United States Patent Application Publication US 2015/0052636 A1 - sequence listing, part 21

SEQ ID NO: 72768 - DNA, 916 bp, Prunus persica
  Intron number 2 from transcript ppa002704m (locus ppa00270 4m.g) derived from phytozome v7.0 (chr-ID scaffold_8; pos 11588002 to 11588917)
ctctcgctctctctggcttccaagacattcatattgtgagctctctccctgaattttttttcttgttagctttaattgatgggtttttgctagtttcttatttttgtaggtggtttacgaaggttttatttctagggttttcattttgtgttccccatctcatatgtttgttgattgaaatttatgtgtttgttttggagagggttttacttattttaggaaaatatttcttttggtaccaaaatatagttcaattttctgcagatgtatttttttaaaaacaaaatttacttatctatacatgatggtcatgtacaatttagagtgaaatagtgatcaaatgatggcttactattgttttattcattcatttatatcatgaccataatactaatcatcatcaccatcataaccatagtaaacaagtacaagtgaattaagatattattggaggaatctaggttctggccaataagaaataattggattaaattattgcaattttttgcatttctactttcatcgctgtccattttttatggcttcttatgttctgtggtggggatcctaccatattttctaaacgttaaaagtagaagagaactatatattttaacactactgattaggtatgtccaatttagaaaagcatgaaccagccaaaaatttccaatttagaaaagcatgaactacaagtcaaaattttatgagatagtgggtttggatttggaagtacagtctatatttttaactactttgaatagatccctgtattattaagtcgacaagttatagcctgcaaattgtaatagtccaaattatttttcttgattttgtgtttagggaagtatgagctggtttattttgttgttcttggtaattattcattagtgataatgttaaattgcagattgac

SEQ ID NO: 72769 - DNA, 930 bp, Prunus persica
  Intron number 2 from transcript ppb024395m (locus ppb02439 5m.g) derived from phytozome v7.0 (chr-ID scaffold_13; pos 376958 to 377887 reverse strand)
cgagtaagctcaatttctctttgagaaagacatccaaattattgtctttgagacatgagagactgagagaggaagaacttggaaccttaaatgtaaaccgaaaatgcatgaaagcgacaaatttatagaataaatttttaaaaccaacggcggtccttacaaaaaaaccgccgtttaaattgtgaaatcaacgtcggtattatcgacgtatattacagaaatccacgtcggtaaattaataaaaacgacgttttaaataatctaccatgacacgagttattacttatgtactttaatttttgagtttactacgacggtacctacaaactactgtcgtatttatttaccacgtccgaagttaaatgtaccgtcgtattttgtaatttatacttcgtagttatatgtaaccgccgtattatttttttgaaatggttttatatgtaagcaacttttcgtctacttgacttacacattcgttgtttttatattcttattttatttaaatctgtcatccaaaaaagaaactttacatattgcagaatattaatttccttcgttttaaatttcctccggaaaaaaaactctatttataacgcactgtaattgaaaaataaactgaaaggtcacgggaaaaaaaattctattcataatttaaaaattaaaatccacgtcggttatattaaacctaacgacgttaaattaaatgattccacgtcgaacggaaaatattgcgtcgtgttagttaaaaacgacgtagttaaatgtaaccgccgtattatttttttgaaatggttttatatgtaagcaacttttcgacttacacatgcactgtttccaaacccgattaaaaatttcaatctcccagagaaaccttttcgtcttttttccttgtcagagcattgtcagagtttctcatcgtcttcctctcgt

SEQ ID NO: 72770 - DNA, 582 bp, Prunus persica
  Intron number 1 from transcript ppa002232m (locus ppa00223 2m.g) derived from phytozome v7.0 (chr-ID scaffold_3; pos 2588645 to 2589226)
accatcaacagcagctccttcctgccaccaaaaaagtaagtctttctctttctggtattttcatggaaaatggaaattgagtcgaattaaattctgggtcagtttgatttgtttcaaataatttgtctgagctaagaattgaacgaactgtatagaacagcattgttgtgctttggtcgttatctgtttccgtcaagtgtttgatttttgggtcatgtgatctcagccctatatgtagcagatgacattctacttggttaatagcacgtttaagaaaaaaaaaaaaaattttaaaaaaaacaagcttttggttattatatccatgggtcaagaaacggaagtgcatttgaaccaacttacactgcaagcaaatgtttgcctgatttgagtttaaggtttcactttctgacttatgtttcagctatgtgttttgcaaattgattatcaagttggagccaaatttaaactatactcatttgtagtgagttgtgactcgtgacccttattttccaaaaagaattctgtgatatgttcatctagtggaataagagttttgtttggtcgtttttcagaatcacggtt

SEQ ID NO: 72771 - DNA, 828 bp, Prunus persica
  Intron number 4 from transcript ppa011520m (locus ppa01152 0m.g) derived from phytozome v7.0 (chr-ID scaffold_4; pos 1240104 to 1240931 reverse strand)
ttttggctgggggagcatcttcaccgttaggtaataatagtttaattcccttcacctataaccatgaattgtttatttttttttaataggtaataaactatcacaagcttggtaaaagattgataatttttgtgtgtgagagtgattgctcaattgcccttctgggcttgatggtcctgcaatctacgagactctggaaacaaaatgcgagacacttgtaaaaccaataagaacaaaatggaaattttgaccatacctaagtgtgtgccacatttgttgtgatatataattgttatcaccaacctgtaccagcctcacattgaggtgggtgactcccatacacttggcctgccttacattcaaatattcttatttatttatattaataatatttttactgtatctgatgtgctgatgtatgtgagtgcccttgagcatcttcttaaagggtggttaagttttctgactgatttgcttaaaaaaattcaaacttgttagttggaaattagttgggataaacatgaacccacagccataattcaaagtagaacccactcttatcacaaattgcagttatgacagtgaatacaaccagtgctgggtcaactagatgatgcagtttgatgttttgtaaaagtacagattactgtatatcttttcccttttgttttaattccttgtttagggccccttaggcagttatgaaccagcattatgggaaatttggtggtgaaagtctagttagctaacatattatgtgtgcacaatttggcatggaattattgagttgcagctgctcttgtaggatctagcacgcctaagtcccca

SEQ ID NO: 72772 - DNA, 457 bp, Prunus persica
  Intron number 1 from transcript ppa015562m (locus ppa01556 2m.g) derived from phytozome v7.0 (chr-ID scaffold_1; pos 31491889 to 31492345)
cgcttgctggtgtcgccatcaaatacggcgttgaggtacgtactttcattcctattttcatttcttcatctccgtgttttcttttcttttttcctgtcaattggacttcttctgcttgaattaccatttagaattgctaggttttctttttcttttgttgtggttggttaattgaatttgaatatttgctggatgctgagaaatatataaggctgatacctaaggcagtcaattacaatatacgtatgattctttgagttctattgtgctttttactccaaggggtgtgattgttttgtcttgatactaatgtgtgtgttcctttccccccgtctaatatcaggttggtttttgtttgctggttttttcgattattgagcttcttctttttttttccaaaataaaataaaataatttagtattttttatgatattgtaggtggccgacatcaaaaag

SEQ ID NO: 72773 - DNA, 488 bp, Prunus persica
  Intron number 2 from transcript ppa026707m (locus ppa02670 7m.g) derived from phytozome v7.0 (chr-ID scaffold_6; pos 2352508 to 2352995)
aaacaggtatagatttgtacaccattgaagaatttaagatataggtttgaagagttactaattgctgactatctattgtccatattattgtgaattgactctccatttggggtcgggatcaagcttggggatgaaaataagaagaaaaatgagaagggtgtcaaaatactgcatctcgttttcccttcttgttttcgctcgcgaacttcatccctacaccccatgactagccaattcacaacaaatatgtggaagattacgtgatttatattataaattgtgaatcaaatgccataaactcaggcgagtaatgttcttttgtcatacatatgtgtatattgtcatctattcaactattatatttaggtagtcaaacaatctgacaagagaatattttccatatttagatgtacttttatatgtagcaagtaatatcagttatcaattaccataaaaacttgattattgttgaatgtgtgcagctaaca

SEQ ID NO: 72774 - DNA, 357 bp, Prunus persica
  Intron number 2 from transcript ppa004096m (locus ppa00409 6m.g) derived from phytozome v7.0 (chr-ID scaffold_7; pos 17808196 to 17808552 reverse strand)
ctcctgtaagtattgcactcattttcatttcctattcctatcagtttttgggccttttcttttctttctttaattatgttaacaaaagataagttctttctattccaatccatgtgcacgttccaattagatggtggaactgttgatgagagtgtcatttgaatttggtgtctgtttgatttgcttttaatatgccgacttgtttcagttttatcaagaaaatgtaacttgtatttgggttggtcacacaccggcatctgatttcaagactaatcaaataattagcaaatgaaaactttgtattcctttgtttatctatctttatagagttggcagagagaaatcaaattctaagtt

SEQ ID NO: 72775 - DNA, 405 bp, Prunus persica
  Intron number 1 from transcript ppa010435m (locus ppa01043 5m.g) derived from phytozome v7.0 (chr-ID scaffold_1; pos 21762515 to 21762919)
cagagctttggctcattgatttgcctaaagatcaagtatgtttctttttgggtggggggctcttttctaatactttgtatcaatgccagtttataagttttcagtataaagagaaagacgaaaaatatgcaagctttaataatctgtccaagtcattacagtgttgtgcttttctcgcttgagaggggagtgattatggaaagtgctttttttaatctgggaagaagttttacactgaaactagctgtccggaactgacttccatggcctcaggtcgttatggtgaaaaaatagtgatcatgtcattagaatttggcagtagtgctatttttgtttcttattttgatctttgccggtcattgaattttgatgatgatttttgggtattgcagaatcctgatttta

SEQ ID NO: 72776 - DNA, 589 bp, Prunus persica
  Intron number 2 from transcript ppa000341m (locus ppa00034 1m.g) derived from phytozome v7.0 (chr-ID scaffold_7; pos 18545993 to 18546581 reverse strand)
ttgcaggtgccatacccttgattgatagatttcaggtacgagcatatattgtctgatattcaatgtgatatgccaacacgcacacacccaaacatacacgggtgtgcacacacttccaagttcattgtccttggttttttttgttccagaaatcaaataacttgaatgtataaaatactgattattcattttttaggtcaataaactgatgtagtacagccctgggtattagtttaaacactcgaaccaatagaacagaaaagaatataagaggtcgaagagaagaaaagatagaaggaaggcagaaatcagagagtttaagagaaggtataattcaatattcaaatctgaatttaaaaaactacatgggggtatttatagcaaactaaaacctattccccaaaagaaatgctaacccaaataaaatagaaacttaaaactagaaatctggaaaagtagaaatcctactagaatttggaaaactagagaatctaggaaactaataaatttaggtcctacgcgtcctgcatcataaacattaatatggtttattttcttttgaaaataggtagaaggatttttgaggtta

SEQ ID NO: 72777 - DNA, 766 bp, Prunus persica
  Intron number 1 from transcript ppa004180m (locus ppa00418 0m.g) derived from phytozome v7.0 (chr-ID scaffold_6; pos 8453553 to 8454318)
aggtagccatcaacggctctcgtttcaatttaatttttttcttttatctcaattcaattattccgttcagcttccactaaacccttattagttttggagcatttggggttctgggatttgattattcttcttgaaatttacgagaaagcttagaattttaattcttcttcaacttgggtttctttgactaaaaacatcgactaggaggacacctatgatgtgggtattatatgtttttccaatttattcacttttaaaatgtccatgcaacttaattatatattggttaggatatgaaaaatgattaactcaactgaatactactaacccattacatttcaaatgccttttgatattaaaaaaattgtgcttacacatcctggtccttgagcatttaattgttctagtcctattattattattatttatgtaatactcaatgacgccgtttgtcattctatccataaatccttctttcagtaaggtaaagtgggtttttgtctttggccatggcacaaagttacattttcagttagcctagtatatttcatcatattttgactaagcacgcaaatttgtgttgatgacaagcacatgctgcacacacacaaatacatgtatatatgcgtgcatacatagacataagttatggaaacttgtataagagcaagatttcatgcatactgacataattctaatgtttgaaatgtgtttctgtgcatacattccagttctttgacatctcaacaacagtagatcctagtta

SEQ ID NO: 72778 - DNA, 688 bp, Prunus persica
  Intron number 3 from transcript ppa010142m (locus ppa01014 2m.g) derived from phytozome v7.0 (chr-ID scaffold_3; pos 1790189 to 1790876)
ttttccagtatccttctgacttatctcccctaacatgcgtccatattgtcatcttttatttcttcttcatgatatactgagtttttacaattacttttgtttttttaataggagttgatacaatttactagtacaggatttaggtgcaatatgaagaaatgatagtttacggaactttgttgataaatacgtctgtgtgattttgtgcgtgtcttttgacttaatctaatagtagcagatactatgttagtaccatgtagctgctgctgttataaaaatttaagttgatcatctttagtgtgcacgagatatgagaggcactgtaactttcagttttcttaacttagaggatatgtcatcgcatgcatcattccactggcaaagtttggtttggggtttgtgattttttagtatatcaattagacatatggtcttctagcatacttgcataatattataataatcttttagtatatcaattagacatgtgtgtctttgtgcacgcagtttgtttgtttgtttgtttttcctttcacttatgtttagtcatttagtaatttgttttatcgatgttgtgtcttagtgttgtattattgattcttctcattagaggaagagcatacaaatgttattgccttgacctttgttcttagctatatcatagaaggacgtgtctgttacttgacaa

SEQ ID NO: 72779 - DNA, 757 bp, Prunus persica
  Intron number 1 from transcript ppa008127m (locus ppa00812 7m.g) derived from phytozome v7.0 (chr-ID scaffold_3; pos 2712703 to 2713459 reverse strand)
ctccgtttttgaccttctcaaacgcccagctcaaggtattccattcaccaattctttctgcgtgctcgttctcttctgggtttgtttgactatgccaatttttgggttttgtgcttctgggttgctgagaaagttgaggataatatgataaaacgttagagtactagaattgttgtgggttttgttgtttatgattatgggaaatgaaaacatttctcagttaagatttttctgtttctgctgggtccttaaatgtttagtttgagctgctcatttcaatactgataaaattgaaaaggaaatgagaaaatttgagagagtgcttgaattctgttggtttgattaatgaaaaagtgagttttgcttacctaaatgattgctcggttgttgggaaaactgcggaaagttaataaaaattgggttctcagttttctgtgttatgctgtcttcgtttctcaaaagaattaaagtcagcttggataagaaaaatagctgagtaagcacaatttcatgggcttttaccaagaattgcaggtttttgtaagtcccgtgtatatatagttttcgtgaatttaggtgataagcttgacaaatataagattgaaaccttcattttgtgagataaccgcctaattttttttaattagttatttttcacgatgttttctcttattcctttaataccgatgttcatgtatgaagcattgtggtaatggtctttagcaatattattttgcaggggaaacagtacgaaccg

SEQ ID NO: 72780 - DNA, 1030 bp, Prunus persica
  Intron number 1 from transcript ppa018311m (locus ppa01831 1m.g) derived from phytozome v7.0 (chr-ID scaffold_1; pos 8717241 to 8718270 reverse strand)
ggagaacagttgttgacattattcgtacgtaacgtttcgatggattttcaatcattcatactacatatatatatatatatataactgcctctttctctttgggaattcaattctgccaacttataatatatctctactcattgcagaaacgtattaatctgagtatggaagcacagttttacaattttcttattttctgtcgacagagtacagaccaccattgcctctcgttggggtgtaaacttctgatggtttgccttgtccacctcatgttgcatctgctgtttagttttaattcctattagtagctagtttgctgggtagggactgttgttctaggctccgttggaatctagctatgtctgaccctgcttttgttatttgttcttgtgttctgttggctcctcgtggctttagccttctgtttgtatctgttagaattgaaggggaaacaaagtgattttattagattggaggagaatattacattacttggtgtaggctaattgatattctacacttagcatattggcttattggccaccacacttagtttagaatagtttgggctatttggcccttacactttgattggtgagcttattggctctcaacatagtttgatttgggtaactctgggctccctaatagtttgggagttgattggttctactcccacatagattgggagttctattagttgactccacatttcattgtggttgcatgcctatttataggcccctttgccgatatgcacagccaccaacttgggcttcttcatttcttagccatacatgtgtcttgtactagaatgttattcaaacttcaattgctttgttccaccaccttgagcatttagcttgttctagaatattcttgtattgccacctctatcttttgaagtcttgacttttctagaattgtatagaacacaaatgagcattatttttttcaacagtatctctattccttgttttggggttttttgaatacaacatgaatttcaaaccaaaaaaaagaacaggaa

SEQ ID NO: 72781 - DNA, 825 bp, Prunus persica
  Intron number 1 from transcript ppa002807m (locus ppa00280 7m.g) derived from phytozome v7.0 (chr-ID scaffold_1; pos 39252915 to 39253739)
tctcaaactcatcagaattcaacaacatagtctcagtttcagtgagtatattgtttatctctaaaaatgcttctgacccttttgtgtatttatttaaatttgtaatttttctttttagtctctgttccgttgaaacatttcaggtgaaaagttgagaaatttttcatgtggatgctatgctgtctgatgattatcatagaatgatcaaattgggtagaacccatacagcttttttgttattgggtttaacagaaaattatgaaatagttgaattactaggggtaaatttatctgtgcttctccgatttctcagcaaccaaagggagtttggatacttttatttatgttccatttggtttctgggaaaattgaagaatctgaaagaaaatgaagtgttggtgcctttaaaccgcacgtaagggtagacaacttttgatgcttagttatgaagtgtgagaattgtagtaagagtagtgctaccttgtgttcctgtaaaaacgtttcagtcacgcttcgtaatgtcatatgagattttgagctaaatgaacagggaggggagaggatctgggggctcaaaataattttattaacatatgcttttagattattgtttgacactttttcagatgaaagggcatgcatatctgattcagagtgtgccagttcgccctttgttcagtggcataactctgttgacaaatactcccttgcaattagaagatcataggattcttgttcatttgtatgattttgtttaaattttttttttaatggtgacctcaattagaaattttgcaatgatcaaaaatcacttcagatcgagga

SEQ ID NO: 72782 - DNA, 394 bp, Prunus persica
  Intron number 2 from transcript ppa002856m (locus ppa00285 6m.g) derived from phytozome v7.0 (chr-ID scaffold_1; pos 11681211 to 11681604)
ttgcggcaaatagtgcttcaaaggagaagacacaggcatgattctgattttgcataaatttcatttctttttgtagaagttttaattttggattatagtatttgttattcttgttggatattgcatagtatgcatttggaatcacaaaaatttgataattcattgaatgaaataggcattttgatgatagagcttgtattcttcttggtgtacctgcaattaatatatgccctcatttgtggatactatgaaaatgttagtaaaatgaaggatgtaagtttagttgtgaaataatgttacaaattttcagtttgaaactaagtgattgcagttttgtttttctaatgtgatgaaatcaggctcatattcgagagttggaggaggaagtgaagct

SEQ ID NO: 72783 - DNA, 645 bp, Prunus persica
  Intron number 1 from transcript ppa013940m (locus ppa01394 0m.g) derived from phytozome v7.0 (chr-ID scaffold_2; pos 1435179 to 1435823 reverse strand)
gtctatttgtcaagactccctcagtaggtattatcttaattttgagaatttatttgcaccgtctaatcatctcatgagacttttttacttacatttcacatggaatttgaaataagccggttgcctttcatgtgatgataaatacatcaatccaagcaaaactctagttttgttttgaagttcggcaacatcccatttcaacatgacggcatgactgtgcacatttacctgccaaaatttcatgtgaattgaaaaaaaagaataacaatttttgtcatcccatataaagttttaaggcatttgtggatcaaaatgattagcctgcatcttaagccatgttaaggaaagaagaaaaggtatattttttgtcatcccatataaaagatgcagctatttcgggtgggcacatgacttcttctctatcattctatctgaagccatgttctctgtcatattattgataaacaagtccttcccacataacggagaccatgttttgtgttgtgattgtatgtttttgggtttgaatgtggcacatcctcaatagagatgggctgtttctgactattgttatcttttctggtctacaataccttcagattttaaatattagtgattgttgataggtcgcaggaagctcaagtc

SEQ ID NO: 72784 - DNA, 416 bp, Prunus persica
  Intron number 1 from transcript ppa005099m (locus ppa00509 9m.g) derived from phytozome v7.0 (chr-ID scaffold_6; pos 25975689 to 25976104 reverse strand)
taggaagacttctgcagagagcgtcactcagacaggtaccttacctcccactttcgacatgcgtctcaaatagttgtgttttatttttaatttgttttcttatttgagcacgtttgcttgatgcttaatctgtttctttgatttttcaagctgaattatcaagtgggtagttctcaaatggtccataggagtccaaattatgaaaatgatgacaatgaagtccaaattgttgttggattttgatgataaaatggtgtctttcaaattacctatatggttctgttttcaatttcggcttttgtattttttttcttcttgagatttctgtgttgttgttgcttaaacgctctaaatttggtattttatgaattggatttacaggcaattggacgccgtgcatattctatcaagaaaag

SEQ ID NO: 72785 - DNA, 508 bp, Prunus persica
  Intron number 1 from transcript ppa005832m (locus ppa00583 2m.g) derived from phytozome v7.0 (chr-ID scaffold_1; pos 43221746 to 43222253)
cgctgctattgggagctctccaaagctcgcctcaggtacacatttacacgaaattctcattcttttcatttctattaatttgaaaatggcatttctgggtttttatttataattttttaaaactgattgtgaagttgggttgtgtttgttctgattcagattgcgtaattgtattctataaaacgtgattctttgatcgctgttacagaattttttattgatgttttcttacttcttttatatggtaaaaatggtatcattttggaagaagagaattataatagtggggggtgattctttaatatgtgtaattttttattagaaacaaaattttatttcaattacacaacattacaattttggtggacaagttgtccaccttaaacagtaaaacaatgaaaactagactacaaaaacaactcattttcttccacaactaacatactggtgcttgtgaagtttttgtcatttggattttgtcttacaattttttcacttttaatccagc

SEQ ID NO: 72786 - DNA, 409 bp, Prunus persica
  Intron number 1 from transcript ppa012860m (locus ppa01286 0m.g) derived from phytozome v7.0 (chr-ID scaffold_3; pos 6828791 to 6829199 reverse strand)
aggtcaggaaggcattcagacaacttgccttgaaggtttgtttacatctgatttaatctccgttttgatttattttattctggatttatttttttctttttcaaattttcaaaattttcccttagtatttggttttgaataatgtatgttaccaagtagaaaagtaggcacttttgttacctttttcctgttggtatccttttcttctgttactgtttttttttcttgatgggtttttttatttattagctattttctacgagtcatgtgttttgggtatttattagggattttatttaataggcactatgtttgattaaatttataatcaaattttgtgagtttgaatgattgttgtggcgctttgttgactgattggactttgtcaattgcagtatcatccagacgt

SEQ ID NO: 72787 - DNA, 596 bp, Prunus persica
  Intron number 1 from transcript ppa004914m (locus ppa00491 4m.g) derived from phytozome v7.0 (chr-ID scaffold_8; pos 5525637 to 5526232 reverse strand)
tgtttgtgctcactggtatgttggtgtttaaaaattattttggtttttggttgggatttgatataggattgtgttaatgggtattgagtaatttctgggattgtttgttggatttaatgatcaggtattggttttgatgtgattgttaatgtgggatgcatgtttcttttttttaaatgtaaatcattttgcagtaactttgttctagtatttgcaatgaatatatctgcatgatccattccacccttggaatttcgaaagtttgattcttttaagttgtagggatgggcttaatttttttcaaaacttatcttcttggctgtcatttgatcagttttaggtaattcggagtaagactaaaatgctaatgtaaatggtaaatgactggttatgacatgttataccatatgatgtattgtgttcatatatttgttgctatcatgttacagagatatttcgctttccctattcccagaggagaagatggagcaattaaatgttaaaaagaagtatagtatatgctatagcagcttatgatttagtctctgggttgccaggttgtgtaacttgaagcatttttggcagacccagtggca

SEQ ID NO: 72788 - DNA, 392 bp, Prunus persica
  Intron number 1 from transcript ppa025162m (locus ppa02516 2m.g) derived from phytozome v7.0 (chr-ID scaffold_4; pos 12492131 to 12492522)
tactaaaagcagatctaccaggtaagatttccaaatacttctaatatatatcttagtgattcaaatcatcatgaaccaaggagactgcatggttgaattgtgtatattattttggcaggctgcaatatagaaacctaagaaatataggtggtattattccttaattcacaagtaaaccttttgagttttcagagacaaggaaaggggacctttttatcaaacatatatgttaggttttgtggcttttggtaattgaacatttaatgttgggctccaaatggtttatatatatatatatatatatatatatatatgaagatttttgaactataaactaaaaattcaagagtgcaatgaaacagaacagtatttttgatttggtgaaacaggag

SEQ ID NO: 72789 - DNA, 899 bp, Prunus persica
  Intron number 1 from transcript ppa008423m (locus ppa00842 3m.g) derived from phytozome v7.0 (chr-ID scaffold_4; pos 7009639 to 7010537 reverse strand)
agacccagttcgagttcttgtcactggtgctgctggtatgagatcactaaaattcttcaacaagcatggatttgagattgttatttttattaattttttgtattccttggtttaggaggagaccaaacagagggtttggttctgttctttggaataatttgatatgttctgtatttctaagtatcttgtggactttgttttggcatctgattgccttgttctggaggttccctgtagattctttgtttcaatcatggtactctttcacctatataaaaacataggattggattgtcttgattttaacaggttgcatctgtctgtttttgagaaaatggagaatattgttctttttcagaaaatcctggttgttctgttcactattgccttcttttggaagcttgtaaaatacatgtggagtttcttgagcatggagaaggagcctgtgactgtattggttactggtgctgcaggcatgctcaaatcaatccttttatttcttccccatcccccccctgttttaaaaaatttataaaaaaaaattacaagttcattttcttataacagttccgatgcaaaattcagatgccatgtatttctcattgccgcaaaaccatcttggaatatttcctgaatttataagctcatgatatccagtcttatgatgtgaaaatattgggctaagtatccaagtatttgtatgtcaagttaacaaaataatggaaagggacaagcttttatgttgagtgtcccagaattattaggactcatttttcgcatttgaattacatcttgctgtaattctgtggtgaacttagattctttgatatgcctttttaattaatgtgtaatataatataatattggattttgattatattcaacagggcaaataggct

SEQ ID NO: 72790 - DNA, 969 bp, Prunus persica
  Intron number 1 from transcript ppa001516m (locus ppa00151 6m.g) derived from phytozome v7.0 (chr-ID scaffold_3; pos 2658538 to 2659506 reverse strand)
ggtaccttctcattcctctgatcaatctgatttatataaccctaatgataaatataacgagacgtttatttattaatttttggaattttccgttaacattaatttgttgcgttacgctcctgatcgccatgaatttcaggcctttattaattgcgatgccgagagtggtaatgggtttttagcattatctgcatgggtttcgtttatttttatttttgggtaactgtttatgtaatttgattttgattgactctgatgtgattgatttgccccagtttgatgtaaattttggggcttcgaactgtttgattaagctcctcgctttcaattcggagtctggtgatttgtaggaggaaacaatagattgtaacaacctttcttgcatttgtttggttagtgagtaagtataagaaaagaaaacaaatgttatctttattgttccttgagtcttagcttgagacgccggaaatgtaaatcggttgtctcctgggggtaatgggatttttttgtcttggttgaggtgagatatgaaaacccgaaacacaaatttaatttgtttagcctttccttctgcattttcataacgagttaagattaatttgcttgacacttgtagatcagtctcaaaattttacctttctgaatttaagaactgaaaaagattatgttgttgttgtgatacatacaaaaagcatgcagatacttatatgatcggttgctttttttagttaatgaggaaatgttagttattttttatatattgtataatcttagtctttatggattttggctttgtaccaatgctttgtatgataacaaacacagtgtgttaatcactagatgaattttttgatcagtatctctagaacattttgtatctttggaatccaaggcttttgtttcctatctaacgcatgagcatattctcatccagcgaacagtgaggagggctgctctactcagcttatt

SEQ ID NO: 72791 - DNA, 763 bp, Prunus persica
  Intron number 2 from transcript ppa007447m (locus ppa00744 7m.g) derived from phytozome v7.0 (chr-ID scaffold_6; pos 25434221 to 25434983 reverse strand)
ttcacggtattctcgtccaacttcctctaccacaagtaatttcttaatctgtgccaatacttttttttttttttttacctttaattgtatgcatatgctgttctgaaagtgcaggatgcaaatagaactagattagaattgaagttatacaattgtattttcaaaatgctttgatccttaaagacagttgatcaactacagatatcatttagttaagaatgatgaaacaaatttatatacttggtagtactcactttaactgaatcaacctcactcaagggaatgcccctattttaaaaatcttccttaacttgaatttctcccataagcacccacaaactggaagcttcctgaacttttttgtctaaagatccatgtgattagggttttaaattggaattttcctgctgcacatttcgatttggaattgtttccttaaaaatctctgcccattttgggcaaaacggtatctggattgtgttagtccaacaatctcatagttcgggtgactttaggtttgctggcccatagttttgttttcaggcttgtgagattgcaaaccgacacagttgaattggtaagaacacccccaccacaaacccaagacctgagagacctaagccatgaaacactctagtggatagaaatttctcttagatcacctgtgtggcaactaaatagctgaggttttgattcattacatgtcagaacttgctgctgttgtatggatgacttacaacaaactgtctgggacagcatttgg

SEQ ID NO: 72792 - DNA, 694 bp, Prunus persica
  Intron number 1 from transcript ppa002794m (locus ppa00279 4m.g) derived from phytozome v7.0 (chr-ID scaffold_6; pos 5893910 to 5894603 reverse strand)
tcggggttacttaatgtattgtcttttgtccacataactactttgaagtagcaaatttttaataacatatcaagagtgtcttcttaactcagaatgcctttttttaataaaaacaaatcggtctatttgcataatgttttggattggttagggattaaactctggtttttttaaatttttaatataaagaaatgtttgatttatgtttgttcatgtagattttcaagcacttttctgtgtgttttctctctctaaattttaacatttctctgagatgctcttttggatttgtgctttcttcgcatgtagtttaggggcagacgatgattgtgaatgtttttgtttctaaatctgcagccttttcatgaatgtttctttctttagcgttggtatgttttgcatgatggagtatattcttttgggcattatgtgagaaatttttactttcaaactatttactgtcaggaacaatcttgatttagttttggtgattgcaattgttttgagagattgtgtcaaatgttgtattctgtatgggtattgttgcagttgtggggtttaagaattaagatgaatataagagtctctagtggtcttatgtatttgatgttttgtatttgatgaataatttgttcacgtattatgtgaattttgcacagtcttctctaaacggatcaggctcaaatcttccaga

SEQ ID NO: 72793 - DNA, 1039 bp, Prunus persica
  Intron number 1 from transcript ppa007693m (locus ppa00769 3m.g) derived from phytozome v7.0 (chr-ID scaffold_2; pos 18126701 to 18127739 reverse strand)
ccaatcaatcaaaaccccatttctgagactcacaggtcagtttccgccagatcgtttctttttttgtcttcttatcaaatatgttttctttctcttgcgaacggtgatttatcgattcggtcaaattagggtttcaattcaactcgttaggtttggtatttgatccacttggttgctgtgaaaaaaaaaaagtttctaaaaataaaatcgaattgaaattgtttcctgacaattggtatgaatttgcttttgaattttattgggtttgaagaaacttctgggttctatatatttccggggatcgaagacatagcttcggtgacaaatggccattctgtgaataacttaaatgggaaactggtatgaagaacaagagaaatgaaagagagaatgtttcccgaactgtgtgacttggaattggatttttggtcttgttgctattgcctattttttcgaattgtggctttttagtagtgtactgagtgtttaagttaatgtggatttgaagagttctgctgctactagtgaggaaaagagaaacttgaacttcaatttcaatttctttaagggctttatttattcagaacttacattgaggtgaaaatatggtaattacatgcaatgctatatgctaagctactagattggcgaaacatataagttcttccattccataaaattataaaagaataaatgcaaggttagagaaagaatgcctcatccagagggggaggggggaggaaatgttttggcggtgtttgatttgcagatggtaagggtaaatttcaaatagattctccaaaattaatcagctgtagaaaaacctattgaaattgcaagctttattggtggaaagggaaagtttggtgtccccagctctagtcttggcgtcatagctgaaggtgtaagctggcttgcatattactaagattgagaaagtgaatccattgttcaacatacaagctgcttgttggcttatatcagtcttacttatctaaaatccttatggttccattttaatttttcaggcgacattaga

SEQ ID NO: 72794 - DNA, 376 bp, Prunus persica
  Intron number 1 from transcript ppa026887m (locus ppa02688 7m.g) derived from phytozome v7.0 (chr-ID scaffold_6; pos 1634827 to 1635202 reverse strand)
agcagataaagtaagtttctcaatctcccatgtccacatttttataattaaccccaaagtcttcaactttatggtctttttccgttcttcatgttcactagaattgttcttttcctaaaagattgatgctttcttgtatgccaatcaatataaagttttgatcttttcttggttctgggttttatttatgtagagtttatgtcaattctggctttgtttggttttggttatttgacagattaatgcaaagaaaacaagaaatacccaaatatgatttcatttttttcttccttaaacttctacttgcttgcttctgttataaggttctgaccaatttgataccgaacttttattttctgaattagtgtggaataca

SEQ ID NO: 72795 - DNA, 964 bp, Prunus persica
  Intron number 1 from transcript ppa013381m (locus ppa01338 1m.g) derived from phytozome v7.0 (chr-ID scaffold_5; pos 18213326 to 18214289)
gtgtcaagaagaaagccgaccgctactgtaaatagatatcaatttcacacatatcggtttcctgttcttcttctgcttccccaattcccaggtccgcccccttcttcttctttttctcgttcaatagtatttcctctttatatttataattatttattattagggtagggatgtgctttcagtatttcttaatgttttattgaaattatgattcattgtgtgttatacttgtttgaaatttgtttctttttgttgtcatttattctaagctgctactggtttctttgaatttgaattgaatgatcaatgcttcttttgtttggaactctgtcccctttgtatactaccgctttttgtttattaccataacaaatgatccatatttccttatgaagattctatagccctccttctcacctatgtaagttggtcacttcttcaaataaccatttttctctttaatgttcctgaattgttacatgtttcttatcttttttgtaccgatagaataatcatgatatgcatagcttatgatatttgctcatgtgctctgccgcctatcttcagcttagaggtctcaacaactgacccttaatttcttatgagggctattatcactatcaatcatgcacctcatcctgctttacacccattcccaccacaacttttttctaatttgtacaagttcgtagaaattagcagcatctagttagtatcagctgaacctagttaaaagttaaaacttgttttggtagggttgttgaaaagatcttaatgttacctgacatgttcctacatcaatatcatgttgcctcttgttccttattgtttttgttgcaagttactaaattgtctcataccctcctctttgttgccttcaacaagtatgtgctcatgcatgagtacagtaagctgctcatttgtctcctaacatggttttgatttaattgatggcaggaacggc

SEQ ID NO: 72796 - DNA, 456 bp, Prunus persica
  Intron number 2 from transcript ppa018570m (locus ppa01857 0m.g) derived from phytozome v7.0 (chr-ID scaffold_3; pos 20649556 to 20650011 reverse strand)
gtaggctcgttcatacaaatggaactctcaaaacagtaagttttgtatgtcttcaaccaaaagggtagtaagcatttaggcagtgctacaatatatgcgtgggagccttaatttctagatttgtgcttttaaaagaaccacaaatgctttcaaagatcttcttttatatttgctttgatgattaatttcgtcttctcagtttttctccatatgatgtattctcattctgatttaggctctggttacagctcagttttcttttttccttttttgttataggaaattccacgcacttgcattgttgcacatggtgcactattctaggctagaagttggtgtagtctttttttttttgttggattaaagtttgtgtcttgcctcactatcccgcaattaattatttgttctgtgtggaatgaagatctatatagccccatcaaaggctttagtccagga

SEQ ID NO: 72797 - DNA, 677 bp, Prunus persica
  Intron number 1 from transcript ppa021579m (locus ppa02157 9m.g) derived from phytozome v7.0 (chr-ID scaffold_4; pos 27640479 to 27641155)
tcaaaggcacgtacttactttttcatatcaattcaaagtcctgtctttctgagattgttgattagtaatcagtttttgctttttggtaaacactagcttaatcagtaacttttctgctgaatgaattgctaattacagatactataataagcaatgaaattataaaagctaatcagtaactcttagatcaatattgtttttgcttttcttttcttttctgctgtctttcacctatacggatcacaggtcttgcccaaccaatcacggttgttagatacatgaagtaagaagtccataggaatttttaagcttgtattgtcaggttgagtttccccttttatccatttttctttttatcactcgaattttattataaaatatcaacacattcgctgagtatggaactgatcattgacatacattattttaattgatcatgtttagacaggtcttcaccagttgttcagaaagactagtacatggaataactcacaatttgattttggttttttttttaaaaataaaataaagaaaagctggatttgcttgttccatgtgtgttttctgtggctgattttcttcaatctgttgtattgaagcatgtactttaatcaaatttataactgtttgatttcttcaaattataactaaatgtcatttgttctgcagctcctcgt

SEQ ID NO: 72798 - DNA, 941 bp, Prunus persica
  Intron number 3 from transcript ppa011791m (locus ppa01179 1m.g) derived from phytozome v7.0 (chr-ID scaffold_10; pos 321780 to 322720 reverse strand)
gcgagtttcgcaggtttcttcggtaagaactattgaccactgcttactgcatttttagttcgcattgcttttttcattaggataatgaaatccggaaaaatatgaatttaggtatcaaattttttttgacaagatgatagatagctctgtggcttgcccctgtgtagttatctcaagcacaatacccaccgtatccttcaaggattggctttaatcctttacacaatcaaattgatttccggatgaacgtcttaaaattgaagattattggtaggcagtgttgatgaaattctttttgtgcctgataaagtcttaaatatcgtccccaatatggcaatatcactcattctttaccaggaacttgctgaccaagttttctactcctttctgtatacattaccttgttcatagtcaaggcacaatagcattggtcttctaataaacttatgctattctcagcatttctgtgccgcttcatctttcaatccattacagccatgaggcatccctaggatgctgccatgccagtgggttgtatgtggtgcagtaagtcatgccatttggtgtaccaaaaggaacgtagaagcaagatgatcaagagaaatcgcagaattaagatgtttcctgtggatgatgttttttttttttttttttggggggggggttagaatgtagggctatagtctatagtaggataagaatggtaccctctcgtcttacccatcctttttggacgcatgttctcaattctctactaatgcacagtgatggcgttagaaagtggatgatatatgtgtttctctagttatcaatcttttcatgtgtaatatttttgaagctccttgagaacatagcataagcactaacctttttttttctttgccatctcctcggtgaaaaacaaaggctctgttgaaaattggtattcgtggggttacagt

SEQ ID NO: 72799 - DNA, 981 bp, Prunus persica
  Intron number 1 from transcript ppa024389m (locus ppa02438 9m.g) derived from phytozome v7.0 (chr-ID scaffold_6; pos 7912921 to 7913901 reverse strand)
tcatgttatcatggaaagtctgtagaaacaggaatcaataacctccggcagcggtgccttataaccattagtgaaacaaaaacactagtgatgcatgatttgcttcgagacatgggcatagaaattgtttgtgaagtatcctattatgaccctggaaaacgcagtaggctgtggcatcaatagaagatgtaagagaagtgttgaaaagaaaatctgtaagtatctttccacaaaaatggttgaaagcataatgtaaggcggtttgataaccatttaattttcactttttactgttgagagaaaatcctaaactcattttattttaggggttttgataaccatttaattttcacttaaaaaaaaaaaaagtaaaaacatgttggtaacattttcatttttcattttttgttggtaacatgttagtacatcatgttctggaaaaagaagaagatgaaatttctaagcctaactaatttgttctatctttagttataaattctgagtgactagtaaattggtggagacaattgaacaagagaatacgatttgggtagaaaaaggtggcatctcaattttgagaggagaaatgtttactgcataagcaaataaatttattaggcataggcagggagaaatttaactggcttttaatttaaagggttatttgattctatttaattgaatttttggctatatttgaaagttcttacaaaaacggacatttatgaatttagaggtcaagtttaggctagatatgaataaaactcgtccataaataaatttccgcatgaaaataaaacttctttcttactgagtgccgttaacaggaactgacgaaattcaaggacttgctctaaatttggaaatatctgaaaaggctagtttcagtgcacaagcatttgaaaacataaggcgactgaaattgctccaactcaattacgtagagctcactgacgacggctacaaatatctttccaccaa

SEQ ID NO: 72800 - DNA, 658 bp, Prunus persica
  Intron number 2 from transcript ppa006330m (locus ppa00633 0m.g) derived from phytozome v7.0 (chr-ID scaffold_4; pos 22020186 to 22020843)
aaaaccatcctgataagggcggtgatcctgaaaaggttttgactttgttttagctctgttatgttttggctggttactgatttatcagtttgttggtgtgagtttcttgatggagttgacgggtatttgcttggtcaagctacgccagatctagcatgtttttgagctttgaggttgacaaatttgtagtctaaaaatttgagctttgaatatagttggtggtgaattttgttgtaaatttattgaaaattgctgtgtaataaattgtctgaatactaagaaaaaaaattactgaattgttttaaataattctgactgtgtcactgttgataatttcagtatattgcaaataattctgaggtaacatgaatacctttattttttcatggtgaaacaattgatggattgggttttctgaagttttccttgcgggtgcgtctttagacagttgggcatatgtgcgtctgtaaacagttgtttatgtgggtttctagagacttagggcacctggttgtattccaaagccgaggaggtggctgtgctagtatttaattgtcagaaacatataaatttgatggtaatttcttaatatattgatttctccatttcttttcataatttagtttaaagagttggcccaagcatacgaggttctgag

SEQ ID NO: 72801 - DNA, 944 bp, Prunus persica
  Intron number 1 from transcript ppa012368m (locus ppa01236 8m.g) derived from phytozome v7.0 (chr-ID scaffold_7; pos 22027741 to 22028684 reverse strand)
ccctcctcctttgtcccttctcaagattgctcctggtatcactctccctctcctttctcaatatgggtttcttgtcgctttgatttctgatttcttatgtttcgtttctgggttcttttgaaagtgtgattttttcttgattggaatgaaacttatggttacccatgtcatcaatttggggtttaaatccttcttattgctaatttttgatttggagctgcctatgtgttgggaatatatgtgggcagtggaacccaattcaggtttagatttactttttttttttttttttcttattgtgtctgattttaagctgaatagagtgaaattataatttcccttttgatgggtttgtggcattgatctggtgttattgtttttttcccgagctgttctcttttgttgggtaattcttgtttgattgagttttgagtaaagttgagatcttgccttgttttgtctttacgtgcactgttatactgtgtctttattctgttatcctatggtgcttgaaaggaaatacagcactacctgcatatcatatgtgcactctttaaaattgctatggggtgtatgaagtctttctgatctgagtttatgaatccacaatgtgctcattttgtggcaacataaaccagttctgcactcagacattgttaaccatgtttcggattttactcctgggagctggaaagtctcgtttcaacatataatgattctcaaatatgctagcaatgagtattgatttgtgtatattgaatctgggaaaatctattgctgctgttaaactgcatgcaaaatctgagattttgctatcgatttccctatcttctttcaattattgtaatctgagagttcatttttactcctataataacatatgtcatggtttggtttttgttattcttttgcaggattggccaatctctcagtcacaggttaga

SEQ ID NO: 72802 - DNA, 801 bp, Prunus persica
  Intron number 1 from transcript ppa015624m (locus ppa01562 4m.g) derived from phytozome v7.0 (chr-ID scaffold_4; pos 17959892 to 17960692)
ggtatgtcttcctttgctgggagtaggggtcatcattaggcctacgagcccatgggccgatgagggctccccctgcccatctagaaaaagcccggccggctagttacgggccatgggttagcacaatctgttgttgattgggccgggcttgggcttggatatctaaagcccggcctagcccacagacctggttcatttgagttcaagaaagcacgaccaggccagctaataaaagtccgacccacgggctcacatacatataaataaataaatataaataaaaacccaagttaaatggaagatttagaaaatcattatctattatcattgtaagaactacaaaaaaaaaaaaaaaaaaatttgaagtatgtgataaaatatgattttattaatatggcggttgtataactatatcttcatatttatggatttaaaaaaaacagataattatgaagttatgaataaaaaaaataaaatggagacataaacatatacacaaatgtaaataaagaactatgaaagagagggaaacattaaaacacaccaaaacatagagaaaaaataaaataaagaattgacaaaaaaaatccatataaaaaagacaaaataaagtagaccaatttcaaccccgcctgacccgatgggctttttcaagcccagcccataggccgagcttgggctttgaattttctaaaaaagctcagccaggcccggcccaagtccattaaatttgggtggggctagcctggcctggcccattaacaaggcttagctgggaggtggtcttttccattagataga

SEQ ID NO: 72803 - DNA, 826 bp, Prunus persica
  Intron number 1 from transcript ppa020085m (locus ppa02008 5m.g) derived from phytozome v7.0 (chr-ID scaffold_1; pos 43584584 to 43585409)
ttgctgtatctattttagatagagtgtggttgcaggttttgtgtatcgtttagacatgtaccccttgttctctattcttgtactttgttttaaaataaatgaaagttcttgtttcatataaaaaaataaaaaaataatttaaaaaaagaaagaaaagcccgatgcaagaaactggaattaacaaaccaaagtaaaagaaactaggaaagagaatgaatatcattcggaagcatctatttacttcaaaataaatacaaaatatattgatccaaaaaaaattgggaaaaataaacaagtacaagtggttatgtaggtatctgagggaaactagtttgttatggcataaggtgactagaagtaaaagcacgtaaattgtgatgatgatgaaacaacgaagcagggactaatatacctgaaatccactgagaagagtttccatctgtgacaagatgctgtcacaatcacgaatttgatcatgaagagaaactagattatcactttctttaatataatcctgcagtaatgaagaagcaagatccctaaccatcaaacttatgattcccagaacccttgccattatctatataaaattaatgctggaaacgagaagtaattattaaacaagacgtattgagaaagttatagatccttttttccaatctctatcataaaacaatcagctttacatagaccactacaggtacagcatccaagaaaatattccagcgtagaaaaaatagtaacttcggagactcaaaccagacatagtaattttgttggaaactaaaaaggagactgtggacagacaattggtcgcaggtgtttg

SEQ ID NO: 72804 - DNA, 906 bp, Prunus persica
  Intron number 3 from transcript ppa004605m (locus ppa00460 5m.g) derived from phytozome v7.0 (chr-ID scaffold_2; pos 5952969 to 5953874)
caattgcatcatctggtctaaggagcggtgagctcccctatgtttttgagcttttcattttcttcaacttaagtagaagttgtggttcaaaagcactgagacatgattttctggctttgtcattaaacttctgttgttctgcatgtattgtttttctgttttttcgctttctagcttctgctgcaaggaacattttttggtgcagtagattttttgtcatgtgctttattctttttggcacctggggtctagtgcaacacaagtttaacaagtttaaggatgcttatggttttactaattagaatcttccaataatctattatttttttcaaacttagttcttaggggtagggtttatttaatgcctgacttagcaaggtttttttgggagtagatgagagttccagttcagtaacagaatgtaatcatgttttgcaattttgttattcaaatttccttgatgtctagggtttggttttctttgaaatcagctctggaatgcagactttttttatctgtattctatccataccctggtgttttgatttcctttttcttaaatgtattccttagcgaatcaactgtgttcaaagatctacttcccaagctgaagccatgaaatatgggcctcttatttcccatttattttgggttggttgctctaatttgaaaatttaataattcgtgaagccatatataactctagttgcgagattccccagcttacaccttagccagtttcgtgtctttatacccaatggtgaatattattttcaggttgttttcatattttctacttaattgtggcggctgtttttgagcagtaggcgtggttaaaggtactgatattatctcttattcttttatgcagagttcaatctttctgagaaacaagctgaagcaata

SEQ ID NO: 72805 - DNA, 1039 bp, Prunus persica
  Intron number 1 from transcript ppa010393m (locus ppa01039 3m.g) derived from phytozome v7.0 (chr-ID scaffold_1; pos 594870 to 595908)
aagggttcaacttcaacaggttagtcgtccctctttctttgcttttgatatttgtagtttgattttctttagctgttaactagtaactgttttttggaagaaacccatgaaatgtttcttcaaaaatctgaaattgggcatttccagaaagtttctggcttcaattatgtttcgattgaatttgaatttctgttactgtttggtgtttttcacatagccagcttgttctgtttgtttgtttgcatttaatttttgtattatagtgtgtgattcaatttggtttatattgctttgatgtagttaatttaggcttctattatgccttgcatatgtttgtgtgtttttttttacaagagagtaagatagcagtcctgtaataagataaatggtagtgttatatatgataaattctttgtgaagacgcggtttcgttcttcaccaggtttgatcaaaatgagtaaaggggaacaatggaagttaaacttccttcatttttcttcatcttcttattttattttcgtttttattagagggctggagtttgtgaatttgaggaggtcgtagacaatttttttcccctaagtgagaacgtattggctgtacatgtaagtgagttgaagctttcagttgtaataccaaaagtaatgcagaatttgttaatagcttttctagttagacgtatttggaataggaagttctgcatctgtaactactttggcattgaaaaacttccattaataagaaaatttcgccacatttactctccactatgccatatccatatgcctttaatgaggagatactagctactggaccatcccaaacaaccatttgaccatgttcatcactagtttcacaactataaacagcttatcatcactagcccctctccaccaatatcatcactattattttgatcactaaataagtaaatacagaacaggatatagatttgaactttcttgttgagcttaaattgattcttcctaatgtcttatgtaaaggcacatctcattgcccttatctgaagtcattatca

SEQ ID NO: 72806 - DNA, 687 bp, Prunus persica
  Intron number 2 from transcript ppa021222m (locus ppa02122 2m.g) derived from phytozome v7.0 (chr-ID scaffold_7; pos 12496015 to 12496701 reverse strand)
agtgcgtcaactgtatccaaaaggcccaaacattggtatgtctccgttctagttttaattatttgttttgtcatgtgaaattactgcttttgaaatttaggaattaatgtgaacgttttcttgcttcaagcattgttgcgatcaccatttattgcagtttcttcttagcattggttgaattatcttattattatttatcatttttataaactagttaactataattttctttagaaagttgttagcaaaagagaggttttctttgctaaggtagaacacagttactagactgagaaattttctcttggttacagttatctacacctttcttggttacagttactccacatttctgatagattggcatagttttctaggctatggcatatatccaatccatactagaaaatgttgtcataaatgatagatcagacattacgattaaaatatgatcccttaatgagccttctttagtgcaatacaaatgtcctctctagaaaggagaagaatgttatggggtatgtatcttctggtttgcaaagtatgatttgattgataataattaacaagaaatattgtgcatatgcatgcgtttgtttttcgcctctaaaatgttttgtgcttctctgacaaaaattgtgatactccttagattataagaaggaactgaggtcacttaacagagaa

SEQ ID NO: 72807 - DNA, 970 bp, Prunus persica
  Intron number 3 from transcript ppa003734m (locus ppa00373 4m.g) derived from phytozome v7.0 (chr-ID scaffold_7; pos 12547304 to 12548273)
ctttttgccctctgcagttctatcaagatttcaaggtaaattgttgaaactgaaatctgacatgattggtacattcattggtcagttttgaatttattagttattggaaagaagtccaattttcccaacctctttcctggggttaaacatgcccttccctgcccctcattctcacactattattcttgatgtttcacttctggatataattgaggattgtgcaacttaacatctttgttattcttctgttctgatttctataattttgatgatgctactaaaattttactttgccacaaagcagaggtccatcatttttttttttggtcaaacatcatttcaagttatgttcaagttcacatgattttggtaatagaccttatgatttgtagtcctttatactaataaacaaattaagattattgtatcatgttttatattcttctggtgttgtcactatttcgccaatattggagatactttgttgcatgaatgtggaggcttgaagttttaagattaattaagtgactttaacaccattagtactgtttagctgttttggttgctcccttggattcttttatgtataagtccagcacactgggctagaaacctgccagtagtttcttcgatttagtattgccctagatcatgatcttttatgatcaagctacaacctgtattttagttcctctattatcaagctacaacacaatctttgtgtcacctgcctggcccaatttgaagcctcgaatagagaattgaacagctgttcgttttgatctctctctttttcgtcaatcaaaagctcaatttagcttatgtttaataatcaacaaaaattatttgggtgatttgttctgttaatagataaaaagaatagcctgttattgcatgcactctgacacatctcatggtcactttctgttctccttttcagtctacaggattttcacctccattatctttc

SEQ ID NO: 72808 - DNA, 773 bp, Prunus persica
  Intron number 1 from transcript ppa002402m (locus ppa00240 2m.g) derived from phytozome v7.0 (chr-ID scaffold_3; pos 4804769 to 4805541 reverse strand)
acgtagcttcagcctccctctctgcctaccgttccgtaagtgtcacattctcttcaacttccatacaacctcttattctttataagctctacactccatttttctctgtttgatcttttattattattatattctctgctcgttctgggagtttttgtttttggtgtttcatgcaaatagaaaaatggataaagtataaacaactttggatggatatcactttgtattatatctatctatcacatgctgatatctaattttaaaattttttttggttcttttctctgtttgatatctatgggtgcttctcttatattcggttgatttatttacctgtcttttttctgattgttacgtttgtctgatattactgatacttaggacgtggattagtttcgttttgttgtcaatttcgataagtttgtgtcaggggcattattgttgcctagcttgatagtcttggagaaataaaatgagtttggtcaaggtgggcttttaatttcatgcacttcaatctaattgtattttgacaaatatggcggtttcgctttagattttgacaaatataattcatggattatcgttaacttttcgtacatgtatgtatacgacattgcatggatgagcttttagttatgaataaaaagacgtgggatggtatatatttgttgtattttgagcttcagcaaagcaatgaaacttagctgtttgttgtttatttgttcttttgtgcaaaagttgactagcactgccaagccatcaagtttgggtca

SEQ ID NO: 72809 - DNA, 583 bp, Prunus persica
  Intron number 1 from transcript ppa009557m (locus ppa00955 7m.g) derived from phytozome v7.0 (chr-ID scaffold_7; pos 20360943 to 20361525)
cttacggaaactacaaacactactacggctatcgagtaattaatcccctacccgccacttttttcctttttgaatattcttattgctctacttggttttccagaaagctttggctagtcaataactaaaaatgcgacctttttgtgttccttttcttttaagtagatatgtggggttagtggttgattgaatttacgggcacccaagtaggtgcttttgtaagtttgattgaaacatggcatttaatttgaagttactggggctgtgttctggattttaaatgcattgcatgttttaagcttctgggtcgttggattgagtttatgcatattatttggaccttttctggaaaggtatcctgggctaagtcttgcccatgatttattattcattgtgacccaaagtatttgagataatcagcttataaagtcactgataagttatagtttcggccattcttcagtctgtaattttataacagtctcaatgctctccctctctctctctacaacaatgtgaaatcttattgccttcatatgatattttagattggtcaagaactggaggaagatcctagattgaa

SEQ ID NO: 72810 - DNA, 686 bp, Prunus persica
  Intron number 2 from transcript ppa019840m (locus ppa01984 0m.g) derived from phytozome v7.0 (chr-ID scaffold_7; pos 9401071 to 9401756 reverse strand)
gaccttaccagaagctaattaacgtaagtggtttgcttatcccacttgaagttcttttatgagtgatatagcttataatgcttattttcttgaggcaaaatgcatctctctgctactcatttatgtgataatgctagttttgtattgtgctcaaatgattggtggaggaatctagttatattgttaaattgcttgactggattacatccagacgtatgtatatatgtatctatattaaaatttattttagtgtttttagtttttcttggttcaaaattttttagtttcttattatgttttcgagttcttgattatttttctgagttttgtaacaaactgaacatgataaatgtttatgcttctgctctagggggtgtgttggaaatagaattattttgtaattaggactctcctaatatttgctttcccagtttgtttaataagggtgatctagtttcttgatttgattgtaatttaatttcctcttggattctcattctctttctattttctcagcagactaactgtacatcctgaaaaaaaaaaaattcatatataagtaatatgtagagaatggaaactagtatgctccaatccgtcttctttatgagcgttcttgctgacattaggacctggttctgttctgctgtatgtttatcaactgattattttacaatattcagata

SEQ ID NO: 72811 - DNA, 331 bp, Prunus persica
  Intron number 1 from transcript ppa019840m (locus ppa01984 0m.g) derived from phytozome v7.0 (chr-ID scaffold_7; pos 9401844 to 9402174 reverse strand)
agatcatagtaacgttaaaggatgtaagaactcttttgagattttgatgattcgttcattgttttgatatatccttgtgttattgttcttcttatgttgttccacctctttgtgttgtcctagcttgctctgtcatcaactttttgagtcaggctttgtgtgtgagcctttttaatcttctgtttgcctgattctttatatgggctgtggcatatccaagctgtcatggtctaatgatttgtatttaagactaatcatcacatgtaattttcatgatataagacatggatctgttaataatttttggtgtttcttgatttgtaggccaagg

SEQ ID NO: 72812 - DNA, 709 bp, Prunus persica
  Intron number 1 from transcript ppa025208m (locus ppa02520 8m.g) derived from phytozome v7.0 (chr-ID scaffold_3; pos 16909153 to 16909861)
gtggttgggttacgcaggagatagacgaagacgtatgaataaatttgaatttccttctaatttttctctgctggttttttcctctttcatgattattagctatgttctaaccttcaaggttgacaccatttttccatttttccattttgcaattgggatggtaggcatagccttgtggaaattctagtttcttgaaatttcttggtcactataatgcagaaaatcggccaaactgttttacctttaattagaaattgattaaaacttgtatcaaatttttattatttttttaatctaagctttttcttgtctctgcaatgcacatgaatttaatggcatcgtttttcaatttttccaatgcctatgcagtgagtctattaggaaatttgtagtagtgtttattctcttaaaatcaagcaagaactaacctttggttgctaatgagaagagaaattaaagtcaatcggtctgcgatcttgcctaacatgtaacactagcaggttcctgttacaacaaagctaagaatctatttaggtgacacaattatataggttttttgacgcatggggagatcaatgtacaagtttctggcacttgaaagcaagattgtgttatttatactgaagctacatgcaaacatgtatcattctgatataagaggatcatcaccaatatttgacaagatattctgactgcaggcagagcaggc

SEQ ID NO: 72813 - DNA, 354 bp, Prunus persica
  Intron number 1 from transcript ppa000789m (locus ppa00078 9m.g) derived from phytozome v7.0 (chr-ID scaffold_4; pos 7344570 to 7344923 reverse strand)
agttcgtcagttggaatcggtgggaacgttggaaggtaagttggatttaattttaatttctgtttggttgcaaagaaagtgtaagaagatactgaagctacaaggttcagttttttgttttgattaagttgaggcgggaactaaatgtagcttcggattagtggaaatggtaaccttttgtattaatacttgcaattgtttaagcacatgaacaatcaaattcataaggaatggaggtcggcccttttgaaattgttttgtgcggtgcgatgtttacaatagatatgccaactacaccctctttttgtcttttcacattggtcattttcatttgttttctcaggatattaagac

SEQ ID NO: 72814 - DNA, 494 bp, Prunus persica
  Intron number 1 from transcript ppa010828m (locus ppa01082 8m.g) derived from phytozome v7.0 (chr-ID scaffold_3; pos 18092975 to 18093468 reverse strand)
ctctcatctcagacaacaaagatctcattttcaatgtccgtttcttcccaatcctcttcttctttcaatttcttttccttaaagttttaattttgatttttcatatattgtcattatatctattgggaattcattttgaaccttattttttgggcaaatggttgatgggttatttagctcacttcttctgggtactggttatatcacttaatttgttttaatgctcatattactgtcaatatatgcaaaaatgtttcttttctttacaactttgtatctttaacttgtgacattagaatttatatggttcattatcatcttgagctggaaattgatgcttctttgatctaggagaaattcctctttgtaaattaagcatttggttcattcccatgacaaattgatagagcattactctctctctaaattgtttaactttttagtgttccatgaacttatggttgttttgtcacttgtaggtccatcctgtgttg

SEQ ID NO: 72815 - DNA, 495 bp, Prunus persica
  Intron number 1 from transcript ppa014941m (locus ppa01494 1m.g) derived from phytozome v7.0 (chr-ID scaffold_79; pos 8132 to 8626 reverse strand)
cgagaacaagcgcaagattagagaagctctgcaaggttacccttttatctttgattttgttttagggttagttgattttctacttaatcttattaagatttcagagggatggagccttagatcaagcaacatcgatattgtccccaatttaaccaggtttatattgtccctaatttaactaggacgaaactatttaaccaggtttatatattgtcccctaaaccctaaaccctaaactatttattacatgagactttctattttgttaagtttctggtgttagcctcgtgtatgcttcaacaatccttggcccaccactaggaacaatattgtccagtttagtaaattcttgattttattaggagtgaaactatttattatgcgagcctttctattttgttaagttttcgacgtgggactcgtgtattcttcaacaaatttggtacaccttttgttttcttgcagagggaaaaacgattcccactgagcttcaga

SEQ ID NO: 72816 - DNA, 649 bp, Prunus persica
  Intron number 1 from transcript ppa022044m (locus ppa02204 4m.g) derived from phytozome v7.0 (chr-ID scaffold_2; pos 2198418 to 2199066)
tgttcctggtgttggtggtggtggtggtggtgaaggttttgaaataacttttttatcatgaatttcttcatggattcatatctacacttcctgtgcagtgtttttggaagatattaaaataaatcttcttttaatttatgaaattagtttaaattttttttatattaggaaggaaagtttgattagagggacaatttcagaacgtatgcaaaagtcatcaatatccttgactgcaggttcttctgggtcttcttctgttgccaaaagaccaagagttgtggtgccatcacagaatgcaagtacagcctctagtcaccaagctaccctcttttttatttttcttaattccatgttagaattggttttggttttgctgttacagtatagttggagtcactcagcaaagtaatgtaggctttaatcatgtttaatgaaagaatgatcttttatatcatgtaaccagagaatgattgatctttcattgttgtcaaagcttcaatttttgtgtttcaaactagtaagaattataatctttgatgagaatgagttaggtttcttgagtggtattcttacttgagtaatttttttcgaaacggttgctatgtgtaattgacagacctagttaacttggtttattttaaattcacag

SEQ ID NO: 72817 - DNA, 356 bp, Prunus persica
  Intron number 1 from transcript ppa021413m (locus ppa02141 3m.g) derived from phytozome v7.0 (chr-ID scaffold_8; pos 13505394 to 13505749)
actaaccggtggcctgaatatcctccagaattaaggtaactcaatgatcactaagaagaacgtgcttattttaggtaaccacatcacataattatacaaagatgaaaacaaaaaacagagaagcaataaaatggttaaagaaatctagaacacctgtgattcataatgaaaatgcttaggagccaatcaaagaacactagctctcaattgaaaatataactgtttgtgcaaaaaggaacctttgcattaaagggttaaatacaattttggaacttgatcacttatatgatctaataactagacactgcatgctttgagcagggtggcgtgtgaagagtatactgaagaagtagaaa

SEQ ID NO: 72818 - DNA, 642 bp, Prunus persica
  Intron number 2 from transcript ppa007767m (locus ppa00776 7m.g) derived from phytozome v7.0 (chr-ID scaffold_7; pos 20030854 to 20031495)
ggttgcggcttatctctgaagaaaaggaggcccaagtaagtttaatttaattactagaggagaattggctgcagtgacgcgatatccatttttttcatcttacattgatgttgaagagttctattgtcaattgccatctgatatgtttctcccaaatgagttagttaggagtgatggaattcggagaccttagcggcttccacctggaaattaggcttaattttgtaaagcttcccactgcagaagcatcaccagtgaaatttttaggcagaccaaggaaaagagttgattttgaattccaagttatttcaacatcatcatttgacttttagtgttcttgggtggagattttaatttcaattaaaacctgtcagatatatgtctatccaactcataagaatcaaagtgggcctgaattcttatgtttgtgtgtgtttttccatgcttccatgagcacatgcttggcgtacttgtattctgatgcatattggtttttgtctgcagagaaatgtccctgttaatgttttcatagtatatatatattttccttgtttactatattgtatatagactcaatataatttattgcctttttggtaaggatcagacttctgacagtaaggagctcaatttcgaaatttc

SEQ ID NO: 72819 - DNA, 894 bp, Prunus persica
  Intron number 2 from transcript ppa024077m (locus ppa02407 7m.g) derived from phytozome v7.0 (chr-ID scaffold_4; pos 12330350 to 12331243)
ctattgacagagttagcatcaaggctgtcatcttggtaattaactctctctccctcacatgcatagtggtgttggattgtcttatctttttcacatagtaatgctagaattactcagtttgttcaaagaatgatgttacaatatgcttgttatgggatcatatctaaagaaataaataagtttaaccaaaattggaccatatctgaaattttttattgtcaaacttgtgctagccagccaagaaacacaaaggaaaagatgtgttgtgtgacaagagactagtaatattaaaaagaaaatattttgtaaaaaactagtataagccaaacattttggactaacttagtattttttttaggcttatttattgatatgcctcttatattgtaccgaaaatctcaatttgcccttatagtttcaactgagtcaatgtgccccctatgctttcatttcgtgtccgacgtttccctcattccggcaatttctttggtaacactgttaacttgttgacgtggcatgggtatttttataattttagctatttaaaaatttaacttatattagattgtggtgttctaatatttctttgaagagcagacatgggcttagccaagttggctagagcagatgttctcccactctacactcgagttcgaatccccttccccgtaatttagaatagaacatcgcttgtataaaaatattaaaaaattctttgaagcatgagtattttcaaggtttttgaatgtttcacttttaaagccttctacctttttatatatatagatatatagatagataacatgtgggttattcctaaccccaattctttgggttttatatataattttccattaatttttaatcgatttttaccattaaaattcttgtagg

SEQ ID NO: 72820 - DNA, 910 bp, Prunus persica
  Intron number 1 from transcript ppb024773m (locus ppb02477 3m.g) derived from phytozome v7.0 (chr-ID scaffold_7; pos 11141712 to 11142621)
atcacgaataattgtggggtttaacttttagacatcgataatgcttttaacaagttcgtcttgtgtcacgcatgttagtgattattaattaaactttttggaaaggttacctttttttttggttgtgggaaaaggttaccacttaccaagccacttaatagatcattctataaaagtgtttggaacaagttaataagcactttgaccagcaggctttgcctctcaccctagctacatgtatgtatcatacaaattatatcttataatcaaatatccgaccacatttttttttttcccttagaattagatgactatataatcatgctctgatttaaggactcacaaatgccataactcttttttaattggtcgatctcaataaaaataatataaaaaataattacaattaattaaaggtttgaaatgctcataaaataaagcagccttaaattgtaaattgtaaggagtcattaagagttctttctctcttctcatatttagggtctccctattttaggaggtcgatagggagtatggttagagtcttattttttcaaatcctccctaaaatttgtataaggaggtggtttaaggagcccattgtgaatgctctaatgccacttaaaattaactacaaaaaaaaattgaacaattatggtttaaaatagttttatattttctccctcttttcttccccccacctctccctcatttctcaggcatctctttcttctctctaaagaaaaacaaaaagaaaaagaaaaagaaaatcttacaaaatgggccttttaataatattgtaaacccacctattaaatcaggcagagttttactcttctatttggaccaagcttaacaattgtccgtttatcaagcaagaggcccagaattgccccttgagcttcagttg

SEQ ID NO: 72821 - DNA, 881 bp, Prunus persica
  Intron number 2 from transcript ppa017418m (locus ppa01741 8m.g) derived from phytozome v7.0 (chr-ID scaffold_4; pos 2510398 to 2511278 reverse strand)
ccacaagtgcgtaatggttggattcatatgcgatccctactatcgaaagcaagcagcagatctagaaagatctagtaggaggagtgtcaatattcagcttaatcataatcttattaatgttgagtatgttggaagtttgaaagcaaatgtcccacattggagaaaacaaaaaattccatatgctttataagcatgaaaccttaacatcaattaaataaggattggtgggctgatgggcttggtagtaaagactatcatgattggcttgcttgattaatattaatatttaaataatcaagacttgggccttgggccttgggtctctggaaaataaaagaaatatacctagcccgaaaataaaataattatttttatttttcggatttctttggcagaagttaaattcaaaccagaaagacttatctttttgtttgaatttgaacaggtataacggatactaactgctcatattattttaaagttaccaactgtattggagagaggcacaccaacccttgaattatagatagttgaatcctgggagatagacgcctgttgaacttcaagcactgagaagaggctaaattctgtctttaggacattgcaaatacgcaagcctctatcttcaataaaagtcagtttctgtacttaatttatatatttgcacattcatacagatttcataattttgctactgtttatattttaagaattgtgcaataatatagtgatcctatagcatacaacaaggttgtgcgaataaatgacgataaattggactttccggaggtttccagcgaattctagctggagatcttttcttctgagacaggtcaatggacaaaggacttgtaaataacccacggaggttttgttttagc

SEQ ID NO: 72822 - DNA, 1052 bp, Prunus persica
  Intron number 1 from transcript ppa016229m (locus ppa01622 9m.g) derived from phytozome v7.0 (chr-ID scaffold_7; pos 13324166 to 13325217)
accaagaagctgctgttgaacttgggaaggagctggtaattaaccttgtcaattcatttttataattcccctgtgcttatttcttggtttatttgcttctttcttctttcttctttatattcacccttctgcgttccatccgtatgcagcaaattagagcattcaaacacaaaaaaatgtttcacaaaagtttcctatttggtcttatactctttctgggatttagaagccgtttttgttaacttcatttcaaaggaaattgggcttgatgctttgtctccatttaatttccttaaaaagagcctacatatggtgcacaaattctttcttccatttcttacatttttttcccatttgggtttacttctttttttctcaagtagtggggtgggggggtgtgcaaggttgcgtgttgtaaccaaacaaacgttcaacgtgggcttatcattgttccagacttggagcctagcattaagcctgattagggtttatgtgtggcatgagagagagagagagagagagagagggaggaggcagagattgctagctgtaacctgtctgtcagttgagcagccttcttgcatgatctgagttttgatttttattaaacctttttttatttttataaaaataattaatataatcagtaagtactgctggtagcttttaattctccaggagagggaaccaaacgtgctctcttggtatcatgactcttttaagcgtgttgtcttcacaggcttccatgcccaaaaccccccctccctcttctccatgagttttgtttatggggttccatgaccatgaaatttaattatattattttttataataataatttcactcagtagcctgtttacctagggttttccattcattctttccactgggagacatagtttttataattgttaccatctcttctaagtttgctcaatcaatcatgtacgtatgttttaaaaatattttgtgatgaattgggtttctgacacgtgttcctgggtttgcatttcgatgtgttttgaaggtggagcgaaggattgatttggtct

SEQ ID NO: 72823 - DNA, 825 bp, Prunus persica
  Intron number 1 from transcript ppa007436m (locus ppa00743 6m.g) derived from phytozome v7.0 (chr-ID scaffold_5; pos 14608203 to 14609027)
ttgtttcccattgccaagcgagaagaggttcccaggtgcgtgatagccccgtttggttactcagaaaatgttcttcgtattcccaaatttttattattttttaatgtttcatatgttgtttgaatgtgtgctggggttgcttctgatagataaaaggtttggaattgctgggtgagattgattctacaaacatcagtttcaacaaaaaaagaaaaagagacaaaatttgatatcatttctaagattccctcgtagtgtgctgatataagttatttaagcaattggatgaaagaaagaattcattttgatgctaaagattctattttgggacagattttggttgcactattcttcttagtattcaaaattttcgcttaaggcatgactttgtgagaagctagaaggatattgcggcattatgtcatatccgagtattagttcttagcctttattgggttatcttgcacgcatgaagcatattttttacttatgttaccactactgagcttaagcttctaggagtcatgcagagtcatgtagattagaaatgcaccctgtgcagtggattttaccattattgaccgattagagtcatttttctaagctgaaataaactatacacaaattctttactcttgagaatttttttatcattattagttttattttataaatttcacttctagttgtctcatgcaactctaatatgaaaagtatcaaaggacagcttccttgtagaggagttctatcaagtcttcggtttatataatttatttcctttcatgtacagttgagcttatcacaaccaccgtacggcagccaaaa

SEQ ID NO: 72824 - DNA, 705 bp, Prunus persica
  Intron number 1 from transcript ppa021749m (locus ppa02174 9m.g) derived from phytozome v7.0 (chr-ID scaffold_1; pos 1519936 to 1520640 reverse strand)
gtgagggtggtggtgcgtggctttggctttggcagttttttatcgaagtatttttagtttggctttggcttggtggcttttttattactcgttttcagatcccacaactggaagaatcaataacttcgatttgcccaacaggttagtttcttattcttttcattttcatctaaatgatcactacttaagggaggggaattgaacctatcatctcgaatgcaaaggataaatgctcactacttgagctacaagccctttgcgattgtattttcttttcaaattctcacctaccggagtaattcttgactacaaatggttgtataaaaccttgtatccatcactttcatcacgcgacatgaaagatagacttataattttatccaaccgactaatatcacttacttgacacgcactctaactctcacaacatttttcatcaagttatcaatgtgagatatttcatcatgtgatggattcttttgatgttcagtgcctcagctctcatgcctcagtttttgatcccctaattatagactgcaagttgcttccaaaaaatcatgtaaagtatgatgcctgcacaaacaaagaagtgagtgagaagtaaagatgttacttgaacatgtttcattgtagaacgacctctcctttgattttgctgggaattatggagggcaagccccaagttcaaattccaacagttaaact

SEQ ID NO: 72825 - DNA, 854 bp, Prunus persica
  Intron number 3 from transcript ppa000826m (locus ppa00082 6m.g) derived from phytozome v7.0 (chr-ID scaffold_5; pos 16902745 to 16903598 reverse strand)
aaaaagaagtatgttttattttggctttgacttattagttttatttgaatctgtttcagttatatgtttcaactttgtgaatatgttacgaaaattgtcaatgttggagtcatggtgtttgaaatgtgtcaataacgtgtatgcatgcttgtttcatgtttagtaattcgatttgtctaatatgaactttactttgaagggagtgaaaatttattggtgggaaacatacctttccaaaatttagtttcaaacatttgaatgattttcatttacttagcaaagagtataatgaaagtaggaaataaagtaattttcattcttatgtaatgttgactgttctctagctcttaaaaaactgaggtagtacttctattgaggattactgcaaatgaggaaagcatagacctatgaacttaggatttttgaagttgacagaaggtgatgttccctttgagataattgcaacattaggtggaagtaaaattgctttcgaactctaactccaaaagatggcgaaggtgtttaagcaaaggattactcagttgaagatgtgatttgatgtcatgattcatggggaaagttccttttatttttgtgtctttcattgtaaaaaaactgtgatccttgtaaaaattatcgtcagtatattttgctcattttaatttggtagagaatgttgttgtgtatcctgtcacacatttattagtagtaatctgtgcattttgtgtcaaatgagattctggaactggttgattcagtaatatgattttactttaagattccaaatcagcttcatggttcttcttcttaacattttaggaactggaaggccaatctttggggacgtctttgca

SEQ ID NO: 72826 - DNA, 673 bp, Prunus persica
  Intron number 1 from transcript ppa021859m (locus ppa02185 9m.g) derived from phytozome v7.0 (chr-ID scaffold_7; pos 19541592 to 19542264 reverse strand)
ttgtaactggtatgtactatgaagactaacctcagcactctatctttgttctcttgattggaattgccccttttttttttcttttcctgtttccattttttgtccttatctatgcatgagatatattcaatgtatttgacatcatccggctttcactctaaaatcctaaccactatattgccttttgtattgcaatttgcatgcatgttcatggaaataaatgcacctcaacaatcgttacaaacagaccatgcattaacttcccaagatttctcaatcttttgtccctatttattatatgtaacaaatttcccaaatttccgaaaatcaagctcttctgataatgaaagttaaaacttgaatttcctttttattgttccaatcaacacatttttttttagtacaagcgatcatctaaactacaggggagagagtttctcacatacacacacaactgaagccatgagggttcaaacctaagacctttggtttgcaaatcaataccattttccactggaattgaaccaattcaagtttttagttattaactattatagttagatttgaagactcatattcatataaagttttcctaggaaaggggtttaatgtgatgaggattttgactttttctacagggaaaggagatttcataacttgttcctcaaccaag

SEQ ID NO: 72827 - DNA, 539 bp, Prunus persica
  Intron number 3 from transcript ppa007260m (locus ppa00726 0m.g) derived from phytozome v7.0 (chr-ID scaffold_5; pos 12713594 to 12714132)
ctcagttgtggtgtttcaactggtaagtcatgcgtcaattgtgcattaattaattttataataaataataataatatcaacttgtgcctttgccctttagcatacgttattattttgagatttttttcttcttcttaattatgtattctcaaattgggaccccttggtccaaattttagagtctatagtccatatctgacttattttttgtcttgttggaaaagaccgcatggaagttagaacttagaagcaacagaatccacaatatgagggagagtctattcaaaacttctggaatggattatgtattggaaaaatatatatatgtatatcaacatgaacaattaattctttatctccagtatgtaagaactgctgatgtggaagaaccttaattaactaacaaagatattgtgatttaactgtattaaagtattaacgatacaacattctaaagagtattgatgtttatttcatgttatacataattataatgcatgcgtttggtcatgtgatatatatgtaggagttggtgctgc

SEQ ID NO: 72828 - DNA, 836 bp, Prunus persica
  Intron number 2 from transcript ppa023572m (locus ppa02357 2m.g) derived from phytozome v7.0 (chr-ID scaffold_5; pos 1462548 to 1463383 reverse strand)
gctcttgcgtgcatctcttggtaggttttcaatctcctccacaatatctatccttttggtttacggttgacaagttcttaccatatacgcaatataagaaaatagctgcctgctacaatttttgtttctatttctcctcttgatccttcatgattgaaatttcagaaattgagataaaataaactatccaaccccagataaggccataaccagttccacctgttttcagacatttctccatgtgggtcacctttacttggaaactagagtgggtttcgggagaccacacatttcttagcttaattgctttagtaccccttcaaactatagttaaatttcacattgccacttgaaaattcaaagtaacccaccttgcacgcttgactgatgttttgcgtctcactgtatccttcatcgtcaagtctgtcaaaatatccgttgcaaacgctaacatgtgacatatattttggtacaacaatgagtctcattaatatcacgtcaatgtttttaacggactttttgacagacttaatggtggagggtaaaatgaaaagcaaaacatcggtaaatagtacaaattgagtcattttaaatttcgagaggcatatgagatctgatcattaatttcaagatacactgcagcaattaggcctatatttcttcttcaaaccccaaaaaaaatgaaaaaaaaaaatagttccttagaaaatggacagatcagctctcagctggaagtgtctcaatttaagaaacattaataagacatgagaatgggaaaacgcggattgagataatgaattttggaaatggaccattgttgcaggaccagctttgta

SEQ ID NO: 72829 - DNA, 910 bp, Prunus persica
  Intron number 1 from transcript ppa008386m (locus ppa00838 6m.g) derived from phytozome v7.0 (chr-ID scaffold_8; pos 18172031 to 18172940 reverse strand)
gtcgggttctgggtcaggcaaggccggagctttgggttagtgtgtttttttctttctgttcttggttctttctcttgcctagagtttgataaatcgatggacttattgtggatatagcaattggaatgtgaagtcgtgttttttgaatcatatgaatcatgatattgtcaagcgttttccatcacatgttaagttcagtctttgacttcagccaatttctgcttgaatttctgtgaattattggcgtttttgtaaattggggttttgagttgctttgtcctgtttgtttcacagtctgtaggagattgtttcagaaacttttgaacttgttctcgatggggaacaacactcgtcctagatgctatgctattgcattttgaattttgtggcactactgctttcagtttttttcttcctggttctgctctctgatttcattgtgttccttatcggaatagtttttgtcttcatcatttttgtggtttatgtttacctctaatggttgtgaactagtgtttttttggtttcttcagaggaaccagggcaaaccatagattcaaagccatttctttagctccagctccacctatgactgtagattctttggccgtctttctgatattattgcttgttttttttttctaggttgttctatgtgtccatgaatactaggattgcatgaacactagttataggattgatctgtttgatgttgaaccgtggtgacactcaaaatatatatttcctccctgattttgagcacttgcattgacaattcttctcttctcccttttaaaagtttcaatcataaacagtacatgcatgtttatttggaactataaagtgtaactattgttatgttctttctttgacataattttatctttaatctctgcagagaagaagggag

SEQ ID NO: 72830 - DNA, 485 bp, Prunus persica
  Intron number 1 from transcript ppa019725m (locus ppa01972 5m.g) derived from phytozome v7.0 (chr-ID scaffold_7; pos 21784283 to 21784767)
acttccaaattctcctctcctctcgtcggcgacatgtccatgtccacttccacatccacaggaaacagagaaagtatgaattgggttcattattcggccttgtcacatagacggtagatatggagacaccttttagaggccagctttgattatacaatgatgattacgggtgagttaaaagagattaaaaggttaattaggaagtgagaagcaattttaattgtgaatagtttctcatgatcttattcttgtccttaattagtactttgattttgattttgaggaaaatattgtgggttagtttgttattttcttcttccttcttcgtccatgtaaattctacagagtacaaattcttgctgtaattaaacgttattgtcatctttcttcaatacaactgaaactgcatacaagagacttattcaagtacctcagtgtctgactgtttgagttcacaattgcatcgcagagctacaagtcattag

SEQ ID NO: 72831 - DNA, 924 bp, Prunus persica
  Intron number 4 from transcript ppa013310m (locus ppa01331 0m.g) derived from phytozome v7.0 (chr-ID scaffold_6; pos 2093490 to 2094413 reverse strand)
ggaaccgtgaacccccacagcgtttcaggcgtcgggtatgttctaattttcgtcagccatttattttatatctgttatttgcttttaggttctgcctctatgccttttagtctatggttcagtgtgaggttcactttctttaaatccgattatttctgtttgttcaatacttgtatcttttcataatttggtgtctagaattgaaacattgtacattatatttcagtggatgagtctgtatatgtacaaacttcataaatgtaggagctaaatacctgataccacgatgaattccttaataaggttcaaatgtacccaatgtcaaagactctgttctatatgccttttttcttaggatacagtcaggacttgtatgttttttctttctatggaaatagcgagcaaggttggttagttaatttttagactcaaatgcatttgcattgaggttatcaaatctgcaagcattagaaatttgtgctagtcatctgggtgcacgctttaagcacttagagtgaaacttagtttgccgttttcttcctggttctaatttttttcatgaagaagttgggtaaatgttcaaacttggcataatgcgcgtcgcattatttggttgtgcgatcattgtgctttctttgttaatgacatcgaggagatggactggcaaatgattttggtttgaatttgttgccttagttcatgattatatttaccatcatagtattatctctatattcactggcagagtattttctcccgaaaaatttctaatatattcttttgatttttgtattcagctgtttgcacgtctaggtttttatttgcgtatatgattcatctcttccatgttcttttagtttacgtttctatttctctttgtgcatatcaggaggatacacctaggcctgctgctcctggtgcacc

SEQ ID NO: 72832 - DNA, 537 bp, Prunus persica
  Intron number 1 from transcript ppa003649m (locus ppa00364 9m.g) derived from phytozome v7.0 (chr-ID scaffold_4; pos 359630 to 360166 reverse strand)
aggaccccactcaaaggttttagttggttttaattaaagtgttattcttttccgtaaattattagttaaagttgcattcaaccttgcgtggttagggattttcattttgtgtgtttttgttttggggtcaaaatctgcatttgggtacgttttggagctttgattgtgtgcttcagctgaatgaaaacgtcggtaaattgttaaactggtatactggagaataactgtgtagtcaactggaagagccatcccatatattctagctcatggccaggaaagtgtatagaacggggtactgatgtttctacaaatgcgttttgctttactttttctttattagtcttattttagttcacttttttttttctgccattgggaccttcaggctgcctgtttcctatcctatgacagaatcctttactcaacatccatctttcataacttggaccgtactgatgtttcattatctttttggaacatatatgaagttttatctgaataccaacttttgatcaagcagatcaaggagaaaaaaga

SEQ ID NO: 72833 - DNA, 664 bp, Prunus persica
  Intron number 2 from transcript ppa013960m (locus ppa01396 0m.g) derived from phytozome v7.0 (chr-ID scaffold_2; pos 21739311 to 21739974 reverse strand)
caaacatcgagcctgtcatcacctccaccggttagttcgctctatacatatctctctctcttcttccatgtttcagcagtagttagtatattgttccatggaactaaggtccaaaatatggaagaaacaggtgtttccgccactcttctctctctctctctctctctctctctctctctctccccccttaattttctgtatcataacatgcatgcaagcaaacataattaagctatgcaccaaacaagttcttaaggaggctgtgatggttatagaggttgataatctcccgtgactcaaaatttgttctgtaaatcacgtacacaaagctgcaaaacattatgcagtttatggcaaacaatgaatattaattctagttcaactttaataacccaagtaaccctttgcgctgatctaaattaaactcagtggtgggccgtttgcaattcacacccgaggtactaggttcgaacaccttctgtcatggaaatcagtttgattgaaaatacgattgagcctaaatattatggccttcaagaatcttcagaaaagcagcctctactctatatgatccaaacttgtgccaaactaaatggtttgtataaaaatctatgtatcaacttaaacgtagatcatgatatgaatgattttggtgtagtttgga

SEQ ID NO: 72834 - DNA, 617 bp, Prunus persica
  Intron number 2 from transcript ppa020312m (locus ppa02031 2m.g) derived from phytozome v7.0 (chr-ID scaffold_4; pos 15358307 to 15358923)
tttctgtgattgtgttgacggaaccgacgagcctggtatggttactcttttcgtgttttaatctgtgcagccattaatatattactttcggttcttctgatgtacaagtttttgagtttatttattttctttcttttcataatatctcttgcacatgtttcaatttttttttaggtttttaatgtcatattacttactgcctattgggtcgctttgaatgtcctgaactcacgtcacttggattagttgttagccattgcatttcatttcatgttttcttggaaccatttgcacataagtccctgaattgtctttctttattttgttttttaaaatgtgaatcatcaaatcatcaaattcgtatgatttatttgtgtagaagcagatgcatccagcttccattttgacagtaagtgagtcgagtccaaccttgagtgattagtgataatgctaaacttctactttacttgggttttcatacattctgtgtttgcatttgctgaggtttaccctggatgtttagtttttcagatccccctgtttgtgtcttggtgattcaattgggcttctttgtattttcaggaacttccgcttgtcctgcaggcaaattttattgt

SEQ ID NO: 72835 - DNA, 939 bp, Prunus persica
  Intron number 1 from transcript ppa004770m (locus ppa00477 0m.g) derived from phytozome v7.0 (chr-ID scaffold_2; pos 16178599 to 16179537)
agggtaggagtaagtatcatcaaattaatatatttggcaatgataaccattttctaatggcggcttgaaatattataaagactaaggcaacactttcatgatttaatgtgtcctttatgtgtagcgtcactcaagccaaaatagtcaaagaagagagaaatatttttaaaagaaattaaaatggataaaaatgcctttatttatttttagattttttaagaaatcttttatatttatatgtttttggtttgaaagttgaggggtttttctgttttttttgaaaaagttttggcttttttcaaaagtgaaaacctaaatttactaatacttaaataacatatattatttaatgaagttgagcacgtgtaatcattaagcctaaaatgtgaaaaatgtgatatttcataccatattacaatgtgattattagctcaaaaccaatatacaataggtggagagatgagaatttttaactattagaataaaacttctatcctttgacaccctgattaatgtgatttgagttagagcatatagtctaacatgaatatatattttccgaggataaaaaaacataattaatcatgtatcatcttgattgcatcgatctaataggaattcctctatataaatccatcttttaggctaatactttcaggtaaagcttgctaaaataggtgaaaacagttgtttgcaacagggtttttgtaagtttatctttaattttgtagttagaacttagaagtttagtttatactccatgttcttgatttagctccacataatttgattaggcttcctccacctgtgcatattgaattaaattctaggttttcataaataaatgatgaattgaagagcaaaaaagttgggctagggatgataatttgtgatgtctttacaggagtaccaccaagggaacaagaacccaagcccaaa

SEQ ID NO: 72836 - DNA, 261 bp, Prunus persica
  Intron number 2 from transcript ppa001974m (locus ppa00197 4m.g) derived from phytozome v7.0 (chr-ID scaffold_7; pos 21719489 to 21719749 reverse strand)
cgccggcttggggtttgaattttcttccttgttgtttgattggcttattgtgttttctgtttggttgatgagaaagtttgggaagactagggaaaatgaaagtttaaaactaatcaatccttgtttaatcagaatgttgaagataaaaacttattttctttcaactacggggaatgagaatttgagtttttgtagggatttattgaggttaggtgatgatttctctcttttttctttaaccattgctgatgtgcaggcaca

SEQ ID NO: 72837 - DNA, 456 bp, Prunus persica
  Intron number 2 from transcript ppa000375m (locus ppa00037 5m.g) derived from phytozome v7.0 (chr-ID scaffold_4; pos 11040283 to 11040738 reverse strand)
ggtgcctcctggttcaccaaagccactttgcaaaggtaattctgtgtgtgtttgtttgagtttgtttctcaggtatcagttaagtaagaattttttgtccaattttcaatgggttgcttgcatattctagcataattgagtgaaaatttccaaatttgatgatgaccaagtttagatctgggttgaacccattaattataaaaagaaaatcatatattataattaatttaagtgaagatcctggtcataattgtgataaccaaaaaatgacattggagtcagagcactcttagatttgatgtaaagttctgttctttagcttgttatagttgcatatttcatcatgtatgaagtgctaaataattgttcgttgttgacagattgtgtaattggtgtcattttattgatgtacatgcaacaggtttgtgaagtttgttaccacaccagaagctcttg

SEQ ID NO: 72838 - DNA, 775 bp, Prunus persica
  Intron number 2 from transcript ppa009246m (locus ppa00924 6m.g) derived from phytozome v7.0 (chr-ID scaffold_4; pos 10817522 to 10818296)
ttggtatgtctactcacttgaactccatgtaattttgcttcatgtttatactaggattttgttaattttctgtcagggaaggaaaccttcttaaataaatcgttgaatgtccccttaataatgaggcagctgattagatctgacaagttttgctagacatccaaaaatctgtatcttcatttgaatttatttataggtgtacttaagccacctatcttaacttctgccagctgattctgtctggcattttcccacttccaatttccattgcaaatatcatccttgactttggttgaaagaggaagaccagagtcacaaaccattctatggccatacttatgaccctgtggatgccagttgcccaataagctaagtgtttgagccatccccttatcttcatttcataaaagatctggccaattttctcagcttcaagagcttgctctggcttcaataatgaggcattttaacctccaacaaacagtcacctttgaggaaatcttctttgaccttagcaaccccaagagacaggttgattgaaagtatacgagatgtgatgtgatataggcatccaatctttaagaccttaataccccagtgatattcctttttaggcttaccaccttgcatcctgttgatgaaattaagttttgcttaatgcttaaatagctatgcaatggggaaagtgaattcgaccggccgagtatttttgaagtgttggttgaagtgttgcttaatgtctaccttcctttttgtgcagttgttgcgacagacg

SEQ ID NO: 72839 - DNA, 772 bp, Prunus persica
  Intron number 1 from transcript ppa007067m (locus ppa00706 7m.g) derived from phytozome v7.0 (chr-ID scaffold_1; pos 43379120 to 43379891)
aaactgccaagtcctcttgaaggatcgaattcacagtaagaaatgaacagcattttggaagttttgtcgtatgggtttttgccaaaacaataagagagttgttgctgttgttattaaagaattatgatcaggaatggtgtattttctcatctcttctgatgtccttttgaatttcttaggagtgattaggatttgatgctaattagggttgttattcttttaatgaataacttctgtttttagtctattcctttcttcccactataatccaaggaaacttaaagatggtatcttttactttcttctgtttaattctttgtgtaatttgaattaaaataaatgctgatgcctaattcagtgtgtttggggtttctaggttatatttgaatagctaggcctaggttgtacaagggagcttttttcccaattagggtaatgttaaggtggtttagcatatcccattataaccgattaatcctttccttttttgttaaatatgcagaaaaagtaggtgatgtatccttttctagtgataataacaaaagggctgtggatgtaccaagccagtccgggaatgcaccaattgcgcggtcatcggagaatgctagtatggagtcatgtgataaaaggtttgaccaacaagagtgcactccaccccaaacaattcctatccactcatcaacgcagagagggtacactgctaattcttggcccgcatccataaacagcaaaaggaattcagttgagcactcagcttctccagtattattca

SEQ ID NO: 72840 - DNA, 341 bp, Prunus persica
  Intron number 1 from transcript ppa001441m (locus ppa00144 1m.g) derived from phytozome v7.0 (chr-ID scaffold_1; pos 32118409 to 32118749 reverse strand)
gcgtcaagattgccgatccttataggtatggtacaaccttctcttgtctatatatttcccaccatttttttttcgtttatttgtttgtatggaaatggaaattcattatcgaagaagattttctttcaaggttttcaatagtatgtagcatttgtacttagagtttcaatcctaagccctagcatttgtcctgcttgttatctcaacgaggatcaatcgccgacttcttgatgctgctatttttatttatttataagaatttgatcgaattttgattttctgactcttttggattaaatcttttaggcttgaagatcctcattcagaagagaccaaagatt

SEQ ID NO: 72841 - DNA, 807 bp, Prunus persica
  Intron number 3 from transcript ppa006824m (locus ppa00682 4m.g) derived from phytozome v7.0 (chr-ID scaffold_4; pos 7202479 to 7203285)
aatatgtgagtcacagtgatccataaaactagcatttttcttcctcttaaataccgttaaaaggttttgctgataattgtggcatatcgtgttaacttcattttgcttctgaatgaatgaaatggcagtatcttacatttatggatagtgggattattttttatggtataggccatgtctaaaatgtcaatgtcaagatgcacttagaactataagggaatacagtaaaaaacttgtattctgtattcatcccaattctatgaatcttgtggtttctcctacttatttttaaacctttcctttttcattggtctggaaaaagaaagtttactctagtgcttgttacatggtgtctaagaatcgatttcataacattacatgttaatataatttttcattcttgaaagtcacagcacacatagattaagaatggattctttggcatgtgaaggtatctcacttgttatgcctggtgagttccctcttgggtttctccaacctttcagcaaaaaaggagctgaaaatgttatatgtagcgcgctgggggttttcattttggccttcaaagggagcaagggtagtgagagacttgaggggctcctgtaatcactttattttttctttcactattattgtttgaattactacattggttaactctttaattcgttcaatgtatttatattgcattaccttttaatatatcatatcttaattaaacaaggttgagattcctatctattaatagttttcttgtgatctgagattgcaggggtcaagctaattcaaatactcgtgtgttgccga

SEQ ID NO: 72842 - DNA, 746 bp, Prunus persica
  Intron number 4 from transcript ppa006824m (locus ppa00682 4m.g) derived from phytozome v7.0 (chr-ID scaffold_4; pos 7203265 to 7204010)
caaatactcgtgtgttgccgagaatttctgtgagagtaagtacaactagaactcatgcacacccaacctccccccggcctctcttttccacaaacacacataaaattactttgtcattttgtttgaccagtttttatattagttactcaagtttatcggtttcaatagattaacaacttcaattgtgttgacatgttttcttttcaatggttaaacaatcggtcagtagaattttattattgttgaatgcaataagaatatttgtatttcaacatatagtgaaatttttttaatcgatgactagtttgtgctaaatatgagtatttgcaatacctataagtcaacacaaattgattataactttgtctgctttgattggtttacgtcatttagttccttaacactgttaaatcaagttattgcttaagccacatcaattattttttcttcaacttgaagctttatgacagtgcattcatttaatcactttacctgagtcattgcttttcgtaatttattgtaagcctccattgttccatcaccacttctaagttttgaattcaaagtattcagtattctatatgttgttttgtagatatccataaatatcagagtactgaatcatcctgactttgtttcttggcatgttatatctggatgaaatcaatatcatatgtttatttatgttcctttaattttattgtgatccagccaattctgaagtccacactgaacacttccgaatc

SEQ ID NO: 72843 - DNA, 594 bp, Prunus persica
  Intron number 1 from transcript ppa000481m (locus ppa00048 1m.g) derived from phytozome v7.0 (chr-ID scaffold_6; pos 2740138 to 2740731 reverse strand)
ctgcattgagatctttgtttcgagctcatacacaggtttaattcaaatcttatgtagtagtttgtattcacttatttgtgtttggattagttatgtgctctttaattttccaaaaagaaaaaagaaaaaagaatgattgctattccggtgttgatgctttgcatagatgacgattacaaatttagattctttcctattttctgatggcctcaaaagttagttagcttcatgtgctattatgcatagcttgtatggagaaatggtaatgtgagttaaatcattggagatagtgaagttctaggactagtgtttagagtactgaagtgttggaaatttcactgcgtgaaaatgatataattcgaaatagcttgacatattgagtgtacttgtttggttaatatcattgactatattcagtgtaacctaataactttgggagatcatatatttatgtaaagaagagcagtggaataaaatttgttttctgtgatctatgctgcattaaatggtgtttgtgtaaagtgtgaatggattacaagtttttagtacctcgttgatctaagtgatgtcttgttctgtcagagggtcacagac

SEQ ID NO: 72844 - DNA, 495 bp, Prunus persica
  Intron number 3 from transcript ppa007301m (locus ppa00730 1m.g) derived from phytozome v7.0 (chr-ID scaffold_1; pos 35369464 to 35369958 reverse strand)
cacacttcatttactgtcacagtggctatttgcaggtagattctccttttcatttgtgtccagtttgttttgttcttgtaaattccacgcccaagacagaacattctcttattgagtatatgtctgtgtactcttatcttgtctagcggtaatctgcatatgtgaactgtgtttgttcattaaaatgacgatcaaccgcacttttggaaacacaaccctgactgagaaatttgagtatgttgctcatagagttttcttgttactttcagtcactgagtgtagtctctctggactaaaacttttctttgctccagtttatttatcccaaaattttagaaaaagtaaccaatggctttagttagatgtatttcgtagaacttgtagtggaatattcttatgtgcttttctttttcaccagagctttgcaatggtagaagttaaaataagtgttgattttcagtcatcaggaccttcggaatcatcaagctgagcagg

SEQ ID NO: 72845 - DNA, 798 bp, Prunus persica
  Intron number 2 from transcript ppa010107m (locus ppa01010 7m.g) derived from phytozome v7.0 (chr-ID scaffold_5; pos 1228127 to 1228924 reverse strand)
ccaatataccatttgtcgataatcaggaggtagaggtattaatttaattacgatttaaagtaaattatttctaaaacattcatacatacatacatacatatatatatagaacatatatagaacatatatatatatagacacgcacatatataaccttgaaatattcaaagttgtcatttgtatatatatcatgggaataactgaacaaaataaaggaaattatgtttctatctttctctggatagtaaagtgaaatttatcttttatttattcattgtatttgtatacatatcatatacatatacatatcttttgtttcgggagcgcatgatgtatccaaaaggcttaagttatgaagtctcatatgaaggcctacgtgatgaagatgatgaagtcccatatgtatcacggaatgtcaatttggagcccactttgggaaggccacattgggattgaatacaataaacaaaaattaggtattagacataacaactaattaggatttgagacagagtaattctgtttggattttaatatctatgaatcaaattttgttttgaattaggccaaagaggaggcccatatgtgaaataattttctttattaagaaaaaaaaaccattgactgttaatataaatattgcataactgaaaaaataccacaaaaacgaggttggtgaagtggtttgtgaatgaggctttcctcatttgagggtcaaggtttgagttccttcatgcacactaaatttcttctttttttaaaggttgaggacaatatagttggttaccagcaacaagt

SEQ ID NO: 72846 - DNA, 989 bp, Prunus persica
  Intron number 1 from transcript ppa001575m (locus ppa00157 5m.g) derived from phytozome v7.0 (chr-ID scaffold_1; pos 26586592 to 26587580)
tcaaggagacctttcctctcaagcggactgaagtggtttgagctcttcctttctgggtcgtcgtctttttctgttggtttgtcgaatctgtttgtattgtattcggggaaaataaactattgagattgaatttgaaaatacgcaagaaaagagactgttgagcttgaatttgaagctctgcaatttctatcgatgaacagtgtttccaaagctggaaacttgtagtggtgttcgtttatttcttataaattttactctttcctctgttttctcggcgaccatacagagcgtcaagttttatttctgagtttagcgatgtcttatttagtctacttgaacttgtaggtagaggggaagatctttgtcagattagatcatgggaagaatgccaagaattggatgctgaccgttggttgtagtcttcctggaaaatgggttcttcactggggagtttcttatgttgacgacgttggcaggtaaagcttccacttaatgttagattgcaattactctctctctctctctctctctctctctctctctctctctctctctccatggtgttatgctaatctcataataacttaaagaatgcgtatttattttttgcagtgaatgggatcaacctcctagtgaaatgaggccacctggttcaattcccatcaaggtatgtattgggttcttaagtttgattgcggagctccgttcaatatgaatttgaaatagatgtggaatttcaggactatgcaatagatacacccttgaataaatcagcgttgcccgtaggaggtgatcaatctcatgaagtgaagattgatgttaaacccaacagtgcaattgcagcgataaattttgttctcaaggttctaattttcaactattaacagttgagaatttcgtccctttatgttagatatgcaggctgttataatgttatgcatcttttagtgagaatttctgcccttgttggggggttttggtggtgcagg

SEQ ID NO: 72847 - DNA, 705 bp, Prunus persica
  Intron number 2 from transcript ppa005082m (locus ppa00508 2m.g) derived from phytozome v7.0 (chr-ID scaffold_8; pos 11334934 to 11335638 reverse strand)
ctgagggaaagagagaatatcctcattttgtatgctaataatttgtgttgctatatatctcttcttttaataatatgtgtttagttccattttaatttcttggattctatatatccattctgttgcttctagggactagtatgagatggaatgcttgaaaccatttaaaaataacatttattctgatgagtagaaatcaaacttttgtgttgctagggagtgtgtgtgtttgtgtagaaaatttatacaaggcttgtgcttgaccacatatgtgcgttaggccagttggccagggcagtgagcccgccccccttgcacccaacttcgaatccccctccccataggttagattaatttagagtaatttatcgcttgcattaaaaaaggcttgtgcttaaccgagaattgaatagtactgtaatggggttaatagttgagagaatttcgacggtagaaattggttttggaatttttggggacagttgtattgacattttcagtcagaagctacaaggaattggtggttttcatatataactggataactcaaagatcaaagttggagttaagtatggtggaggtggaccttaccaagaagaaggaaatgcttttgtgattagttgcaccatattttctactccaagtaattgatatctgctttctattgtttagaaagagtgaagaaaaggtggattgggcgcgttc

SEQ ID NO: 72848 - DNA, 682 bp, Prunus persica
  Intron number 2 from transcript ppa018196m (locus ppa01819 6m.g) derived from phytozome v7.0 (chr-ID scaffold_4; pos 12872252 to 12872933)
gtggctgttggccaagtaagtctcatggagatagtgttatcacaatgtgctatttgcattagctttttatcttttctgttctttttgttcatgtcttgttttgatttgtctctgttacgtgctatgtttattcattttagcacctctagtagtcattttcaccattaaagtataaaggtttttgcttaaatataggtggctcaaggctgattttgttagtttccgctgatttgtaaatctttcagataatgtcccctgtgtctatttgcttgatattacaatttgtagttctatttttctacttgaagcctagtgctagttctatttgactgagacctttcaattacatttcatgaacattagtcccactttgtacgagtaggctagttattgtttttatttagtaaactaggctacaagtactacttacctgacatagtatcttttattttaaacatctttatttgctgattgtaaccacttttccaatcgaaatcttctggtatataaatgttgtgggatacatttctgaatgtaatttgggaaagcgtgccaaatggttgtgctattcatgatattttgatgcttgttcacagaattctgacttatgtgtttgttctaaaacaattggttaacgttgttgcatctgtcttgtagcactgctgtggttgcttactgcagc

SEQ ID NO: 72849 - DNA, 741 bp, Prunus persica
  Intron number 1 from transcript ppa010282m (locus ppa01028 2m.g) derived from phytozome v7.0 (chr-ID scaffold_7; pos 14698893 to 14699633)
ctcctacaacaagatctgcgtcatttccagtttaggtactgctctttctccttttacttctgcaactgtgtttatatttctgcgttttttatgcctaggagtttagtttctgtttatgttttatgcatttgcttcgaaaccagaaatgggatttttctagaattcttgtctgaatatctttgctgctctttgatttatgctgattcactcacatttgatacatgcatttgattttactttttttattgcccagaatcctgaattttgctttcttgggttggattgaaactgaagaaaattaaggaaattaaatgctccaatcctgaatcttttcttattgataaaatttagttgatccattccaatagataagtgtaagatccatggattttcttcattttcttgatgaccaaataaggggtaatatatgcacacacacaagtgttcttgttgtttctgatgtcttaaatctccaacaattgcaacattttctttgtgaaggtgttaatttagcttctctttagttagtatattgtttcggtggttcctcgtagatctctttggtttcgtctttaaatttcgattcagatctgtgaattgtatgcttggtggtagtttatggcaattggagtaatatctttccttgttcacctataaattgttctaaattcgttgtctgaataatcttttgcatgttttttcgattctgaacagagtgaggtacaatcctcatcagctaag

SEQ ID NO: 72850 - DNA, 988 bp, Prunus persica
  Intron number 1 from transcript ppa026599m (locus ppa02659 9m.g) derived from phytozome v7.0 (chr-ID scaffold_7; pos 11494172 to 11495159)
tatcattatctcagcgacaggtatgctctttttccatgtgcatcatatatatgtgtgtcataatccgaaatacaattactcaaacgattttgagataattcaataaaagcacttactaacactatcaggcacaacgttttcagcagggcagctttcggaaggactgcaagccaagaaaagacgctgaggtacacaagaatataaaaaaaaattagtaaatttaggttttacccataaaaaaacttttacttttggaaaaagccaaagctttttgaaaaaagacagaataacctctcaactttcaaaccaaagacatgcaaatgtaaaggatttcttaggaaatcaaaaaataaataagggcaattttgtccatttttgcttcttttaaaaattttctctctcctttgggcttttccaaagtctcccatataaatttgatgaaattacaaattatgaccatattattcatcaaacattcttcatgcctgctgctgcatatagtataagcataatgattttggcactccaacttctcaaactttttcagccaaaaaaaaaaaaaaaaaaaaaaacttctcaaagttttctaccgtaacacgaggagtgcgtgaggttatggtgtgattttggagtgccaaagcatcgctctaaaatcacacccttaaataacctcacgcactcctcgtgttacggtagaaaagtttgagaagttttttttaagttatttaagtcacacccttaaaggttatttaagttatttaagttatacaactatgaataagaatcgaaatagaaaaatgatacccatttaaaaagttaccatatgaaataaaaaataatctattagagttgaaaatgctaattctgtagtcattctggaaaccggaagagtccataggataggagctaaatgttgtactcataggataagattcctttcatactgattgtagttccattttcagaaggacaaagagtacgtcacaaa

SEQ ID NO: 72851 - DNA, 1038 bp, Prunus persica
  Intron number 2 from transcript ppa025765m (locus ppa02576 5m.g) derived from phytozome v7.0 (chr-ID scaffold_14; pos 255095 to 256132 reverse strand)
gggggccttggggtcagatctactgctctcttcaataaagcggcttgagcgaaattaggttgaatctgcttaactgattcttccaattggcaagctcaaattatagtgaagaagtatttgaagaaggagagttttcttgtggttgctaaaaagacttcacattcttcgacttggaaagccatccttgaggcgcgttttgtgcttcacagaggtataaggtggattgttggtaatagtcaatccattcctttctagactgctaattgggtatttccttttcctttgttagatctaattcatgtcttccttagaaataatcataatttaaagtgtttgactttattcaaaatcaggtttggcattatgataagctctctcacgtgattgatgatgatgttatagaaaacattctcaccattcctttgcccttatctccttttcaggataagctaatctgggggcctactcctaatgggaaattctctataaaatctgcttacaatttacaattataggatgagcaaagtcacccaaaagcttcatttttgaagaaaatgtggggttttaattttttcccccccccccccccccccccccccccccaaccccaaagtcaagcttctttcgtagttagaagccatctttacaaatgtttaccaaatatcaattcagaatgcctctgtgtaagaatcatatgaagactattaaccacttattctttgagtgtcagtttgcagtgaatatctggagatgcacgtattttttccccaactatgttcagtagaattttgatggcattgagtggctgacttcactacctcatacaaaggcttccgatggcccaaatgttttttccaaagctcttattctctgctggtagatctaggaagccaggaacaattgtatttttaaagacatcgatccccacccagttagagtccaaaatgtggatggtagcattgggctggattactagaaaattaactcttgccctcctcaaaagtctactggaaggattaacatcaagtggaaaccatc

SEQ ID NO: 72852 - DNA, 416 bp, Prunus persica
  Intron number 1 from transcript ppa007622m (locus ppa00762 2m.g) derived from phytozome v7.0 (chr-ID scaffold_6; pos 19748223 to 19748638 reverse strand)
tctggtgttctttctcccttcaaattctcaagaaggttattattctatataacttaatttcccagtcattttttgtttgggttttttaccatttttattccattcctagatttgtctaaatgtggttcttaaaaagcacaatgattcaatgaaatagggaagataaaaaaacgaacaaattgggatttaaatttgaatcagtatccgtttgattaaattttttttttcttaatcagtaaaaatgattttgcggttgtaacaccatgtaacatgttatattgacagtgaaaagccgacacatattcagtcagtacaaaagaagtttaggatttatgcatgctttaatgtcaagatctgagttcttggtttgtgtctaaaattgaatttatttggttgcagagaaactggagagaaag

SEQ ID NO: 72853 - DNA, 905 bp, Prunus persica
  Intron number 1 from transcript ppa010321m (locus ppa01032 1m.g) derived from phytozome v7.0 (chr-ID scaffold_3; pos 15945162 to 15946066)
agttcctcttttggtgagaggtcagtgtttttagttttagtagtctctctctgctcagcctgcaccttattttcataaggattttgtgtacaacttttgactgcttctttgagcttgtgaaagtttattgctttacttcatattccatgatattaagtgtaattatatgctatgtgagacattagtgagctgatctagatctgatttgttgatgtacattgtttgactgtggactctctctcttgttcatctagagatttgttgacttgggcttactcagaaacctctagtgagggtgagaagctcaaggtacacaaacatgttatagtggaaaggatgaattgctcacagaaactgcaaatttgatatagttttttgccgtttgtaattttatcttctgagttcagaaacagggaattgggtcaaattctaagttatatatcaatgtgcatttcttacttttcgtgtttcctgtattgcagtgccttgtactttcgcccctgttcttttagtgcagtccgttagatcttttattaaacagcctctaccactataatgggtatttttcctttttttaaatttgttgatcaagatctgggttttcttggagaggcttattgtgtttttgagattttcttgatcttacaaagattttgctaactgggttttgtgggaacatagttctggtgcactgggaaaggtgaaaagttgggatcttggaattaattggaaaaacttatactcagtactcactgactgtgtgattaactggaaatttcttttggtattagtgtttaattggcattttacctttgtgcatgtcttgtcaaactgagatttagttcatactcggaaattttttgcttgcaggaatttggagagtctgtcaccatacaaaaagtact

SEQ ID NO: 72854 - DNA, 768 bp, Prunus persica
  Intron number 1 from transcript ppa007961m (locus ppa00796 1m.g) derived from phytozome v7.0 (chr-ID scaffold_7; pos 6602290 to 6603057 reverse strand)
attgcttcattcaggtatacgaagattcttcttttattcatatttgaggctttttatcaagtaggtttcgttctgattactctgggttctctgcttttaatcttgattgtagttttctgcatctgtgtgggtttctctcaaatgggttttgttttgattgctcttgatttcctgcttctagtctttatggttctgttcttcatctatgaatgggtattgtttggatagctctggggttttctgcgtttaatcttggtcgtccttttcttcgcctgtgtgggtttctctcaaatgggttttgcttgctcaggggattggaatctgcgaatcttgaaactttgtgattttcaatttatgttggtgaggtatatgatttttttgtgtgtttctcaatttgatgttgttattggtttctatgagtcttgaaacactgggttgttcaatctgacgtaaaagtacggttttctggttcgagttgttcttttatgatttttaacacttgagaatctgaaaattcttatctgggaatgttaaagctacaatgctggacatttagtttacgatgatttgggcatgatatttatgagtttttctggaatgggttttcgtttcttcgagtcttttggctctaaccttagttgggctataatattccctttcttcttgtaaggtggtttctttctttttaatcaagcatgtattacttggatttctgtctaattccatctgtctttcttaatgttgtggggtttttgaatcagggttgcg

SEQ ID NO: 72855 - DNA, 879 bp, Prunus persica
  Intron number 1 from transcript ppa015752m (locus ppa01575 2m.g) derived from phytozome v7.0 (chr-ID scaffold_1; pos 32705732 to 32706610 reverse strand)
ttgcctcaaagaacaacgtcttacgatctaattatgtaataacctcaaaaataatacttggttttattatttttgtgaaaaatcttataagttgtatgactttattgggtgttttatgaatttagtttgatgtgaaaatattggaattaagtgagtttaatctcaaatttggattgaaatgcccttatgattaagtttatgattttttttaaatgaagtagggcccgtttaggcccgacccgataggctttcttaagcccagctcatgggtcgggcttgggctttgaattttctaaaaaaatccgacccgatcagacccgatattttctctctcatctttaaagcccggcccgacccagcccaaacccattaaatttggttgacgagccctaaatgcaactgctcatctggtcgcatcacatatatctcgtgtgggtgggaagtttaaatggaatcaactttggcctgagtggttgtttgacactcttgctgctgacgtaaacattacagttcggctttaataaatttcttccatcgtttgaccccaaaaaaaagaaaaaaaaaaggaaaaaaaaaaagaaaaaggcttagattagatagataaagaaaagaagacgagaaaaagatggaaattgttggtcagatgagattcagatgagatggcctgtgtttaagtaataaaaacaggcagctaggcctgtgtccgtggtctaaatcggcttctaagcccacacagtatcttgagcctcaatagctggacccataacaagtttgctggtgatgagctatttgggcttcaaactaggccacacatttctgtttaaaaatatatatagttgggcttttatttaatttgtagggggttattatagggaaaac

SEQ ID NO: 72856 - DNA, 443 bp, Prunus persica
  Intron number 4 from transcript ppa005814m (locus ppa00581 4m.g) derived from phytozome v7.0 (chr-ID scaffold_1; pos 36130395 to 36130837)
taaggtagggcatgctctttagtaatttataacctgtatttggtatactaataaagttttgtcaaaatggaatgattgtgtgctcaacaatgatggctaagaaaattaaaatggggtctgggtaactataagaaaatgattcacgaattcaccattcatgtgtggattgtttctcttgatacattgattttctacttttttaaatgcttaggattttgtgttggttttttgtagtatgtacttcttataagtcccacaatatctctttcatgtcttgtgcatattatcgtaatgttgcattcttcttcatccccaaaaacaaaaagtgatgcattcttgtaaatactgtgtttgacatttttctccatctagtgtgtttgattttgatttggatgtacattttcttaggtttggagtatatcaaaagggaaactattgagaaa

SEQ ID NO: 72857 - DNA, 402 bp, Prunus persica
  Intron number 1 from transcript ppa017550m (locus ppa01755 0m.g) derived from phytozome v7.0 (chr-ID scaffold_1; pos 45709669 to 45710070 reverse strand)
ggtaactactaaatttccttagacaattttaattttaattctttttgtttcttttccttgaccaagttcttacacacagatatgagttcttctcttaaattctgtttttaaaaatttaattgccaacatcatgtacttgaattggttttcttaggcctctatttatatgtgatgccttgaatgattataataataaagcttaaactgttaggtctacatgtaaatgctccaataacttaagttattagaaagtgggtcaacaagtgttatattattacgaagtttaacagaactcgaagattttgatgtatgtcaattcgatgaataaggtattagtttaatttgctcttgtagtttaacaattctagttttgctttaatttgaacttacataataccaggc

SEQ ID NO: 72858 - DNA, 822 bp, Prunus persica
  Intron number 2 from transcript ppa002847m (locus ppa00284 7m.g) derived from phytozome v7.0 (chr-ID scaffold_1; pos 8485674 to 8486495)
tcaagaattttctgcttcacactttgcagttacaggtaatgtcatgatttttaacagtttcacataatgttatgttgtcattagcttcactagtttctgaatgtaattggttggtggaatttacatttctcatgtggatcatatggtttacagtttaagaattctatttctaagtaatataatactttttatccacaattggagcattaaaagaacttagtacttttaacacagttgatgatgtaggatctctaataaaactacaagaaatggttctttttaaaatgtcagaatttaatgttcaacaaagcatttaaaagtacaaaggtattttacaaaatgggatcaccaaatgattctggagtcattgaagccacttatctgattatataggtatctctgttttccttgaaaatcgctgatgacaatactaagttatttgttgttggtgaactacacgttcacactaggtcttctaaacaactttcagtcatgttaatatgataatgctataaattgttcttctcccagaaaaaattcttgaaccaatgttaattcaattttgttgctagagttgttgattctgagatttttttcattgtcccttgctttccttgtataggaaattttaccagtttgttactttaatcgatacctctatggtgatgtaaaaacagaaattggcatgctgttgaaatatgttttggtaaaaatttgattcctcattgagcattggcacatttttttgacatctcatctaattaactttgttttggtcttttgttagagctgggagaagacggttgactgccacagccctgg

SEQ ID NO: 72859 - DNA, 1026 bp, Prunus persica
  Intron number 2 from transcript ppa020626m (locus ppa02062 6m.g) derived from phytozome v7.0 (chr-ID scaffold_3; pos 17741822 to 17742847)
tgataagaggaacggccccaatagttgccagcgtaaaaaagaacgagaatttagttaccaagcgtgttatgaccaacgcaggcgctatatgactccagttttatacgcttgtgttttgggcagctggaaaatagctcgctttctctattctcgcactccaatccatgttttgactcaagacaataatggccgccaaggagctgaacttatttcccagtgctttttccagagaaataaatttggtaattttgacatcattttcaattatatatataaataaccaattatagtatatgttgatttgtggctgcttatatgatgaaccaactatactatagatattggatgggatttacttcagcattgcccaaaattggcccttactgaaacttacttcgggtgctcccctttaaatacactagttaatttgcgttcagcattttcaagtacgatttctctcaaattttggtaacgctgaatctataacaattaatatttacggtttccctcaagtacgtacaccgtgttcaaagtgttcatcatacaaaacatttttgtatttttttatacaaaacattttcttcttggttttttattttggttttcaatattgcatccttcgttatattttatgtaaaaagaagctcatgtaaagtgttcatcatatacgtacacatttttgtatgtttttgttttctttttgtttttgttttgtcaacatcttcggatttcgccatgcagttatgggtttctttcaagaagttgtcaagaatcttctcaaacggttaggtatgctagctacatccatccacattattgattcttggtttaattctcacttttgaaatacgttgtagattaatattgttttcactgttaacctagaaatccgtgacttgcatgaaatgaaatgagattgggccatgaccgaattcttcaaattctacggctcatgtgtgacgtggtaaaacatacaaatcttgactggaagcaaactatcttcgtgcaaaaggcaatcctccgagc

SEQ ID NO: 72860 - DNA, 426 bp, Prunus persica
  Intron number 1 from transcript ppa015447m (locus ppa01544 7m.g) derived from phytozome v7.0 (chr-ID scaffold_6; pos 26253479 to 26253904 reverse strand)
aaagaagtgtttggatcgtctggtcgatctctacggtacccatttcaattttcactcgtaccaatattttgtcaaattcatcagataaacaaaaagataatatacaatttgggttcataatttggtgggttttgtttttgtctaattttagctgaaatgaaatgggtttgttgggttttgtgctatttttaattccaatatgtttgagaagttgagttgtgtgtgatttggtagaaatgtagttagacttgagatcaatatgtgtgaagtgactttgtggtaaagtttcaacaaacattttgcttagtttcctagtatttctactgttggtcacgaatttgtgcaggcataagttaactatgattagttttagcaccaaagtaatgatagggtcatcttcttctttgatcttctgttcaggtgacg

SEQ ID NO: 72861 - DNA, 533 bp, Prunus persica
  Intron number 1 from transcript ppb023038m (locus ppb02303 8m.g) derived from phytozome v7.0 (chr-ID scaffold_8; pos 6452017 to 6452549)
tatcgatatttttcgatattatcgatatttatacggtatgtgtatggatacgttctgaaatatccttgacttgaaaaaatgataatatcctcaatatttcgtcgatattatcaatattttagcccattctaaaaattttataaaaaaaaatcaaaagcaaaccctactcatatgttgctcatctaggtggtctcatatcttctctctcattctcttctggctattagacttcttgtttctctctctctctctctctctttgctacccgacagcatcaagtttctccctctctttttttggggtcaaattctccttttattgtctacatcttctattatcttgggtgcgcaacttgacaacaacatcttctcctcttcttttgtcagcaagtattattctcattctctcctttgcattatatctttaattataattataatttaaaattgagtattctaaagtttaattagggatgaattataattttgggattttgttgaaattaattagggtggtatcattttgtgaactat

SEQ ID NO: 72862 - DNA, 862 bp, Prunus persica
  Intron number 1 from transcript ppa005993m (locus ppa00599 3m.g) derived from phytozome v7.0 (chr-ID scaffold_2; pos 24821156 to 24822017)
ccgttgcttttaaatcgtcgtctgtgaaagagaaggtaagaaacattctgaaacctgatcatcgttttcctatctaaaagcttcataggtttcagcttggttcccgagaaaattcgaaagaaacgaaaattgtgatctggttacttcttgcgttgctgtttcccaatttttttattagctaccgtttctcggcaaccgaatggggatctgacatttagggtttctatagcggtagatctgactgctctgcgactttggtctttgttttctggtttcttttcctttattaatttataaatttgttgtctatttagcggtatttcaccaattggaaattcttttggttatcaattttatttttgtattcttttttcgctaaatttgaattggagatcttgttttcgtgaaatgcatagccgattttttttctttagctaaattaggtctgaacttctggttttagtgaaatgcatagctgaattgcaccttttttttttcagtaatagttgatattacttgtgatttctaggtcttagtttctggttgaatataatggtttgagattaatgctccttgtatgacaaaagacccgagctttttgtgagttttgcctatgaacgtaacttagttactttgaatgtaagcgccttgttgtttttgcttctgaagaatgtttagtgttcagtggtgttttccaaactggaatgctcgttgtttttgtaaatgtgagaatttggtgatgttggattgttagttggtacttattgcattttaaacatatttgttctatcattcttatttggacagtgtgaaatattattttgcatgtttactaatagcttattctcacttgtgccagaaa

SEQ ID NO: 72863 - DNA, 633 bp, Prunus persica
  Intron number 1 from transcript ppa009252m (locus ppa00925 2m.g) derived from phytozome v7.0 (chr-ID scaffold_3; pos 20115490 to 20116122 reverse strand)
gatacgacgacgtgtcctctatcttcctctcagaggtatgtcgttcatccgttacggttcttatttctatttcgtttcccgcatatgaaatctgtgagagagtttgtggcgctaaattttcagatctaccgctcttcgtttatagatctttctttctggaccttcgaaaattacaattgcttgaataattgttattaggttttcttttttcgtggtaattaaccttaaataaatagtttccagttcaattatgacgttatatagttctttgggtgcatattctccgtgttcttgttgttaattatttggggtgataagatatgaacatcaaatgtgggttttatactgcacaatttttgttagattttcaacgtgctatgagtcaattttctctgaaatttatagttttgctgcatttttatttaattttgtgagttactgctgtttgtagaatcgttaccgataggtattatctgtaatgcaattatgtgagaaattagttagaggattatttcccatcaattttgatattcaaaccattggaatccagaggaagcgtaaaggagacacagccaagaaattgaagaaaaggggatttgaggacttttaccacaagagaagaaatcagtcacg

SEQ ID NO: 72864 - DNA, 198 bp, Prunus persica
  Intron number 2 from transcript ppa010315m (locus ppa01031 5m.g) derived from phytozome v7.0 (chr-ID scaffold_1; pos 35025506 to 35025703 reverse strand)
aaaccagatgtatggaatatttataaaaaaaaaattcagaagattaagaaaactatatttatgcagaacttcgaattgtgaattatttccttttgctttggggattttgggaaaaagagaagaagaaagaaatgaatagtaattttgaatgctgtttgtgctgcttacttgcatgaaatgatgatgcagttaccgtta

SEQ ID NO: 72865 - DNA, 482 bp, Prunus persica
  Intron number 1 from transcript ppa011237m (locus ppa01123 7m.g) derived from phytozome v7.0 (chr-ID scaffold_4; pos 26433122 to 26433603)
ctcagagacgcaagcttgctcagtaccaacaacaggtacagttagtactatattttttcttctgttcaattatctcgtaatactctcacgttttgtgaattgcgatttttcttttttaaaatttctgttgttggtttctgtgtaaaattttggtttatgttctcgttggtcagtggtaatattgagagaaggaaaactgtggctctgatctcaaacgggcaacgggaaattaacagttgaaaatggtcaacacagtttgcgttttaaaagtttattttgtttgtttttgataggtggagaaaattagttttattaaggatgtgatttgaatacgcttttgaattttcgatgaaggataataattgggttcacatatctagatgatttttgatagcatttgttataatttcttatgttggttccatttctgttatccctcttttccagcttgaagctgtaattgaagccgaaaagcaagctgc

SEQ ID NO: 72866 - DNA, 287 bp, Prunus persica
  Intron number 2 from transcript ppa005845m (locus ppa00584 5m.g) derived from phytozome v7.0 (chr-ID scaffold_1; pos 21774144 to 21774430 reverse strand)
caagtggggttagaggtgtaactagtaacccagcggtaattacaaatgatttgctcttttattacatttctcctgtgttttttgaaccatgtttactgttctgtcatgtatggaagatgtttttcttgatctaagatcaaatgtgaaatgggtttggaagtgaaatgatcaaaatgttggaaaaattgtttctttaaatgcgtcttctgtggttttcgtgtatctgatctaactagctctttataatttatgattgcagattttccagaaagcaatatccacttcaa

SEQ ID NO: 72867 - DNA, 374 bp, Prunus persica
  Intron number 2 from transcript ppa008186m (locus ppa00818 6m.g) derived from phytozome v7.0 (chr-ID scaffold_2; pos 25543703 to 25544076)
atttgatcaaagaactcgataggattattgggcaggtgggtatgtcttagttttgtatttaagattgaaatttcggttcttttctttttctcttttcccaattgattcaggcatgtgggcaaatttggtttttgagtcaaaattcacatttgacttgaggcaacaccagtttgaactattattgcctaacaccaaccgcaatccatatggatgattttttcttatttcgccaatatgaagtgcctttctatacttgttcgaactcagatgtatacttgtatagctagttgaactactcaggaggactaattgagtttaccactggaaactgttttttgtgtgatttttataggggcgatctgtcatatcagtgg

SEQ ID NO: 72868 - DNA, 141 bp, Prunus persica
  Intron number 4 from transcript ppa019564m (locus ppa01956 4m.g) derived from phytozome v7.0 (chr-ID scaffold_6; pos 22880370 to 22880510)
catctttagccggccacccggataaggagttgagggtaagtttttatttggatattttaaccagttgtaattttaataatggaagtttttgtttttgttttttttgagtaattaacattgtgtgttcttcaatggcataga

SEQ ID NO: 72869 - DNA, 1036 bp, Prunus persica
  Intron number 2 from transcript ppa011619m (locus ppa01161 9m.g) derived from phytozome v7.0 (chr-ID scaffold_1; pos 18338208 to 18339243 reverse strand)
taaagtccttcctggagttgaaaccattgaacaaggtagctgctttttaatttttaggtaccatgccagtttgtaacatgatttatcagctcatacggtaccaagtttaagggtttgacgtatagttaaaaatatttctctagttgtatggttatcttgattataagatttcgaactggatataagggcttttgggaaacaaaatctggcattttgttaatatattcaaaagacaaactttaaagtactatggataatataatcatttgatcatataaaaacaggagtgcaagaacactggttggttcctgataatgagaacactgtctgcacacattacccaagtggtggtaattgtggtcagcactacgatcaggctatatagtgatctgatgtagtagtaggttatcaactgtcaaatgagcatattagtaatacctaaaaatgcggaagatttttcataatgggcaaactgggtttggtgcaaactttatcatatccctggcactcatattcacaactttgagttgtgacagaaatatttaagcttattttctgtgtttgaagaagagtcataagttttttgttcgttggatttttccaactatacattgactgaaggaaggacctttctattcagcatataaccttacccatatttcaacctatcttgctactctagaattttctcagcatcttacactcatcattgtcaactatagttgttggatcttcaatctatttagtgccttttatctcctaagttactcgtataagggggttgagcagaatattgagatcacaatcagtcatgaatgctaggaaaatatgttttcaatcaccctaatatgtattttcagtgctttaaaccattttaatttggtcttatggaagaaccacactaacaccctaaatgtcttaattatttttttcctgtcatcaacaagtgatttatggcttttgtaaaaatttctcaatactaatgggtgtgcagcttgcaggtgtgcaaatttacagaaagttttacacagaagaa

SEQ ID NO: 72870 - DNA, 723 bp, Prunus persica
  Intron number 2 from transcript ppa025291m (locus ppa02529 1m.g) derived from phytozome v7.0 (chr-ID scaffold_6; pos 19437444 to 19438166 reverse strand)
gagtatattacgtacaccttcatttttcaacatcaaaacgcaagttagaatcataaatgcatattttatattgcataactttattcgaactgagcaagctgatgatcctattttagaagttcaagatttgtaattttagcttttgtggatcatgacatatcaaatcatccaacattggagggaaatacaaataatgctcatgataggattgcaagtgttcaagttactgatcaatagacaaactctcgcggcacattggcattagagatgttccataattatcaagtgcaacaaggcatcattaattcttgatttattgttcacacttggatctttgtttctcttgcttcgtgtatttcatggttgtttttttcggttgaaaaagttaatcaaaatgatcattacttcttaagttatttggtttctataagtacttgactattctatcacatgtgtcatgcttactgatgtccaaagttgggattctctacttcgttttctttctaattgtattttaaacgtgcagaagtgaactagcaggagctaaagtcatgaatgaatttggaggaaaagaggcttgcaaaggaaagttgggcaaaaggaaagacaaataaggagttgaacctgaagaagaagacaaaaactattttcggttgaatatagctatggaaccctgaatagctgatatacttcgcgaggagtgcagctaaggtcacaaaggag

SEQ ID NO: 72871 - DNA, 686 bp, Prunus persica
  Intron number 1 from transcript ppa018755m (locus ppa01875 5m.g) derived from phytozome v7.0 (chr-ID scaffold_4; pos 10790347 to 10791032)
tagaaaagctcaaccaattgagctataccccactggtgaattacatgccattttataggaccaaaattataacttttcctgaatctactgtcacgagacgaaattgtcatgctaagattttcaaagtcaacgaaatcacaaaagagaacaaactatgtaaattaaacataaatacaatttcaatatatacaaggggcaaagatataacaattagctatgcaatatgattcgagggaaaaacataaacttataaagagacaaccaatcaaatacaacaaatttgtttatggagattcaagggaatgtatacttttgatcaaacctaccatagaattaataaaactttttgtgtggaattaaaactgaagaaaacttcaatagatagaggactattctgggtcagtgggatggtggtggttgacctggtactcatgacctggtacatacatggcctattttgctaaatacatagatagaacattgcattgtcttgttcttgatcatgatctttcctccaatacacatgaccaaagaacctatggctatcttcatgaactgcaagtcttgttctgctataaccaccattaatacacagccaaaccttcttctcatattcctctttgttttaaccaccttttcttggaactcagtttcattctttgctgcagctgttgatcaagtctctt

SEQ ID NO: 72872 - DNA, 816 bp, Prunus persica
  Intron number 1 from transcript ppb022709m (locus ppb02270 9m.g) derived from phytozome v7.0 (chr-ID scaffold_4; pos 19446700 to 19447515 reverse strand)
ttgatccaaaggttgcagagaaggcaaaattaatagtaagtctcactgattttgttctaaatttgaaaaacagaggtttttaatttcatttagatgtcgttcattttaataaccatcgttataaatgaaacaccacgacaatttttatttactgccgtttcaaaaatgataggacgtcagtttttttagaaaatagacgtctggattgaattaccacgaagattttgtatttctgagttagaagttttgttttaaagtttaaactatcttcattttctcacacaaattctctctttctctctctccctctctatttctctgtaattggtttgtacactatttctggaaaagaatgcatattttggttaagttattattatttttttctggatttgtattatatgacggtattttagattatcaacattagaatgcatacacaacgatggtaatctgttaccgatgtttgtaatattttaccacgtcagtattttctcgaaaccatcatcttcatttaattaccacgacagtggaggtttttcatttagggttgttttaattttttctattcaactttcatttacacacaactttttgttataggacggttttcttcccttaccgacgttataattgttacacaacaactgtagtttcttaccgacatttgaaattaaatacaacgtcagtttttttaataatccgttatcttcactgaattaccacactagtttatatttttgagttagatgttttattttatcggtagtacaatatattcactcactaacattctctctctttctctcttttagg

SEQ ID NO: 72873 - DNA, 901 bp, Prunus persica
  Intron number 1 from transcript ppa006946m (locus ppa00694 6m.g) derived from phytozome v7.0 (chr-ID scaffold_1; pos 42673176 to 42674076 reverse strand)
ctctgccatcttccctctcttatctcgttccataggtaacatcgtttaatttatctggaattctgagcacagacttactgaattacttcttcttattgttttgcatcatataattgttcttataaatcatgaaaatgggagttttaaactcatttttatttctctctgtttattccgtacactgaatttggggttggaatcttaacttcaatcgtatatacatagatatatgatgtatttatgttggcgtgttcttgttgtatgctagaatgaataaaatccttgaatagagcacgtgtgaaatactactatttttctctgttggtgttgtgagatggcttccccacgagaacattgtgagtaatcaaggctggagtctcgacagggctctatttttgccaagaccctaatttgggttttggaaagaaataccaaggagcccgagaattggcattgttttggtgccataggcctttggttgtggggagcatttcatatcatctaccgaagaagatggtactattttacatcgttttcagtttagtggtacttggacaattttacatggttttttgatgtcatttttataatgactgtaaaaaatgatttgatcctttttccttataaaagggttttataatacaaaaatattttgtaagattttggagtttctaacggtaacaatcctttggatagtttattgcggttgatgtctcacatctccccctccacttccaatcagaaaatcaaatattgctgctgtgtcattatgagttttgttttttgatatttcaaaatatttgattaattctttcgacttgaagatgcttgaatttgtttgcaccatggtaagaatatctgaggttttggagttttgtagaccttattttaaagaggaagc

SEQ ID NO: 72874 - DNA, 723 bp, Prunus persica
  Intron number 1 from transcript ppa008448m (locus ppa00844 8m.g) derived from phytozome v7.0 (chr-ID scaffold_6; pos 15327146 to 15327868)
ttctccaaaccttcctcgtcttcttcgtttctgaggttcgtgctctgagcttcgcacttttgtttttgcttttcatttcacatctcgaattttgtttccggggaatttcatttcatctgagcaatgggtttgcttgcttgacttgacttccattgaactgttctcggctatgtgatttgcaattcaaattattatcatactttgcttttctgtggttttctgtggatctgtgtgggatagtaataataatgccgcttcagtttccggaaatttgttttccattttgctgtattgctatgttctagttctggcattctctttatttctagtctgaattcatcgatttgataattctttgttctttcttagaagtatcttagtctaggaattcaaatcagggatcaatttggcttatttgaagcacggtatgtgaaactgctgagttcagtttctgttgacaagagttgattagttttttttagggtttttcttcaaatctgacaatatgtgggtgggggattttttaacagtttgtcccacagacttgtcatttaatttgttttatgttcaatatacattggtaaactagtaaaatataatctggtacagcattgtcaaagagtgctgtgccttttctggggtttacttgcacgcaaagagaatgcttcatttttttcttttcttaaataacatgattttttacacagatagaactattggtca

SEQ ID NO: 72875 - DNA, 406 bp, Prunus persica
  Intron number 2 from transcript ppa013403m (locus ppa01272 5m.g) derived from phytozome v7.0 (chr-ID scaffold_7; pos 4207827 to 4208232 reverse strand)
gttgcaattccactggtaaaagatttctatctctctataattttcagctttaattctcaattttcaatgttggctttttctttaatgggctttaattttctcatttgtttttcttggttcactgttggtaaactagtaaagttttatattttgatgttgttttttattaggacctcattttaatccattgaagaaggaccatggagctccttcagataaggagcgtcacgcaggtgatttgggtaacgttgttgcaggcccagatggtatgaaaagtattggtttctgtgtgtaatgtagtattgtacaccagatggaatggttcctcagatacatatagctcagtattttactaaatttgcactctgcaggagttgctgaggtttctcttaaggactggcaggta

SEQ ID NO: 72876 - DNA, 435 bp, Prunus persica
  Intron number 1 from transcript ppb015715m (locus ppb01571 5m.g) derived from phytozome v7.0 (chr-ID scaffold_6; pos 11372252 to 11372686)
aacagtaagagcccaattcaatgataataaacactttgtccaaagccaatttcaaacgaaaaaataaactccaataaatatatatatctttcacctatgtaattagtaaacaatcaaataataataacccgcataatcttcatacaattaaatacataatcttcatactaccaaaaaaagagatatataatctccacaaaagtctttatccatgactgcactttgttttgtgatgaatgtgaagacaaaagatagaagaagaagatagatagatagatagatagatagatagatagaatgacttacatagcacaatgcgttgttactgcttctaggaggttgtgtctacaacgctaacatgaaaaagaagttggagcgtcttggaacttcttggcatgagttttgtttttttagggtttcgagtgttttggaatt

SEQ ID NO: 72877 - DNA, 817 bp, Prunus persica
  Intron number 1 from transcript ppa001002m (locus ppa00100 2m.g) derived from phytozome v7.0 (chr-ID scaffold_8; pos 356234 to 357050)
ttgtaagtcaaccaatctccttttggattcgattcgttggaatttgatctcttcgattccacttgctctgtttccaatcagcgatctttaaatctacgctttgggtttggaccttaatcgatgtttcttatttgatttgggtttttgtgaacaccctgtttgtttgtgtcgagaactgagggctaaggcaaacatagctcacaaaagacaagatattgaatctgaaatccaaactcttaatgagtttgatttgatttgggctataaatgaggaaaatgatcaccagacacaataatggtttaaacgccttgggcagttcttggcgatctgcaatggtccaccttactgtgccaccctgaattaactgaaaaaagttacattcaacagttttcactgctgctatagctgtactttccttgtaaataggaaataaaggatctatttcttgacttgttctcttgctgtgcatatagtgtgcttttttgtgcgtgtctggatatgtgcatttgttggtgcattctgcgtgtctgtctgtctatatatgtttttatccatggaatcactcttaccttgtagcttcaggaattctagagttcagtggctatctattctcataatctatgatgaacagcttgaagatgaatttatatttgcaaaacatgaaatatatatggcatcatttcttatgtttgggattactcttgtacttatccatactggcctcactgtccggagatcctgatatatgccttcttttttttcctgatggttgttattgtcagggtgctggtaaatcagctgttttgaacagtttaat

SEQ ID NO: 72878 - DNA, 257 bp, Prunus persica
  Intron number 1 from transcript ppa004372m (locus ppa00437 2m.g) derived from phytozome v7.0 (chr-ID scaffold_1; pos 33752416 to 33752672)
gaagagtgcattttcccaactcccttctgtgccaggtacatatttctcagtctttgccttaatttgcatgtcatgttcttcttctttgagattttctcttgatcagtgatcatgagatttctgcttttatctttgtcgttattagtttttgggaatttaagaaagaagatgcaatgattattgtgtaattaacttgggaatttgtttggggtgtgtgtgcagtggtaccagggctgccggtggtggggaatttgctg

SEQ ID NO: 72879 - DNA, 950 bp, Prunus persica
  Intron number 2 from transcript ppa004372m (locus ppa00437 2m.g) derived from phytozome v7.0 (chr-ID scaffold_1; pos 33752788 to 33753737)
ttgccaaagaggtacctttcttcttctcatttctgctgatctcaggggaatctgcaactcaggctttacatataacttgtcccatttttatctcaccaatctctatgtaccatgtcacatattcgaagggtactttcgttatttgaggaaaaaaaatctaatatctattcataagtttactattgaccaatcaccatagatgttgtttataccaacttaccaagtgagttcagtgtgtaccatctcataagatgaaaaatagagcgggctttgtgtctaaaacttcagagttgggtaaaatttggttgcttgttaggccttttttttagctagactagcttcattggtgctgaagtttggtagcaaacaggggactgtgaagtgaactcaagctgaaacgtttgatatttaagttaaagaagaggcaggtttttcacgctttgatctttctgaaaatttttatgtggacaagtaattaattactttcttgcaagaacagctgtgttctgtgtcacaatgtgtcattcgcaatctcatgtagaattaaggctccatagctgaagttgcagtttatgagaatcatacttattgtatagcattgtcaattatgagatacaaaagccccctgtgttttctttaatgccgtgaaagatccattgggttgagttttctactgattaaatggctttaatattctccattggcatcattatagattttgatgagaaacagcagtgtcctggatgccctatggcaatgatcaagtgtcctaacaatgaagttctgtttcttaaatatccaatatgttcatgcttaatacgtacataatacagggctggttttatcttgtacacgaatgcttctatgttattattttccttttggtatgaagtcaatggttgtatgtattggtcaccactttctgctctaatggttggttgtttcaggcc

SEQ ID NO: 72880 - DNA, 636 bp, Prunus persica
  Intron number 2 from transcript ppa012072m (locus ppa01207 2m.g) derived from phytozome v7.0 (chr-ID scaffold_6; pos 4982356 to 4982991)
gattttactttccctgccagccaaataaggaagtggtagcttttctttctgtttattccttgttctgatatttctcaaagtatttgagctgttttacttctggggttacattaatgaaagaatatataattttaaggttcagtgtggattattagaatttcattatagttttatgtccatctccggcataagcatatattgtcttttgcagtacttcgcttcttgaactttttttgttgaattgccaaagggaaaaattattttgtgacctagcgaaggtgcagtatctaaaaagttgaagaaattttggatttattagtattgcaatattgtctggattgtgatagatgattttttggagaatcagtttgtagcgcccaaccgtaagctactactttgaagggctaattttacataattagctttcataaagttacccttttcggaagcctttagtttgttgatgcaaaggcattaatgactcaacatagatgccctaaggcgtcatttaagataactctgtgcattgaaccagagatgattgcaattgcctgctatagttattcattagttacgttaatccaccttcttcaaatttgacttgcttcatgtggacggctgtgctcatgctgcagt

SEQ ID NO: 72881 - DNA, 775 bp, Prunus persica
  Intron number 2 from transcript ppa015635m (locus ppa01563 5m.g) derived from phytozome v7.0 (chr-ID scaffold_7; pos 16048201 to 16048975 reverse strand)
tggcgttgaagttttaccagctctccccagcacaggtgagttgtctcaaaaataattcaaaaattatacttttttttttttttaatacaagcaatagtctaacctacaaggagaatgtggtttattaaacacattactaaggtattatggggattcgaatctgagatcacatttctaccttttttttttttttggtgagaaattctatgattgcattcataatttagccaaaaaagtcactagccacaaaatactaatacaaactaggcacaaaatggtcattacaataacagagcggtctaacatcaaaattaagacaatctagtgcacctctactaacgatcacgcaagatcgaagaaactctggcataggcatcctaactaaaattacaaaaagagataaagcttgaaaaaaccaattcataaaaatacaaataaaactctcacaattgagatgaaaaactctcacaaaagaggagaggtaaaaactacacagatccaatgtcgagacgcagtagtctgtgatggttggacgaaaatcataacaaaacgaagacaaataggaaaaatcatctgtctttgaaaatggagaaagaggtgaagggtggaggaagaataatgggcctaagtaggccatgggcagatttctttccacgttgctgctactttaatttctttttccctttttttttttctcttgttgtttttgacattttgtttggtgacatattaatggacaggataaaacgctagtgtcctctttgataagattttc

SEQ ID NO: 72882 - DNA, 637 bp, Prunus persica
  Intron number 1 from transcript ppa009378m (locus ppa00937 8m.g) derived from phytozome v7.0 (chr-ID scaffold_4; pos 1795707 to 1796343 reverse strand)
ttggatttattggaccgctcgattgctccgattcggtgagtttcttctctgtatccaacacgtttttcattttagaaaacagacgttgctttgattaagttttgattgattgccttacatttgtacttactggtagctgaaattcatctttcctctgcgtctgatcaattttgggttttctggtttactcgtaataatcctgaatagtggaacaaattgtgatgtcttgatttcaatatctgatctttattgcaatttcctcaaaaaccaattgcaaaggtgaaaactttggagtgaaagttttgacaacatcaggcaatatcctaaatttaagaactttgaaacatcttacaaagttaggttcaccttttaaaaagaccacattgcaagaagatatcaaataagcgtgtgaccttttagtgctcacagaatgcaatatgaaaattgcagatgccctttagagttgttgcttctgtaaatgtttacttggtgatggcatatgcttgaataatgaatcagttgggatatggatggctgtttagtaccctccatattgaacttaacatgtagaatctgaagatcatgtaatattctttcggcagattccaaccttgggctccatctcactgctgaataa

SEQ ID NO: 72883 - DNA, 819 bp, Prunus persica
  Intron number 2 from transcript ppa013036m (locus ppa01303 6m.g) derived from phytozome v7.0 (chr-ID scaffold_1; pos 34334171 to 34334989)
ccccgacgttcgattgtaggtacttcttctttttttctgttaagttaattttgtttttaatttccaatttttggggaagattttacgatgagataagctgagccatcagtatctgttagggttaggcttagccaagattttacttattttcctgctgcagagaagggcttgccttttgatttgtttagtttatatcaattcttcttcaaccatttttcggagcgagcgtatacctagagcttgaaatttctcactatttgttggttaagttagtgctgtggcagtgaaatagaaaattgaatatgcttttgtttattgattgttcaagtacacgaaacttgctaatcaaggtttgactagtctgggtaaagttgtatgggcttgtgaagggcaggcatttaggcgtaggcagagtctgttatgcgtatggtagtacttgctctttttttaaaattattatctgggatcttttccttctttcattttggatatctatcttctcttttgctttctggctttcattcccattagctgtttcagatttgtgctaaatggatgttaagaagaagttactgttttctgtttgatgcttaaaattttaagccttttgacttagattacaatcattgatgtagaggagcttttggtgtaactttcttttgagccgacagtggcaaaatgctactaaatttatttatatttttgaaatatgaattggatgtatttttctgcatataagtatgttgaattgatttttttatttatttaaaaactctattcgcagaattaggctggtcgctgttgccacgcaaaagtttg

SEQ ID NO: 72884 - DNA, 761 bp, Prunus persica
  Intron number 2 from transcript ppa012246m (locus ppa01224 6m.g) derived from phytozome v7.0 (chr-ID scaffold_2; pos 21232775 to 21233535 reverse strand)
gggtacctgatttcttctctttctacaatctcattgttttactttgtctaaatttagtggttcagatctggtttatggctatttctacaatctcaatgaggggtttcatgataaatttcaaatctttaaagcatttgaatttgggttcatatttttgcaacgaaattgctatgtaatatttgttcttttatataaaaattatcttcttggttgcctagaaagcatctgaaaaaataaaaggattgaattttaggtttaaaagagatgcatcttagtttcagtagggctctgttaggtttctaacgagtcttaagcttagacatggcttaaggggatgatgatattagttcatgcttatttatagggtctgaattagctaaacttaatcaatgtgtttcaagccccattcttataactgatgttaaagcaacattgtattacttctggcttctaggtagccccattcttataactgatggtaagcgggtatcaatgtcaaattgtgcccaagaggcatgtattagttgactgacaaaacaggcatgggaacttgaagtttgactgtttttttcaaatacaagaaagctgaagcatgtcttgttactctgtgcaactggctttacattgttcatttcagtgatgcttctgtgattttattgaatttaacagttgccaaatattactcatgcctagagattggttttgagtgaaattattttgaaatgaagagattgtggttattttgcaggaagacacgtggt

SEQ ID NO: 72885 - DNA, 652 bp, Prunus persica
  Intron number 1 from transcript ppa015392m (locus ppa01539 2m.g) derived from phytozome v7.0 (chr-ID scaffold_5; pos 13141257 to 13141908 reverse strand)
agaaagccgatctcaaccagcactgcaagatcgaggtattgttatatgctgttagccatgtaatctttttttcttttttattcctctttttgttccaatcatatggttttcttccaacccttttgttatatgttatcaatcttgcattcatttctccaaattaatataatatttcttcaatttaagttattgttcttcctaatttgaaatataatatatatgcatatatattatcctatgcagacatccatatgttattattgagcggatgccatgcattttgcattacccctctttgctttcttgttcacaatagcatccacgggataataatatacagacatccgaacacggtgattcaagaaagtactaaaatttcaataattcaatttggtgttcaaatgatatcggattcagtagaaatgatttttgaatgcatatctacaaaataaacaatttgaattagtaaaatacaatatacagtaggctctacaagggtgttcttcaaataatttgagagatggattcctcaatgaaaactacatatatatatatattgatcaatttcaatatacaactagtgtttttgcttctttttcagaaattaatatctttattcttgtattctaaccaatgctttcctcattaggga

SEQ ID NO: 72886 - DNA, 1011 bp, Prunus persica
  Intron number 1 from transcript ppa001975m (locus ppa00197 5m.g) derived from phytozome v7.0 (chr-ID scaffold_1; pos 36325375 to 36326385 reverse strand)
aacacactcgtctgccacgcccaatttctcaatatgtgagttccaattttttgctagttttgatgtttttttcttcagggtttttgctttgcttttttcccaattggaaaatacaaggtttttttatttttttattttattttaaaagtaagggcgttgtttgttgtttacctttctgggtttgactagtttgctataattgggttgcttttgctttttgggtcgttggaggaacttgattgcttagcattttgagtgttactgagttattctggttaaatcagtgcaatttatctttccttatttgattgattttgggtgggaaatgcatttgagcccccttttccttgttttatgaaatcaggaacctgcagttgccattgctgactttagtagttttatgattgaggtggagagcctgtccggaattgcagtctttgtcctctaaatttaatgtgaatctcccaaaatagaatcattgacacagtgcaatttatatgtcgttgatgaatggacaattcgtataaatagtatttttttcacggtctgcaacttgtttttttttgtactttttggcactatggaaacattcttgctatcaatagcaatcatgttacaaatgaaggactgccgtgaagtaaattgacaaaattaagcttttgtacaagcatatctgagtgtctgagaacactttcttcctcttttcctggagatacatggttgttttatcttcctccctgtgatataaaaattcgcctcaatcttcaaatgttccaaagctcaacttaatttgtagctttgatggcttgaattcctcaatatactattgcagaacatgagttattatgcgtggatctatctgttataatggctgcaatcattcaattatgtacaattgctgcctctagaatagaagggcagcttgtactcatccttttgatgttgtactgaggtttgatttacataattcctgcaggttctttcctgagaaggctacaactttagcgactg

SEQ ID NO: 72887 - DNA, 855 bp, Prunus persica
  Intron number 4 from transcript ppa009623m (locus ppa00962 3m.g) derived from phytozome v7.0 (chr-ID scaffold_3; pos 12627641 to 12628495 reverse strand)
gccgtccaagtgtgagttattctcctccttatctagactttgtccctcattttattttctatccggatttgttgttctgcttatatttggcactgatcctcagttaaaatcctgatattggttgtatagtctagaaatgagttaaagaattggaattagatgaaatcatgaaggaagcattgttatctagactttttccctcattttattttctatcctgatttgttgtgctggttttatttggcactgatcctcagttaaaatcctgatattggttgtaaagtctagaaatgagtcaaagaattggaactagatgaaatcatgaaggaagcattgttaaaagatttattttttgttattatatctggcttcaattcactatcccatcaaaacattctgaggtccaacaaagaagtggatatatcaaagcttttaatttgttctttatatttatttgcacattttacacttttttaaagaggcattgtctccgtggttgtccattagcagtttgatgtatagaactggctttcggactcgaaccttctgcaaaaagccagtttaggttttatcttcctctgttgtttgaccttggtgtgtattttgaaatagtttatttatgtttaactcccgacatgagcggtccattaagaattgttgaatttgggtatgtccgggtccctaagttatatgtaatccattaggcctagccgcagaattatttgatgtatactgttgctcatcttgatactattcaatagacacattactttggtggtcaatttcattgagggaaagatgtttgctgtttttgtcacagggttctgctgaagtggtttatactagacgaagtga

SEQ ID NO: 72888 - DNA, 737 bp, Prunus persica
  Intron number 1 from transcript ppa000475m (locus ppa00047 5m.g) derived from phytozome v7.0 (chr-ID scaffold_1; pos 3514142 to 3514878)
tgcagcagctctttcattccctctccgccgctcctgtactctctctctctctctctctctctctctctctgtatttatgttgtatatggtcttgggtggttgaaatttctctaaaaggaaaatcctttgaagcctgagagaacgtgctttattcacttgtgcggaatgtgtgttatttatatatgtatgagaattaaatttccatggaataatagttctaaaattttcttttagaagtattttgtataaaaaaaaaaaatcaaaacttcattaaaagcaagataacccagaagcaaagaaatatgaaaccctccgtaactgtattgttttgtttggtgatgccacagtaaaccaaagttattactcaacaatgtagttcgttttaatgtattttcaaacatcgttatgataaatttggtataaattccaaatgttgtctgatgacgatttccttttgttttatttaaacaaaatggaaacagaagaataagtcaaggtctgattaattacttgtttaaagagtgtgccgtactcactggcaaagtaggtagtactttgtttgtgtgtattatttcttattcaagattcagattttagtactgttggttatgcaacctttattttcatttttacatttgattcttgcaatttaccattgtgatttaactaatgctattgaggattctttttgtacattactagtggacagtttcgaaggattcgttgtttcaaagatc

SEQ ID NO: 72889 - DNA, 867 bp, Prunus persica
  Intron number 1 from transcript ppa007906m (locus ppa00790 6m.g) derived from phytozome v7.0 (chr-ID scaffold_6; pos 28475007 to 28475873 reverse strand)
ctctccctgaacacattctcatcgatctcttcctggtactctctctctctctctctctctctctctctctctctctctctgtgtcttcctctattttctaattcagctaacatgaattgctatgcttgttcttaatttctttgaggcgccagatgggttgctttctgttatggggaaccggccaggcttgatttggtgcgataataaattttgagacttttcatgttaaccaatggtggttgggtgtatgttattcaaagttacttgattgctttggttcgcttgattgtttgattagggttttttgtgctcagatcagaggaggaagggtctgattctttatagggatttctacctttttgggtttctattgtttgaatctgatgattttgtcaatgcatatattggatctgtttgtcgtctgggtccacgtggtcactcgtgaacctatgtgaactgcttgtacattaatgatcaagatttctgtaatacgctgcaagatattgtaaaaaattgttcccattgattgattactgatggataaagtttatttagcacagtgaaaaagacatcccctaccccggaccccaacttgatcaaacactgctccatttcaaatcaaaagaaaacagaatattattctttcgtagtctggtgctgtggtcgtttttaacttctggcttctatgctgctatatggcttttgggacatttgttgacttttgctgctataccttcatcattttgcctttctaagcgttctatttaccccttttactttcctctataattacgtatttggtatacatgaacgtcttacagtaacactcaatttcatggcagaaaactctgagagctggaaagctaa

SEQ ID NO: 72890 - DNA, 764 bp, Prunus persica
  Intron number 1 from transcript ppa002473m (locus ppa00247 3m.g) derived from phytozome v7.0 (chr-ID scaffold_3; pos 21969187 to 21969950 reverse strand)
ttgagttcttcgctgcccagattcttaaacgaaaggtatcttcctcgtcctcttctctcatgatgtttattagttagcttgctacagtttatcatttgcttcattcggagtcgataaataaggaaaggaactgcaacttagtggtgtatcgagacttatttcaccgcatctccgcggccacttgggcgtgttactttgcggcattctctgtcattcacggacaaatcaactgattaaacataaaatttatttttcatctttgttcaaatatttttttttgatgtttttatcttttgctgtagaggcattcagcatgtttcaggagttaatgaaaatacattctcatttttatgaaaattgatggacaatttacctggataatcgtttcagtgtgtaaaagctggagcgggaaacagtggtggttaatttattttatgtttttggtacttcttgttaacgttgatatatctgttggatgactctacaaagtgttctagggaagaaggtatcagaagaactgcctgcttgtaaaatatcagtacgtttaggctctgtctacccgccgcaaccatctttctttatcagggcttttgacacctgtgtgaaacctaagacactaatgtgctttgcttgaatcttgtgctataagcatcaattgaaacttgaaagtcatgtatttgtttggattattgaatgcctatttttcaaaagtgctgctatatacaaccatattgcttatcgtaatgtcacattacagatccaaa

SEQ ID NO: 72891 - DNA, 567 bp, Prunus persica
  Intron number 1 from transcript ppa002070m (locus ppa00207 0m.g) derived from phytozome v7.0 (chr-ID scaffold_6; pos 3293191 to 3293757)
tagatacgagagacggtatccgattgatctttcaggtacaagcatatgcattgttgtcgaattcaattgcgttctgtgcctttttctgtttataatcctaataaatgtaggagaagagcttaaagaaattgaaactaatgcttgtcgtgaaccaaaagcatttagtgtttattatttgtattatttttgtattcatttgtcattttcaatttcagttaagtccttatgacctcatgctaattatcaaggtgcttgtttatcggtgtgttgagttcatcacttttatgcatttattgttttgatttttgacccatgatcatttttaactcttctttagatcattgtctttgcattagatagagagatttgccctaaaaataaataaatttgaaatagagagcgagcaatcatggttttgtgttatggtttcataggtgatgcaaactcatgtcatgatcatgtatgagaacatgtttcctatttgatttggcttggaactgtgactaatagtttaataatcttttaatggtgctaggtaaaaccaaaccaggaattccaagggctagt

SEQ ID NO: 72892 - DNA, 458 bp, Prunus persica
  Intron number 1 from transcript ppa014658m (locus ppa01465 8m.g) derived from phytozome v7.0 (chr-ID scaffold_4; pos 22654098 to 22654555)
gcagccaatccacttcctcctatacgcctggttctgtaagcaaaacccatcatatatcttttcctttcaatttctgtaaacatatataccaaatgttatgctcaaatatatattaattgttaaacattgttcccttaaaaaaaacaatttattgcaaaattggaatatacaagaggtaactctgcacaaatattaatgacaagatgaggtggctaaaagcactgttaatgtctatcagcgcgcaatgagcacgaataactgtgattattaagtagtaggagctgatagttgtttttgttaccacatcctatgccacaaatattaattattaccaattattcttctagtaatgcttgtttttttgttgatggcaacattgggaggagggaatcaaatacaagtttgatcatatgattaatttaattttgttggtgtaaacgtgcagccaatatacgggt

SEQ ID NO: 72893 - DNA, 626 bp, Prunus persica
  Intron number 1 from transcript ppa012557m (locus ppa01255 7m.g) derived from phytozome v7.0 (chr-ID scaffold_2; pos 12944346 to 12944971 reverse strand)
ggacaggtgctggacagactacaaggtaccacttcaaagctttcatcgattttgatgtaaaaacaaaagaaagaaacaagctttaacagataaatgtttgtaattctttcgatcccaatagtgtttgaatctttcgttttgtagatcataaagaacccactaatttttctactgggctttcgctttctttctttctttttcttccttttcttaatttttcattttagtttggatgggtttgtgttgctcttccatccttccgcacttgtgggatctgcaaatgatgttgaatcacagagtcatgcattagcttttatgggttctaaggccaactcactgccaacattaacgcaaacctactggtcctctgttttgagtgatgggttcctcagatgcggttgaaagttttctttttgacatcaaatttatgcccatgttttcatatcttttttgttgtactgaattttagatgtgatggtcaagatgatacctttggccatccatcaaagaaatttgtagatattcatcctaacagacagtctggcatgtttcattactggacatgaatcagaacccttaattatgttttcattgtatctgattgttttccaccttgcaggtaagca

SEQ ID NO: 72894 - DNA, 594 bp, Prunus persica
  Intron number 3 from transcript ppb015954m (locus ppb01595 4m.g) derived from phytozome v7.0 (chr-ID scaffold_7; pos 6634033 to 6634626 reverse strand)
gatccttccttggggtttgagaataaggtaagaagaaattaccttcatacatttcacgtcgttttttgtattatcaacgacggtcatgtaaaattaacgtcgttgaatggatatactacgtcggttatgaaaaatatcgtcgtctgtgattgaatttctttttatttataaaccctaatagtcattgtttatgcagtatgccaagggaaaccaggaagcttgatacctcgaagaagccattgatgaagtctggaatgaatgggcagagtttgttttccaaattattaaacagggcaattattgaacacttgatatttatgtataatgtacaaattttctctataatatgtaatgtaaaaatttgttgaggttttcttaaattaaaaaaaaaacaaacatacaaattgcttaaccgacgtgtaatacttttccaacgacctaataaagtcaaaaaccgtcgtattttgttgtttcgtgttttaaacaaatacgacgtaaaaatatagttagacgacgttctttgaacaattgagtcgtttatggtttacaacatcttcaatttcttaagggttcagggtatcatcgacgacgttt

SEQ ID NO: 72895 - DNA, 260 bp, Prunus persica
  Intron number 2 from transcript ppa002658m (locus ppa00265 8m.g) derived from phytozome v7.0 (chr-ID scaffold_8; pos 17198331 to 17198590)
agcttggaatctcaattgaagtcacagagcaagtaatttgattccttactttccttttaactttttcttgtgttgcttgctttagccatcttcaaattttgtaccttttcaagatactcaaatggaagatttgtttaccattcaccagctttacataagtttttgagtacgtactttgctcttgagtttttctggtcatagtattttgcccattaatcactgatgtggctgtaaacttggtcaattgtcaggttgagcta

SEQ ID NO: 72896 - DNA, 776 bp, Prunus persica
  Intron number 2 from transcript ppa005525m (locus ppa00552 5m.g) derived from phytozome v7.0 (chr-ID scaffold_5; pos 18291166 to 18291941)
tgcgaggactacttcgataatgtcagctactttctacagtctgttttccgcattgattgttaagtttctatttcaaatatatttgtggtcgtagaaagatgcatatcttataccattttgttcataggcttggttgatgatcagtgcagaactgtaaattatgatataaatttgaagacaagttgaccttttatcatatcatttgaattcttttatattttctaatgattttcttttgagggttattagaagtcaataattgcatgtctgaataagttagaattgccacttgtttttaactggtaacggattcagttaagactcatagaactaagtattaggtggttcagaatgaggcaaaagaactgcaaagctgatattttgtggaaacttgtactctgaaagttgcatctcataacgcaaaagaactacataaattttattcttgtatcttttgggttgattgaaatagcatgtcttcattgtattcatactaattaccctatgcttgcaactcctctctttgtgtgcttttatactttgtgtacataatgtttcagagctattgtttcatacaacttccaccaagaatcttcttcatgttcttcttacagagtgtggtaacgtcattttgcagcccctttccaaaaaatccacatcttttgttttgtttgtctatggccatgtgcttgttatatgaatctgagtttctcaaagcattttttacacatatatatctcagcattagcttttcatgtcccagatcatattttcca

SEQ ID NO: 72897 - DNA, 629 bp, Prunus persica
  Intron number 1 from transcript ppa013152m (locus ppa01315 2m.g) derived from phytozome v7.0 (chr-ID scaffold_4; pos 3800702 to 3801330 reverse strand)
tcctccccgagggcacccacagaagcgtcaactgggtaatatcttcttcttccttctacttcatctgtatttcctttttcctcaccacatgttcatcacagtttaatgccttttgactatatggtagctcaataaatggaaaaggaaaactaaagcaagaagtaggattttgtgtgtggttattttgtttaatgggttgtgttgttgtgcattcaataatgtggagaactcacttctgcttagccaagaagttgtgttaggctcagttgggtggtgggggtttgttttgttagtttaaaagtgagaaattgaacattgagagttccgtttctttcagtttattttagtttcattaggttattatgacctctctggctggttgctgagaaatttggcttatataaaagaaagaagaaacagaggtgactaggaggggaataaatttgttagggttatgatttatgttgttctaaatgtttagtcctcacgtgaggctaaactccatgaagggtttttgagtctagtgtgttttcatggtgcgatattgagggctgaatatgttgttttgcttcattttctccctaagaggtcgatgataattgaaagaagttcttgaaaaatttaggcag

SEQ ID NO: 72898 - DNA, 510 bp, Prunus persica
  Intron number 1 from transcript ppa000711m (locus ppa00071 1m.g) derived from phytozome v7.0 (chr-ID scaffold_8; pos 21378419 to 21378928)
caacgccaaacactcgaaagagttgccggtgctaggtaccagctcttccttgtttcatattcaaaatccaatactcttccttgtttcatattcaaaatccaatactctgcatgagtttataattcaatcttcactggtgtagttttgagttgaacttgatttgtttttgcctgacgattgtaagtctcattttaacgaatcttcattggaatttttctttctttgtccgatacaagtttggtttttctaatgaatatgaaaatctgtaaaattggtaattttgttgtgttgtttgcagtttcttaatataagaagttagttgattgcagtgtgagccgagaaaccttactagtcaagctagaactttcttatattgacatgataggaatctgttgttagactaacctcgccctctctctctcttagacttatacttttggagtgccgccgagataatgattttgtaggttgactaatgatttactgtcaaattgggtgcttttagaacgg

SEQ ID NO: 72899 - DNA, 348 bp, Prunus persica
  Intron number 1 from transcript ppa010675m (locus ppa01067 5m.g) derived from phytozome v7.0 (chr-ID scaffold_6; pos 15610493 to 15610840 reverse strand)
ccttctcttcccgcctcttatccaaatctagaccggtcagtcaatcgatcccatttctcattcatcttcttttgtttttagtttctgagaaaatgtttgagaaaaattaggcatttcagattacgatttgttttttaattttctgaacgttcacggcggctaaattgcataatttgtgctagtttaatctgatttgggtgattagaaattgtttttcacttggttttatttatttttgatccgagtgatgatggatatgtgaaaagcttttgggctttggataaatgaaggcttggaattgacgaacgtttgtattaattttgcttgcaatgtttcagctgtgtggca

SEQ ID NO: 72900 - DNA, 468 bp, Prunus persica
  Intron number 1 from transcript ppa018403m (locus ppa01840 3m.g) derived from phytozome v7.0 (chr-ID scaffold_7; pos 21615606 to 21616073 reverse strand)
cttgcattcctagagtctaagcttcaggtaaataatcaaaactagaactctattttgagcaatttataatatcaaattttgttcaccaaacaatatttctttcattaaaatatgagcccgatctgcattttgtcaccaagtgctccaaaattttatcataccacattaccactgcatgcatgccgctatgtacatatatattgcgttttttgcagttaatttattagtggtcacttttatcgaatgtgcacgtatagcaatatataaataaatacgcgtattataatatgagtaaacgagtcatgtcattacgtagtgctatacctaactatcatgtttatttcattagtcacaatttgatattagtgtgtttatcattcttcttctttttttttttcttttttttttttggtttgtaatctaatacgactaattttgttttacttgtttgctatatgcagaagatag

SEQ ID NO: 72901 - DNA, 579 bp, Prunus persica
  Intron number 1 from transcript ppa000122m (locus ppa00012 2m.g) derived from phytozome v7.0 (chr-ID scaffold_6; pos 18245339 to 18245917)
ggcagcaaattcttcagcaaattcttacccagcaggtataatgtgcttaaatctggttgtgtagttgttttgcaagttgggttttatgttcttttggatttgattagcaatcttcttcactccagtttttgttgacattcttgattagcaaccttgtctgtttgtttaaaggctcattgcatctcttggagtgaacttttttactttaattttttattgtgtttactggaatgccaggtgaatgggccagctttgttaaactacgcttgatttttatttttattttgcttccgtatatattatgctttaagcactttatcgacgtgatacattgtatgatttgaggaaaaaaatgctaaagcagtattgagacctgaatcatttgataatatgcttttctttctgccttgtaggctatttatttattgttcaagcacttattaattatttaagctcaaaactaggagcgtcatttttggtagatatgcaatataggcatttcagattttcctttttgtcttctttttaactagaatttgcacaggtcctggtgttaattggagaaactggttcaggaaa

SEQ ID NO: 72902 - DNA, 472 bp, Prunus persica
  Intron number 2 from transcript ppa008339m (locus ppa00833 9m.g) derived from phytozome v7.0 (chr-ID scaffold_6; pos 109016 to 109487 reverse strand)
gatatcccatttcctgattggtccttctggggttggtaagaatcatcagtctttgattatcgtcttctacatttattattgttgtctttttaaatttacagttcttttatgtgggtaattatgcttgtttttttagcaaaaaagatatgcttgttttatacgcattgccagtgactcaatgggaaagaacctacatttatgatttgtttgtgtatgcttgaattgctataagaaattgtaaattagtgtatgcttgcatcaattttacgctgtccccattttaggtggatcaatcaccgctgtcataaatggaattttccaggattgacatagtttgctaaacttgtactaagtagcatgaaaatgttgcatttatgtgggcttcaaatgcctggttatggttttatttgtgctgattgtctttatagtctatgattactgcacaggccggagctacatatttatccctgga

SEQ ID NO: 72903 - DNA, 504 bp, Prunus persica
  Intron number 2 from transcript ppa008860m (locus ppa00886 0m.g) derived from phytozome v7.0 (chr-ID scaffold_4; pos 11000653 to 11001156 reverse strand)
gttttggttacttgttctcgtcgaattagctacaggtcaaaatcgagttccattttttccctgcttctagctcgttgttcaatttattcaaaactagaatgattcgttcatactcatcgtgcaacttggtgagaattggggaggtcagagaggtagaggtgtgcggaggtcacaggtttggttgagagaggaaagatgagagtaaaataccaaatttattgaaagtggaacaaaagaagaaagggggtagtgtataatggatatgctatctttctatccattatcaaatttggttcaaaagggttggagtgtactggacagttcatgaacttccaacaacaaagaggggttctacaataaccttatagattttccctgtgatgaatgattatgctaataattttggcttatatttgtatgtatgtctgtatccatatgtgtatatatagatatgtttgtatatgcttgtatgaatgattatatatgtgtaggtatcggcatttg

SEQ ID NO: 72904 - DNA, 672 bp, Prunus persica
  Intron number 3 from transcript ppa012417m (locus ppa01241 7m.g) derived from phytozome v7.0 (chr-ID scaffold_5; pos 15596740 to 15597411 reverse strand)
ttgtttgagctcacctttgccaaagccattgagtggtaattcttaaacgtagctcctttattcgtggtttatttcacttatttataatctgggtctgcattgaatgtgctcttcacgttacttaagatttgagacctctgaaaaggtagattgattgtataagattctgtagttaaattttggtctaaacttttcttttcgctgtatttccattcttgaactctctttgaaaaaataaacatatacacagctgatgtgcatttctttttgtggttacgttggacgaaagaaaccccattggggttcgatcctgggttccattggggggggggggggggggggggggggggggaaatcccccccccactgtggtgggaaattatcatgaaaagtcttttaaattgtataatgaacctgttgttttttcataataatctcttccacacgtttactgtttagaacagaaaaaaatcgtattggtgcatcaatggaagatgtataaaactgatctttgtcagggctgtaaagtcttgcattagattctcataaatcccaggctgttataatccgtaaatgatgtaccatgctgcctttgagttgagtttgtgtccgtaatgttctaaatcttttctgacaggattccgatctggtcatacgcaaagctaattctta

SEQ ID NO: 72905 - DNA, 860 bp, Prunus persica
  Intron number 1 from transcript ppa009123m (locus ppa00912 3m.g) derived from phytozome v7.0 (chr-ID scaffold_2; pos 3760752 to 3761611)
aagaaggaaaagcgcatagactctcctcttgtacggtcagtgctcacacctcctcttttccaattttgcttttacacacacacacacacacacacacacacatatattattatttgtaactgggtactacatatttgtacttataagaacacaaataaatttttttagactagggactttcagtttaatgtaatattatcatttaaattgcattctgtagaacccttttcgtaaattttgttttcaatttatgttttcgaaacataaattgattatttttagtatttaaaattgggacacctaatgtgcatttgtttaaaatacataatttcattttttaagtagtagttttctagttaaaagaaaagttaagcagtgtttattactgttggttctgtcagagtcttgaatgtttaattggtttcatgttagaaaatcatgctctcaaattttgatcctgttaaaactttgagctaatcaagcacaaagtatgaatttggtttagcagtcccttttaactgtttacaaatgcattattctgttctagctagtaaaatataatttgttaagtagtatctaattccttaaccataatttgaaatgaacctcacgagaactcgttgggaatcagctaagaagatgcggattatggaatgtcaaacaatcttacttttatctttcctgattgtatctaggaatttgttatgtatactatctttcctttaccttttatttgattttttcacttgttactacttccgatatcttgttttctactgatgaagttgatttgtatatttaaattgccaagacagagtttctgactgcttcatccctttcgtgcgatacatacaggtata

SEQ ID NO: 72906 - DNA, 311 bp, Prunus persica
  Intron number 1 from transcript ppa005051m (locus ppa00505 1m.g) derived from phytozome v7.0 (chr-ID scaffold_4; pos 27347908 to 27348218)
gcgtctcccccaccgccatccgcgaaatcgtcttgttcttcttaatttccgtgttgtttttgaattctagacgttaatattcgaaatttaagcagggaaatttgattagaaaaaaaaattgcctttttggggcatcaaagtttctttccgtttctattttgttctggctccccttaagccaagcacccactttttttatttttgtttaattctcttaattttgaatttttccattaacgaaaatttcgaaagtattaacaaaaatgagatattttggatggttcagttgctgcgagaaatatcgcacgaga

SEQ ID NO: 72907 - DNA, 377 bp, Prunus persica
  Intron number 1 from transcript ppa013488m (locus ppa01348 8m.g) derived from phytozome v7.0 (chr-ID scaffold_10; pos 245780 to 246156 reverse strand)
aattggatcacaaactgggacagccgcagaattatgttcaagtggtggatcattgcactcaatccgtttgctggactgacgaaaataacaagtatgtgaatgaaattcaacagcttttgaaagtcattgattgctttgcctttacctttgcctttgttgcattcttttcttcgtttattgttcatattgacctcctgattaatgattatgtatttagataccttgagctcaatttgtttcttgaaatcttgtggctctataaatcttaatcagataccttgtttatccagttccatgggatatttgagtttttctgacttttggaaaaatgttttgtgacagtttgctggttcggttgggcctaaattaaagttgct

SEQ ID NO: 72908 - DNA, 985 bp, Prunus persica
  Intron number 1 from transcript ppa011007m (locus ppa01100 7m.g) derived from phytozome v7.0 (chr-ID scaffold_3; pos 18590720 to 18591704)
tctctctccttccagttttgtcccacctatctcaggtactttttcttttctttctctttcttatgtgattgtttaaattattggtcttttgcagtattttgaatcttctgattgcatcagaattgaattgatatctgcaaaggggttagattttatttatttgtttttgctgatgatggtttttattctttgaacattctggttgtagcaaaatttgatatttgcaacagggttttgttttgtgaaccttctgatgatccaaaatttgatatattcaaaagggtctgttttattacattgatttatgtgtttttctagattgatctattacttttgatctttaaaattgggataattgcatgttttcctttccctattctgttattttattttctggaaattttgaatggactgacttgaccttcaatctctgggcagcttgtcaacaaagtagcatattacgataaccacctgtaatttctatggattttatgctggttgatatgcctttcttcctcaccaccattcgggaggaagggcgagaataaggggaaatttaaatttactggcttttataacagatgaggggaaattgtatcttaaaacatccctgttgtgaaacttcataatcacaactattttctcaaatttttcatgtttctccgaatattttgaagacatattcaactccataggagtcatggtattacagctgcaactagtgaggtgcctgcatatttcccagggagtatgacaatgataaattgaatcgcttcaaaactatgatctctctgtaccattaaagtagttgacacgcattgcatgtgtgcatgtgttttctgctttagttctagtagatctgtttagaggacaactctcttgagtattagccttttcccttgtcaatattgttgtttgaaacttacacatgactgtcttctatttcacaggtgaagaatataaccctaagttatatcagagccac

SEQ ID NO: 72909 - DNA, 685 bp, Prunus persica
  Intron number 2 from transcript ppa011007m (locus ppa01100 7m.g) derived from phytozome v7.0 (chr-ID scaffold_3; pos 18592032 to 18592716)
tggtatgccttcatcatccttgctactgaactagttaatttttttatgcattactattagttgttatgatgtgggacataattctatgtttcctgtttggtagatgatcttgatgttctgcttctcttgtcacactgtcaagctgattgcttttatgtatgaaattgaattttcttttcaacctcattaccaatatcttatggaactgtatgccaaagagcattattattggtaattttgctggagacagtgctgcttttgtgccctcactgatctgctattgtcttgtaagtcttcactgagagcatcttatatagattgtgagacaatgagagagaagaatttcttgttttttttgattttaagagaagagttttcattattaagcttgactgttagaactttaaaaagtgtttgcatgattggggtttgtgtgtgggcacttatgagtcttcctttaaaggttagtgatttggttatattcttctggaaagcaaaggtttatgcagttgctttgagtaagagatttggcctgtaaaacagttcagcaagagattgagttaattccataaattacaattttaatattaatcgtgaaaacttaaactttacgatggaagaataaccctttatcttctcgtattttgtagtatacatcattattcagaagaggagaagtgcattc

SEQ ID NO: 72910 - DNA, 955 bp, Prunus persica
  Intron number 1 from transcript ppa007434m (locus ppa00743 4m.g) derived from phytozome v7.0 (chr-ID scaffold_3; pos 20985401 to 20986355)
gggtactctgttttgctacttctactactctctctctcttccaagtttacctctttctttgatactttctcctattttctctgccacttttggaatattggcttccagatttcgagctttttgctctttgttctcacttacttgtcagtgttggcatctgggtttttctaaattcggagctttttgttcgtttttgtcactcgcttactattcttggcatctgggctgggttttattagtccagtgttcagctgtactttgctggtattttatggtaatttgaatgtttcttcgtattgatttgctatacagtggatgtattgtaagtggtgagctggaattatggtaaaatagcttgaaaggcattttggagtagttttcttgagacttctagtagaatccttctaaaataaaggtttgatttttagttatggataaagtgcgatgtagctggggtttttatgcttagatataccggttaatttcatgaaatcgaaattagttatgatgctgtggttcggtccactgatctaccatttctgtgatgtattgattgaattatccagcccctttgcgtgcttagagtgaacagtccagtttgagatggtagtgtaactgctagcacctttcatgctgtgaggattgctgtttggtgtggctttgtccctgaagtgcataattgattgtgtagtcttcacgctgcatgatgcctttccatgccagtgtctaataccagcaatcaccacatccatagttccagctttcttctaaattttgtttttgacaagttatgccatccttgatttttagaaataaattctccattacatgatttatcatttatctgttatttgtcattacaattaagagtattcgcattgttacaattacaagtctaagtaataaaatagaatggtggtaagatccttatatatatctgcaatgttttgcaggt

SEQ ID NO: 72911 - DNA, 322 bp, Prunus persica
  Intron number 3 from transcript ppa021000m (locus ppa02100 0m.g) derived from phytozome v7.0 (chr-ID scaffold_4; pos 19859543 to 19859864)
ctgttaaagtaagtttccttgcaaccaaattattgcacatcatttaatttcccttcttctaattgttatttttaaattttatcctgaaatgattaaaaaatttatttgatctccaaatgttcgtttttatattggaaagttttcataaattatgaagaccacattgtagaccacatctctattacaattgttcgattagaaatgcgatagatcgtctataactttactgtttttcatatataaatgtagtccatgtagcaatactcatatattccattttgtgattatttgagttctaattatacgatcttctatcttccag

SEQ ID NO: 72912 - DNA, 964 bp, Prunus persica
  Intron number 1 from transcript ppa007772m (locus ppa00777 2m.g) derived from phytozome v7.0 (chr-ID scaffold_3; pos 13189479 to 13190442 reverse strand)
gactccaccgagaaggtgatcgcagagtacatgtcagcccctttttctccttttccctctgactcttcctctgttttccatgcttgaacatggtatacgtatctgtgcgtatttgtacgtatttttgtatgtatgcaaatgggtctgcttgttttgatgaataaggaaataggttggctttggttttgtgtattgttcttttgatcgaccacttgacttgaggtcaaatgatcaagttgtgttttgttttattgtcaaaatcttttccctttctctgttttgctgctgagagataagtgagagttataggatgtcgagttctgccctatatctgatttccttttcttcttttttactttttttttaattttattctatttttctatggattatttgaaatccattggggttggtgtactttttgtcatacgagatttcttgtgtgggaatctttgtattccttctgagtttatttttgttgttgttagagcttttgttagttttgatcttcttctttgcctattcattgtgaccaaaataataagtttttagagtcctgtttcctttttcttttttctatttggttcctgagattcaaaagtcttcttctttttcctatttattttagaaagatatggcttgttaattttgtagttgggtgagctaagaatccagcttttgctctttctataatagcatatagattcaacagtttttcagaatattaattcatacttttatattattatatcttttccgtggagtgtcacgatctttcttgttttggttgttgagctttgattaatgattggtattctctgttttgttaatccttctcagcttaattatgctgttacttgggatttctttagcttgaatatattgttcaatgtttatttttctttttaatttaattccaatttttttaacttttaattactgtaacaggattggtggatctggt

SEQ ID NO: 72913 - DNA, 598 bp, Prunus persica
  Intron number 4 from transcript ppa009144m (locus ppa00914 4m.g) derived from phytozome v7.0 (chr-ID scaffold_3; pos 929482 to 930079)
gtttttgctcttggagactttcttccttccggaaggtatgacatagtagattaaaggtcctttcagattaaattacccttatatttctatctttctcgtgtctgcccatgcttgatttatcatattgttctggtatctttaccttgacacatgatttcagactggccggaaaaatcatgaaacattaaggatttgtgctctctctctatccacttgattaaagaggaaggtgtatatgtatatgtacatacgtaactatgttgttttcttttagttatatataaatctctctgacaggacagcctgtcagaatttaaaatctgatatctcaaagttcgttgggagttaatctattcttttactgtttcttctttatgttttgacaataagagttaatctactttatgaagagaattaatatctgggaaggaaccaggccgctttaggttttaaacttttggtattttgttattgacttcctcatcttcttcatcttcttaacatccttcgtattacagcagttgattgttgagtaattgcagaggaatgatttcattttgatttggtcttcaagatttcagtttaagtcctactgagg

SEQ ID NO: 72914 - DNA, 296 bp, Prunus persica
  Intron number 5 from transcript ppa009144m (locus ppa00914 4m.g) derived from phytozome v7.0 (chr-ID scaffold_3; pos 930098 to 930393)
acaaactgtccgaagaagagaaagtgtcacttcaggtaatgctcatgggcaaaattttctatctttgcatttttcatttggtggtgttgttgtatgttgtattgtaggagttgaagccacagtcttttatattttctcttctctttgatggactaagcatctttctttcatttctgtttctgattttataatatttttgcttttgcattttaaatttgtgtcttttcatattacttcgttttaaaagatccttcacacgtttacctttgatttgtggcagactcggctgaaagaat

SEQ ID NO: 72915 - DNA, 882 bp, Prunus persica
  Intron number 3 from transcript ppa015435m (locus ppa01543 5m.g) derived from phytozome v7.0 (chr-ID scaffold_8; pos 15510669 to 15511550 reverse strand)
gacaaaggtaaacctactacttaatctgtacttaattcgtcaagaacattacccaaatgcattggacaatgttcaggttgccaacataatatttttggatcaaccagttggtagtggattctcctatgcaaaaagttggcaaggatacgagatcggtgatatatcatccgcagctcatagctaagaatttctaaggaaggtgaaaattggttaaataagtaattaaaattatatattaaatctcattaattaattatattttcgtcctccttttttgcttttgccttgttttgggctctttgtctgtctgtctggtgcccttgtttgcttatcttgtgcccttgtttggtcttttgggctattatagttgttctctgctcatttcatttagcctgtaatcctaatggtccattaccatctttgaatttacaagtagtctttatacaagcaatattaggggagggaaattgaatctaagacttcgagtgtaagaataaatatttttaaccacttaagttacaagtcaatctttaattctttaccatttttctaacgtgtgatttgaattcatacgtttattcttttaccaaacaaaaacctcatagctatgaaccttttatttttatttttaaataataataatagcaaaggatacatgaagcttagatatcttcagtgtctatggaacaaaacgtagtggttataatatattagtaaaatgtgacattcatacatgaaaattttcttttttgtatttttgtggggatgaatattttctagactttattgttagtattaaatgcggaatcttgtcttggataactaaatatttcttgactgaactcagggctacgtgctaggcaatccatttacagaaccagt

SEQ ID NO: 72916 - DNA, 998 bp, Prunus persica
  Intron number 1 from transcript ppa018817m (locus ppa01881 7m.g) derived from phytozome v7.0 (chr-ID scaffold_3; pos 14347466 to 14348463 reverse strand)
tgtaggaaatccctatcttcttcaaacttgtcaaggtacgtatgtaattaattatatctagcttccgtttctgcattttatttttctttgcgtttgatttatgcaagcaatattggaaaggaagggaaagaactccctttttattcagccaaagaacttttttcaagacataaaagtcatgcaagtcaaaataagacccttccttctacatacttttggtcacctaataatacttattgttaagattgttgttatttgtaccacaaatgttatttgtattcttactatttctttaatattaatgagtctctcatacatttatggggtccaaaccgtattagagagggtgatctgcatagtgataagatattgtgcaaatagtattcttattgtattgctaatttaccttttctgttttttttttctttctaaattatgtttcagatattgatgaatgcataattggtcatgatcggtgcgggccgcacagccactgtgtgaacattcctggttcctttctttgccatgacaaaaagaaaactaaattgatcgttattataggtacgcaatatatcatcctaataaaatactgctgctttttctataaaaaaagaagaaggatatttcataaataaagttacggggagagctagattggtcattcttcactgttcactatattagaggtctctgcagttttttcttttatggagtaaatcggatatccaaaaaggacaatcctagaacccaaataaattttataactttacaaatatcacagagcccaaagttcttgactaagaaaataaagaccaaggcctaagtgtcaagaggaattttagacataaaactcttttgtatattgccatcaacagtttattttattttattttatgggcacaagacataaacttggtttgcgatttgtgatcatttatcattttactgagttatatattgcaggtcttggtgcgggtcttggactgttacttttgctt

SEQ ID NO: 72917 - DNA, 368 bp, Prunus persica
  Intron number 1 from transcript ppa010001m (locus ppa01000 1m.g) derived from phytozome v7.0 (chr-ID scaffold_2; pos 1439715 to 1440082 reverse strand)
ctggggagagtgacaaaatttcaggtaattttgaaaagaaaaaaaaattgaagttagagttgaagagtgacagtttccatgttctattgaagtgaaacaggtacttgtgttagacttacataaatttaggtgtttgtttatttgcttcttcatcaatggtagaaggtttaataatctataagttctgttttgatttttgtttttctaagtttgcttttccattatttttctgagcaatgcactggagttttctaaggtgatagcaaacacaaaataccgctggaggttctgctcaagaatgaataatgtaatttaaaatgtggggtaaaatttgtatttgaattgtcttataggtttggaggaaagta

SEQ ID NO: 72918 - DNA, 823 bp, Prunus persica
  Intron number 1 from transcript ppa001035m (locus ppa00103 5m.g) derived from phytozome v7.0 (chr-ID scaffold_1; pos 30037592 to 30038414 reverse strand)
gcagtggcagtttcagttgtgcaatcggtacgtacttaacttcctcttcttcttttttctcacatctttgattatcggccgaaccagccttaagtttatgctaactttcaatttaaaaggggtaacatgtgttatagtcacttacaccaatggacagcccacctttcattattgagttgttttggactttctcagatgtttaataagatatgcgatttaaatttttaaatttaattttgatggttaatgtttttgaagtttcccatacaatatatatacactaaacaccaactttaagttcggaacttccaatagattttttctctattgtgccgtgtcagagttgagaatccacataaaacttctgataagttcctggacttattattaggaaaagaaaataactacaatatactactttttaatataaaacatcataaaattttcagcagtacccgagatttaagagagagttgcagagtaccaatgcataaagtcggaaaaatggctaagacaaacaaaatgcctgcagttttgggcttaaaaaatgggataatatggtagtgtctatgtgcaatgagatggagtttgagtaggaaaagagagtgtgagcatatgtgggttgagagtgattggaaattggaaactaatattgtattaaaactatttaaaaccatcggggtatagtctactttttttatatgatgatctccaaagagagttctctttataatatagatatgtatgatgtactgtttaatccttacatatgagcttagtaatacaccaacaatgaagtttccatctcagtgtttcagtggga

SEQ ID NO: 72919 - DNA, 570 bp, Prunus persica
  Intron number 2 from transcript ppa022548m (locus ppa02254 8m.g) derived from phytozome v7.0 (chr-ID scaffold_5; pos 4561866 to 4562435 reverse strand)
ccaagcagtcttggcccgacgcccaacagtttgtggtgagttttgattcctgagaaaatgatggaaaaggaaaatagctattgggaaataaataataataaaaaatgcatattctgtgtatgtcttgtttggttgctaaagaagatgatagaaatgcaagaaaacctttgggtttggagcattgacaaacataatagatttttctttcagcttcatagaagtgagcattcttatacttaaaaaaaaaattatttaaataaaaaaataaaaaaataaaaaaaataaaaaactttctaacagagtatttataatgcttgtttttcttctggggttttcatttggggctgctaatttatctggtgatgctgagaaaaatggaagacaaaaaggaaatgtaaaatgttgggtcttggatttttcaacaatttagcaggacagttaatttttatatttgtttaataatttttccttcaatggaggagcgtttggcattattgaggaattgagtttgatgttaatgaatatgattgagcaggttgaggctgtgggagtggggaagttgaggcacaa

SEQ ID NO: 72920 - DNA, 326 bp, Prunus persica
  Intron number 3 from transcript ppa003276m (locus ppa00327 6m.g) derived from phytozome v7.0 (chr-ID scaffold_5; pos 16819469 to 16819794)
gaagttatttacaagatcgaagttcccgcgaataggtacctttttttcttttcttataattgactagcactgagaattgtcttaattgcatgttttggaacttgatgttttatcctacttcatttcatgggttggtttctaattttaatgttaacataacccttgaggccaaatattttaaatctcatactgctcttgtctgcttaagtgggtaggctgtgttcagagtatcaaggagtaactaaaggaatgagaataattgttgtatgattttcacataatataaaatgagttgaacaactttgttatttgatttatatgcagat

SEQ ID NO: 72921 - DNA, 1004 bp, Prunus persica
  Intron number 1 from transcript ppa012993m (locus ppa01283 6m.g) derived from phytozome v7.0 (chr-ID scaffold_4; pos 17909857 to 17910860 reverse strand)
agtggggtatgactctttggcatctgtctttttcgtttttcatctagttcccttgtttggttactgagaaaattttctgaaaagtgaaaaagaacgagaaaagctctaatctttttgcctgatttatgtgggtttttgtagttttgctaaaatcagcttagactaatccactcatcgtgttatgcacgtttctggtgcattcgggcattgatttctgaattcttctgttggtcgtgcttagacatttaagttgatttggttatttttatttttgttacgaaatggaaaccagaagcagctttgttagtattagatgtgggtttggaattgcaatttgaattggttagctacatgtaacgtggggattattttctgtgttgtgagtattgctaccacaattggaatgattttctttctagtttctcttcctgctggtgtgaatggtctgattgtgaatttgcaacaatgttatgaatgcggggtcgaaacttggctcatttacttgataggattttctaattttcatgccatatcgttaaggagtaccatttttactcagttactgtggatttcatatcagtctatgtattaaagatctgggaatgggcttgcagttgcattataagctgggtttttttttattttgtgtcactactggttggtgtaatttgaggaaagtgtttgatccgagatgaaggtaagtgttgggcttaaagtgatcatacttcataacttgatcataagcttgcccaaatttttttttttttccaaaaacccaagtgtttcatgggaaaaatcacttggaagtgcttctataacccaaaaatacttgtaaattattttgtcaaacgatatcagaactgcatattgggtttgtgtgacagattacggttgattgtaatgtatttgttagtttcagcaatgcaacacactttctgaattcatttgatgagtatttaattgttttggcattaatgtatgactgtttcttgcattagacactg

SEQ ID NO: 72922 - DNA, 867 bp, Prunus persica
  Intron number 1 from transcript ppa004581m (locus ppa00458 1m.g) derived from phytozome v7.0 (chr-ID scaffold_8; pos 14327353 to 14328219 reverse strand)
agaaggtatgtgcagtttttattagtcgttatattttaatatggtgtgtaattgtgttattatttctgagtaacaatggctgaagtagttatctcttaatatggtttttctggttgattaagtggcatccttaattggggcttagttgttgaaagtggggcagtggtgtgattttgagaatgatgacatcttcttctgtaatgtcaattatacaacattacaattttcatgacatgagtgagcaaaacagtacgagtatgaattattgcaagaccttacacggcttaagttattgatccttgtcactctaagcaggatatgaagtttgatatttgcttctggactgcattatgttagtcttgcctagttcttataacttgagctatcgatccttgacactgaaatcaggatgtgaagttcgatattcgtttttgactgcattatgttagtcttgcctagttcttatcatggttgaatgtcgtctagcagtggaggacctaggccattttagtttttttttttttgggtttgatctccatcttaaaaaatcttgttgggtaaaatgaacaagaaagatttggaattggcagtgcttgagagagagaaaagttgacgcgacttacagcagttgacaaattgtgacagtatcataaaaatgaggtatttgtatgtgacattgatagttctaattctcctttgggttccggaaataatccttaaaagaagacttagtatttgtattgaaatgggcctctctgttattgttaacatttcagtataatgaattgagtcttcgttcttgggacttcaacatggagttttgggatataaccgacccaattgcttttggttcacttctgtatagga

SEQ ID NO: 72923 - DNA, 726 bp, Prunus persica
  Intron number 2 from transcript ppa006177m (locus ppa00617 7m.g) derived from phytozome v7.0 (chr-ID scaffold_1; pos 43962839 to 43963564 reverse strand)
aagctctgggataatttgggctttttggttaacaggtaagtcccaagcttttggttttggtggatgcgcaagttcacctttttttacctcaccatttgctaaaatgagttcaacaaatttggaaagaagatagcatgacaaaaataaaaataataaattatttatgaacgtcaggtctaaattttgagactgcccttgttatactctctctatcatcatgcatcaatgatctgttatttttacttgaggatttgtgtataagttgctataaaaatacgttgtcctaaatatgatttttcttcttatgaaatatgggttcttttactttgtatttctttctccttggaaaactagggattggatttccagtggatgaagttaaccaatacttctgacaccagtatgccttcttaatctgttctatatgcagttagattatcctttttatggtctatattgatggatgccatggacattctttgcttatatggcgtatagattgtaactagcctttttcatttcaaaaatggttttaaagtttggttctttaggttactttgtcatatgaatctgccttttctactttttttcaattttttgttgcctttcctatatcattttatatcttgttctccattaagtattttgtttggtggcaattgacatagtgtcactttttgtttgtggccagccgtttgcacaagctaagtggaaatcagaagattt

SEQ ID NO: 72924 - DNA, 740 bp, Prunus persica
  Intron number 2 from transcript ppa008526m (locus ppa00852 6m.g) derived from phytozome v7.0 (chr-ID scaffold_1; pos 28455147 to 28455886)
ctgtccgattttttctggataaattcgtctttgaggtactcactctgctgtacatccacacaaatttgattggagtagctaaagtttccatcttttgtagttcactgatgtgctaactttgtttatattagatcgtcaatgatgtatatgaccggaatgcacttgtattttgatgggttgtgtttggttttggcttgtttgataagcatactttagttattggatatcaaattgttcaacatgatatgtttcgatctttattttttaagagatttgaccggttgatggctcatggtttgatgctgcaactaaaatcagcttggctatttgagagtcaatgtttgtttgccctgtctttgagtttcctttagatcttctttctgcttcttgttgtatattctcaatcaactaaaaggagataaagagaacaacttgttttatatggaaagttgatagggttctagcacctttagagaatgagagctgtttgttaatgaagacgttaaaggttgaagaatggttgtttaaattagtccagggtagctttcatttgcatttcttttcatttacacctttatttaatttcttcattttttatctaccactactttgttatgtattataatcaagaaatgtgaatgtgattgcatttatttctcataatatctttattagctctgtataaattgaaattacatattgcagagattggggagacggttaatttttggaaaggggca

SEQ ID NO: 72925 - DNA, 626 bp, Prunus persica
  Intron number 1 from transcript ppa003213m (locus ppa00321 3m.g) derived from phytozome v7.0 (chr-ID scaffold_3; pos 21057220 to 21057845)
cttcattggccttctccttcgtggcaactttaaaggtaaatatcagttttgtcctttgtttcctttttcttgtgctaattggtatttctggttaactcaaaactgattatgtggttatattaggttctaagttttgatgggaaattgataatattttggaaacaaggattttattgtttttacaaaacagtttaggacacaacacaatactgtccaatcataattttatacgtgctcaatgtaacctctccatctggcgttgaacctgtgatccaataaaactggggttcttgactttcatttcccatttgccgaattattgttttctgctgatgctgggcctggcagtggtttggttttcttttgcacaacatttctatctacattaccatgtctgaagagataagatttcatccactatgtacaataacaagtctgtgccttgagtatcatttttgaattttgcttgcttactatcttgaaatgggttgttaacgttgtaactaggagtggattgattaattaagacacattgcttgaaggagtatgacttaaggaaaacacgtcaaatctaacatcacagaattatttcaggtattctgttctgcccattaatttgccttatc

SEQ ID NO: 72926 - DNA, 838 bp, Prunus persica
  Intron number 1 from transcript ppa011744m (locus ppa01174 4m.g) derived from phytozome v7.0 (chr-ID scaffold_7; pos 12552091 to 12552928 reverse strand)
tcgcccgcgctttggagatttgcaaggataagaaggtaattaatttagtttagtaggatgaaatattaaaggaagttagaagttctacttcaaaatcaaatcaattgggaatagggagtaatctaacttcttataagtccttggttaggttttttaacttttcaatgtgagattttttacatctacattctcacacgttctctcttatatcatgaaagaagttaaagttctactccaaaactaattaactataaggggagtaactcaactccttataagtttttattaggtttccttaacttttcaatgtaggactctttattttcacattttgacactcgcttaaatagttgttatttttgtgtgtttttttaaacaccgtgtttatcaaatttgtagatgataaatttgtgaattgtctatccttttaaatatgtaaatgaaacttaaaaaatagacgattctgatcgtggaaatacaatagatttgaatgaaacttaaaaaataaatggttctgattgtggaaatacaatgcgagtcgagtctcgcagtgattctttgcataagtttaagatccctcaatagattagcactcttaacacacacacacacacgatgttttaatgtttatgttgttattttgtgaattaatcatttatcaggttggtttatgtatctaaggatttctcttgcattattagtttctcaattaatgattctaattatgggttcagataattagatgagaggttttgtgatgcatttgggtgaacttaactaacacgattttagtaattgtgcagatcaaagcagaaaccctaattctaggtggagatcc

SEQ ID NO: 72927 - DNA, 966 bp, Prunus persica
  Intron number 1 from transcript ppa025151m (locus ppa02515 1m.g) derived from phytozome v7.0 (chr-ID scaffold_2; pos 3213440 to 3214405 reverse strand)
ttttaacattttgttattaatctataagcctgatgtgttctattttctttagaaaattatactaattttttcttacttgcaggtcatccaatactcaaaaactctcacttgaatagattatgtatttggtttttaattttaagaacggttgagtctataatgttggggttttttttttatatactcagaaagtttttacaaaacttacatttatgaaactagtgagtacatgttgtaagctacaaatgataaaactagttgggcgtcgggggataaagacatagatggaagattgtaaataatagggaatatttatgacctttttcacatgaaggcccattataacatgatattttataaatataaaaaacacacttcaaatctaatactatagaaaaattccttattgtaccttcaaatgaaaaaattgtaacatactaataaaccaattagaaagtgaccaagtgactatttgagattttttttataatccaaaatagccaatcttataacttttctataaattatgtagtgtggtgttttttgtaattttatgtatatacatgtattctgagtctttatttggcatacttaacaggtgcaatacctagagaaatagggaacttaacaatgttgaaggcgatacgccttgactccaacaaattcaacggtatgtttgttgcattaccccttgtcttgatgtgatccggtgatatatgactcagtttttgttgcagtgcattgtattgcataaatcatgagtttaacatatatatatatatgcatatatcttaatgatttttcagaaattccacaagagatcagctttttacatcagctggagaagttgtatgtgcaattcaatgccctaaaaggccctgttcctgtggctattttcaacatgtcttctttgactacgttgactctatttagaaacagcttgagtggtggtcttccagacaatat

SEQ ID NO: 72928 - DNA, 802 bp, Prunus persica
  Intron number 3 from transcript ppa026876m (locus ppa02687 6m.g) derived from phytozome v7.0 (chr-ID scaffold_4; pos 10189532 to 10190333)
ccctggggtatgtatgatgcttatatttgctctacttggtagctttctggatatggtagcaactgatgtgctatttaatgccttgtactattggctgctgttttgcttgcccatgacatataagtgtaacatctttggagaaatctagttttttgctagtgtgtttttattcttttgggggttatcttatctgggataccatccatccatttgacttatgctgctcctctttcctttggctaatgtgtctgtgggtgtccaaattttagaaatttatccattgagttctttcctttatgaaagaattcctgatcagctaaccgtggctactttggtaacgcccactaaaaataaatcacgtctctagttttttttttataatcataaatgtagaaactgttagataaatagggagcactggctgtgtacatgtataatttgtttcatgtccccactatgtcatgttctgtttctagaatttttctgtctcggtgtccatgttctgtctctttgcatttcacgtgtctgcatttcagatagtttgcatgtccttgatattttctatagggtaaaacttctctgccatttttgtttgcctgaggtgaggatagaccctaactaatgaaggacagaattcacttgttggttagtggaaatgtgtttcaatcttctgttttaatgtcaaaattaccccttttcctttttagccatctcatttagactgcaaatatggcgtctttaaggagatatcatttgcaagacatcgtctaaatcatttatgcttgctttttttcccagtgtc

SEQ ID NO: 72929 - DNA, 501 bp, Prunus persica
  Intron number 1 from transcript ppa003576m (locus ppa00357 6m.g) derived from phytozome v7.0 (chr-ID scaffold_8; pos 16268509 to 16269009 reverse strand)
cgggtcctgctcctccacgaccaccacctcaattggtaacttctcttattcaaaatcttagtttggttacttgggtaattgttggaatttagaatacagagttgtgaatgtgggtgctctggtttgtttctgtttttttatttgaaagcttgtatctttttcgttttcttaattgttttgactttgaggctgcccaatttcctcttctagctgaatatgctttcgttctacagattttgtgtgtctgctttatccaatgcttttagttctatcactgaattcaaaaccattgccaccttgtttaggttcaaaagttagacatgaagtattgcagcctttgagttttacttgtttgatcaacttaaagatacccccggttgtagtatcatcttagttttacttgaatacttgaagtctattcagttaatgaagttgaattgtcatggcggtccgtatatgcagtacgttgattgtgcatttgatttcccaggtggattcctg

SEQ ID NO: 72930 - DNA, 722 bp, Prunus persica
  Intron number 1 from transcript ppa017804m (locus ppa01780 4m.g) derived from phytozome v7.0 (chr-ID scaffold_6; pos 19590011 to 19590732)
ttgtagcttcaaggttatccaaagattttgagtctgtgcattctcaacatgcacagattagggagaaacttgagtacaatcatcgattgtctcgaaaaggatatgctggtttggaggatcaattggaggaaaccatgcctggggtagaaattgatcgatctaccttatggaagagagctagacaggacaaacatggtaacatcccggatccaaaggtggcagagaaagcaaaattaattgtaagcctactcactttgttttaaatttgtattaaactgtgaataattcttatcacgtcttatgttatattttgcgtcgtgtgaatgatattaccacgtcgaaattttttaaaacacgtcgttaaaggtctaaatcaggaatcactactctgttttctgtaattatagcataagatgtcggtggttcattttcgcgtcgtttgtattaaattactacgtcgaaatgttttaaacaaggtcgttaaaggtgtgaatattgaatcatccctctgttatctctaaataaagcataagacgtcggtggtttattcatttcgtcgttttaaaaaactaaccacgtcggtataactaccgtcgtgataaattataataacgtcgatttatttgttactgcgtcgtctgaaattatataatacgtcgtttgtatataaataaccgtcgtgtgttttttgttcttacttttttatatatctttgttttagg

SEQ ID NO: 72931 - DNA, 383 bp, Prunus persica
  Intron number 1 from transcript ppa000586m (locus ppa00058 6m.g) derived from phytozome v7.0 (chr-ID scaffold_2; pos 19590817 to 19591199 reverse strand)
ccaagcattaccgtacagtaggcccacactccgaggtaagcatcgttctgagcttggcattggctgcattagtgatgtatgtgatcaaatttatgaactttgtaaaattgtgacgtgggtagcaaaattctgactctacagaccaaagagtagttgcaagttgcaatttttaatgtggattgttcagttttcaaacaacagctaaaagggtgcttaaatctatcaattttacaataaattgaagaataaagttaccgactttattataatgtcattagcaagtaggaactttgagtgctgcccatgttttttttattttttataatagtttctgtgtggtaatctgtttcatttcaaacactaacaggtggcaactacaagca

SEQ ID NO: 72932 - DNA, 855 bp, Prunus persica
  Intron number 1 from transcript ppa012514m (locus ppa01241 4m.g) derived from phytozome v7.0 (chr-ID scaffold_5; pos 13582187 to 13583041)
gggcaaaaaacagttaaaaacagtaaatttcctaggttagttctgctggctctcatcaaatagttttcttgtgaatttgtggtattgatctttgatctaatttgggtatgtttgaacatcttatcacaataatcacatagactaaaccaccattatatctctctttatatgcatgcctttgatagaaagcaaaagggttcacttatcaactacttaaatcctagaaaaagaacagcaaccacccatttgatagaagatcttcattgactagtaaacaatagatatagaaaagctctttgatctgtcacctggaagttagcatgattctcctttgatctgtctatattgaactttgtcaaatttctggcttgtttgtcgaatctatcacctatagctaccttttacagttctgattttattttgcaatgaatcttctgtgaaacacacaataaaccaagagagaaaaacccaataaagaccgagaagttttggattcttgtgatgaagttttgatatattggttctcagttcaagtgctaagaatggggatcaaaattggaagttttctatttctaaatcaaacactgttagaaaactaccagcaatttattattagatttgtaaagtttatacctaagatagtcctataaaaaatgcactaaaacacttgattgctcaaacctgctctgtaacttcatctttgtctagttccatgcttcacataatgcttgaaatttccttctgtttctgcaatgccttagtcatcttgcccgttctagtaaattggtttttcgactatttgatgcagaagctactataggtgcacgcatcaagggtgcattgtcaaaaagcaag

SEQ ID NO: 72933 - DNA, 809 bp, Prunus persica
  Intron number 1 from transcript ppa024278m (locus ppa02427 8m.g) derived from phytozome v7.0 (chr-ID scaffold_7; pos 14555142 to 14555950)
aggtctctaggtacgtttacatatacatacgtacacacttgtactaaatattatctgccctaccctacaattttctcatccttttttctttttttgttcttggttttcttggtttgtggtttctcttaattggacggtgaaagaattgttttggatagcaatttatttatttattcaaacttttttccttgtttggagttggaaaatgactgaacaaggaagttcagttggaaacccaggtgctattcttttcttttgattacttcatttcgagatctgatgatggctttcgtgttgtgcaaaatggttacttaatcacttcttttttcttttctttctatacgttttctattttcaaaacgcgacccttcttttaaatgcaagtatttgtttgtctttttttttacccaaataatgggtggcctcttccatgcttggctactgtgaatcaactggctttttatctgatatggaaaagacatgatttacaagaaacgtacttccccccacataagactagccattattttgttcacaaatttgaatggtcatatccttttgtctcgaataagtactgtagttgctcggcaaaaggaaaccacacggaattcttagaacatcagcattaggaaagcaaaggaccatgaattaattcacatggccacaactttttttgtgtgtttttagactagtccattttggaattcaatttagggttccttactattatcaagtattgaatttcttgtagggggttttttttaattgtcttcctcatgttgattaagtaattaatttggtgcaggatc

SEQ ID NO: 72934 - DNA, 570 bp, Prunus persica
  Intron number 1 from transcript ppa000594m (locus ppa00059 4m.g) derived from phytozome v7.0 (chr-ID scaffold_1; pos 10614199 to 10614768 reverse strand)
aggtacgcatttactattctgcctttgcggcagcttctgtggtggtgctttggggtgtcgttttgttggatctgagttcggttatgcttgtgtgtactgggttgtttaatttattttagggaacttttgcgctagggttttggtggtctagggattggttacttttgccccttttggggtcagaagaatagcgaaggaaggagagaaacgaatacttaggatccgggtttttatatgatttatctccatttctatgttttgcatggtggtcctttgtttcgaagctaaagctgagtaaaggagggtaaaaacaagtttctttagacgtttactgtatcttcggatatgaaagctgagagaccgatgctagtggttgatttttggttggctttaccggatatttcttctgaaatttctctaaattacttttcttttggttgataatcattgtcattgtcattgtcatgtttaattgagtttgactcttcaaggtttggtgctgtaaactccaaaccatttgggtgcaccttttcttccctcatgtactcttttgcatgatcgtcttgcagg

SEQ ID NO: 72935 - DNA, 738 bp, Prunus persica
  Intron number 1 from transcript ppa001737m (locus ppa00173 7m.g) derived from phytozome v7.0 (chr-ID scaffold_3; pos 13287247 to 13287984)
ctctctcaacgagaaggtcagtttttgctcttgctatacagataaatagatgtacacgttgatttgttccgctgtttggttgctgagaaaccatggggaagttgaaaaagaaggaattctatattagaattatgaatgcaatgctatttttgcttagtcgtaggatttgatttcttttagcaatttccggataggcctgaacttcgattttatatggaattacgaaatttgaaggggccaaagttaaatttatatacttgaactttgcttgcaggaaataagacaattatgttcatatcttttggacttaaagagagcttctgccgaggaaatgcgtagaagtgtctatgctaactacacggcattcatacggtgagttttcattgaatggttaatgtgagaagtttgtgagtttgtaacatccttcatatgcaattttatatgttcatgttccgaggtgcttcactttaacagcattgtatttgctcggtatatgcttgggtatttgggttagtttttgactcatttgacacaatatttggatagcgagattctttagtttttaagtgtggtatgtaaaatattcccaccatttctagctctaggtaaaaagtataaggcactccattggttcatttaaattgtatttcacatagtatgaaattttatcaatgaaatcagttgcatgggcgtatcaagttttcttttcttattagtttggtttttgctgctgtgttt

SEQ ID NO: 72936 - DNA, 450 bp, Prunus persica
  Intron number 2 from transcript ppa001737m (locus ppa00173 7m.g) derived from phytozome v7.0 (chr-ID scaffold_3; pos 13288050 to 13288499)
attcaaaattttatttgtacttgttgcaaggcatagtaattgtgtttcgttctttaagtgagagttgaagcattttcggtttttgtacctttgtgtgttttcttgttgctttagttttatgattgataaaagttggtatccaaggtaatttactgccaatatggtcacactcaaagtgattgtatttgatattttcatttttgtaattaggaacttccaattcttgtcaacctttttgcataatcgactcttgtttgggtaactttcatgtatttagttaacttaaatgccattttcacattccattggaaggttaaactagtttgttcttcaattatggagtcatttcttttgatacaccattcttcgttgagtgtaatttggattttatattaactgcacttcttactcacagcacttccaaagagatatcagatttggagggggagc

SEQ ID NO: 72937 - DNA, 720 bp, Prunus persica
  Intron number 2 from transcript ppa010764m (locus ppa01076 4m.g) derived from phytozome v7.0 (chr-ID scaffold_1; pos 4017808 to 4018527 reverse strand)
tgcagtgctgcgtaatctagataagagtttacaaggtatgattctgcctactttagctgttgagtgctattgtcatctttgtttcattttacattcaccactactttggatcccctgaagtacaaaaaataggaacgaggaaacataagaaagtgacagattcaagttgagaacccatatatggccagtggctcatctaacgaagctatggatgggaagacagcaaagaaaatgcaagcataactaatgtacatattcagtcagttatggatacattagtcacaattgtgttcttcccttagatagttgtgaagacatggcacgccaaatatgtgattgaacaaaaaattctgtgtaccacaaaagggcttattggagttggttatagttgtgtttgtggtttaagtgttcctttgaaacctacgttttcatcatttttctttgtactgtgaacccgctctaacattgaaggaacgtatttcttcctcttttttatatttattctggttggggatggggagtgggacatgccatcttgtagaattgtctcccaacactttccatctttttttcttcttgtattattcactcattgcattaagaaaatatattaaaatctgtaaaatttgtgcatgtagttactcaaattttgtcacatctctttcttggggttctcaagtaaactatttgtttttctataaacagatattcagaggcaaa

SEQ ID NO: 72938 - DNA, 607 bp, Prunus persica
  Intron number 1 from transcript ppa011048m (locus ppa01104 8m.g) derived from phytozome v7.0 (chr-ID scaffold_1; pos 37301376 to 37301982 reverse strand)
catttttttgtcgggaaatttctgccatcttctttgtaagctctcgttccctctgtttttttttttggtgggtgaaatttcgattttatctggttgcataacaatgccggtggttttctctttttccactcttattttgtgtcgtgatctgcaccttctgtttggatgctgagaaaaagggggaaaatggaaaatttttgaacttcgtgttttctttgtttgagtttccaattaatgtgaatgtcaatttctagctcctaaaatgtcgagtgcatttatggttgccttgtctttctgagattttattgaatgaaaaacccaaaactttccacattagcaacgatttaaagatatttaatcaagtcttttgatctgcatcattgcacttagtttggctgatttagaaaagttgggcaactttttttccttaaaagaagaagaaagcttgaagctttttaatttttaaatataaattttcacaaagtagggcatcatcgcgcttggtaatagaaagttcgtgtttattataaaatgttcttatttagactattttatcacagtttgtgacctttttcccattgttctttctcaggagttatacacaacc

SEQ ID NO: 72939 - DNA, 692 bp, Prunus persica
  Intron number 3 from transcript ppa003906m (locus ppa00390 6m.g) derived from phytozome v7.0 (chr-ID scaffold_1; pos 36734109 to 36734800)
ggccatcttgaacctccctattttctatcttgaaggtactaatctatatggttttacatttgatcattgatgttattttcagctccagtctctcaccttggtagcgaatacgtttggcattttagtgttagcgacaggtcagagtagtctggtgcaaactgtaaagtcctacccatcttggtggacgagaaagaaaaaaagaatgttttattaatctgaaagtattctggattaacaggaagtggagatggtatctctgagcaattgcatttggttcttttagatattcagaatgatctagcgtcttttgaatgctctctgtcagtaaaatcgtttcagatatatgtcaaaatattccatgcaagatgcatttcactattgccatctttcttaatatcattgtgtctaagtttttagctgctttaatagcattacctcaaaattaatggaatcaactaactggtgcccctacacgctttagtcctaatgataatgaccaagatgaatggcttaggagtaaaaagaaacaaagttaaatctcttgtcagtcttgttttcagattgccttcttttgcatcctcatattctcgtatgttttcattcattaattatttaatatcttcagagaacttagattttgattcgtggtatatgcaggagttgtcctgttcccagaggcgacccttccccta

SEQ ID NO: 72940 - DNA, 395 bp, Prunus persica
  Intron number 1 from transcript ppa000545m (locus ppa00054 5m.g) derived from phytozome v7.0 (chr-ID scaffold_1; pos 4033947 to 4034341 reverse strand)
aagcagaagcagcaacaacccaccaccaccaccaggtgccttttcctttcgtgtctctgatcaatacccacaacttatttcaataagaaaatcttagatcttggaatttttttgtgatatgttggaagaatgctgttaaattcgatgatcaggagagtgctgtaggatatatgtatatgttttaatatttttatatcgaagtacattaattgtgattagcctttgagttgaattgaggttatgtgtgagagaggaggtgattgatctatgcatgatgcgaacatttcaatctgttgatttggtatttgaattatgagtttctgaattttgggtatctttgtttttgttttgtggttgtagatttggattgtgggttgttgatttgataaattgaa

SEQ ID NO: 72941 - DNA, 529 bp, Prunus persica
  Intron number 1 from transcript ppa018727m (locus ppa01872 7m.g) derived from phytozome v7.0 (chr-ID scaffold_4; pos 22194141 to 22194669 reverse strand)
aggccattgttgggttttttgagagaattaagaaggtagaagatcagtaacactctttattaatttatgtgcatttcacattcaccacatgtcaacatcctaatccatgacttgttttgatatttatagcagtttaattcgtgctgcatgctattgagttatgaggaatctgatgttccttgaattatattgttccaactattaaagattggaacaaggaatcagtcataatgcctgcccataaagttgaatccaaatattaataatagtaagaggttcttctagagtttactgtatacaatgacttgtccaaatcacaatctttttcaattgcgagaactaatacaatacccaccacacacacgttttgtacatttatatatatctatgctctctgtggagcttattctgtgaatggttgcttttaatttgagcaaaagtataccgtctttgattcagtgttgtgtacataacacaaatgtttgcttgtacgttttttcttctttgtatcagccttctagaggagaat

SEQ ID NO: 72942 - DNA, 669 bp, Prunus persica
  Intron number 3 from transcript ppa014652m (locus ppa01465 2m.g) derived from phytozome v7.0 (chr-ID scaffold_2; pos 17704021 to 17704689)
gctatatagctttagtaaagtctttggaagtaagtctttcgaattaattttttcaatagctatcaaaacctaaaaggttcaatgtgtggctataatgtggatttgggagtgtgctattttgcctctgcgcctatctggattagctccttcttgattgatgatatgttaggggttgttagaaccctttagtttgtgctgacagtttgtagtctgtttgttttggggtttgatcccccactagttcataaaataaaaaaataaaaaaaaagcttcaatgtatgtgctaatgtgaaaatttcaattgatctctggtttggccaaagatctgtttcgcttaatgctttgctgtttttagtaggggaaatgatctgattaattgatttaggatttttccaataagctgctacctttctggatttacttatctcacctgataaatctttctgcactctatccataattttttttttgaagccctttgctataaataaaataaattatgcacataagttgtcatgctttcttcctctctagcttgaaaatgttttattgtgatgtgccaaactttgatcaacatttttcttgtttgtggtgggtgtgggctatagagaccataataataagtctgttcttactgatacaggggagaggagaagttggtagtaaact

SEQ ID NO: 72943 - DNA, 842 bp, Prunus persica
  Intron number 3 from transcript ppa002396m (locus ppa00239 6m.g) derived from phytozome v7.0 (chr-ID scaffold_7; pos 1686255 to 1687096 reverse strand)
ggctgagcttgtaagcaacagaggtacttcccttactctcggaattccagctaatacaagtgaaaataacatattggaaaatattctcttgccagattgtttggcaacataagatgcttattatgttgctagattgtgaagctagaccatttcagaataattcgtgcttgaatgtgtggtccagatttgcattctgacaagaaagttcaaaattcatgtgtgtgagaaccattgaaggaactgtttgaatgcctttctgttttcattatattttcagagtttcttttcaaatctgatatatttagtacgagtcaagctggcagacaccattttttctgttcttatattttggaagtggagggtttggtgtcttcctgaaacattttactgttggattaactcttcattgagatgtttaggattatcctatgaatgtttttatttatttatgcaaagttgttgtatttgagttaatgtgctacctgcttgtgcaagtgcggttgagtacaaaatggagaaatattctacttttttgagactcacgtcttactctgtacatttaatatgcactaccagatcccccccttttttttttccttcgatttcttttctgtcatgtcagttttaagttcaacaacaggttgaatgacttcagattatcagtacatggttaaaaagttttcttcagaatcatatgaaatgtggaattcactgtattgctaaatataaaatgttatagttagcctttgtctcgtaattttgactgaatgtttatagctgaggcttcttaataacgttttcccacaggttttgaagctgggggccctaacgttccttccaac

SEQ ID NO: 72944 - DNA, 513 bp, Prunus persica
  Intron number 1 from transcript ppa002396m (locus ppa00239 6m.g) derived from phytozome v7.0 (chr-ID scaffold_7; pos 1687600 to 1688112 reverse strand)
gagttaaaaaaagaaaacaagaatatttatttcaggtattattttttttgtttagtttctgaactgaattttatactaaatggatgagaacttaataatgcactcttatctgagcattgctgaaaatcaccatctttctgggtattctcttcttctttgaggaatttggtttttactcgttatctttttatatcaattttaaattcaatagagacttgcttcactagaatctccttgatttgatcaactttgtagttatttaattggtcttaattatttgtgggtctttcataatgttaccacacatcaatcggtttgattgaaccaaaaagtcattgtgaggaagtgtttatgggatttctatattttggcgatcactcattaactgagagaccattttgcattgtttgtgttaccttgttcttttgctgtttaattgatcagaatgtaactgagtatctcctttgtctatgcttttttagctgtggaagtattgggtgtggtaactgagca

SEQ ID NO: 72945 - DNA, 608 bp, Prunus persica
  Intron number 3 from transcript ppa010827m (locus ppa01082 7m.g) derived from phytozome v7.0 (chr-ID scaffold_5; pos 9512809 to 9513416)
ggtatcctcatagagggtacgtaagcaaatttctgactcttttaagctttaattgttgttaattttttagttaatgattcaattgcttttgaatgtttttttctctgatcataatgcaagtagttgggttgattggtgctgctataattaagtattgattccattttctataatgttgtatccgattttaagatggagtcaaacaatcagagttaaaggactagattatgtaagaatagaactgcaaatttcgaaatttagttggttgcgatgtgcatgagtataatgtagtcttcaagtgagctgcataagttgaagcttagttagaaaattgtgctggttagaagggcccttgtgcagttgtgtgcgtgcttctatcttatgcataatagcttagtcgtgaaattagggaagttacgatccaaaaacaacaactaaaggctaaatggggatgcaaatataagatacaaagcgtcttcttactatatataaaaattcttacgaatatctgaccacatacttgctctgtactgattatatggtatacttagccatctttgaattgggctgcaggaaccagtctggctgcaaaatttttacgggcaaat

SEQ ID NO: 72946 - DNA, 1024 bp, Prunus persica
  Intron number 1 from transcript ppa005233m (locus ppa00523 3m.g) derived from phytozome v7.0 (chr-ID scaffold_4; pos 18031132 to 18032155 reverse strand)
aacatttcgacccacctcccgttttgcaagaaaaagtgagaaactttttctcattctcttctgttctcttttgagttctgtatacttgttcttaaagttagtgtctttattgatcttctagaattgtgatctccatgaatgttacttaggttttatgcatacatttggcgcaattatggcattagtttgctgcgggatgtagatgttttcgttctacttacatgcttattaagatctgatatctgggtttaggcattcatttgcaatttgattggattttacttgctttgtaaatctatcagttgagctttgttaactcatttttgggttgtggcattacttacatacctgtgcttttcgttatctcatctatgtctatagtcttaaagaggtacagattatcattttaacatgttggaatggaatgtagctgaagtatactaatggagtggacaaagccagagtcttttctttctcctgtgtgattaatttaatttgcttatcttgcattgtagtttttctgtgttatggtttgtgcacatgggtaatgccattgtggtgctttccagtacaaatcttatttatccaacaaatgaagtgtgctgatggagtgaacccgaaccatgattgtactattaatattttaacccaaatatatgtttggtttgcttgaatctgtctttttcctatagttgcattgttgtcttgttggtattcaggactcagatacctttttaaaatttaggagtcgtggattatcttttagttccctgaattttattgtcaataattcaactttgctgatattttttcaatttatgaaggtttacttcaaacattttgaaaagtattgggatatcttactaactgcaagttcctttgcatgtttgttcactttttgtgcttgcatatcatcaagatctttcatttgtgtgcctctaacttatgcaaaagattttgtgtatgtatcctcatttgctgacattgtgggtgtgtatttttttggcagattgaacggctcgcc

SEQ ID NO: 72947 - DNA, 621 bp, Prunus persica
  Intron number 4 from transcript ppa010139m (locus ppa01013 9m.g) derived from phytozome v7.0 (chr-ID scaffold_5; pos 12876745 to 12877365 reverse strand)
gacgcggatttatcacaccatgtaagtattagtatgtctttaggatgttcatgattattattcagtatttacagcatcattaagtgtttgccttgagaaattactttccatatttcattggaagggataatttcccactggccaagagttttagatgacacgattaaggaaagggtgggtggtttgttaattttggattgcaaaagcaacttggaaaattttctctattaaaagttgtttcctttctgtattagtatatagtgtactccctcatttgcttaaagctattgattgcgtcttgtacatattgatttccagaaatatttagggggaattattatttgagtagtttcttttgaaccatcaataccttgttcatgtcactttttcaaagaagacaattacaaatattgaattagctctttcctttggtgataagggagtcctcctctggccaccaaaattgagtatgtttttttgttttttgttttccttttctttgaatgttcatatattgattgcatttccaatttcttatagtcttcacagttttattcatttggtctgtttacttctcatgatgcagccaaagtatttgccaagcttcatcaagtaagaaca

SEQ ID NO: 72948 - DNA, 458 bp, Prunus persica
  Intron number 1 from transcript ppa007743m (locus ppa00774 3m.g) derived from phytozome v7.0 (chr-ID scaffold_2; pos 17167544 to 17168001 reverse strand)
ctgtacgctttttgattcacaattttgtctcttctctattatttgaactggttaattgttgttgttttcggtgaatttttggttttttctggtggaattttgggtttttgatgaatttgggaattgcccagttgttggatatattggtttgattgattatgaaggatatttcttagaatttggttctgtttgatgaagttagggattcccagttcataggttctgtgttttgtttcagttctgtgaacaatttgtttttgaatttgatttcctttctgaaagtagagccaattcgtcattgccttgctgaatcttttcctctttatccatggttgatatttgtatttattattaaaaatctcgatatgcttgcatgtgtgtgtgtgtgtggatttcattatgtgcagtctcattatttggttatgatcctccataggaagtggatcctactgttgagc

SEQ ID NO: 72949 - DNA, 700 bp, Prunus persica
  Intron number 1 from transcript ppa003041m (locus ppa00304 1m.g) derived from phytozome v7.0 (chr-ID scaffold_1; pos 26873450 to 26874149 reverse strand)
ctttgcagctttcgcttttaactccgtatatacaggttcgattttcaatctggttcatgcatacaaatcatttttctgcattgtgttgtaatttactttttaattttagattttgaagaatatcgacccaaaatattcatcccatagtaattgcaattagcttcgggaaaattctgtaggattggtagcgttttggttataatcggggaattcgagccgcacggtataacatttatagacgaatttgcaattttttgttgttgctgtgaagcctgtggatgaacatgaaatatattcataatctacatttgcacagtgcaggagaagaaaaatattcaatttaattcactttgtaactcaacttcattcaaattataagcttcattttttgctaattaacttttaaacatctatgtagaaaatgaaaatgaagggaataatgtagtgtatgccgaatatgaatgcatctttactgttaatgtgcatagtgttgtttggtgtgatagttgttgttataaccagaatttctttaaccatcagtaatagtatcatttatcttttcagtgtgtattgtttcttgctatttcatatggcaatcatgaattcttgtgctaattttggtttatttaaagcttatgtaacttctttgggttaactatcctctgttttgacttattgttgcagacacttggaatagggc

SEQ ID NO: 72950 - DNA, 733 bp, Prunus persica
  Intron number 2 from transcript ppa023611m (locus ppa02361 1m.g) derived from phytozome v7.0 (chr-ID scaffold_4; pos 13093136 to 13093868)
ggtaaggatcttcttttactaagtacaagtgctgggaacaagaacgtatgattttgttttagatgtgttcatggatcttctagataacagctttgcttatttacatttatgccatttatacttgaattcaaatatctgtcctaagtttgtaatgcagttctagttgcatcatgttgtctaatgacgttgaaaaaggttccatcattagtcttcttagaaattcaaagcacaacttaatcctcacagtgaagtcatttagaagcaaatttggagtaatttaatgaaaatggattcgtcacctaatgtgacgaaagaaaatgatatcgataataatgaaggatgtgcatgatgattttgcttattttatttattattatttttttaattatggtatttcatcctaaacatagaatctctattgttgttctgagtgaggacatgcttccttttatttatttatttataatctcaatattccagcatacgacacatttcatatgagtgcataagcaaatactagttggacatgaaaattagcagtctgattgacaattgtacttgttataaaaacataaaaagaatggcaattatacctattgcatgtcttcaatgtttgtagtccagacattgaagttgcctttttgtgttaacagtttcttattggtcctttgaaatctgattgcatgtcttatatgcagaattgtgtctgattgtattccaataaaaggaagaa

SEQ ID NO: 72951 - DNA, 858 bp, Prunus persica
  Intron number 1 from transcript ppa010440m (locus ppa01044 0m.g) derived from phytozome v7.0 (chr-ID scaffold_4; pos 7565798 to 7566655)
gctgggaaaagcgcttggacttgaaggttggtctattttctcatatgggtctgtttgtttcctgggaattaatggaacagtttgctgtcataattttcctgggaaagatttgacatttctcttgggaacttgattttggtgttgctgtatggttgtgttcttgtttttgatttggttgctttgaattttgatttcatgacatgttctgtttcattcatggtttgactgcaattggctgtattttatttgtattttcttcaatctaattccttggtttggaattttctgttatctttagctgtgtgtttggttgctgagaaacagatagtaatggagtataagaaatcttgtagctttctgcagttcatttctttaattctcataagactttcaatttatcataatattgtttttccattatccatgttttatttattttttcctgcagtccattatagcttttgaaattcaatataacagtattttttttcttcttttcattcctgacctgagtttcccctgccgtcgaacagagccttttgatgtttatgaatatcctcaagatgaacaatctttttttaatagtttattgctattgcttgaaaaatataatatttaaaataaaaaactgtaattaatagcaaaaggatatatttgtgtattctgtcaattattttggtgatgttcttcaatgctctgcaagttctaatcccattgtagattctttaaaaccatcttttatgtcatgagtaaattaattgtgagcaattcatttattttattttatttctgtaattaacatattgtatattgattgctgcagtctgggaaagtgtatcttcaaaggtgcagtgctcc

SEQ ID NO: 72952 - DNA, 884 bp, Prunus persica
  Intron number 1 from transcript ppa006189m (locus ppa00618 9m.g) derived from phytozome v7.0 (chr-ID scaffold_2; pos 18150824 to 18151707 reverse strand)
tccagattgtgcgtgatcttaacctcaagttacaggtgagtggtatagaattgtaccagcatttttttttttgactttgggtgtgcatttcaatatgcctttgcttcttatgtttcttgtttccttttggaagtcattacagtgcactaaaggatgaaaacagtacttcttaaatcttgaatgggtctttaaataaaattccggtaaagattccaaatttccagtttacacaaatgttaacctgaaataatctcacaattttggtttgttttatagaactgatactgtttagcatcgtagcagaggaaatggttctggaagtgtcacatatgtttctgacttggtgtgcttttagttgcttcaggatatccatttgttactaaataggttaagtcctatgattttttgaaattaaattaagcgaattaaacttcatcatactgcttatcctgaaggttataaacatacattcattagaatggtccagaaacataaaattatttcctttagatcgtgttggaaacattcttagagccaacatttgtcagtctctcagtcaagatacttattctgaaacagttgaaaaagctttgatttatacagataattcatcattttggtgatttgtactaaaactagccttttgattagttttcattagaaaatggttggttactgtccttggtaggtagcattatagtcttgagtggattgatgaaaagcaaatatatcagtagttctctttttgtataaaagtttgtgagactgcttatctgttaaatctcattttatatagggtatagcttttctgctctatagttttcctctgaagatgaatgtcagatacggttccattgtctaactctatattgctataggttgtg

SEQ ID NO: 72953 - DNA, 819 bp, Prunus persica
  Intron number 1 from transcript ppa004400m (locus ppa00440 0m.g) derived from phytozome v7.0 (chr-ID scaffold_8; pos 16525396 to 16526214 reverse strand)
aacagaagtccccacaaaacccatttcatttcaaggtcttttctctcactctggccctgattttttttttttttctgttggttgttatttttggtggaattctgatattggtattcattggaatctgttaaagatgctaaattctttaagcccatgaatgatcttgtggtggttgatgagaaagtttaggaaattatatgttcatgtttttatgttttaaaagattgctcttcatactctgtttggttgctgagaaaaaagtgagaataccaagggacttgagcttctgttatgatttaagttctatgggttcttttttcatttgaaaaatctgaccttatcagcttagctgacttgttaaattgacctgaattgagtggtgaatgttaattcttgtttgcttggttgcctgatggtaaaaggttcaattttaacttttcttatctgtgtgtgtgtgtttttttttttttgtcttttcccttttcttgctatgctttatcagcaaccaaacgaacctttatggaagttgtcagtatttctgagtgttaattttcatgattttattagaagacatgttacttttttattgttttggttgaatgattgattatcaattctatgcctgcctgattattcctgaacttatgtacaaaatattagagagaacctaaaggttttggaatttgaagaaaattataggaaaatttgttagatttgaaaagaaaatttcagaagcttccatgtgtctggattaataaaaattcaaaattgtttaatggaattataatttgcagccttgtaggtgagctcaatagagag

SEQ ID NO: 72954 - DNA, 553 bp, Prunus persica
  Intron number 2 from transcript ppa000592m (locus ppa00059 2m.g) derived from phytozome v7.0 (chr-ID scaffold_5; pos 16492156 to 16492708 reverse strand)
cataccatcgtcagacagtagctgtaagaattttctactcgatgactccatttttttgtttacaaatttgaggattatgtcttaaatttgaaatacaccttggtatgttacatccttcgatatctttttttttagggaatcaatgttgtttcaaactcactgttggatagcaaattctcattgtacttgttagacatactaatttcacatcaaccagatatcatttactattcgatctaaaattttcttaatgtatttgaaagtactttcaaacttgagctttatacagtttttaggtgagaatcataagctggaatcatcttagaatttggcatggaggatatgctaatgacaaaccaattcaaattcaattatcgagggatgcctagtacactaggtgtaatttttcctaattcttagctagggctgtgtgtatatcccagcttctgctgattctggaatggaacttgaaaccatcaatataggtttctctgtcattttagcagattttatggtactgaatctgaatttgtactacttgtaattgcaggaa

SEQ ID NO: 72955 - DNA, 613 bp, Prunus persica
  Intron number 2 from transcript ppa025607m (locus ppa02560 7m.g) derived from phytozome v7.0 (chr-ID scaffold_5; pos 5500773 to 5501385 reverse strand)
atctaggatttctttagcttgcttgtgtattttctgtaagaatcttctttgcttagtggattgcctggtcggataattacccctagtttttcccagttgtgggtttctgggtgaacaattttctggttttgttgtgaacaattttctgaatttgtgtgcttgatagttgactagtcatcttgtagatagtcaatgaccatttgcaaggcgataagttttaatcatcaacctcttataaatagtctccattcatcctccaagttaggcaacatatccatattatgactaaacaagcccataacatgtttaatacaaaaaaatgatcctttactcataataattttataatttgtagaccaattctctatatagcatgagtcaaacatggctagctataaacaataatgtacactataatttccatgcaaattcatgtgtgcacaaatcaacgaaatgtaaccatgttcctttttccttttttgggagctatataaagtttgatatacatcaatttggactgcaaaaatcaaactctgcaaatcagtttgataaataatgaatatcatatccattattctgttgttatggcgcataataatactaagttgttgct

SEQ ID NO: 72956 - DNA, 700 bp, Prunus persica
  Intron number 1 from transcript ppa008842m (locus ppa00884 2m.g) derived from phytozome v7.0 (chr-ID scaffold_7; pos 16505864 to 16506563)
gcaccacataccgcaaggtttggatttattgtccttgttattcagattcaggtgaatcagctcttttttagattgggttttgcttttcgtgttcatagatctgcatgcacatcatgttgaatctgtaaatccttgccttcttgctaatatccctgttgggttttgatcttggatcatcattggagaagaagttgagcaatttttaattgtttgaaagatttttatattttttcgcaaattaatcagttctactaaatgcaaaacccccctttgatttttgttttctctgtaattgaataatagcacaggcatgttgcatatctgtttctctgttctggtattgctatgagctaggatctggaccataatgaaacggtcttttgccctttcgtctctcactagattttattacttaaaaaaaaagggatatgcatttgttatgatttgttgatagttaagaatgaaaaggttgtgatttggtcatgcaattttgtttttgaattgtgggtgagatctgtgttcagcaggtcatcaatttaccctgattcatatactaatatgttgaaatccaattgttatttgaacaaaagaccctgattttcaaaagcagactttttattattatttagctttctgttaatccatttcttcattcatattgtacttgtttaatttttgaatgtctattttggatacaggg

SEQ ID NO: 72957 - DNA, 755 bp, Prunus persica
  Intron number 1 from transcript ppa006489m (locus ppa00648 9m.g) derived from phytozome v7.0 (chr-ID scaffold_1; pos 225535 to 226289)
cctcactcaattcggtaagtgctcatgtctgtcaacaaaattcttcattttctttgcttcacttcacaactgtgggtttttattttttattttatttcctttcatttcatttcctttgctcgagtatacaaaattcaaagcatctcttccaataataactcctcctgttaagtcaatttaaataattaaattatggtggaaaccaaaaggtaataaatattttccattgactgtattcaaaggaaacaatctagttgaggagatgtagttctttcctaataatcactaggataatggagagagcctatctgagagataagattgctctgtacaataacaattacaattagggctgagtccaaaactgtaatcactagtatagtgatcacaataatacgcaattgtgattctctttctttttgtatttgcttttgtgatataggaacccgtgtttgtgcactatgaacatgagacattccccctttaatataggatctatcaaatcaaagcatgcaatattgaaatttatattgcattggtgtttctatttttaacattactacaacatgcaacaaaactacattacatggtttgagtgtaattttctgtcagccagcctgcgtttgtcctttagatattgatatttttctgtctcatatttggatcttctcctttttgttaagggactaatttcgtaagtcaaattcatccattttacaggctaaatttttggcggtgttaataattataccctg

SEQ ID NO: 72958 - DNA, 784 bp, Prunus persica
  Intron number 2 from transcript ppa013321m (locus ppa01332 1m.g) derived from phytozome v7.0 (chr-ID scaffold_5; pos 17956457 to 17957240)
agaaatccgtcagtttctaactactactctctctctctctctctcgttttaatttcttatgtgattctaatctttaatcaagttgatgatgcctgcaactcttcagcatgctaaaatgaatttatcaaaaatgaaatcatataacaaaaggaaaattacattttgagcaacaactgatgtctccaatttccattcactatactgtttaacaaatttattatagaataacagcattacaaattcatatttatttttctcaaaatcataatgcccaatgacacgcatacctgtttcttaattttgtcgtctaaaattcttgcatattcggcattggattgtctcgtttcttcgacttttctttaggatggtatcttgaatcttgaagtttctcataattatttctgtctttatgtattgaaaattttctgctctttattatctttaagattttctttgtttttgggtatttgcggatgagggtgaaacaaggatttgtgcttgtggaaatattctggtaggatatcaattgagtgtatttggaatatactctctacttttgcgctgtacatttcatgaaaaacatgatatgtggttcagttcttatatgttgcaagttgcagcatatgtagctgtgggatgtctaatgattgcacaatgagccctctgccaatcaagagaaatggaagattcaagttctatctacatatatatacctttaaattctattattcttgacacctttgttgcggaaaatatgtcatgcagatctacaaggctcaaagga

SEQ ID NO: 72959 - DNA, 1036 bp, Prunus persica
  Intron number 2 from transcript ppa018528m (locus ppa01852 8m.g) derived from phytozome v7.0 (chr-ID scaffold_6; pos 6908467 to 6909502 reverse strand)
ggataggaaaaagtctcttgcttacaagcacctatgtatgtaacttctctttctcactctttttataaatttatttttggatttaaatcaaagtttcactttttattttgaatctgtttggaagtgacaagtagcagtagtttgtctgtggttagtgcattgttacgagtactgaacatttggatcaaattggttcaattcttttggtttatagctttgaaatgatattcagaatttttctcaaatgtgatactgctattgcattctcatgctttggttcatcgtttgaggtgttgttttacatgctcaaataaaaatggaaatcgggttagcatctccttttcctcgtgaatgtagcacctctccatttggaaaggaatggagagtacggacccagtggggagttcagaatgacctctttaatgcccttaattagtattcctcatgaacatcatatggccatctttactagagttgtgttgtattttgcgtgcaagttaacgacagccatatgttttgtgcataagaaaaatggacaccaagttgtactgttagaaggaacagtgttttgatttagattgttcaatgtaaaacaagcatttgacagcttgaaaacttaagagtgggtaagtcatgtacagaatattttgttaaaagtgaagaacctctcatttgttttgttatttccttcgtttgtttgctttttctgatagtcgcatttgtgtttgaaaaagccctttggctgccgcactaaaaagtttttccattttagagttagactgtgcggagcttatcaacggaacctttttctcatccatttactagaaactgattactaaacttcgcttacaagttcgtacaaatggtgtcaacaagggaaaactagttcttgaaagacaattattatccgaatcagtcgagctaaaacgtatgagacatacagtcctagttgcttattgcaggttatgttaattcccagtcataataacgtgctttcttcttgtttcagccacagttgtctctaaacgaaagagat

SEQ ID NO: 72960 - DNA, 936 bp, Prunus persica
  Intron number 1 from transcript ppa006209m (locus ppa00620 9m.g) derived from phytozome v7.0 (chr-ID scaffold_4; pos 6362538 to 6363473)
ccggaaagtctgcactgacgaattatgtttgttctttgcccttatcgtttaaaggtgtttaatctaatggtgttcttgatgaattattaaatgattgtattgagcgatgaaggtactgcggttaattggctttcgtagtttttgttctgaagctgttttttggttttggtattaagtagtctttaatttgattaacagtttcttgatgatttggttatgggaatttcagtagggtatacacaagttctgtagcatgagtataatgaagtgttggagacttttggtaattttggcgttatgcattatttcatttgcctaattggtcatagtttatattttatgggcagataacattcgttcttctatgttgctctgttgtgttgtgtatattgcatggcattagatgaacaacacgggtatcgtattctgcctaattttcccatgattactggacttcggttgttaagatatcaaaatagttgctaaggttaaagcatgtttgagcttcttgacagaaggcttaacatgtcagtggctctgaactcgtttccagctaaacaaaggtgagttcttcttaggagtcttaagtgagtatcaaacaccagtattgagtctgaacctgtcctgtgcataacatttctcttaaatccaaaatgttatatttcggagagaaacaaatgaaaaatctttttagactcccatctgggatatacatataagcttgggagattatcctttgttcttaaccttgattctttgatgtactctgttggatataaaatgatttgcggtactatcttgaattaagtttattagaacatggatctaacatcattttatacctttactggatttattgtaaccagaaccgttctgatgacgtcctctgcattttttacaggttgggactaaggttgctgctgtgtcacggaagac

SEQ ID NO: 72961 - DNA, 560 bp, Prunus persica
  Intron number 2 from transcript ppa002422m (locus ppa00242 2m.g) derived from phytozome v7.0 (chr-ID scaffold_4; pos 154720 to 155279 reverse strand)
agcttgagttctgtgttgaaagtggtaataattcataaaatctatgttcaagtatttttcttatattcatcttccctttgtttttgttttttttctttctttctcttccctttctattagaatttagaattggtttgagcattcttaaagaatactagccatctggttcaaacttctctgctgatgcagcagtcatgttcattttccattttatggaagagcagggccatagaattagataattttcacttggctgatctatcagatacaataaaatgatgccactggatgattctaacctcctatcacacaattcactgagctaggttaagtgcttgtactcttctgcttagaaagacaatgtagaatatatatatttgttttcgagcttggtaacttaacttagcattttgatccatttgagggaggaaaaaaaagagagaaaactttgttccctctgaccttctcacccattttgcttctttttctagtctaatgacatgggcttcttatctaatctgataggtgacccagctatagttacctcacaatccccaaaa

SEQ ID NO: 72962 - DNA, 610 bp, Prunus persica
  Intron number 1 from transcript ppa019981m (locus ppa01998 1m.g) derived from phytozome v7.0 (chr-ID scaffold_8; pos 19784699 to 19785308)
aaggtatttatttacttatttctcacttaagagatgtaacctggcaactaaactttccaatcagttttagctcaagtgtctcaaaaacaaaacttgatgtatcagtctttgcaatttcacaatttattatttacttatttctcacttaagagatgtaacctggcaactaaactttccaatcagttttagctcaagtgtctcaaaaacaaaacttgatgtatcagtctttgcaatttcacagtttaagagattgttaactcctccttttgctaaaccaggcattataatgcgaattaaattcagtttttcgtatttgctaatcaaacatgatctaaggaataagcttctatgtgtcatttcatcgtcaagtccgcttgtgggctctgcagaatacaagtcctctaatcaagtatcactctgcatcacaacgtgggcacattaaatctgatgttatctttattgtgaagcaaacatctagtaaggacttaaaactgagacatacaaaaccatcagacatatacatttcttagcttttatcctactatgtattgattatttagttcatactagagaatattaacattatggtcttcttctaccagataaaaaa

SEQ ID NO: 72963 - DNA, 560 bp, Prunus persica
  Intron number 3 from transcript ppa010082m (locus ppa01008 2m.g) derived from phytozome v7.0 (chr-ID scaffold_2; pos 19659356 to 19659915)
agagaattacactggctgacttgttccaggctgatgttcctgatgttggtcaactgaagcttgactctggcaaggtccagccagaaatggagaaaaaaatgaatgccagaacaaggagtggcctagcatttgccaagaaactcatccctcgcgtcaaagatgattcaagtccaatcaaaaatatgcaacgagtgagtagttaaatgctttattttctatcttttattgatccccaagtcaccttcttccataagcatatcatatcggaacatgttacgttatcaaactagcaacataagaacactccgaattctaattattgtctgaatggggtctaaatttacagtatcatatgtgattagagttgatatcacgtgtgatgcacatttcttttcctagtcaatttaggaagggcgcgcacttattagctagtaatttagtaacggtacatttttgtagttttagcgaggtataattactgtggagagagtcatatcactgtcatggtcttgtttttcatagttcactgaatgagtacctaatctctaatgtcatagctg

SEQ ID NO: 72964 - DNA, 751 bp, Prunus persica
  Intron number 1 from transcript ppa021097m (locus ppa02109 7m.g) derived from phytozome v7.0 (chr-ID scaffold_8; pos 2615657 to 2616407 reverse strand)
tttcaaggtgaatttaatttctcttgttgtcttgatccaaaaaagtgaaagctacgtagttagtctaggtttaactttatgcatctcaggtcgatcttcatgctcttcttcttcttcttttgttttgtttacttgttttcgtttcatctttttggtaaatttttgtttatgtttttcggttagctacttacagattgaataaatgcgcttaatcaccggagctacaagctttcacaaatttttgtatgttttgatcagtaagaagttcatacttttgcaggcgatctagctactttgctttgcttgttagttttgggcttaaacggggtgcctttttttaagtctgacgaatttagtttcatatgttggaagggtaattattttctgaccccagagttagttgtttactaagtgataatgaaaaagcatatgaattatgattcaaaagatgaacatgggttgtcatgtttttaatattaaacgtagcagtagcatgcaacatggagatgaatgattttgtatgtgtttttaattcaaggatgaaggatggaaccaaattttgttgtttcattatcctatcttgtttttttttttttttttttttcagttatttaatgagtccattcttgtaaaaacttccctagttactgagtttacaacaacaagattaataaaaaataaaattacagcagctcattagctttttggaatctaatttttattattaatatctgcaggaagctaggtgagc

SEQ ID NO: 72965 - DNA, 486 bp, Prunus persica
  Intron number 1 from transcript ppa011372m (locus ppa01137 2m.g) derived from phytozome v7.0 (chr-ID scaffold_3; pos 13174145 to 13174630)
tatcatcttggaacggtagttttttgaatccttgcatgataatactgtttgtactacattcttgtttctgttaatctgtgttaagtttattgtgcttcgaagatattctcttgacgtagacatagattttaatagagaagagagaaaagagaagaataggtaagagacagaaaagggatggaagaaagagaagtatagagcgtgtcagacaaccgaccagatctgactatgttatggtttaacttttaaggtcatatatgtctgcagcacacatttgtttcattttacatgtcgtaaatttataaaagatatatcagtgtatatctcggtaatgttcactagtgtattctagccctccacaccccaccacacccccccccccccaaaccaaaaactttagtttcttacatatctcggtaacctatttaattaggtgtagttttgactgcaggtgctacaactccaaggaaaaggaaaggattcgga

SEQ ID NO: 72966 - DNA, 739 bp, Prunus persica
  Intron number 3 from transcript ppa011372m (locus ppa01137 2m.g) derived from phytozome v7.0 (chr-ID scaffold_3; pos 13174784 to 13175522)
cgatatcttgctcaggttgtgttttcttccaggttgccagtgtcactcttgtttcaaatgtaattatatatgaggattgggtgtatatgtcacgtgaaagcttgaattgtgagaggaagtcctgtttcttagagggttgaactaaattagttttataacaagttagtccatcgccattttggaaattcttggatataactgaactcgtttccctatgtaaaagattcaatttttaaaggcttgaaatcatttgcaaatgagggtgccttctgctgtagagaacattaccttgataaatatctcttttctatgtttcaaactcaatgctttggtcttaggcttccaagattaagttctttctcgtgaaacgccttgctcgtttatgataccggattttgatggaatatttagcatttttctaacaactgtcctaaaaatcatgtaatgatttggtcctttattatatcattatatgacacttcatagaatcttgaagccttatataagtgtgcttagaagaaaaagaaagcttgattgtgcttgattgtaaattattttacaaaatcttcatcaaaaaaattattttacaaaaaaccttacaacatattttgatgtaccttttgtggatttgtcttcataggactcagattttaatatttgtacctttgtataggtttgtattggacttcttcatcttgcaattaagtgtctctctctctctctctctctctagatatat

SEQ ID NO: 72967 - DNA, 781 bp, Prunus persica
  Intron number 1 from transcript ppa000968m (locus ppa00096 8m.g) derived from phytozome v7.0 (chr-ID scaffold_6; pos 3841287 to 3842067 reverse strand)
cttattggagcttgtaagcgctgagcttgatcccagtaagtatggagtttggcagagcatgcatgtgcattcaaaccacagcttaactaacttctcattgagtaaccctagctaggtgaatgtttttttaatttaaagatttgtttggagatttgtttaaagatttgttttcttggtcatcttgaaattttccttgatttcttaaagacagctagctagctatttcttttgattttgggaccagataacacagctaaatttgtccagacagagatttgttttccaaatctgctatatagtttacactataactagtcattcataaataattttttatatattttcttttaacaaacaaaagacgatatatcttcgcttctatcctaaagtatcttaatgtgtgaagggaaatggagatagtgatgagagaggaccatctcaatatcattcgattggtgagaagcatggttaagcaacacgggttttgctagctactaggcatcatagaaaaggaaaagccttgtttttcttcagatatggtccctacaagccaaaatgaagcacccaaaattggcatgcatggaccatttatggtcccagagagtcggacgaaatctatttatttgattttcagcaattgaccgtatccatatacatataatttaggaacttatatatatccattaattatatgcatgttgcaattaggaaatgatttattaatttgttaagtttttgcgttgaagaaactggattagagaaggagaaggttgcagggttc

SEQ ID NO: 72968 - DNA, 451 bp, Prunus persica
  Intron number 1 from transcript ppa002583m (locus ppa00258 3m.g) derived from phytozome v7.0 (chr-ID scaffold_6; pos 11832169 to 11832619)
tcgtgtgtgtttcaactttcaaccataattgggtacaaaactcaaactccctgttctctgcaaaaggcccttgatgggttccgtatatataattttcttttttttcaatttttttcagtcttttttataatattactttaaatttgttatgatctttgatgcgctttgtgtcactagctactactttcatcatcatctagctatgcagtccttgaaagtcatctctctctctctctctctctctctctctctctctctctctctctctcaattttacatatagttcgtggtgaacttcacccctccttttcttcagaagttttctgggtctaaataaaacgactctcactattttaggcagatataatttgaggtttctgattcatgggttttcttggcttgtttgagatctgcagattcttgttgcttttttctccaggatcttgcttgt

SEQ ID NO: 72969 - DNA, 892 bp, Prunus persica
  Intron number 2 from transcript ppa002583m (locus ppa00258 3m.g) derived from phytozome v7.0 (chr-ID scaffold_6; pos 11833516 to 11834407)
aggtactattaaattctatgttcattcttttattaaattttttgctatttttgtgttttcattggtcatattgattctgtaaagtttcatttgttaagcacgattgtttttgatgtcttgtgcaatttatccaaagatgtaattcaaccacacttctagtgaatgattgaataagaaaaaacacacctggcacttggacaagagttgggcagaattgcactagtcaggcttataattattagctctagtcccgctggtgggtccattacgtaaatgtaaccacctttgtcaagggaatctaatttactaatttgtgtttagcttatgattattacacgacgtttaagaaaagaaaaggctttagatgttaattaagtcgattcaagaaagatgaagaaattattgtgtgtgaggataacatgacgtgagtcagaattgaaaagtagccacttagtggtggactataatactctttaaatttgataggggaggaaaaagaaaaagagaaaaggaaaacgaaagttggagcttaattgcagtgggtggggatctgggaccattgtgtctgtttcatgtagttaccaaactttcctgctgaccccgtcattaattaatgtatacacatataaaaaaaaaaatatataatatatatatatatatactataaaacggacatatgtaataataaaaaactatacgacagaaatgaactaaagtgggtcattttctttgtcaccttttcgtacatttggtttgtttgcagtgagttttggtctcaagagggtccattggccaaaactgtcgtgcagctctgtaaatatgctaatttatttatttatttgtcttttgttatgaaggtggagcaaagatacagacagtaccaccaacaaat

SEQ ID NO: 72970 - DNA, 773 bp, Prunus persica
  Intron number 1 from transcript ppa002532m (locus ppa00253 2m.g) derived from phytozome v7.0 (chr-ID scaffold_7; pos 20711090 to 20711862)
ttatatacctcccccgccgcctcctgggcctaaaggtatcagctttctttgttttttgagattttgtgatctggttttggtaccttttttttgtttgtgttttggggtaagttttagattcggtttcatttggaccattttgatcactctgtatgcagaaatggtctttagctagattttgtgggtttagaggagcccgatggatctggtcatggtataaatttataaattcaattttccgcatttcccccaaaatgttgccatcgtttcgcattgcaatgatttttgtttataattatcccgattggtgatgacttctgcttgtgtgattatatggattaacatgaagccctgttgaatctggtaaagcatgctatattcaggggttatgccttgtgtccttttcatggtcattatgtatcgtgttatgcataagtagaaaacttccaacttataaatactcgacttgaattctgaatcttactctcaaatctttgaatatcaatcactacttcactctcgtaagagacattggattctttttaacatttcacttggattaaaagactcgtggagttttatggttgcctttttgtttttgtttctatgacttattattttattccagttttgttcgaaagaagacattttctgaggaagtttctttgtacacctaaaaatttgcgtctgactgcccatgaacgaaaacatatcattgctgtggattatccagatggatggtaatactgatttcctagtgttgtatttttcag

SEQ ID NO: 72971 - DNA, 866 bp, Prunus persica
  Intron number 3 from transcript ppa012862m (locus ppa01286 2m.g) derived from phytozome v7.0 (chr-ID scaffold_4; pos 28695833 to 28696698)
cccctccgagctggttaaagatctcaactcaggatgtgagaaaccttaactctaactagtttggtttgttgtgatttgtttggttaatgtgaattgaagtaagttttgaatattttgctcaatgtcattccccacttttgggaaaaagaacaaaaaagaagaagctgttcttacccaattggtatcagacagtaaaggattgttttacgttttttgggtcttctttagtcaattagcaaccaaacagagccttattagttcaactctctcggtctgtctttcatcttcattgaatggattgattaaacagtgagagaacaaaaaaaggtagcagattcttttaatgtaatttgggcacatctttccttgctgtttgcaccaaatgaaaccttgaggctggttatagtgtactacacatagtagtgatgttctaattagcatgaatttttcgtacttacaagtctgttaatgttgcgattgtagttggcatctttgtaattctaaaattgaaaacgaagcataatgaccttttcttttgtttggttctatttgagtggtttttggcattttagaataatcaaaacttagtttgttttctgcgttccatgttcatataatcaattgttatgcctttatatctaaaatgaatggccacgtacctttgtggcaatggaaaacgctgcaaacccattcctctctattgagtgaatgagagtatatttggttgttaactactgatatttccaagataattgattcccaatgcaaaggaactaaacactaatttccattttgtgtattatacttaccaagttgttttttatgtttaaggttgaggagaacatttgcaaatttgccaagaaggg

SEQ ID NO: 72972 - DNA, 350 bp, Prunus persica
  Intron number 1 from transcript ppa025375m (locus ppa02537 5m.g) derived from phytozome v7.0 (chr-ID scaffold_2; pos 20225939 to 20226288 reverse strand)
tctgcaaccacaagcctagtgatctgcctggtaacctattaatctttcacactttttcttcactacccagttttgctatgtgtttttgtttatttataaagttatgatcttgatcgctgctgttgttgagcagtttggtttcaaaattttgttttgttctgcatttcgatttcaatgctcttggaaaagccaacccttttcttatttctaatgtgctattttgttgtatgcatacatttatgatcttgtttagctgttgtgttgttgagtacttgaaagacttgaagtgcgttggtttcatattttctatattttgcatgtcagagtacttcttcagcaaacctaattac

SEQ ID NO: 72973 - DNA, 599 bp, Prunus persica
  Intron number 1 from transcript ppa003898m (locus ppa00389 8m.g) derived from phytozome v7.0 (chr-ID scaffold_4; pos 9151415 to 9152013)
acatcgaaaccctcgtctccgatcaacttcaagtggtaacaatccaccctttctcaatctctcgtttttcttcttgtatttcacaattttgtaactattatcttaattcactgtgatattgatacggcccatcgtttttgcaatatgaatttcgcttcgagtttcttttatttagaattttttgccgctgaatactctgttattatggagctctgacaagggttttgctgaatttcgctttgtttcaactagtttactgttatcttgcgatatagtgcctatattgatgtctgctgctatacgaatcttgtactggcatcagcaagctgaaaaagtttactttttaaagtaattttttttaaggatatgataatgggttgttgcagaaatgaaataagctaggaaaccctctcattttgatttggagattgaaatgtgacttgcatgtttagttgaatatagataatcctgaagtttgttaaagatgaacaaagaaaattttcactagaacttgagttgagatttgaggaacctcataggaattcataatattgtctaaagaaagctactttcaatgctgatgggcaggtttcctacaa

SEQ ID NO: 72974 - DNA, 516 bp, Prunus persica
  Intron number 1 from transcript ppa009727m (locus ppa00972 7m.g) derived from phytozome v7.0 (chr-ID scaffold_1; pos 34330569 to 34331084)
ttgatccattcaagatcatcacttcccaggctcttgtatgttttgatttctatttctttttgctttgaatccatactcagtttcttctgtattctattttggtctttgaaatgcgattcttttgggtattgatgttttgtttcgcgaatagtaatgccatgtttggctgtcgagagagagtgggaagataatggaaaaccctaaacagattgattgggatattagagtattaagtttcatttttaaattcagtttttgggtttgtttgacaattatctgggcatggatacgctttactgttttcgtattatttactgccacgggttctcctgcattgttgaatttgtggggtggaaattgacaagctaattattccttgatattttttaatgtttatttttctctggaatgtttttgtttccagaatctagtaggattctaacaatgattatttcctgtattgtgattttcaaatatgtcatttctgtaaattcaatataatggatgcactcagga

SEQ ID NO: 72975 - DNA, 726 bp, Prunus persica
  Intron number 1 from transcript ppa005826m (locus ppa00582 6m.g) derived from phytozome v7.0 (chr-ID scaffold_2; pos 14725621 to 14726346)
gcctgtttcactctctctctaaattcgcgcatcaggtatgctttaggattacatttattagggttttccttttgtttttgtatcatacaaggaggaatctgctcgggtttcgatttagggtttttgtatggatttcgaattcacatttacaaagttgagattgggtttgtttactatgaaaaatctgacggtcgtgggttagggtttgagtttgtcttccttaatatgatttgtgcacctgattgtttctcttggatgttttcttcatctccgcctttgactactatgatttagggttcaagcgtctctctttttatgctgaaagggactgattgggaacttcttcagtttgatttttaggtttggtctcaaagtattttcgaacttgggaatgtatatttaatggaactaggtattgtttttagttatattttcatatgttcggcttgaatttgggttatagggttctttttggctgcttgtttgctaatttcttaagaaatttagagtggtccatctcagttccttgtggatatgtttggaagggaaagaggtggaaatggacgtgtatggttcagattttgttttgctcttcacaatgttaaactgaaactgaaagtaatctgataatctgatgtaatttttcttttcccatgagtcatgttcttattggcttgttgtatcattgcaggtaaaggtttcttccataccagaaggactctacta

SEQ ID NO: 72976 - DNA, 450 bp, Prunus persica
  Intron number 2 from transcript ppa012805m (locus ppa01280 5m.g) derived from phytozome v7.0 (chr-ID scaffold_1; pos 40861718 to 40862167)
ttactgatagcctagggtttcaccatttccacaaggtaacatttcacctcttctcttctacattattctgtgagtcgctctcctctttgattctcattattcttcattgaattgttaaatcgcgaatttgtagtcaaaattttcagtaaatgttgtttttcattgcttgagagtatgctcgatcggagctcaaagattgcgtttttttgatcgggttatttgtttttgttggaaattcttatagatccgtggtcgtttattgtttaattaggtcaagtattgtgaactgaatatgattactatgtttttaattcagttagattagattcaggtcttaagaatttgattggcattctttttgttggaaaattttgtaaatttgtttataattcaacgagtgtctctggtggttaaggtactaagaagcaagagtttgttctttctttcaat

SEQ ID NO: 72977 - DNA, 889 bp, Prunus persica
  Intron number 1 from transcript ppa013450m (locus ppa01345 0m.g) derived from phytozome v7.0 (chr-ID scaffold_2; pos 9686435 to 9687323)
ggtaatctttccgtccatgttcgttaatgcttatattctgtgtgttttctgagcaatatgtgcttacatagtttatttgattcttcctgatttatgttatttgattttgatcttgcgcgtctcctattataatttgtgattgttgagactgaaatcaaaagaatttgattaccaagatgtagaagctatagggtgttataaatttcttttttttattatataatgtttatatcaaaagacattgagatgagttattttcaaagcattacatccatttttaaaagtcagtggctgctccttatgagactcaaaacgatggtagtgaaccctgttgtcattataaactgttattttgttccctctcgggaaatttgtttgctttaattggattttattatgtattatatgaagtttcatgatcatattttcgtattcgtttgtgtttttgttgtgcttgatacgtccccagtcggtatcgttttgcacgagcagttgttttcttgtttataaaatttattttagtcatgttcctaaattcaaatgtatttgggtggttatgtgatgacattacatttctagactttgtgtgtcacaaaatttgaatatgtttagatcaattttcctgtgttcttataatatctttctgaatgatgcattgatgagaaacctgccggtttaccgatctaaaagaatgaaaggttaacttgatatgagaacccgtcacagtttagtttttgcttagaaaatttctgcatctttgagtgtaatgttgcagactccatttctgctgtattcctttgttttgtctatgttaagcatcagctgtgcaaatgatttaagtaacctatatcttgattctcatgcagcacatttaaaaagaaggctccaa

SEQ ID NO: 72978 - DNA, 1013 bp, Prunus persica
  Intron number 1 from transcript ppa005760m (locus ppa00576 0m.g) derived from phytozome v7.0 (chr-ID scaffold_2; pos 17436159 to 17437171)
cgtatagggtatgcggttctgttactctgttttctttgtggttatctctggaatgtctagggtttttatgattaaatagtgtataggttgcctatgggtggttctacactgtgtatttgggttttgttggatttattacaagttattgtttaattgtttacctgttattgtatattataattctcctgtgtgtaggaaagaggtcaatatgaaaggagttaatggcaatgcctttgtgttttcttcgtcttgcgataatattttgtttttggtttaggttatgtctaggaatatggttgtagatgagctgttctaatcaggatacgggagagtcattcgtttgtctcttaggcaacgttgggtactaaacaaacaacttgttcactgctcgaggttagcttgattgcagttgttttggtggaatagcgggaagatgttataactgaaaacgtgtgggtatttagtaaaggagactgtgaacctaaagttttgtgcgaggatatggatcatagatatggagttttgatgtttgttaaattgaaatggaccactggtcttgtcaaccgagtccagctgtcagctaataatcagcttcaggcccaaaatggaggttttcaaatgcaacatgatccttgttttaaggcatgaatcagtgttgcagactcagttaggtttatttgttgtatgtttcccatctgatgatcctgttagaacttctttttttggataaattttatcaggatttaatgacttctaatatgcaacatcaagctgttctgctggattgtagagtctcgatgcttattttatatttttaattgcgggagaatgcacttgggagctttctgtctgaggggttgttatgtgtgtttttgttgctgttttgttcctaaatcatggaataagtgcaatttctgtgattgaagcctctttggttcccattgtctctttgatctctcattctgtctttgaatgcttttgtgcagacaaatcttatcaaagaaagcataaga

SEQ ID NO: 72979 - DNA, 383 bp, Prunus persica
  Intron number 3 from transcript ppa026434m (locus ppa02643 4m.g) derived from phytozome v7.0 (chr-ID scaffold_4; pos 20545035 to 20545417 reverse strand)
gggactggtgagattgcttcctgtcttgttatctttttaagttaattatgattctcataaagtcataaaacaatacagaatgtatggcatgtttacttttaagtaacgagaataagaagaaacaaaatgattttcattcttgacttcccttatttaaattcttgatcaaatacacaaaaaatcaagaatctcggatcaactgggagagtgtagttgatccgattctcattctttcattctcgtacctcttccttattattcccattaattaattaaacatgcttagtaaaaagtttgtcataaagatcaaagcaggattacatatatatgtgtaattcaaattaattataatacctattaaagtttcattgcagggggtgagg

SEQ ID NO: 72980 - DNA, 658 bp, Prunus persica
  Intron number 1 from transcript ppa001953m (locus ppa00195 3m.g) derived from phytozome v7.0 (chr-ID scaffold_8; pos 19212935 to 19213592 reverse strand)
aggtttgtttgctttaaaaattgcttatccgttgaaccacctgttttcttcttttcaatttcaatttcaatttttttatatattttttttaactccccggaggtaaactaataaaactgaaaggattttgataaatagacattaaactgattgttgtcaaacccagtttccgttgccttttcattctattatcctcaaatatatgagtatttggtcataatgatcaggatttccacatagacccttacaaatcgttcatctccatcatgaacagagaggtgaagtcattgcaacttttgacaaaccttcctggatcaatgtgtcactctgcatagattaaggctgttgttcggttcataaaatagtcctacttttaggcccttcgcatactaaaggctgtccgttgaccttttagggagaaaactaggtatcccaggaggaggctatcgaggataattaaatgcagccaattgtggttttgcatgccaaagcatgtcagtcagactctcacaatgaaaagcagagttctttgccttaggagcctgtctgaaacaatgcagtctttgtattggtgaccctggaagttgtttgtgtattttaaagcttaacatttgaattttcaggaagcaagagcgttattaggaagatacgaatatca

SEQ ID NO: 72981 - DNA, 1014 bp, Prunus persica
  Intron number 1 from transcript ppa007575m (locus ppa00757 5m.g) derived from phytozome v7.0 (chr-ID scaffold_6; pos 1034794 to 1035807)
caagcgctccacatcgccttggaaactgatccacggtaccgcatatcataatcatatgcctttcttccattcatttttctatttctttatttattgtttttcactttctgggaacactcgcatcatattttcttcaaaagttttgatttttccgttctacttcatagtttagagcgaatatatgcagtgttctatttgtttaccgaatcgggtttgttttgcattcaactatttgttccatttagtcagtcaaggctattctttttgctttcttcttccttcttctcagatgatgatttcgtctctctatcacctgtaacaattataaaattcacaagggaaatacacacacacacatacatatatatttctgtaggcaaggcagatactataacaagagttgtaaaactgtcagtgaactttgctcacgtgtcttattgttctaaatctttgcactgtaaatttcagagctgtaaagtagagaaaaaagaaaaaatgcatttagcttacctttatgctttaatttgactgagtgcctcacaatttcacaaacccctttacacaaacgtctgcagaatgagctttgtgaacttgtgactaaaaaattaattgagataatgagtcattgtttatgttggtcttttgttgctacagaacaaactattcaactcagttaattgtaacggttcttaaattggcttgaatacaggttttctctttttcagtaccaaatatttaattcaaactcagaacaagttctagtgttttgctcatgccatttaaaagtaactcatgatagtgagttagtctgtaatcacttacgtgcatgcttgattttgacgcgctagtgttattgtatctgaagctaatgttggaccctgcaatatgtatatcttgatttgtagtaagatctaatgacgatgtgcttttactaaagtgatttaccagttaccttggtatgcttatgttcctatggattaaccaaataattcttttcattttcacacagtgctt

SEQ ID NO: 72982 - DNA, 516 bp, Prunus persica
  Intron number 4 from transcript ppa015094m (locus ppa01509 4m.g) derived from phytozome v7.0 (chr-ID scaffold_10; pos 346739 to 347254)
tgcaagactcttaagtccgcctaatttcaagtcaactggaagatctaagtttactacttgctttttggtattcacgaataatttagcattgttttcttttcattagtgttttggaaatggtggctgatcaagtgtcgtccatgttatttccttcattgtttttgggtatgtatccacattgaggccttgacaaagggaagaatgcacaaatggtagtactagtaacagaaaagagaaaaggaaagaaaacagatacaaagtggtcactaggttcctgctttccgttctgtagtctatacaacacattcttttatgtcagtttatgtttagaattttggttaccttcttatctttttccaaatgtgcaaataatattgccatcacttcaattatactgagcaactttaaggtttaaggcgtctgctgtctctaagtagtaagtacaccttttgacttgtatcgctgaataattctttgtatttatttgattaatttgcttattttggtattttaggt

SEQ ID NO: 72983 - DNA, 801 bp, Prunus persica
  Intron number 1 from transcript ppa007205m (locus ppa00720 5m.g) derived from phytozome v7.0 (chr-ID scaffold_5; pos 17413450 to 17414250)
gggataaactgagcagccacagggaggtaagttttgattttgctattaatatatttgttctatggctgggaatgctttgaatttgtgccatttctatgttgcgctttaactcgaattttttaattttatcggtgggattactaggtttttggcagtttctttgttattgtggaacatggttgagggttttgcggctatttggtgcttgatgaggatatgcttcttttgattgttggctgaagtttatgtttgtatctgtcaactttgatgcatcaattcaatactaggattgtatttaagccgaaaatcttaaatttactgttttgttttgtgtttcatgggtcatgaattttctcctaatatttctaacttttgtgggcctttttagttttcacttcattcgttccatagtgggtttcagtttattgggtactcaaaagttgccttgaattatagtttttgattttctcactaataagtgcacttattaatttgcgtagatacgactcgttatctccaagtttaggaccccacacgaaacaggatatatattaattagctttgttaatcttctcagcgttggttagggttggaaattctattatcttctctgttgaatgtactagtctttttatttatttataaaatttcctattgaatatatgacactgaaataagatatcaacatattttatccgcttgtataatgtgctccacgttgggtttgttttaattaacctactttgttgatcaattttgtttgcagcgtccttgtttagcaaggcgaactgtgagcccaga

SEQ ID NO: 72984 - DNA, 673 bp, Prunus persica
  Intron number 1 from transcript ppa012598m (locus ppa01259 8m.g) derived from phytozome v7.0 (chr-ID scaffold_1; pos 3244997 to 3245669 reverse strand)
gaccctaatttgatccaagatcccactatttacaggtgggtcatctcaatttgtgtcctttaatttgtcatgagtttaggttccaacttctgataatcaaatgggtttttgtttgggagtgatgaaaagcagtttggatggcttatacatatataatatataaaccatgttgttaattgtttgtaatcattgacttaagacttaaagactatgatgaaggtctctgtggattatatgggttatcatattgatattggtatattgatggtgaagtggatcatgttttcttgtgttaaaatggatgtgattgaggctaaaagaagatactatggaacccaacttttttccagcatttcttttcctgactgtctcaaatagtttgagtcccacggtatcatgaatccaattggaatgtaagagatgtgtaataatgaaaatattgataaaatatttgaaacaatgatgatattgaaattcagtgcaaagctgatattgttccttggaaggtgtaatatgcaacacccgccatgatagtcacattcattaccttcatattttacaaagatcttgatgttaagaataggtcgaaggagcttactctttcctcatagttatgaattatccttctagctggtatgccttccatttgctgattttcaattctgtaggttga

SEQ ID NO: 72985 - DNA, 405 bp, Prunus persica
  Intron number 1 from transcript ppa000905m (locus ppa00090 5m.g) derived from phytozome v7.0 (chr-ID scaffold_2; pos 20458417 to 20458821 reverse strand)
tctgcagaggagtccacttcgacctctcaggtttctgctctcgctcccaaaacctgttgagattttccagagtgttttccatgcatttcggaagctaatgttgcattgaaatttggtaccaaaaaacaagaaatttgaagtgtacatcattattggaacccaagtagttaaaaaatggccaatttgaagaaacagaagatgaatacatttgaatttgttgtgggttttaattaaaggattaaacttttttactgttgtgttggagtcactgacattatagataaagaatgaatgattaaaatggtaaattgaattttgatatggccataccatggaggtttcgtgctaagttatgatcggtgggttgcagggtagcttgttgtattcaagggcattctgggttag

SEQ ID NO: 72986 - DNA, 585 bp, Prunus persica
  Intron number 2 from transcript ppa016425m (locus ppa01642 5m.g) derived from phytozome v7.0 (chr-ID scaffold_4; pos 1209275 to 1209859)
atcaacgagaacaagctcctctccaagaagaaaaggtccgctttttttaaatttatatatatgttttttgtctatgtgtattcagtgaggtttttacttgattttagcatttgaagtagactttttgtttgatttcagcacaccttttttttaatcaaatttctatgttggcttttgcttgtgttacttcttggcatacggtcatgaatttttatttatttactaaattataggagtagactgcgatcaaactttagattagataatatagagaagggaattagacttgaagaaattttctatttacttacctgataaagaataaacagaggtttttcgtcgtggattttgaaattgaggtattgcaatagaggagttgtgtgggttattgcagagaccagagatacagaacatatagttgcaatgagttgttatgtcagttgatggttcatgtgtacaatagggttgccatttattgagttgtttgtgatgcagattgtttgtgtgatgtatcacatgtgatcgcatctcgcacgtaagttgtttacttcaatctcatttgttttgcttgtaggtggactcctt

SEQ ID NO: 72987 - DNA, 548 bp, Prunus persica
  Intron number 1 from transcript ppa011785m (locus ppa01178 5m.g) derived from phytozome v7.0 (chr-ID scaffold_8; pos 464800 to 465347)
tccacgcactcaaaatccagtgtttacataggtcagtacactgctcctttctccagtagcagttccccttaaagtcagtaactcgaaaacatcattttaaaaaattaattcttttccatgcttgtttgatggaagctggttttttttcttttcctcttaggaattggttttcatatattattttcattttgtttatatataaaaatgtgtgtgtgtggataagtttgtgcttctgggtgccaatgaaaatttcaagattcaaaatttagtgtgaaaagtgtttctgctgaatgtctcttgtattgtagggaattatattgttatatctatgatgaagaattaattttcagaataaatggtaatgattaataaaactaatctaataaatggtaacatgtactttgcccctctgcttctatcttcatttatttattttttttctattacttatgtctgtcatatctaagtttattatttattctggcatgattatatgacatttatttttaacaggtaatttggacgagcgagtgagtgagagagttttg

SEQ ID NO: 72988 - DNA, 1050 bp, Prunus persica
  Intron number 1 from transcript ppa019882m (locus ppa01988 2m.g) derived from phytozome v7.0 (chr-ID scaffold_5; pos 16466696 to 16467745 reverse strand)
acgaggaaaagtgggcccttaacgtactctctctcaaacactctctcgccgttttcgattttgttggaagcttaagacttgttattagagacttattattagaatttcttgatttttatttaggcgtgatttcaattgcatgtatgtataatttcctcatgttttggccataggatgtgggaaaagtttatgttatttggattagaatatataattttcccgggacttgcgattcatggaggtcggaggggtgtctgttttgtgcctcttgatttgagattagcatcgggaaagttaaaagaagttttgttttgcaaggacaagtgttactcgtagttcatataaatgttttcttaggtatttgactaaaggatgctgtgtggttgtgacatgtctttttgctatgttaactggaaaactttacaagtggaaggaaaacatggtcgctatgttacattaacaagtgttagccaaaccttgcttttttatttgtctaagatgtggaatttggattatggtatctcagttattaacattacagatgttgcaagtttccgaatcgcaattttttgtgattacgattgtgcttataagctataacaatagatgtccttttaggcgatgctcgtctctttatcattatatcttggtttccataaaaaattgtaaaccgaagacataagtttttccttgcaagaatcgtgcttctgttctagactctagtctatagaaagtgtcagatatcgatatgagtgtgttttgcaaagttgccttcaatattttgatcttttcagtttttttctttttgtccgagatcttttcagatagtgatccttaataaacaggggttcttttgcccttgttatactgtagtgaacgtttcttgtattctttcagaactcgagttttatttgttttgcatggatgccagatgctatatgtcactcataaatccatctttttgttgagattacaatggggataaaggaattaaaagtgtatttctctcttgcagaaattgctgcgtgctgcaggtctgtttgcaggatc

SEQ ID NO: 72989 - DNA, 566 bp, Prunus persica
  Intron number 1 from transcript ppa012637m (locus ppa01263 5m.g) derived from phytozome v7.0 (chr-ID scaffold_3; pos 1417178 to 1417743 reverse strand)
gatttgatcctcaggctgacttttatcaggttagatgatttgatgtttgtcaacttgtcttcatatgtattgttgctcgtagagatggcaatgggtcgaatcaggggtgggtatgccattttaagcattttcccccattcccgtctttatacccgcaatattcaattagggattccccatttcagtctctccccaacccgccccattaagaaataaaaactactttgttgaaagagaaaaaaccactatgatcataacatatgtatcaattcaattttattaatgaactcaaaatctagactattaaaaaaaattgaatacatgtcaaaaccacatgtccaagacatgatcatcattatagaacttcctcagcctctactttaatttttgtagctattgtattgtacagggttagatatcaaatctgagtttgtcattttttggcctgaaaagaaaagtttgttattcaatgtcacattgcacattctctttgctaattttatctagttttaaaattttaaaaatggtcagtttctggaagaagcaaaacactacgcagtagaggc

SEQ ID NO: 72990 - DNA, 1065 bp, Prunus persica
  Intron number 1 from transcript ppa010264m (locus ppa01026 4m.g) derived from phytozome v7.0 (chr-ID scaffold_2; pos 19584497 to 19585561 reverse strand)
cacctacagagctgtcttcacctactctcatcgtctctctctccctcctctttctctctcttactcattttgttgttttattttctggctatttaattgtgtatgtgcttttcaagaattgcacaatgtgggtttatggcgtgatgcgatttctggggttttccatttttttttcccttttgtttgtatcaatatgctttctgggtttcaattgtcttgaacttgaatagcattgacttgtgtttcatccaaagacttttttttttttttttttgggttcgtctttcccaatttatgtctttctgtagctgaattgtggtatcttgattccttgattaaggcctctaattagtccaaggaattgatgcttattggatggataactttgttatgtcattctttcaaatcatggtgattggataattgttgtgtgatatgactgaatcttgtataatcttgttgtaattctccatttaattgctggtgaatgtaaggctcttcgatttctactagttgatttaggtgtgccatgatgaaagctgattgcttgccttcaaaattgataacttttttgttattttgctttattgctaggttaactgataaccttaagaccaatacaataattcttatgctgctatttctcttggcatgactctatagccaccatgaagcttgaaattttccttttttttttttactctgacctcaacaaatttgttgcagaaaggattctaagcagtaaaattgtgcagcataagacactctccggaggtttgatctatgtaaaattgtaaatgaaagtagtaaaacccgaagactatttcaattatttgtgccatctaccatgtcacaatttataatatcatttccagctcatttttttctctttgcaagcattcatttcgcattgtcctttacgaaacttaatcatccaatgtttaggcatttgaacttgtttctgtcttgtgttattcttatgcttggatcaagtttaatcatgagctgtatggaatatcataccatgcaggtatatatcttgggggaagcaaggttgtccatttt

SEQ ID NO: 72991 - DNA, 536 bp, Prunus persica
  Intron number 2 from transcript ppa016039m (locus ppa01603 9m.g) derived from phytozome v7.0 (chr-ID scaffold_5; pos 5962372 to 5962907 reverse strand)
cccaggtaccttccttatctttatcttttgttttttttttttttttttttttggtgtcacaactagtacttttttacagtagacaagtttcttggatgtaatttagggtttagaaacagagaaaattgacttcataatctcatctatagctgaatgattgatcagaagtttaggattcgtctgctaacatcattcttttctatttaaatattggcaatatccaactagcgtctcctcaaatgtcaactgaaaaacatcaaaattgtatttggtggctattatagttaattagcaatttgacattttcgcttaaatttcatttcccacgatgtgctaaataaatgagttattataatcttaaaaataggtaaaaacattaataaagagtaaaagtcaacagatttgcaaaagcaagtgagcccatttaataaaaaaactagagaaaattaaaaagatagtaggcaaatttgctattcatttttacaccaactttaactttctcggacaaataggttcttcggttcctctttccctaa

SEQ ID NO: 72992 - DNA, 727 bp, Prunus persica
  Intron number 2 from transcript ppa001454m (locus ppa00145 4m.g) derived from phytozome v7.0 (chr-ID scaffold_1; pos 45452819 to 45453545)
aaggtactggcttttgttgttattttttcttctatagagcaaaatgatataaaaatattgattactattaagtcaaaaataaaatcgtaagcatatgttaagtacattgcttgtaagcatatagtttgaaacaaactgattttcagagtcagaagtatataaatttggtcagtgggtctgttggtaggaaagcttttgctaagtttcttatcagttaaccccaaattttgcaatgcagtataactgcacaaatcttaccttgttatgatgcaatgatggttgtttttaagtatgtatttatgggtcaataaattgtccttttgaacttttatcaatttattacaagttggttgttgtttaagagaagtgatattattttgaaaaaacaaaagtttaagagctaggttttcattgcttgttttattgtttctctttctttggttaatattcaaaatgattgaaagtgcagagtaaaaaatttacatgacctacctgggtccagctattattgtcaacagatcaacctagctatcctcatgtttttagtatttacatggttaactggtttttatacttttgttatttgggcatagagatacgttttgcttcagttaaatagagatttagtaagcttgtcccatttaagtgatgccattttcataaactaagaggcaagggcatagagacaataaaactgtttgactggcagctcctgatctgggttctg

SEQ ID NO: 72993 - DNA, 682 bp, Prunus persica
  Intron number 1 from transcript ppa007150m (locus ppa00715 0m.g) derived from phytozome v7.0 (chr-ID scaffold_6; pos 24098920 to 24099601)
tcaagccagtcatttgtctctcatcaaaaacccaggtcaccttcttcatctgtctgcaccttcatgatttcatttcttgatttttgaaaaagttttgccttttgttttctctgtttctgtttctagaatatcgtatattttttctctgcttttatcatcacccttttctttttctgttgcggagaaagttttggaatcttgctttggattggggctgaagagggtactgctagattctcaacttttcttcttctttttgttctgtttgattcttgaatatatttttaatgggcgcttttgtgaaggattgaagcttaggcaatcatatgagatgtcaatcttgttacttttgcacgacactgagtttgaacttttcaccactagtttttgtttgtttcttcttttcgtttatttatgtatgttttcaagatcaagaaacgtataagagaacctttatacgcgtgttcatcttgttctggaagctttgtttcatagagatagaatcatgcaatgtaatgggaagatgcaggaaaaagatgatttacaaaatttgctttttttctttcattcggattttaatcattatccaagaagacaatgtattaatctgagtactacttgtactgaaatagtcaatctgatttttgagcattctctatgcagactgaattggaggtgacag

SEQ ID NO: 72994 - DNA, 545 bp, Prunus persica
  Intron number 1 from transcript ppa013506m (locus ppa01350 6m.g) derived from phytozome v7.0 (chr-ID scaffold_1; pos 1347446 to 1347990)
tggatctgttggatataattagtcttgttggccaggtaagtttttttgtttttgtttttgtttttctttgtaggacttttttttaatctgcattccaaacatgatttttattcgatagaaaattgtgtacttcaattgagttattggttcttcatatttacttatgtatgtgtgggtgtgtgaattatccctagtccttaacgtaacttgttcccttgaattctgtttgacatgcaacttgtaataagtcgattaggtcatgtgcgtgtctacagccaaattatatgaaacacttacttgagttgggtaggattcagaaaccttgttcccttgagtaaaaataaactaataatatatatattctccatagctacattgttttgttagtatgagaagaaattttttgtctgtctgtgtttcgttttggtttttaattcaacgattttgatcattaactgtgtctacatctggctaaattgacacaaatctttgatttttcccttgcttgctcagatatcagattaataataactaattaaggatag

SEQ ID NO: 72995 - DNA, 525 bp, Prunus persica
  Intron number 3 from transcript ppa015996m (locus ppa01599 6m.g) derived from phytozome v7.0 (chr-ID scaffold_8; pos 4973637 to 4974161 reverse strand)
gagaacaagttattttatttggtatgcaaaatgttttattagctgcaactcttccatgcaatttttagctcataatattatcttgtttaatttgaactttattatcttgtttaatttacattcaacggtgagtgattacaaatctcttaaacccttatagttcaagaaatcgagactatagcaataataatttatcaaaatatttggtgagtcccaattttcatactatattttggacctcaacaacaagtcaatcttccatgggctactagaataaggacaatggctaaatgcaaaatatatgactggtaggtctttcaaagttttgctttccataaaaaataatatacacccaatcaagtcgaatttacttttcttttaagctttatgtgcatctagtttgttcttgtaggatagcaaagtggtcactttatgtgcatcttcccataacatttttttattaaaaaaaaacacctgtgcgtcttgcttagctttttacccctcctattgttctcctgcagcatc

SEQ ID NO: 72996 - DNA, 551 bp, Prunus persica
  Intron number 1 from transcript ppa001945m (locus ppa00194 5m.g) derived from phytozome v7.0 (chr-ID scaffold_7; pos 20522591 to 20523141)
cattaactgcaacagtctggtacgcaattctcgcattcttgtccatttattgttgggtgcattgtttcatgggccacttgtgcatttgatgattatattgtttgtatgtcatgtcaagctatggatatgtaacttgaggtgtgatattagcattgtccagatagcggaatcataatccgccttcatgtaattctaatctatgctttctttactgcactgatagggctcattctagatctaccaaaacaatgtttcttgtgttctagtacaagaatgcaggtcagataaagtatcatacagaccatatatatgaagcgtggaaactttagaaacaaattaagaactgtagtgcatatttatttctcaaagttttgttgcttcttgttaaccatttttgtaaaggtgttcttgcattgcagagtgggagcaatacattggtcatgatgatactaatattagggttttgagttcaaagagtgcatgtgcatatacttatgttttgtgctcaggttcatttttaatgttattttctaccaagcaggggccacaat

SEQ ID NO: 72997 - DNA, 843 bp, Prunus persica
  Intron number 1 from transcript ppa012718m (locus ppa01271 8m.g) derived from phytozome v7.0 (chr-ID scaffold_1; pos 20118771 to 20119613 reverse strand)
ttgtaacagtttggctgagtacgttaaagaccaaggtaacccgtcaaaatttcctctctccttcttcctcaacaactaaatcctggttccatgtcttttctgcatttgtttgttttaactgttacttgctagctatctttgtaatcccaatttcccgcacttcatttttattttgttttgttggtcgctgcgttatttgtgggttattgacgggctttgaggattatggcgtaaaagtgttttgcttgatttaaaattggagctttttggggtttcagagacacccatttactgatactacaagagtctcattgttctcatattaagggtatttcatagaaatttaggatgcatcattaactttcataggaatttgagatctttagaggtgtccatttcttggagttggcaactttggcattgacaattttcaattgtagaaattagcacatacatattaagaggatcaagaactatatgaaccttgagcttgaaatatgttcagtaccaagtaatataaatggaactagaactacaaagctggcaaggaaataacattattcaaaacactaaggaaacgaaatgaagaaaacttgtgaggagacaatggaattttgatgagaaacttgaggtcattgtgaaggctgtgtgcgttatatgacaaatctatggactaaatataaggtgaatgcaagtggtcttttaactgtaacttaacaggttaggggatggaatatgagaaccttgaatattactttcagcatgattataattttataatatactgaagtcctagttttgattgcagagttggtatcggactgtaggaagtgttgcactgag

SEQ ID NO: 72998 - DNA, 615 bp, Prunus persica
  Intron number 1 from transcript ppa002344m (locus ppa00234 4m.g) derived from phytozome v7.0 (chr-ID scaffold_8; pos 12790774 to 12791388)
ttccccaatctccgtcgtctccaatttctggaaaggtatttttcaatttggtgatagcttagtttatgctttcagttgaagccttgagttgttgttttgcttgaagaacatgagaatggtagcatccacaacttttttcttcatgtagctctgcaatttgcttttgtatcatcacgtctaaatgttattgattggattctatgttactagaaatttagtaaaaactagctttgatttatgcttcatttggatcatacacaatttgttcatatttacagcaatgatgcaattaactaatattattgggctttatcgcgttttgtgtacaattattaagtattggagtaaaagttaactaaatcacataatagtagtgagagtggaatgagtttatccataagaaattgcagaagggcttgaaatgtgcatataataggaataaaaagtattcatagatgatgcctcatggactgaccactgtgacgacctaggttttgggttgcataacgaacgaaacaggaacaatgaacatcattctaaaaagtatttattaatggctgattttgttttttattgacagaatttgatttggagaaggaaaaaagtgtactggat

SEQ ID NO: 72999 - DNA, 767 bp, Prunus persica
  Intron number 1 from transcript ppa003465m (locus ppa00346 5m.g) derived from phytozome v7.0 (chr-ID scaffold_3; pos 21692433 to 21693199 reverse strand)
gccttgctgctatagctgccaattgcaggtaacgttatttatttattattattattttcacaactgaagaatgtgtttttggtcttcttgcttgttttacatgcccaatagagttgttttttttttctttcctaattgttggacctgttggcggttttatttgactttttgttatgcacatggatattattttgggttagataattgatatgtttggtttttatttgatgttgcggcttttttttctaaaactctaaaagttcagttcaattgccattgattctgtgatttacttgtttgtggtttttaccaatctgggccatccaattttgttttcttttgcagtttgagtatattgcatctactctgtcagctgacaatgatttcaaaatcattgctttgtacatcttcgcgtaattcgtactgtaaatggttgatagaacaactcggttttctatgttcaccagaatacgtgttcatgtcattgatctttcttatctcgtttgtttatcttgaaattctcatcatgatctaatgttgccaatgaaaaacaattaaaccgaacagagggaaacttctccggagcttatatgctgattagaattttaatcatgatcaaacaaagaataatatgataggcttgagaaagtgagaagataaagttatgttacatgattggtccgagtttttcctgaatttcatctgtgcctaacttcctccaacgtttcttctacataggtttctcaaggagctggatctacaggaaa

SEQ ID NO: 73000 - DNA, 406 bp, Prunus persica
  Intron number 1 from transcript ppa007559m (locus ppa00755 9m.g) derived from phytozome v7.0 (chr-ID scaffold_4; pos 17869271 to 17869676 reverse strand)
cctcctgtatgagctgcgctgatttggaaatgatggttcattttttgtgtggttttttttttgggattcggaagagagctttgatgtgggctttgggtgaaaagaacaagaaaagtttggtgttgggtgttttagattaattcatgatgagaaatttccatttatagctgattttataaaccaatgcagcattgtaagattgggggtttgattttgactatgaaatttgggtttcttcttttttcttggcttgtagaagcgaaatttgatgtgggttttggctaaaaagaaaagctttgtgttggtaatattggcttaattggtattcttgtgggtctttatgtttgttggtgaaagagggagagtgaattttggattcgcatttgttttgtagcgtactctgtgg

SEQ ID NO: 73001 - DNA, 732 bp, Prunus persica; identical to SEQ ID NO: 72126
  Intron number 1 from transcript ppa011949m (locus ppa01194 3m.g) derived from phytozome v7.0 (chr-ID scaffold_5; pos 17287618 to 17288349)

SEQ ID NO: 73002 - DNA, 507 bp, Prunus persica
  Intron number 2 from transcript ppb020445m (locus ppb02044 5m.g) derived from phytozome v7.0 (chr-ID scaffold_8; pos 17559410 to 17559916 reverse strand)
ggtaaatcaacatcattggcaatttggcacccttcaaaggagaaacttagtatgtaataaagaccattaacttttttggttttgtgtttctttattgagcagacagatgccctttacatacatgcagacaacaagagactgaggcaatgcctgcaccatattgtgcaacaaattcgattgcaagacagtaaggacgataatattgcagaatcacagcctaattattcaacttgaaaataagtttcttgacaatgaatttagttcacagctaaggatcagagactaatatttttcatgttcgctggcagccttgatggatgagactcaaaaagagattcaagatctgaaaagaattgtttggtcacacaagacctcaaaaaattgaatggagagattggtctggatgaagggactctgagcaacttctactcatcttcttgaaaaacagcaataatatgtaattgaatcagcccttagccacacagatgttttcttcacaacttcagt

SEQ ID NO: 73003 - DNA, 233 bp, Prunus persica
  Intron number 1 from transcript ppa018875m (locus ppa01887 5m.g) derived from phytozome v7.0 (chr-ID scaffold_7; pos 13958903 to 13959135 reverse strand)
gctatagtgtggaccaaaagttgtatcatcttcaggttggttctgtttttatcttcttgtcttttagtcttatttgtatattttgattgtgagctaccttcctgcactaactcatacttgtttccttttcatcatggttttaatgcttttcttactcacactaattcattattaaattgaaaactggggcattgccagacccctcaatctcccattgtacacacaagtgcata

SEQ ID NO: 73004 - DNA, 622 bp, Prunus persica
  Intron number 2 from transcript ppa006367m (locus ppa00636 7m.g) derived from phytozome v7.0 (chr-ID scaffold_2; pos 10127349 to 10127970 reverse strand)
accgaaggtaaaatttctcaaagctctccactttagattgatagggggatggattattgagtggtcctacatatgctttgagatacttccttttagttagattagagtcaagtgctttgacatgtttgcgtaatttcattgtgatatgatgcaataagcagtcaagttgcaaactctcgtctatatttgaagtatgatatctaatgagtttgttctctctctctctctctctctgtgatatgatgcaataagcagtcaagttgcaaactctcgtctatatttgaagtatgatatctaatgagtttgttctctctctctctctctctctctctctctctctctctctctctctctctctctgttttttctttaaaaaaccaatttttcagatctgttaatttttttttaaatgacaaggattacaaaaatagaaaggagatgatgcatgccttaaccatacatgttgactgacttttcttatgattcttcattagtagtacaggaaacttgaattctaagaggttttgatttgaagattttaaaaggaggatttaatcagccattaggttgtgtttgaaaaaaatatatttatttctgattgtctgatctgtttcaggaagaa

SEQ ID NO: 73005 - DNA, 777 bp, Prunus persica
  Intron number 3 from transcript ppa024695m (locus ppa02469 5m.g) derived from phytozome v7.0 (chr-ID scaffold_2; pos 16831186 to 16831962 reverse strand)
aggtatatatatgctacaacctctccaattttttgcctatgccatggttgtttgggttctgggtttagaacagatgggaaatctggctcctaatcccttaatttctgccaaatgtttagaagtcgattaacgttatacatcttcttatcccaaacagtaacaatcatagcattttcacttgttcagtgttgaagttttttcccctacttatatagaaaaagtgaaaataggtcagttattttggtttcagggttaaccttttagggatgtggttttctttatgcaattttaggagaaattgcaaccagggttggtttacctgtatatatgtacagattggggggaatctcattgttggcattggtagttcctttttgtgttcaagaaatagtttgagcaaaaccctggctgctggtgcccgacttcaaattccaaattccactgctattgtgcaataatgatatgtgattaatattttcaagaagattgagcacaaatatgagttcttatcccgatgcaactattctatactttgattcaataactggaagctatgtttttatgtctgcacttaggtaacgtattgtcattgaacaagttgaggaactatgtttgattacttgattacgattctatactttgattcaataactggaagctatgttttttatgtctgcacttaggtaacgtattgtcattgaacaagttgaggaactgtgtttgattacttgattgcattatattttcgtagggtcgactgaaaattgcagactttgg

SEQ ID NO: 73006 - DNA, 962 bp, Prunus persica
  Intron number 1 from transcript ppa006183m (locus ppa00618 3m.g) derived from phytozome v7.0 (chr-ID scaffold_1; pos 11133899 to 11134860 reverse strand)
ttgagttcctctctagccaagccgtggttaatgtatgttcacatgacccattatagaatgcaataaagatctacttatcttctttttaagtgtatcaacctttttttttattgattgtcttcatttaggcattaattttgtttttggcctattgtagttgaattcctgattatgcgaataccatgatctcttgctgcttttagtattttacttttagttcattgtttttagagttttttaaatttgattgctacacattatcaatgaccgaggcaaatggttgtctgtatgtactcatgttcatatatggttatgatcaattatgattagatcgctctataaatgcaaaaaaagtatggaagaaacttatattgccatcagatagtaactttttatttggcatgttaggtatgttgataaggctattatttcattgatatatctatggtgtttattgagtctgatctccagataactactggctgcggtttaggcttctcatttagcatcatcattaatgctctgctctgctgtcatatttgtacagtaagaatataaaaaagcagcaattgcttgtatgctttccctctctagcatctgtagctgttaggtcttctgatcttttacagtttatagcttactagcagttagcatttgaggtagttgctttattgtgtccatctcatcttattactctgcattcacttctacttgggtaattgactaatctattgatggatttaatcatgcctgcatatttgtgagtttctttatatgtgtaactggttagcattgccttggcttcttgtttatttctttattctttcatactccaccaaaagaataaacatgttgaacaatttcttctctttattagtttttatttctatttccattcttcctgcttatgaatttccaagcaccattcttcatacaggcttcaaaatattcagatccccggg

SEQ ID NO: 73007 - DNA, 1037 bp, Prunus persica
  Intron number 1 from transcript ppa013862m (locus ppa01386 2m.g) derived from phytozome v7.0 (chr-ID scaffold_2; pos 25918337 to 25919373 reverse strand)
gccaaacccagtgggaatttagctggttttactctctccctttcctctcttatatttcaatatgtaattttgttctggttctgtcttttggcgtctctttgctttttgtaatttaagtcaacagttcaactgggtttttctgggttttgattatcttcctctttcaatcccataggaaccaaaaagtaaatattttttttaatgatttaatgattttccagtatgggtcagtttgttcctatcacgtatctgttaaaaacattagttatggtgatgtagttcaagctgaatttgtttttttctcacaaagttgccttcttgagtatctgtttcgatgaatttgtgtagtctctcagttaacttccaagtttttccataatttttcttctgcttttatggtcttttcatctcatcccattgagcttctctgttacgtgttccccatttttgtaattttaatataatatttgtaggctgtagctttttcttccatgtcatatccgaactcatgttgttccttacagttgacatactaaatttcttggagaagttgaattggtcctatattttcaacatttcgcctcagttttagatttttctaatttatgattggagctaacttggggatccataggtgctaatatgtggttttcagcattgttagggaggagttctagagctcctgattaggtaggtagatcaagatatgccgaggttaaccctctttaagaaaattgggtgaggtttctgagattgctctagatatttttgagaataaactttaaatgagaaaactgtcatttgaaaatttcaaaccagtagtctctctttttgtaccaaatatgcatcaaggactacaggagtatgaacaattgagtgacctggtaaagttttccaatggttgtgcttctatgggaagtggagatcatttatccaactttcatcatttacaatctggctttgagaattctttaacccacagaggaacattgttatcttagattgaaattttgtctgcagtgacttggaggtagatt

SEQ ID NO: 73008 - DNA, 574 bp, Prunus persica
  Intron number 1 from transcript ppb025199m (locus ppb02519 9m.g) derived from phytozome v7.0 (chr-ID scaffold_8; pos 6351841 to 6352414 reverse strand)
tctgacagtgctctgacaaggaaaaaagacaaaaagttttctctgggagattgaaatttttaatcgggtttggaaacagtgcatgtgtaagtcaggtagacgaaaagttgcttacatataaaaccatttcaaaaaaataatacggcggttacatataactacgacgtataaattacaaaatacgacaatacatttaacttcggacgtggtaaataaatacgacagtagagttgtaggtaccgtcgtagtaaactcaaaaattaaagtacataagtaataactcgcttcatggtagattatttaacacgtcgtttttattaatgtaccgacgtggatttctgtaatatacgtcggtcataccgacgttgattttacaatttaaacggcggtttttttctaaggaccgccgttggttttaaaaatttattctataaatttgtcactttcattcattttcggtttacatttagggttccaagttcttcctctctcagagacactgtctctcacatctcaaagacaataatttggatgtctttctcaaagagaaattgaacttactcgcatcaaatct

SEQ ID NO: 73009 - DNA, 665 bp, Prunus persica
  Intron number 2 from transcript ppa009564m (locus ppa00956 4m.g) derived from phytozome v7.0 (chr-ID scaffold_8; pos 125291 to 125955 reverse strand)
agttcagagatccaagccttcaactccaaagcgtatacccgccttcattcctcaattttattttattttcatctcttttctgaattaggtatatgcattatgatattggtcttctccaaatataggttataattagtgatcaaatataaacagatctgagaaaagttttagcaagaattagtgttgcgtgtttgagttgtggatattcctcgcaagaattataatttgtgtcttaaaaagattctggtttggagtaaactcactttcacagtgaaatacacgcaacatgaatattcctaaataaaggattaagttgttaattagaaatggttaaatatcgaacaagtcccatatatcttttttactaagttaattagcaacagaattacccagctaccattccaaagcatgacatatagttatagttttggaaccacatgtttcctcttctttgaagcatatcctcctcatacatatatgtatatatatatatatatatatatcttcagtggcatgcatgcaattaactttgaatgtttatgttataatttgtagagtgatgatacatataatcatgaattaaatttgcagttggaaataattaataaattgggtatatatatggatatataggtggtggaggagcaggtaggaactttagggta

SEQ ID NO: 73010 - DNA, 185 bp, Prunus persica
  Intron number 1 from transcript ppa022275m (locus ppa02227 5m.g) derived from phytozome v7.0 (chr-ID scaffold_4; pos 4566255 to 4566439)
gcaagatttctgtgttgctgacactactagctcaggttggtgtcgaaaattcaaaattttcgaattatttagtttgcattttgaaaatatgtatccttcttcttcctatacttaatcttccaatgactttaactttgtgtgtttgtcttgtcatttaaatttgtgcatcacagtgaccagagtga

SEQ ID NO: 73011 - DNA, 548 bp, Prunus persica
  Intron number 1 from transcript ppa004802m (locus ppa00480 2m.g) derived from phytozome v7.0 (chr-ID scaffold_15; pos 13756 to 14303 reverse strand)
tcactgccgtttactcaggtacccaattccacttttggtctcatcatgaagatttgagcttttgttcttcttggttatgtctgagtttcttggtttttcaatttgttttctgtgcttgggatgattttcttggtacaagcctgaattagaaggtgcaaagaaaacccatcttgatgatctagtttttgattagcctaatacaataaaagatttgaaatttaaagaggtatagggtaagagacagtcaatttgtcaaggtgaaattgggttcaatggcctttttaagtgtttgatggtagaagaattgctttgttatcttttacaaatggtttgagaggagagaattgaaccttttgcttgtgtgtgtttttgtttatatgaatttatctccttgatttgttctttctttaaattattgcttatggagattatatggacttttcttttttttcccctacatttgacatgaagttgtgaatatgatgttaattcttcaaaatgaaaatataacaggaacaggaatacagaagcctgattatctcgccaca

SEQ ID NO: 73012 - DNA, 544 bp, Prunus persica
  Intron number 1 from transcript ppa014098m (locus ppa01409 8m.g) derived from phytozome v7.0 (chr-ID scaffold_1; pos 769425 to 769968 reverse strand)
aagacactgtgaagctcaaggttcagtacaacaaggtttgattatctccaactcttatccttgcatgtgttgttaatgaaatatgttaaccttgttctttttccctttctaattttccttttcctataacgaaatgaaaggaagaaattgggtttccgttgaggttactgggagggagacttcgggggttgatgggtttatgtaagaactaagatggataaaatattctctctcatgatttttatattaattgccctcaattaactcaagcaccaatcattttttcccccttaaatttcaatgttttgttagtttaccaatcatctttccttcttgtttatttattttgttaattaatttctttgttttctctgttgattgtgtacattgacttttctacccgccgtaccttatttagtttcatgttttctctgttgaatatatcaccaaattatcactgaattataatgccatatcttagaataaatagatccactatagtttgatgggattcatttgttatatgatgagatccacgtgtagg

SEQ ID NO: 73013 - DNA, 484 bp, Prunus persica
  Intron number 2 from transcript ppa016289m (locus ppa01628 9m.g) derived from phytozome v7.0 (chr-ID scaffold_2; pos 23600794 to 23601277)
cgagatcttgaatctgtttgccggtctgaaggtatttattatgaatatttgaaaattttcttgttgctgtgcggcttctttttaattgaattttttggtgtcgaacgtggtctcccttattgaatacgattctgcatttttggcgctgaaaaatctttcttaaatatatttagtttcaatttctttgcatatatatgctatacatttagactctattgaaaacgttggtgcacccagtttatatagtttagaactataacagagaaggtataaagttactcagaggtaatgatgtccaaggctctacggacattcatatcatggggtttacatttgatttgtttttgtaaataatttacattctatttaaactcaaattgaaaaggttcttttggtttgctattcggagtggttttgggttcaatactaagccctatttttcattccaggaattaatccccatcatacaaaatcctttaaaaac

SEQ ID NO: 73014 - DNA, 680 bp, Prunus persica
  Intron number 1 from transcript ppa003728m (locus ppa00372 8m.g) derived from phytozome v7.0 (chr-ID scaffold_6; pos 20050822 to 20051501 reverse strand)
ttggcaggaaacaaagcacagtgagactaagagccacttatttgagaaatttgtggcacctgagtggctgttttagccgaagcttttccattaagaatttcctgttgaattaaaccattgcttatgaatttttgaggcctttatcctcctatgcttttctttttctggtagttctctattcatgttttgagaatgaattatttcatgtgaagcataactctaaactaaccttgtttctgtgatcattgttatttcttaatgtctatgtataagaacatatttggcagttgccaattgggcctttggattttctcatgattagcattttcataagatacagttgtatgctatctatgctattacattttaagcttattacaattcttcccatcatttatcatcacaaactactgaagttattggtccctgattatttatttatttatttctgttcaagatcaaaagaaaccaacatgggacgggagaagacaacatatttggagtttgaagcaaggaaagacaagaaaaagttgaaggagaaaaggaagaaggatgaagctgatagaaattcctctttgattgaagcctctaaggacaaaatgggcgagttagttcaggtgcagaaatttgacaagaatggtggagaaggggtcaaaaagaagaagaaaagaaagagggaa

SEQ ID NO: 73015 - DNA, 808 bp, Prunus persica
  Intron number 2 from transcript ppa021804m (locus ppa02180 4m.g) derived from phytozome v7.0 (chr-ID scaffold_1; pos 27016809 to 27017616)
agctagtctttattgaacgtatttgtcttctcgtattcatataaagcatataatcaaatgttttgggttaaatagttatttttcctctttctgttggttctgtatgaaatgggatgatgctaaaagaacttgccatcgtcctgatattttgtttggctaataaacattgaagttagtaattagacccctttgtgtcggacaagaaaattaataggtgtagagttgaagatgacgaaccaagtcctcagaagatgtaaagttttctttcagacagctcttttcattagtttaattttacataagggcagcgtgatgacgaggcattagagggcttctcatgaagtatggagataaaaaagcaattaagtgaagttgttattcatggagagctttggtgctatctatggtatcactgcagatgagtttaaagtatgctctgattaatggctgagatacctgctgggatgttgaaggttgtgtagatgatgtcttattttgccgatgacctacttttgttctcaatcatcatattgattatagattgataaaaagcataactcagcacacttttcttgcacaaggaacaactagattattttattaagttcattctttttagcaatttgcatgcatttgttggcattctaatcatgtattttgagtttgtcgagttgaaccgtgtcctggctgcataatgcagaacatacaattgaatgttttttagtgagacaaattattaattgaactacttctctttgtcaaattttttcaagactgtgagtgcagagcactagtaaagcaattctgg

SEQ ID NO: 73016 - DNA, 713 bp, Prunus persica
  Intron number 1 from transcript ppa018897m (locus ppa01889 7m.g) derived from phytozome v7.0 (chr-ID scaffold_2; pos 15864171 to 15864883)
tcgtttgcgcttaggctggtggactagttccatatgtaggagttgattatcaagctgccttataaatatttagccacttaggtctagtgccacaaattttattcccaatattaagcatgaaaagtcaaatagcttcaattgcaaatgctttttctgatttgtaagcaaatttacattacatttacctaacatgtgagcaatcgttgaatcacgccaaatgacagaaataatagcttagcgacccataacttggatttgaaaggctaacacaaaattgcaacatgatgattaataattccaaaaccaacaattaaagttattgatcattttattcattacgtttcttcaataaagtaagactcgttcgcataaataagttccgttgcaatgagaaatgtgataattaaaaaacaaattgtggagtttcagtgctcaacttgtgaattaaccatatggctcctcatcacaaattagggcattcaagaaagcctatatatccaaccagctttgttttttttagggtttcatattcttccacacatttttcgccttcctttcctttttttctgaaccctccttgctaactattttattgttacttgggtattctttttatgcgtattgtcgacattacctttggttcacgctacaaacaccatgattccatgcccctcctagtaagtcacaggcactcaaaagcctcacactacata

SEQ ID NO: 73017 - DNA, 924 bp, Prunus persica
  Intron number 2 from transcript ppa003516m (locus ppa00351 6m.g) derived from phytozome v7.0 (chr-ID scaffold_4; pos 12864483 to 12865406 reverse strand)
ctcaatctcgaacctctattggccttctattgctggttcgttttatcttttccattgtttttaatttttttactcagccctgtgttgttactgtttcattttatctaatttctgagaaaatactaggaaatgaaacccaaaaaaaaataaaaaattgttgattaatgtcaagtagtgtttttagaatttagacggtacagaaaatggtatatgggatgcttacagaaagcaccagaaataggtatatgtgatgcttaaggtttcatatccatttgagtatttgacttttccatgctgaaacctcgggagttcgtgtaaacctgagggggttttgtgaaaaagccaaaaacccaatggattgttggtgtaaataactcgtgattcattttgaaaataaattggaagtgctttctactgggttccctaaggtctgtgctttcccttgtaagataacaaatgaatgcttgttcactagggcttgcacttatgtaagcaataagatgaagggttttctggagaagtttcactaatctatgggaaaacgataagaatgtaaaagagaatctcttctttcagtgtctagtagatgttgattttcagaagtccttttgttttcttttttcattgaccacggaaagaatagtttaactcttattttctgttatggtataataactatttcagttttcgtgtcatcttttttattggtctgagaacattttattgacaaagccacaacagtggatatggtaaagagtcatatccaccatctccgtctttttttttggtgttacctttttctttccaatgttgaggtttgcgtgtatgataaattttctttttggaagatgccttgctcaaacttttattaccctgatttttttgccaggccattcttcaattttaccttgattttggagagag

SEQ ID NO: 73018 - DNA, 252 bp, Prunus persica
  Intron number 1 from transcript ppa003516m (locus ppa00351 6m.g) derived from phytozome v7.0 (chr-ID scaffold_4; pos 12865500 to 12865751 reverse strand)
atcctgcttccgattcttctcttctccaatccgtgattcctctctctctctctctctttctcatcattttccaaactctctgtttgtttcttgagaaaaaggggaaggaaaatcaaaagctgagcttaattatgaaccgaacatacactaagaggcttctttttttcttcttttttttccccatttatctgatttaaaataaaatattgttttttttggttgaattaaatgttgattaggtgaagaagctat

SEQ ID NO: 73019 - DNA, 660 bp, Prunus persica
  Intron number 2 from transcript ppa021417m (locus ppa02141 7m.g) derived from phytozome v7.0 (chr-ID scaffold_1; pos 21721415 to 21722074)
atcgaggcaaacttttagcatcatataaacacgtactcatcttcttcttttacagtcttattttcttttcttgttttattagaatttacacatctttattttcgttttctttttcgggaaaacttagattggatgaggaactagaaacatttttcgtcttagtttatcatgtcttcaaattgtcaagtgcttaactcctggcaggaggaaaatattctgttcttattttagagtgggacttacatcatgtgaccacattttcaaagaatacagtaagtctggttctggtgttggacttgttcacaacctcagactataacaaactagaatctagctgctacttgataatatgacttcttattgtttatataatcagcgagttgtattatctaatctaaaagtagacagcacatagtgcttgttttgacaacattgaggatattaattttagaataacacattggtacatcaaatgttctttcaggatcatgtcaaaatgattcagataagcactttggacctaaaagttactgaatgataagtttggtttgacttctctggtgattatcatctttatgacgtagagttatatattaaataataagcaaggatctttatgacgtagcattgtttaatctccaggtctcagttgtaattcac

SEQ ID NO: 73020 - DNA, 989 bp, Prunus persica
  Intron number 2 from transcript ppa011652m (locus ppa01165 2m.g) derived from phytozome v7.0 (chr-ID scaffold_1; pos 5590185 to 5591173 reverse strand)
cggtcttcatcccctaggatcaacaataattcaaggtattaagaagtttgaatttgcttgtttcaattcaataattgaaatggattgttggtttgggattaagaagtagactggttgttgtagcatggtttaatgatgggcttgatgttattgggagttcaattgaacaaatttgcatcttttttttcagctggaaatgtgtgccccagaaaacatttgtgctaattttataatagctagttttgtattcataagttgatttatgtattggtattctttgttttatattgttctttttcaaaggcatatatagaagtttcaaattctagtgaccttaagctatagatcaattaggaaacaagttctttttctactagagaatacaagggtttcgatcgcttcgttgcttcattcagacaacttttaactgctggagaagggcctgctcttaatctttttagttcagttgtttttctttttttcctaaatgaacaaatctttttactatgaattttgaatgatagtggtattgtttgattttttttcaaggtatttttcgtcgatttttttttttgggggtaatttttacacgttccttggggtaaaaatcctagatctgccacttgcctgtaagacaaccatgaacctagtacctcttgtaaacaaggcttcgataccatgttagagaaccaatagatccattagggaatacgacaataatgtatgccaagcttacataccaagcttacaggagcctctcacgagttgtggacgaatgtatgagcactcaatgtatgtgtccttaaggagacttgttttctcacatatgattttatttttttacttctcataaatgacttgtcttctatggaactattgttagattgatgactgtcctgtgtaatgtgctttaagtttatttctaaagaatgttaatctgtgtttcttttgtaggaccaatatttatatcaatcctccagtagccccgc

SEQ ID NO: 73021 - DNA, 1017 bp, Prunus persica
  Intron number 1 from transcript ppa013081m (locus ppa01308 1m.g) derived from phytozome v7.0 (chr-ID scaffold_1; pos 38303175 to 38304191 reverse strand)
gatcagtcttcccgctgagcatagcacttgcccaggtaatctccttcactcacaaattaatttagatgttaccttaatattacaatatttggttcctttagatacattgtatatgttttaggtacttcccccttccattctaatatgccagaccgttggatctttgtataatacatacatgggaaagctggggtgggtatttgtgctgaaaaatcgaataccgactagacgaataatccagtttagtatgataattatttatttctattttataccgattcaatctaaaccaaaagtttgaatggaaaaattgagctcgataatacctaaaccacgaatcgagtattataatttaatttaaaacaaatttttatttgtgggtgtcatcttcttattagaaattggaatgttattaaattgttagattatttggattaaatggaaagaaaaatacgttggtaatatcccaagaatcaaacataagtgttttaattcattgattaaaatagatatataaaacaaaaatagaaaatggttgcggaataaaaagcgaatatcgaccaaaccaaccaacatgacttgccttggccagtgaatgactttgtaagcaaagagcatgtgagggacggctaagcaagctctagctttgtccacatggaagtccatgggtcctctactcttctgtgtggtgtccagtagtagacaatggacggctgagatttgtactatattttgatgctgttaattaagaatttaagattgtgctcttgtctcacctcttggactcttcttccacttatttaaggtgattaattaaggtggttttggatcaaccataactcatttgatcaccctacctacgtaccaaaaccactaaacacgatttcttaactaatctattatttcttgctctttctatctgcctttttgtttttacttctgtttgtgtttgtgtttctgctgttttttttatgaagaaaagtttaggaggagggaaggctacctcatcctaggatc

SEQ ID NO: 73022 - DNA, 487 bp, Prunus persica
  Intron number 1 from transcript ppa006483m (locus ppa00648 3m.g) derived from phytozome v7.0 (chr-ID scaffold_2; pos 15959624 to 15960110)
cccaccaggtactagagaaagaaagggacgattttgattattttttgtttctgaattttggtttggctgtgattgggaatggcattatggtgaaaaattatggtgggagtgatgtggtggaaggtggcggtgaatttgaatgtcagttgtggttttggcgctgaaaaggaacttgctttaatggcttggtgtgttgatagtgatataaaagcttggaaaatggattttttttatactcattattggtaatgtttgtgagataattgggcataatttgaccgtttaatgttattaacttataatttcaaagggtcttgaaattgtttcacgggtaatgttacaaatgtgaagttttttaaggggcagtctacttgattgaatttttcttcgaaatttatgttcttttttgagaggttgcatgtttttattgaagcagtgtactgaaatgggtatgttgtaggaagtccacaaaggccataaattgtca

SEQ ID NO: 73023 - DNA, 645 bp, Prunus persica
  Intron number 4 from transcript ppa001348m (locus ppa00134 8m.g) derived from phytozome v7.0 (chr-ID scaffold_2; pos 19347207 to 19347851 reverse strand)
tattggtaagtccagactccctgacaattaaactgagaaatgcatttcgtttagcatcttttattgaatatcttttgtcattatgtctgtagtgaatctacaagaatttgtgcttagtttaaattcctgtcattcaagtgttagatactacaatgaaatgtttttaaggactagagaggtcttaggtgtcaagaaatgatttttttgaggcaccaaactgtccatggtctgttctccactttcacttcttcttcaaagctgaagcaaaatccataaacttcatttgaattggtaagaaaatggtggtccttgccaagtaatatttttggtatggtgtttccgacatccctgcctgttatcaataagaggaatagtaaattgttagagttctttcactagacacataggaggtttaaagttgtggctggactcccatatattacatgcatatcttgatactcttttcttaattaatgtcatatttcattttcttatttatatgcagttcataggtcgtgcacattttttagcagaaaacatttgtttttgtgtttttatttatggaaccttcacgtattgtcataacaatgcatgcgttcttgtatgacagcgacaattgctatacatctattgttgatttccaca

SEQ ID NO: 73024 - DNA, 781 bp, Prunus persica
  Intron number 1 from transcript ppa026923m (locus ppa02692 3m.g) derived from phytozome v7.0 (chr-ID scaffold_3; pos 21611971 to 21612751)
tggctcaattgtcttctggtcagttgatacgatgcgattgtctctctttcttttctctttctttattttccattagaataccagtttgagaatgctatcagtttgtttcctgtcatcaaactttagagtcaagacagtgttcttgattctttgtgttgttttgtgatttgggtcatgctataatattgtaatcagttggctttttagattttgcgcctttagctcatcgcgggtattataactgaatgcgatcatgttcttggagtttcttgttttctcaatttgggatttttgtttttctcatttaccagttaccaccttctgttatctggtttcaattgaaatgacatcttttctgaaatcccaagtttcaatcttttctgaaaatattaaaaatattagaacaagcgtgcaaaaatattcaagattgacacttgttaagggttttatacttttcagctgggcttgtctaggatcatgacaaagctagccatagttccaaggttactcactgccagtacctaaataggataatgaaatgacagcagtaactattggagaactcataccaacactaaatcttagctaagctgtttacagtttcaatgtatttgtaggagaattgcttaatttactgaatttgaattttaagatgttctgagtcagtattatacacattgaatcaaattgatgtgatacagttctctcttctgccctgtactattagatatttctgcttctttaatgttattgaatgttgtcctataatctgctccagaag

SEQ ID NO: 73025 - DNA, 1060 bp, Prunus persica
  Intron number 1 from transcript ppa011571m (locus ppa01157 1m.g) derived from phytozome v7.0 (chr-ID scaffold_8; pos 19418604 to 19419663 reverse strand)
acaagctggaatactcggccactatcagctggaaggtccttcacttatctcagctccattatcactcttacccatttgccgatattgtcatttttgctttgatttttccgcttatgggttttggtttttggattgctgcgatgaagaggttaaagctgtgagctttggtattggggattttgtgttttgggaaataatgggcctcatgggatttttgagaatcatattatgtgatttgatggtgttttctttgtgttgaaatgttgccatagataagggtttggttgtttcattttcttagtaatttcatgggtgatgccgttgttatatatttttttctcagtttcaatgttgtttccttaggaattggtgttgtataaatatttctcgtgttatattgctatatgggtcagagagtgtgtgttggattagtggtagtttcgaaaatgcattttttgacatgcttagttcagcttgaaaattgctacgtttggcatttcttaaggcgttcaaaaagctggagaaagatcaccaagagataatcagtaattttcactacttttgtttactgatttatcaaagtaggcgaagctaaagttagttttgtagctatgctaacaattaggaacactatatgctaacaattagtactcaaaacatgagatacgttgtagtacactgcacttttgttgtgtctctcttgaaagttaaagctcaaggtgaaactggggatccatttgtctccctcaaagtttttcatgtgtaacttgttgcgagccagatatgtaatataagcaatcctttcgttagtcggtgttactatttagtagcagaattggctagcgcatctgatggcttatatggtcaaataacatttagtttccttccagttctcctgcaatcgtaatggtactttttgtgctttccattcacccaggttatggttaagtcagtgaaaactgtataaatgattttttttttcttgttccttaagtttttatggcagaaatttgcatgtgatgcagaactatcaaagaggtcaaatcacggacagagaact

SEQ ID NO: 73026 - DNA, 958 bp, Prunus persica
  Intron number 1 from transcript ppa005648m (locus ppa00564 8m.g) derived from phytozome v7.0 (chr-ID scaffold_1; pos 28912556 to 28913513)
gctgggtatgcgcctctctctgttgctattttagtttgggcctgttttggatgactttgaagtttttagctttctattttttgttttaaaattgtgtgtatatttattgatgcttctttcagatttatcatggaattttctgagtttttgattcaatttgttatagtttatgtgttcacctgatcaatgtaccatgaaaaacagtatcgatttaggacatgtagtattttgtcagtggactgaacagtggcaatcaatctgtaagctttaaatgacagtggattatcaattgacaaatgacaatgcttaagcgctgacaagtataaactactttcgttcagttgagagccatgattattgttctgctgtcattgttgagtgctgagctatactcttagatccataatctctttgttttctttttcgttttttgtgggtatgtgtgtatatttcatgtattaatcgttatgccctcagagggtttttattctatttcaaattgtacccttaattatatttaggtgggaaggttgagagagggattcataataatgtgtaatacatttattttccaagagatggaagaggccatgtgcacctgagctaacataaacagcccctaaatagtatgagctttgctgttttctcatcgagtcagtggtcacctgtattcacagtttgcaatgacacacctctgtgtgtgttctgataatttgggcacttttaatactttggtggcgtattatgattgattaatctttcatattttgtttcttctcaatcgtctttgtcctatgctggttatacctttatgtatattttcagtgtcctcccagcttaattagaatatctggttttaattaagatgggttcagagtttacagtatttttctgatccatgtgttggagcagcagattgtttcaagtgtaatcatttgtgtgatttatgcagaccatc

SEQ ID NO: 73027 - DNA, 1036 bp, Prunus persica
  Intron number 1 from transcript ppa024378m (locus ppa02437 8m.g) derived from phytozome v7.0 (chr-ID scaffold_1; pos 7131494 to 7132529 reverse strand)
gaattgtagtatctggtgtaagcctttttagacatcccactcaaccatatcgccttttgccaatcgaatagaagccccgaccaataagccattcaacccaaaagaattacaacaacaacaaagacccaacattgaaccttatcgctttgcatacctcaccttgcaaattataagcaacctgataaatacccagttagaaaatcaatcaaacaaggattttggtttcaaatgaaactcacgatgccgattatagaagagtcatagggtatgtgatagctgacttcttggagaagttggagggataaatggaaaaagaatttggctccattgatttgttggtgaaagttgcaaagattgtggctgtgagagagtccgaattggtttagggtagacaatatcataattattatcataaaagttaattaccttatttaatttttaggggcatgatgggaataataaagtaattttaaaatgaaaaaaataatatgtaaatatcaaaagataaaaaaggaatgtaatcatacgtggcacaaaagtcaaaagacttgtatcaacaataactacgaagataaaatccaaattctattttcgattttgtacttataccgaattttttataaattttaacggaagattaaacggagctcaccatgggatgaccttgatgtgggaatgaagattaaattaatcgaatttgaaggatggggaccagaatgaggaatttggaatcattcatgataaaaagtcattatcctaaagagacgtatatataaatctatcggaaaagaaaaagggtcgaaaagggcgtttccgtaaattcggcaactgcacaaggaacactcgataactttccttaaaactcctcacaaacttcaaagggcagtcgatgagaaagtcgcccgtcgagagagaatgtcggaaagagacggcgtcttctctcacgatcaacaatcaactgctctcaaaaccctgctcgattccctcaagattttcctgagaaacaaactaaccttcatttccatttttgccctca

SEQ ID NO: 73028 - DNA, 641 bp, Prunus persica
  Intron number 1 from transcript ppa010467m (locus ppa01046 7m.g) derived from phytozome v7.0 (chr-ID scaffold_4; pos 6200596 to 6201236)
caaagtatcctctcaagtttataattcccagaaaggtctcatttttggctttgttcatattttctcttttggcaatcttagctcacatatcatatcatatggacatatgggtacctttgttttgatgacaataatatgaattgatcagtttgggatgctaattatgattttttcctcaggtgggttcctctgaaactgatgctgtttgggtttacaccctcacctatggtggtggcattgtctctgtatgtgctctccttgtcttgttctttttccctcttcccgtctattgtgtgtatttttgctttgttcatgattgtttatttgcctgtgggttgtaatctgttttttttttttttttttggggttaatttatttaactttgttctattgtttagggagattctgtttcatgtgaatttaccattggagatggttgcaccactgtcttaacaacccaagcttccactaaggttacatacagaaaatatatttcattctcagatttaataattttccctttttcccattagatggtttggagaattggcttcattgaaatgccttgtgtctagatttcttaattcgatttatgttcttgcgtaggtctacaagtctgtgggatcaaagtgctgtgagca

SEQ ID NO: 73029 - DNA, 555 bp, Prunus persica
  Intron number 1 from transcript ppa006179m (locus ppa00617 9m.g) derived from phytozome v7.0 (chr-ID scaffold_1; pos 31774800 to 31775354)
gggtaagctaagctagctctctctctgcttctctctctgtttttacttggttttagctagccggttcggttatcaaatatcaagggttcactcatctttctgcgaaattagtgattcctctctgttttgttccctttctgaattgcagtgatgctttgttttactcctcctagcacttttactctagtaattcgaattagtgtcctgaaccgtatgacatgcacttttactgcagtatgtatgtacgatatggatcagagtttatttttcagcttctaaattctaactatgtatgttacatttatttcatatacatgtctgtatactaatcccctatttgattttaataataagggaaaatctcatcattatttactactcagtgattcctctcgcatttgaagttatgaagttgtgacccttcaaatgtctcacggctgactgcaatttttatcttccttatattttcactccttttcaaatacttgtgggattaatcaggtattttcttttttatcaggtggaatagttggaatcacttcaactgcaaaattg

SEQ ID NO: 73030 - DNA, 695 bp, Prunus persica
  Intron number 3 from transcript ppa024618m (locus ppa02461 8m.g) derived from phytozome v7.0 (chr-ID scaffold_2; pos 25988197 to 25988891 reverse strand)
caggtatgttgtaaacagtgacctctccaataaaaatgtttcaattcacatgtggatgtcttctagttggttgggctaatagagtacagtgaattctctctctaaccaattaggacaggtgtagaattcactgtgttggtggatctgaattgctgggtttgagattatattagtttcaatagcgtatatttatgttctgaaatatggtcttctgctggtttaattgtgctgaaattctgcctcaactgcccttttattgtgaagttccttataagttaaaaaaaacatgtggacagtgtccagagctctgcatgaggtctcaatgttacttaaccagggaatgataaaaatttcagtgtatgtcaacaaaagctcagtatcatgatagaagattgcattttaaccactgggattgactgaacattagcacttgcaagcatatgactccggaaacagcatgtcttttgttattttcatgtatccataagttacatctagagattgatgttatagcatagaaatatcctgattattctggtagagaaatcctactatatgatatttgattttctgaatttgaggggtgatccaaaaagtacatttgtcttatggcttgcattgacaatgtcataactgattatcacaatactgtctttgcaggttttgtcgaaagaagatattgaaactttgaattt

SEQ ID NO: 73031 - DNA, 635 bp, Prunus persica
  Intron number 1 from transcript ppa002743m (locus ppa00274 3m.g) derived from phytozome v7.0 (chr-ID scaffold_4; pos 10700606 to 10701240 reverse strand)
ggttgatccgattgctctcaattgttcttggtaaaagaattgtgtttagatcagatattttgggttaatttttttggattttgttgcttgtttgatgtaagtcccgatctttttgaatgtattgaatctgtcatttgatgcgtttttctttgctatcgttttacttcttgattgcgatacgggcgtaactgttcagatttgtttgttctttccttgaaaaatcataattttttttttcttgaatgaaaaatcaatagattgaatgcatctagaggctgcacttacatcttttgagtgttggggtaattttgtatttgtttagtttttatgatctatgaagcttttagttgctcatgcactccagataatgcttgattttgattcaaattttttgatttgtttgttttgatgatctgaattgaagtcggtaattttcagattagttaggtattcatatgatcgattaaaatgtgatatcttgaagtatatgccggttaacactgtgatctattcaactagaagcctgctaaatcaaatctagatttggactgggttttcgttatttttctttatataacatgatattgccttttacatcaggactttcggtttctaaggctgttctttggcggaag

SEQ ID NO: 73032 - DNA, 740 bp, Prunus persica
  Intron number 4 from transcript ppa013647m (locus ppa01364 7m.g) derived from phytozome v7.0 (chr-ID scaffold_3; pos 15582843 to 15583582)
cttttgactactggaatacttgcattctcagggacgtaagtgccattccattcttctgcgcttcatttttcatctaattaaacagcttcaattcgattataaaacactacgtttttgcataatagattcattcaaaatttcagtttcttgcacaatgaagttccttgaatctcaattttagaggttttccatattggttaaaagcactcaccttgttacttgttaggatgcaaaggaagtcacaagacttgcctatggtttaattcattggtctttttctagaaaagtattactaccaatgtagtaagatctacttatttactttccagagagctacgtttgtatgattatgctagagttaggaatcatcctagtctgttagtatggtaaaatcctctacactgagtaatgaggattctagactgataaatgttgtaatttgttaactggaagagtaacattatataaatgaattttacatttctggtctgccaatattttgcttctggactccataaattgatctcctggtacttatggcttagcaaactgcacaatgaagtgtaatgccttgagtacagagtccatgcgtcattccaacggactttttccagttgtttgctttgttgaaacaatattcatggaagtgtccgtactgtattcatattatcagaagtgaacgctgattgaaatacttttttgcaggtgttatactgtggcattacttgaggatagaaagt

SEQ ID NO: 73033 - DNA, 928 bp, Prunus persica
  Intron number 2 from transcript ppa011850m (locus ppa01185 0m.g) derived from phytozome v7.0 (chr-ID scaffold_3; pos 16133459 to 16134386 reverse strand)
gtttggtgagtttctttgtgaatttttgttctgctactttttaattctcaattttgttttgcttttctgcatatatgtttgtttatgatcatcaattgataaagggtgtttatgatcatcaaattgataaatggcgtgagataatgattagtatgttgagtttagctagctatatggtaaaaagagtgacattttggcactcaacttcaatcgcgatttgcaattttggcagacagtgcgttgtaatttgtttgaaaccaaccttaattcaaattaaggaaagtttctgtaacctacaattttctcactgcacttcaccttatttcaataagtgtaaggtataatgagcaaattgtaaggtacatatacaaattcccttaaactagccttcacataaaagggcaaatcggtttttgcaagccttaggagtgtgacttcagttggatgaacttgaattcaacctgagctttgggtcaatcaaacgtatttgataagtttaccaaacacgggtatgaagtcttaatccgaattacaagttgggtgaacatggacaaaatgattccagtatgttataacatgtaaatttcagatatacaatattttatagtcataggtgagttctagtgctagatatgcagagtgccaaacttatgaagttatgatataatcaattattaatcatttctggatatggatgaactatataggcgtcttcaagaaaacatattatggtttatgttgttctttgactaacttatttatctatgattgaaagattcgttataatttaaaaaatttggtctgctaatgcattgaggtgcaaaagttttccttcaaccttattactattgtctctctcaataacatgttagaaaagaatgtcttatccaatacacatctgttatgggtgcaggatatactatacgtc

SEQ ID NO: 73034 - DNA, 869 bp, Prunus persica
  Intron number 1 from transcript ppa003145m (locus ppa00314 5m.g) derived from phytozome v7.0 (chr-ID scaffold_2; pos 17441351 to 17442219)
agattccggttcagtggcccgacagcttgcacaaggtgtgtgtggttttgggttcatttcaattcttcaatttgcttttttgggttaattgcatattttgtctttgaattagcatttgagtctcttttatgactgagcttttcggtgaatgtttgaggatctatgaatgagaggtggtatatccgagattaatggtgttggtggtatagcaagtttaagcttttgatgtttgcaatcgagcttgtttgttaaatttttctatgcacgactgttatactgggaacaagaatgcaagcctcaaaatataaagttgtgtagtacaaatagaattattgaataggagtatctgtgcattgtagttaaggaactttgtaatgtgttagaaatatacaaatctcgacatgctacttttagctacttgttcaggccaaaaagaaaaagagattgtagtagcttgttgataaatgttagtgctgtacttttctcctgctagcacactcttcattctctccctggctaccacagctgctcaagaacctttgacagccttgtgttactcatttttggttttatgttcttgaattttgaatttaagatccgcataggatttgatgggccagaaataactgtaaacagctaactaaataagtgaaatctagactgcttattaggggccttttcttttataattactgatggctcaaaatttgattgtctttctagtcctcttcttgttttggaatatttgcccagtgttttgtaatcagagatagaatgagtttcatttgatgttctatatcaaagtcataaagcaccaccccatggttcttttttaacgtgtcttaaagtactgtaatctgtgtatagat

SEQ ID NO: 73035 - DNA, 607 bp, Prunus persica
  Intron number 1 from transcript ppa010352m (locus ppa01035 2m.g) derived from phytozome v7.0 (chr-ID scaffold_8; pos 13876132 to 13876738)
actgaggtatcgtccgccggaacttctgtagtttcattcaattttgataatcacttgcaaaaacaatagcttttcttggttttattgctttttgttcttttataatttgaaaggcttaattgcattgtatgtatgagtgtatgaatatgggaattcaagacctgacctgggttcatgactaattagcaaaacccaactacataagtgacaagatgtcactgggcttcttgttcttgccatgattatagttatggctccactgagacccatttgatgctaatagcaaatactctctgctgctcatgatgcgatcccagcacgtttgttgggatttgggaaagaaagaaggcaatttttgctctggaagtttgtttgattttcacaaacatggtgttaatgtagtttctgactttcttctaaaaaggactctctttttttcaatcttcattactttggaagatagttttcttctctttaaattttgcatacaattcgttttgatttcagtgattttcctgtctgctgactccgactgatgccttttacattagtctttgtaactttttctttttctctatttgcagtattgggttagccagggcaacaa

SEQ ID NO: 73036 - DNA, 494 bp, Prunus persica
  Intron number 2 from transcript ppa021137m (locus ppa02113 7m.g) derived from phytozome v7.0 (chr-ID scaffold_6; pos 3651401 to 3651894)
agcatccaggtctgttgaatcaaacaatcaattagttaacaaatcttctattttctatttttttgggtgactaaattgatgatcagttacttcatttcaaaagctataaacaatgtataaacaagccaatgcttcatggaaattagttattcttcacttacaaagtgctcaatgggaactgcgcagaaaccatgaccttacccagcaaagatctgacaactctcctagatcaaagaagatagttagaaagttgtaaaaaattgaataagggtaatcatggaaaataaaactcaaatgttttaatgtattaatgtatcattcaaaaatgtaattaagaggaataatacacaagagaagaagtgagaagttccaaccaagatggttagggtgaaggttgcgagcattcccctatttaaatatctagatagctaaattactttgtatctttatttataactaaaattacatttgattaattgcagaaaagataactg

SEQ ID NO: 73037 - DNA, 843 bp, Prunus persica
  Intron number 1 from transcript ppa005813m (locus ppa00581 3m.g) derived from phytozome v7.0 (chr-ID scaffold_6; pos 28565672 to 28566514 reverse strand)
cgacgctccgtcactgtcaccctccttgacccaaggtctccttttaaactctttatctgcacctcaacattgtctttacttcttgtcattgttttctctgtttatgtttctctcgttttcccgttgtttccttgtttcccaatcacgatggctgcctcctctcatctgaattgtccgttttgccccttcctttcctttactcgattcagatatgaccaatgcttcatatcttatttaaccaagtcaatttcgatccccggcggcatgaatttgcattgttctcttgatttgagaccataccttatttttaattaattaattatttgtgtttctcaaatgtggttattttgcttctttcttggtatgcgaatttgttgctttcgtgctttgaatttttataatgtgctgtatagcttgctatatatggaatttggagttgtcaataatggacgttttacctatcccgtgacaattcaaacatggaaagttttttagtacaaaattgtaaggaggggcctcatcacaaaaccaatttagatgaaatgtgaccttctgctattcggctttcaggaactgtcttccttcaaagctttttagataatctctgtcactgaatttcccaaacatataagctttggcattgttttttaagctgcaagcagtgaatttaactgcagcttcaaggcagaatttctttatttacttgtctttttttaagtctgtaagtaaataggaatagaaggcaggggatgtgggctcattgaaaatgaaccttttatttacatttcgataagtttgtattgatacaatgtaatgaacttgctcataatacattcttttcag

SEQ ID NO: 73038 - DNA, 770 bp, Prunus persica
  Intron number 1 from transcript ppa026365m (locus ppa02636 5m.g) derived from phytozome v7.0 (chr-ID scaffold_5; pos 12039154 to 12039923)
ggttccagaagttcgtagaggaacggaagacactggtaatgtgactgaattctctgtgtcggtgttttccattgtgctttgagttttttctgtttctggtgatgattgcaatgtagtttgaggttttactccatcttgatgaattttttatttttattttattcttttccaacattgctgttgatgatttgtatacacatttgagtgcggttaaactgattgatatcatgcatctgaaaaagtatatatgtttgaatttgtagagatgcttctgaaacatgaggtgcgaaatcccgagccaaagaaggagcttgagaagcatattaggaggagcagggatggctctgttgagaagggaaaatataaagattatgtgagagatgataatgaagattcagctgaggtcgagtacattgcttcaaagaggagaaaagatattaagaggattcggaaggatgtgaaggagaaggttccagaggttggacaagcaatggatgacacgggtaatgtgattgaattctctttgcgagtgtttacgctgtgctttgaattttaaattttaaattttaaatacttttattgttcctattaatgtttactgtacaatgtgcaatgtactttgaggtcttgatgcttcttaataagaatataattaatctttgaaaagtttctattgatgatttttatacacattgagtgcactcaacctgattgttatcatgtatctttttaagtttatatgtttcactttgtagagaggtatttgaaag

SEQ ID NO: 73039 - DNA, 587 bp, Prunus persica
  Intron number 4 from transcript ppa006469m (locus ppa00646 9m.g) derived from phytozome v7.0 (chr-ID scaffold_2; pos 2007792 to 2008378 reverse strand)
caggctctagttttgtctcgtactaatcaactgaggtaacttttataattaaatgctagtaatttttgtaaaccaatggctacgagatttcaactcaggatacctttcaacgttagggaaagaagtatcttgaaatctcgggacatctttcaatgttaggaaaagaagtatcccttatcaataactatgttttttttatttttttatttttttctattttaactttattatgaccaagagctagttgattaatattgcacaaaacactttgtggggccgcaccaattttatgttagtgactagtaaagtaggtgttgccaacctttagtgccctaaagccaatccctcaacctctacacacttttatgctagtgacaaagcagcatacgtataggtgtgccaacctctactgccctaaagtcaaaccctcaagaacaaaactcatcacaaaacgaatatagttgtttttcccatttgtagtttaggaacaagacatgggccttcccttgcccttttctttatagtaatttcaatttgcaggcttattaacttgttgaaaaacaaaatgcagatttctggacaaggca

SEQ ID NO: 73040 - DNA, 844 bp, Prunus persica
  Intron number 3 from transcript ppa010040m (locus ppa01004 0m.g) derived from phytozome v7.0 (chr-ID scaffold_7; pos 4466793 to 4467636 reverse strand)
acctggtaagcttctcttttaaccatattgtctgatgtgtttccttgaattctatcaagttattcaatggggtgctcaaatattatacttcatctgttacttttttattttttgctataattggtggaattctattatgggtttttaattgcattttttatgcaatgccagttcatagtagtcagtttctgttctcggacacataatttaactgccaaaagagttgttatttaaattggataattcacatttttggtggagctttctgggattgctttatcctaatgtagagaatgatttacttgaggaatttcgtatagtgccttgcttagttgaaaggtcctattatctggtggtattgtcgctgacataagcgaatatcgtgagctagtttcaaatggtatgacataagcttgattaccattcaactaatattaagtttgaagaaccagtagggtatcaccccattcttgaatgaacaagcctttcaaacataagtctttgttaaaattcacttaatgtgttgctagattcttctctgtaacaattaatgctccacgagagaacatgacaatgcatcctagatgggagtatgtagcaccactttttcaaattaatagttcaattcttttcttcgtatgtgaggcatttcagtcttgcaaggttaggcataagccttgaggcatattaatttttatatgttttagattgtacatgtagtatacctactctccctgtattttttccttattttgtggcttcaaatgccttgggaatttttgaatattttataattggaacttacagaaattcttcatgttgtgtttgcatcagatagatagtc

SEQ ID NO: 73041 - DNA, 1013 bp, Prunus persica
  Intron number 1 from transcript ppa017293m (locus ppa01729 3m.g) derived from phytozome v7.0 (chr-ID scaffold_1; pos 40234675 to 40235687)
tcagtagaaggcggtgtcggtcccgaccgatcagtttgtactttttgtaggaaatagattcatttagagtacatccctgcaagccttgtcaagtcgatcatctaatccatctaggaaagtgtaaaatcagtgaaacttaaccaaaattagtgaaatcaaaaggattttgaccgttactattcctagtttccaaaacatcaaaatctttcaaaaatacttcacagatcaaaggaacatggaagccaaaggaaggccagggaattgaaatttctagaaaaacacaaagtttcagaattttctcacaagtctttttcaacacacctcaaataccatccttaaggctcgacatcatactccaacatcatacccttggcctaagcttcccaaaaacaagatttggaactaaaatgtgaacacccaaacccaaaaatttatcaacagacccaaaatccgaaaatcctgatttcaaaattcttcttttgattttcttatgcctcaaaaggtagtctctaactcagttataactataaatcgactcaaacaattaatttcacaaaatctcaagaattgaaaatgaacttaaaacaagagtcccacctttcatcattccaattgcttcaacactccaccatttttttttctacctctcacattttgttttcttaattctcccatggatgtaatagtaataaactccaccttcttcttcttcttttcataatggtggatttgaaagcttgaggcaaggaggaaagaatgggaggaagagtgggctgttgccctccacgtttcagattctttttttttttatatatataaattttataaatatttatttatttaaattattatttttttaatatctacaagggcattttggtaattttcacatgttggggtattttgatcattttagcccaaaattcagaaacaatttcctacgtgttcgttgagtccactactttcgttctacctcagaatcataaatttttcacttgttgcttattgtggct

SEQ ID NO: 73042 - DNA, 604 bp, Prunus persica
  Intron number 4 from transcript ppa012303m (locus ppa01230 3m.g) derived from phytozome v7.0 (chr-ID scaffold_7; pos 22330237 to 22330840)
tgacggggcagttcatatctgagcaacagagggaggttggtttctatcacaaatttgtatccatattttatttctcttatgcctgatttgggcttggtaacaaggcttgaggcgcttgagtttatgcaatgattcaatagttcaaaaaatttctttttgtgaagtatctttactcatcgccaatatgtttatttggactatgttgaggttacctgttattagctgttcaccatttgttttaaagttatcaatcaaaagtactctggttttccatctaggattcaggtttcatttcagggatgatgtgacactcggttcttgggcaaagtaggggaaaatgattataatcagaaatcagaagactgactaccttcatgaaagtaccttctttgagacctagtttccaaatactacgtattggttttctgaatacaagaaaaaataagaagtaactgttgaaaacatgactttcatctttcttcatacaagattaatacatttatactgctctgaaacttttcattacaaagtctgagaaggtgcctatttatgtgtttgatatagtgtttatgcgtttacatctttctgcagcaagtgttgaccc

SEQ ID NO: 73043 - DNA, 609 bp, Prunus persica
  Intron number 2 from transcript ppa023936m (locus ppa02393 6m.g) derived from phytozome v7.0 (chr-ID scaffold_7; pos 11529717 to 11530325)
ggtaacttctttcctataagtccagatcgagaaatatatatatctttgccaacttgaatgcataggaaattgaaattaatacaccatgtttacaatgaatagtcttaatatagtagggtaattgtatatgatctcattttcagtttttctatttttactttattttgctctttcaaccagtacactaattagtaatttcattcccgctactctgcctttagaccagtatagtcttaacaatctatcagaatttaagtgcaccttataactttcttctgttatttccatacactttatattggaaaaagcttggctccttaaaactggggaggtgctcatcctcaaaacaattgagatgacacttgttaatttcatttaaattttatttttttgaaattcttttaactttctttgttttgaaatttgaaagtgtcaaaatcccatttgctttgagaaggaactcttccttaagagccaagctttgtttgaatcatatgcacatgttttttctttcttttaaatgaactcatacagatctgatttctatttaattattttgattgcaattttctaggtacgagtcaaagtttatcaagaaaattgtgaaag

SEQ ID NO: 73044 - DNA, 637 bp, Prunus persica
  Intron number 1 from transcript ppa003101m (locus ppa00310 1m.g) derived from phytozome v7.0 (chr-ID scaffold_5; pos 8191186 to 8191822)
cccagcacaggcgttctaagaggtgcagttttaatactcaaatcaatgttgttattattattgttaagtgcatcttttgtttttctatgaggtggatatttgcatttctatctccttcatttcatggttggttatggatttttgtgtgttgtattatgatatatgatgatataatctcttaggttagtatctactttttatggcttttaagtttttaggaattttttttcttttctaaatcccatgatttctgtaattttattacaaggaaatgtattttctttatgtgtgctgcatcagggaaagaaaattccactccaagaggtttgactgtttgagttctttaggtatcctttatttgtttttcttacaagtttttatttgtgttttgtgatttttaagtaagattgttggcatatcatagaacagtgtgatcatagatgtgtgtattaggaagaaaaagatttagtgagcagtgaccatcaaaagacttgggtaaggctgttttgcagtgattgaatcaaagagattgataattttctcttctcatacatgttggaatcgtcatgtttcggtttcacttttgaaatttatgtcgttctcccttttccttgcagtgcttctgacaggaacttaa

SEQ ID NO: 73045 - DNA, 485 bp, Prunus persica
  Intron number 1 from transcript ppa004901m (locus ppa00490 1m.g) derived from phytozome v7.0 (chr-ID scaffold_2; pos 14006361 to 14006845 reverse strand)
gtttccaggttcacacctctctctctctctctctctctctctctctctctctctctctctctctctctctctctctctcgtctacaattctatgtattttctttactttctctaagccagatgaattatctggtacccgatatcaatttacagtaactggtacattgtcgatattctagtaaccattaccctcaattcttttacaaaataaaatgttgagagcattttgatatggtaatataataatgtcatgagaatttgaacttgagacctctaatctacaggataatgcccttttttactggattagaccccgttggcagttatactaatatttttgataatgtgaatggaagagtttctttatgctctccacttttggtcacctcgagttaaaagtgaaacacacactcgcacacatctaacaagattgccttatcaatgaacaatgcaggtttggtcgtactggaatctacaaaactttc

SEQ ID NO: 73046 - DNA, 418 bp, Prunus persica
  Intron number 2 from transcript ppa019863m (locus ppa01986 3m.g) derived from phytozome v7.0 (chr-ID scaffold_8; pos 149517 to 149934)
atcatctttggcttggtagagttgtctgtaagtcgaatattttcttttttgcttttactgctcgcaatctttgatcatcatgatttcaagcactatcttgcaatttgcatattcaagattctctgtctctcctgaaatcttagtttatcttattaaattctgaaaactaatcttactgtaacactaaataaagtttcaaaagtggctgattcttgtcatttgatttgctatacacaacaaaagagatgtatgttttacatgacggtttctagcaacacaacagcccattgttttgcagcccaaagaggaaaaggcatattctgtgtgaaataatagtataagaattagatttctttttctttttttttttctatttccctagcaataatttttggtgtaaaattgcttgcagggtttt

SEQ ID NO: 73047 - DNA, 538 bp, Prunus persica
  Intron number 1 from transcript ppa018551m (locus ppa01855 1m.g) derived from phytozome v7.0 (chr-ID scaffold_1; pos 33152244 to 33152781 reverse strand)
gaactctttgcggagccaaagaaaaggggaacaaggtacatttactctcactaagttgtatttgagtctgcaagttcgtttcttcttctttttttcaatattttataatccggcatggaaatgagtgattttttttacaattaagagggctcgttctttgaattttcattcttttttagtatttatgttgctgtcatttatgaatgccttgcatttaaatgtggaggaggattaaacaagaaggttacagttgaaattgaaccattaagaatttcatgctctatttagtataggagtaattgtccagaaaatagtccagagcaagaatcaagagctgttcttttagatattgcgctgtttaatcaactttattccccctccccttattgatatcgatgattacatccactggaaataaccaacagatctcatcaaaaataaaaacaacttttacagctgcaaaaattcacctttctggtgtgtttcttcctttattttagcaggaaaccagctgaaagaagggccccttcagaagaga

SEQ ID NO: 73048 - DNA, 440 bp, Prunus persica
  Intron number 1 from transcript ppa021036m (locus ppa02103 6m.g) derived from phytozome v7.0 (chr-ID scaffold_8; pos 983984 to 984423)
taagtatttgatggattgtgccttttggtttgttttgttttctcctatcagaagtctttatagggtttggtaaaatcttctattatcttatgtatgaggctctcgattaattattaattggttttgagttggaactctaattgtactaatttccaccttctgataactgctcacttttcttgttctgcaaatttctcaatcttgttaacgaattatcataggcagcaggaggtcaatataggctagacaacattgtcacctttgctcctacatatgcatcttcaaatctcatctatcaaattatggtttatttgagcaaaataaatctgtgtccataaatcatccgccatttataggctaagggatttctcattttgtacgtatgccacaactattctaaataaacatgtaggaatacacatactttcattttgtcgaag

SEQ ID NO: 73049 - DNA, 343 bp, Prunus persica
  Intron number 3 from transcript ppa001130m (locus ppa00113 0m.g) derived from phytozome v7.0 (chr-ID scaffold_1; pos 44793087 to 44793429)
ggtaattatttatttccatttctttgtttttttcttcattttcttaatgttattcccgacccatctttgggttttcagagtaatgctgagctaaactctgatcgattcacatggatcaggatcaacatggtgcaccgcaattaaatatgtttcttgtaatgttttcagaagtttacaaaattttagtaggattttaaaagtttggttcatcaatttctgattaaatgttcaactatatattcaattttcccaagctctgtattcataatagtaaaatattagttcaatttaatctgttcctaataaatcttactttgctcaattttgattttatctaccaggt

SEQ ID NO: 73050 - DNA, 461 bp, Prunus persica
  Intron number 1 from transcript ppa000439m (locus ppa00043 9m.g) derived from phytozome v7.0 (chr-ID scaffold_10; pos 44061 to 44521)
acgtggagaggcccttttccaaccttgagtatacggtatgctttgctaatgtaactttactatgaaatttggcatatcttttatattattattaaattcttgcttaattacttaaaaagtacagaatgaataactgcattttcttggattacctaatatactataaagagtttagttcgctatacattaatttgaattttgaggatggtgtagtttagcgatcttcttatgatactaatatttgatttgattgggagaatattaaagttttttttttcgttgttgtattgttttggggttgggggtaaggtagaggttggctagttatagtacatgcacaatgctcgtgtagctgtacacacgtatcagcatgttactaataagttatgttttctgtttgcttttatattgattgtgtctttataaacaatcagggaattaacagggctaggcttgaacaa

SEQ ID NO: 73051 - DNA, 428 bp, Prunus persica
  Intron number 2 from transcript ppa005220m (locus ppa00522 0m.g) derived from phytozome v7.0 (chr-ID scaffold_1; pos 42554830 to 42555257)
gctctggtgagtttgtttctttgggcgtttaaatgtgaattgtctctgcttttactgcagttcatatcttatcgttagagtgatcgatttatgtttggtttcatcttaaaagttcttaattctaagatcatgtgtgttttgtttttccccttgatgttggatacaagtcaattttgaatcttcttagttggatttgttttctgatagtattgatggaatattaaaaataatattataaacccatctgaacacatgcgattttggggtattgtttttctttttgtcactgaatttgagtctgttacagtttatcttatcctctgtggaagtagcttgatatgctattgatttccgctatttgtcatcagtaacaattttctggtcttcctttactaatagatctgtatgatctactttgtaggtcttgc

SEQ ID NO: 73052 - DNA, 741 bp, Prunus persica
  Intron number 1 from transcript ppa023438m (locus ppa02343 8m.g) derived from phytozome v7.0 (chr-ID scaffold_5; pos 1166306 to 1167046)
gaggaggtcaacgatgattgacaatcggacaagggcccagaaggatgagatgatgtcagcactttgcaattggagaattccaagtttggtgattgcattagacaatacgaacaaaaattgtacatctcaacttttgtatttatggccattattttctttgtttgggaaaattttgaaatcggccacaaattttttaaacattttgagtttttaaatacgaaaattaaacactttttctttcttgtaaacacaatcatatgaacgtcataaagcacacatatccatatagttgataatgtgcattgtgcgcatgtcttaaatcttattagggggtgggcatcgatatggcaaaactcgaaaaccgaatcgggaaatcgttaaaaactgaattgactaaaaagttaacaaattgcaaccaaactgaaccagaccaatgtcaatcgatcttggtcccaatttcacaactcatagcactaaagcaaacaagaccggttactatatttaatatatatttttattttattacatatatatatattatataataaatattaatatattatttcggccacaatagaactggccgcatgtaacgtttccccccaagctcggcggctaagcctaagtcgacttaggtttttttttatttttttattttcatttctctctgcctcttctgttcatctttctctttgatatgaaacgcaacacagtgaacacacaaacaaagacaggacaaca

SEQ ID NO: 73053 - DNA, 898 bp, Prunus persica
  Intron number 1 from transcript ppa003094m (locus ppa00309 4m.g) derived from phytozome v7.0 (chr-ID scaffold_1; pos 32609732 to 32610629 reverse strand)
caagaagagctgtcctgtcgtcaagactggtatattataattccctttctttttaatattatttcttgtattttatatatatgtgtgtgtgtgtgtgtgtgtgtgtgtgtgtttttaatattatttcttgtattttatatatatatgtgtgtgtgtgtgtgtgtgtgtgtgtgtgtgtgcgcgtgtgtgtgtgtgtgtgtgcgcgcgcgtgtgcgcgtgcgtgcctgtttctattcataaacaagataaaattaggattaattgaattgctcgagataatggttcttttgctttcgcaaaaacaagcatatcttttcttgttgcttgagatatgatattgctattatgcatatgtgtgatgcacaaatcctcattacttggattcctcagctggttgtttatcatgtgaactgttatttatccccaaacgtagtattccttttcaaatcattatggaaatcattatggaagctacttgtgatgggagtatgtcttgatgatcatgttaagtaaatataagggaataaaggaaatagaatgcctcctgcaaggagaaatacccagaaaatttattgagctcgaagctagctattcaaagggattacatcgtatatgaaaccaaacaaagattctaagaaaggttactcaaaatacagacatgagctcctgcatatagtgaggcagctccacacacagacacacacagagatatatatatatatatatatataaaatatttctgtattgacaagttcttgtcatgcattattgttgcgctatgtttacttctgtataaatgagctgctttttgaattatcttgtcttgactcagacttgatttaaatggttgacctttatacaaatatacgatcctacctgattaatctgcaggtaaact

SEQ ID NO: 73054 - DNA, 658 bp, Prunus persica
  Intron number 2 from transcript ppa023633m (locus ppa02363 3m.g) derived from phytozome v7.0 (chr-ID scaffold_1; pos 37645965 to 37646622 reverse strand)
gggaggaaggtggtgagacattcatcagtcttttggtaattcttacacccgcattattatatttttacaagttgcatttgtgacgacctcaagttttttatttacattttgaatgatcctatgggcgagcgaagagcttactcttttttttcactggaaaggtaagtttttgtttaaaagaaatgctaaaagaagctgtaagggggtaggctagaccccggttgggcattatagtcctcaagcttgggctgacataaattagtcaagttttatcttgggttgaatatttccttttgcatctgagcttgctttggcccaaatgagccatactcaaggtgttccctaaagatttgagctgctgacaagaatatttgccccacctttacttggtcagacaaattatacttgcagttgaacctctttgctttgattatatttggtgaatcaggccaaggttatgtcagataaactctggtcctctcgtatcttaaaaaagaacgctgggttagatcatttagatttatgaagggagggtgatcttaagattctgatccatgagacggtttattatggtgaagaaatgatccacactacgtgttatcagcctattaagaattaattactttttctgagttgtcatttatgtctgttgcagggc

SEQ ID NO: 73055 - DNA, 741 bp, Prunus persica
  Intron number 3 from transcript ppa017490m (locus ppa01749 0m.g) derived from phytozome v7.0 (chr-ID scaffold_1; pos 46733004 to 46733744)
ttctgtttttcctgttgaatttgtgggtaagatgttataatcatagtgtttagcactttttaattgcctagtgagctacttcattgtttttgtgcttgaagtttctttctattctgagtgagggaaaatgcaagttttagtaaaagtaaaattttgtgttaaagatgttacatattcaaggcattggttgaaaaaaagaagaactggaggaaaatggactttccgatatactcattctgtatcaatataaattctttttaagtggttagtatcctagattgcttaatgtcccagcaaacttgtatttgaggaataggattatggattcaaatttcttttaaaaaaaatattcatccatatgtgtcttatttttgaactttggtgctggaagcctccattttacctttagaatttctgttttggcagctcttttgctgttacctgcactatttgctccatttgtataaaattagctatttatgcatatacgtagtgttttgagaggataacaaaacaatataaacatacacatggaagttttgagaggaaacaactatatagaggttttagatattttttcttctcataatcatgaaggaaaagtatataatccccaaacaacttggcttgatttgaatacgagtacttgcaccatacatacataaattaagctatctttacactacttttgcttctaattttgtagtcagaggttttgtgacgggaagtactgatacgtca

SEQ ID NO: 73056 - DNA, 432 bp, Prunus persica
  Intron number 1 from transcript ppa003916m (locus ppa00391 6m.g) derived from phytozome v7.0 (chr-ID scaffold_2; pos 20832175 to 20832606)
tcctttttatttattcgaagcccaaagaagttgaggtaagtccattttcatcttgctcttctttctgttttctgttttcttttgtttaacatgtattgtcctggatgaattatttacctgtcttgcattgcatagtttactttcttttgtaacaatttatcttgtgttctgaggtgagggtgcaatggaactactgtttctttttgaaatttgatagagaaaaaaaaagatgaataggttgatttgtctaaaggaattataatcacttgattttctcacctttttcattctatgagtgcgattgtttcattcagaataatgaaaatccaaataccaaaaactaaaatcaaaacagaacaatattacatcgtgcagaacatctctgtgtaataacttgacatactttgcaggatccggtaagcaggccacttt

SEQ ID NO: 73057 - DNA, 528 bp, Prunus persica
  Intron number 1 from transcript ppa015110m (locus ppa01511 0m.g) derived from phytozome v7.0 (chr-ID scaffold_6; pos 19459129 to 19459656)
aatcccttccggattatcaagatccaactctacaggttcctatctctggtctcatacagtttttattttcttgttctggatagtatttgtttggtttctgagaaaagaaaataagtcagatctgggtttttctttttcctagtaattgggacctaagttacaagaaggtcatccttataagcgtctttgttaaattgaaagaaaaagatcatccctttgtttattcaatttcatatgatgaatattagggctaggcttttcagtgacttgggtctagatagatgctcatttttgtctggtttggtttgcaaatttttgaaaccctaggagttgcaatccatgttaatcattttatgttgtaaatattattaacttgcaattgtatttttgtttgagttggaaatttcggaaatttacagctgttgagttgttctattctagtgtcacagtgttggttatagatgaaatagacaagaaattattcttcactgaactgggggaatctaattatggtggattttgcagcag

SEQ ID NO: 73058 - DNA, 787 bp, Prunus persica
  Intron number 1 from transcript ppa026828m (locus ppa02682 8m.g) derived from phytozome v7.0 (chr-ID scaffold_4; pos 11934923 to 11935709)
tagaaaagggaagagggtggcattggcgagcccaagtacttatttgttattccttacaagcagaggagagagtgtggaaacagagattacagtcatgatatttagaggtcgcaacaacaatgccgccactttctctgtctttgacaatcttcaactgccaacagtaagtacccagacctcttttgaaattttaaagtaacgaattcaaataggccaagattttgagccgaaaagctctcaaatttcgtttggattaggcagtaacgatgtaaaatttcgtccaagatggaaacttttactccaaaacgcattttgtattcagttgttgacaggtagggccacacccttgatggattatgtagatcaagcagaggaaaatctacttttgacttgtcaaaaaccaaccatcttcaaatttccacaattctttgaagtttggttgaggatgcatataatcctatcaattctgaaccacaagtatctttcctttctaattatatctttaacttgcaggaaaccattaggcaggggacatcaaggaaaaaaaaagaaggaaaatttagagtttaatgggtgaactttattttgtgcttatcagtactaatttgctctttctgttattcacaatttccgttgcagttgacagcattagccccttgcagtctatccttgacaacacgaccttggtttcaagtgatggaagctttgagcttggtttcttcagtccaggtagttccacgaatcgttactaggggatttggtacaagaacatcccagttagaactgt

SEQ ID NO: 73059 - DNA, 659 bp, Prunus persica
  Intron number 1 from transcript ppa012841m (locus ppa01284 1m.g) derived from phytozome v7.0 (chr-ID scaffold_1; pos 31573724 to 31574382)
gcttgctcaaatctaattttgagcagcttgtcgaggtacgctctcaagttttcatttttatcagtttctaacttgcaatttcttccaaagttatatttcaattttgagtaaaattcccttgattttaattccattaatttattttgtggtttgatttctaaacctaaccatgacatttttcccaaaaagccgagactttggtgaagaacttgctctactttgattctaaaattgtataactggtacctgactccatttttttgcgataaaaagcctaaactttggtcactgctgctaagtttggggatttgtctttttacaaattgtgcagtgagcaaatgcattaaaattgtttgggggatttgattgtgtatatttcatttcgcttgtgtttaatttgatagctaaaggaaaaacctaaaaatgtttgcttttggggattgaagaatgaccccacgaatgaggctgatatataatttagctgttcatctctttcttattcataaggaactcagttattctgagttgggaattttcttttctcgttctaatttgtatggcttgattccttttgtattgctgttgacttccatttccatttaagaaaacacgagttcaatttaacgtgcaggttgcttctaaaaagaagagcatctcgg

SEQ ID NO: 73060 - DNA, 872 bp, Prunus persica
  Intron number 1 from transcript ppa013561m (locus ppa01356 1m.g) derived from phytozome v7.0 (chr-ID scaffold_2; pos 17119879 to 17120750)
tttttgcctccgatcgcgctcttcctctttctcaggttagtattttttttctttttccgtttctaaaatttttcaatttgtttttttaatgtctgaaacgcttatgcttaatcatgattattctttaattgcgctttttctcagtatttttttgtattcctaaacatgggttgtgtttaattcttgtgttctacctgtgtttatccttgtattgatttactttaattttttttatttattattctgcttaatggttttccatttttcattgttttcaatttgtatctttggttgattattttccccttttgggtttgcttttatgtttctcatgatcaatggtttctgagttcttggggatttattgcactgctttactcctcctatgaagctattttcgttaaaagaaaaaaaaaacttataatatttaccacaaacacatgtgtgaaagatttatctgggtattgtgcccttaaccaatggagaattgttcttagttgactgaatttgacatgcctctgcttctcacttcattgggtatatggccttagctggaacacagttttagggattgttctttccagttctagtaactatggaaattttaaacatcgtctccctgaaaatccttcggtatatcgtttcaaatatcttggtagaacaaataaaagataatagaaataaaatcttctttccaaatcttataaactaaagaaaaggtgctatttcaaccaatttttttatgagatatttgatgaaatttgacttccactttcttactcttagggcattcttgttttaaactaacgggttcctgcatgcttttttctttgctagtcctttcgaagaaagaaagaagcacccaaatccgt

SEQ ID NO: 73061 - DNA, 997 bp, Prunus persica
  Intron number 1 from transcript ppa003709m (locus ppa00370 9m.g) derived from phytozome v7.0 (chr-ID scaffold_6; pos 24901799 to 24902795)
ggaaaccctctcagactaagccttccgggcctgaggtatgctcccgcttactttctttctctccagacgaataaagatagggtttttcttttggaaaattaagaaattgggaatgaggttttattttaaagcagaaaaattacatggattgggatttctggccaaggtcaggaggaagtttgagttaaatgtacttttgtgttctttgaagttggttgttggttcacattgttaattgtaatggaggtgcactctcacattgagcaacccaagtgatccgtttgcttccaaacatagtttaacttttaaataaatttgtgactgtcagtttgtgtgccaaagagtctgcactagcttattaggcattagctgtctgttcctgccattgttggattttatggctttatggctcaagaagatcccgcaggataatcttttcgtgtggagaaaaccggggtattgtgtttactttagtctcaaagcaatagtggattatgtcactgtaggggactcaaggttttggtttgttccataatgtagtgttttctgatacatcttgccatatattagtatgtaattccactgaaggggagattactaagttgtaactctgggctcttttgttgttcaaatcaatttttagggtacccattttatagaattactggaccatgacctcctaagaccctgattctctatatatttcctgtcatagagagactggctgtaactccttaagccccagattttctatctttctgcatccacaacttcatgaatgagagcggttacttgataaccgaagctggctttgtacagtttaattttctgtcttttttgttctgctgatatctctcgtataagtgtgtttccttctttatattaattatttcttccccttctgtttattgcttaccgaaatgctaaatgaagcatggtttctcgttttatgtgtttaataaccttatcgtatggtgacgtttctcctattaacagc

SEQ ID NO: 73062 - DNA, 605 bp, Prunus persica
  Intron number 1 from transcript ppa008823m (locus ppa00882 3m.g) derived from phytozome v7.0 (chr-ID scaffold_8; pos 21513721 to 21514325)
gccctctctctccccttccaacgcttaccttcaaggtactttctcactaactttaatttctatatgttaattttgaattttaactcttctttttctcgatgcttggttttcagagaatattcattcatttctgattttgaatttgttaacatcttcattaattagtgagtctaatctttatagccttaatataactacgtggaccggttaagattaggaatttcatattttacggcaaacccaataatccaactaattgctgagaaagttgatggggatatttgaaagttatgagttgtatttgtatgtttggtcctcggtgttgtattgtttatctgggagtttggggagcttcttcagcttaagctcacttgatagggagttaccaatcatatgggatgcagacactttgaatttctcctaacccaattctttatattttatatctctactttattcttgaaattttggaaaatttgacacattttaccactacataaagaaaagcttatgggtttatttccagcttattggggttggataaaacattacggttttaatgtttttcaggaaattgaataagttagttgggaagagcaaaaatc

SEQ ID NO: 73063 - DNA, 879 bp, Prunus persica
  Intron number 1 from transcript ppa021777m (locus ppa02177 7m.g) derived from phytozome v7.0 (chr-ID scaffold_6; pos 11131047 to 11131925)
cctattggtgttggtaaggtttgaaattgtttatttttctttatttttaatttaagatactcgggtactcaactatataggtttttttttcccccaaaaccttccctaggctacaactaaccagagcccatataatggttccgccaatggatctctgacaaactaaaaatcttatgtggttctaaacttgggtgactagttgggcacctacatgtgttataagtccagcccaatatttaaaaaaataaaataaaaagcaaactctacacacatgttacccatccaggtggtcccatatcttctctctcattctctttttgactatgtgacttgttgtttctctctctctttgctacccgacatcagcaacttgtttctccctctttttttttttttttttgtgagtcaaattctacttctattggctatatcttctattatcttggatgggcaacttggcaacaacatcttctcttctccttttgttaacaagtattcttctcattctctccttttctatatatctttaattataattataatttaaaattgagtattctaaggtttaattagggatgaattataatttttgggattttattgaaattaattagggttttgattagggatgaattattctagggctttgatttgggattttgttaaaattgagtattctagggtttaattggggatgaattataattttttggtttggtattgttgagaagttattatgataatttgtttgattttttgttgatatgtttgattaaaattctttctacatattattcataggctatcttttattatgttggattataatcggaatcacaagtgaacaaagaatttgttgtcttttttttaagaaaaaga

SEQ ID NO: 73064 - DNA, 653 bp, Prunus persica
  Intron number 1 from transcript ppa000530m (locus ppa00053 0m.g) derived from phytozome v7.0 (chr-ID scaffold_8; pos 21221928 to 21222580)
gcttttcgggtattttttccccagtaattcgacagagatggcttttctggttcgtattattttattatgaattttattacctcacaggtcatttctatatagcatgttaggttttgttaaatgcaaaccagttgcatgcagtcatataatttttgcattacatgacacagagtagctgggcggacaagttttatctatacgcctacacaagagtggtgaaatggtgaagggcaaagctggcgtggattaaatgtgttatgttccgtatacacatcttccaccaccctccctcacccttcttcgtctaaaaacaaaaattgacaatgttgccatacgagagaagcaatgttttctccaaatgtttgattgtactactaattattttccccagaatcgaagaacatgcttttatatttatttatgaaggttatgtgaaatttaagtgccaaagaagtttctttttgcgttcgttcatgttgtgctactaatgttatcgagtagcaagctgttgatttttatttatttattttgattttaataagaatgcttcctacttggtcaagatgttctcttgttattttgaactaattttacgtttgtttctaattgctttgccagaacccgcacctgttcatttgtgatactgttttcac

SEQ ID NO: 73065 - DNA, 167 bp, Prunus persica
  Intron number 2 from transcript ppa000530m (locus ppa00053 0m.g) derived from phytozome v7.0 (chr-ID scaffold_8; pos 21222658 to 21222824)
ttaaggtattaccttccatatagcttctactaaattctgactggttatattagtgagtacactaggtttgtgaaaaaataactcttggctgatattattttctttttcttcaaatattttgaatttgcttagcgtgaaggttcatccgctgcagaattagaaattac

SEQ ID NO: 73066 - DNA, 421 bp, Prunus persica
  Intron number 2 from transcript ppa010338m (locus ppa01033 8m.g) derived from phytozome v7.0 (chr-ID scaffold_8; pos 21231327 to 21231747)
ttcggaaaaggtttttattttcttattttttgctctaaagtatggtctcttattggttcgatccttccgctgttagtttagttgtcagagttgattctttaaggaagttgttccttttccagaccgcgttttgttgtttgaagcaatttttgcttatttacttaattattcccctttaaatttaagccttggcgcatccttactttataatttatagtgttttttgtttacttatcgaataattggtggggtaatgactggaagacatgtaatggagtttgattgacctttgcccctgtactttgcactataaatggaacaaatctcttcctgaaaagtgattagatgacctttgcatctacttttgatacaaagtgctgatatttgttccaggtacaagcctgacgttattaaaggtgac

SEQ ID NO: 73067 - DNA, 571 bp, Prunus persica
  Intron number 1 from transcript ppa024526m (locus ppa02452 6m.g) derived from phytozome v7.0 (chr-ID scaffold_4; pos 30016875 to 30017445 reverse strand)
agatactctgacagtgctctgacaaggaaaaagtctaaaagttttctctgggagattgaactttttaatcgggtttggaaacagcgcatgtgtatgtcaggtagacgaaaagttgcttacatataaaaccatttcaaaaaaataatacggcggttacatataactatgacgtataaattacaaaatacgacggtacatttaacttcggatgtggtaaataaatatgacagtagtgttgtaggtaccgtcgtagtaaactcaaaaattaaagtacataagtaataactcgcgtcatggtagattatttaacacgtcgtttttattaatttaccgacgtggatttctgtaatatacgtcgataataccgacgttgattttacaatttaaacggcggtttttttgtaaggaccgccgttggttttaaaaatttattctataaatttgtcgctttcattcattttcggtttacatttaaggttccaagttcttcctctctcagtctctcacgtctcaaagacaataatttggatgtctttctcaaagagaaattgagcttactcgcataaaatat

SEQ ID NO: 73068 - DNA, 791 bp, Prunus persica
  Intron number 3 from transcript ppa025469m (locus ppa02546 9m.g) derived from phytozome v7.0 (chr-ID scaffold_5; pos 17347971 to 17348761)
ctttcgttgttaaagatcatcgtggagaatgtaagtatacatgtctcattcagtgtttaaaattgaattagatttcatatttacatcgtaagtactaaacgagcccatatattagggtatatcttcatacatttatgcttctcactatgcattttttattttattttaaattatttttcatggacgtgaccttaccaacccacttgacttggtagttttatgaagtcaaccatcacaaacacaatacaatgcaatattgtatcaaaagatcatgtttacacggcgagtcgaacagtctgcgacctctagagcaatgggaccacggccgtttctttaagttcatgcatgttgccaaagtggcaaaaaaactagtgaacattatttgagtcaacaaacaacctagagctcggcatctgctatttcattactttttcatatggtcagaattcaatcacgtatttctttgttcaataattgcactttcttgtacgcgttaggcctgtcttcatcttcatgacttgggtcaatggtagcctttatgctttctttttctttctctgacatgctttatgccctttaaacaagttaatgaccaagttgaatgggaagagggtttgatttgtcttttcttgtttgtaattctcgaagtgcaaaactcttctacatgtcatggcttggagttacgtgcctagctgcataaaaatatctatatgtgagttatgtaagtaagaaattaatctaaccaaatcccaaattttgatgtcgaagtgtacaagaagcatcatccgcca

SEQ ID NO: 73069 - DNA, 866 bp, Prunus persica
  Intron number 1 from transcript ppa005615m (locus ppa00561 5m.g) derived from phytozome v7.0 (chr-ID scaffold_1; pos 32939884 to 32940749)
tgaaagatcaagggagttgtggtatgttgatctttgttctgatatcgaaattgtttaatctttcacagtcttaatttgtataattatcaaattggattttgtcttctagtaaattattagcttcaatatatgtagtaggaattttgttgcaggcatcatcaatagttttggtttttatttttttcttttcttgtttcttggtgatttaagttttgctgaattttggtttggcaatgagatggggttttgcctgagagccttctacagtttttgatgaatcattggctcgttgaacaactcatttccgctatgttagcaccatagaaatgagaaattaaggcaaattcgtgagcaatggagtaaactttgattgccttctttgatcgaccgtggcttggctgattgcatcaagtcattttaaatttctttactgtaagaagtatcatggaaattggaatgaaccttgtcacgcggtctttaatcttgtaccatgttcatgtgtttgtgcattcttaatcgaggggtttgctggtgtgattatggagttaaatatgtttgcatcaattcatccattctgatttccatttcttaaaaaagggtcgtttcattcgatttttcacgttatggtttgcttgctttggcatctgctgaactcttgatgctcataatcagttggttcagttagctaacatgcaaaactttagacgatgaaaatatgtatcaatttcttgtaaatgtcttcttgagtcattgcactcatgttatattaggatgcaatagttgaatttagtctcttgatgccaaatttgagagtaattcttgttgttataggtgcttgttgggccttctcaactactggtgccatc

SEQ ID NO: 73070 - DNA, 435 bp, Prunus persica
  Intron number 1 from transcript ppa004910m (locus ppa00491 0m.g) derived from phytozome v7.0 (chr-ID scaffold_2; pos 13890041 to 13890475)
gtttccaggttcacatctctctctctctctctctctcgtctacaattatatgtattttctttactttctctaggccagatgaattatctagtaatatcaatttacagtatctagtacattgtcgatattctggtaaccattaccctcaattcttttacaaaataaaatgctggaggcattttgatatggtaatatgatgccgtaaggattcgaacttgaaacctttgatctacaggacacggccattttccactagactagacccgttggcagttataccaatgtttttgatgatgtgaatggaagagtttctttatgctctccacttttggtcacttcgagttagaagtgaaacacacactcgcacacatctaacaagattgccttatcaatgaacaatgcaggtttggtcgtactggaatctacaaaaccttc

SEQ ID NO: 73071 - DNA, 677 bp, Prunus persica
  Intron number 1 from transcript ppa001807m (locus ppa00180 7m.g) derived from phytozome v7.0 (chr-ID scaffold_5; pos 12855435 to 12856111 reverse strand)
aaaccttgcttgaacaaggtaattttcgttgcctcggttactatgcttatgaaattgagtttctgcattaagtttgttttaatcccttttctgtttaagttactaaacagacaaattaattcagttctttcattgttgatgcccagcacacaacgttttattgtcatttcacaaaaagcaaccacctttgttgtgcaacactttaagatagattagtaaacattttcccaaagaattttcaaagcacttgccactttgtggtggtaaattcttaggttgatgtttaccagttgatctcttcttgtttaatgtttatgatcaactcaaaataacaaacggatcattctcgcacaatctctttatttgtttattttttcctagcactttatatcgatcactatgagtgttttctactttggttacataaggtgtctaacttataggagaatgtaaataccacaaaaaagagagaagataattgtttatcaatcatgattattggatgcatcatataacactgcgtgaagaacgattttaagtttacagaagaactctcgctgtttgcatgaagaactattcaaacttttaggaaaaataaattcttcctttttttctttttctcttgtactgttattctacattttttgttaagttgcaaagggcctttgctttcttgt

SEQ ID NO: 73072 - DNA, 355 bp, Prunus persica
  Intron number 1 from transcript ppa005456m (locus ppa00545 6m.g) derived from phytozome v7.0 (chr-ID scaffold_4; pos 3273607 to 3273961 reverse strand)
tccgcgaggatcgtgcactattgtgagtgttcttttactctgattgtttactttaaatagttttccctgctttagttattccatgttatgaagaatttgctttaggttttgcatattttgttatttttcaatctctgcttagtgtgctcacttaggaccctggtttgtttgtttcaatggtgaattgctggtatttttatttgttgagcttgttttctacttctgtgctgttatgtgttctcaatatagcttgtttgctagtctctgagaaatgattcttcagtcatgacttgatttggtggcttggcgagtattctaatgtctcttgcttttgattggcttctaattttcagaa

SEQ ID NO: 73073 - DNA, 799 bp, Prunus persica
  Intron number 2 from transcript ppb015086m (locus ppb01508 6m.g) derived from phytozome v7.0 (chr-ID scaffold_1; pos 29659022 to 29659820 reverse strand)
aggaaacttaataatcgcgggaatcgttgtgggaggtattatatttgtgtatacacattgactatgttgttttagtttcgtgcgattttcgatttcactggaagttgtgactaatagaaatttttctctgcattttcaggtctaattgctctactggttataattggtatattggtgttctttgttcgcaagtgtcgcacaagacgaaacgcatctagtagcacggagaagaattgacgccaacaatcagcaattcttgaacttggcttctattcttcaccctctacagcttaaatgtgtaatgctccatgatgtgacaccaaaaagaattgtgtagatcaaaatttgatttatttatatttgttcgttttttattatatttatttatgtataatgcaataataatgtgaatcatcaaaaagtctgtttcctagtgtcactgaaaactatattgtaaacgtcctgttttgagatttcattggttatttcgttctttgatcagcattccatgaggcttcatcaccttgtcctttggttttcttcaaaagttgctcaatagaatatgctgaaagctccctgaaggtgcaatcaagcattcttcttaactagaaaagatctttataacgtattctaaggttaacccgtatatagttaaatacaaaaattgaaaattaaataaaatatttttgttgttgttgctactcgttagtgaaagggcaaaataccattcaagaggctttcttgtatttactcactcttctaatctaacttggtactagttattcttctgcagcacaac

SEQ ID NO: 73074 - DNA, 775 bp, Prunus persica
  Intron number 2 from transcript ppa025454m (locus ppa02545 4m.g) derived from phytozome v7.0 (chr-ID scaffold_4; pos 18155947 to 18156721)
tgcgaggactacttcgataatgtcagctactttctacagtctgtttgccgcattgattgttaagtttctatttcaaatatatttggggtcgtagaaagatgcatatcttataccattttgttcataggcttggttgatgatcagtgcagaactgtaaattatgatataaatttgaagacaacttgaccttttatcatatcatttgaattcttttctattttctaatgattttcttttgagggttattagaagtcaatacttgcatgtctgaataagttagaattgctacttgtttttaactggtaactgattcagttaagactcatagaactaagtattagttggtcgagaatgaggcaaaagcactgcaaagctgatatttcgtggaaacttgtactctgaaagttgcatctcataaggcagaagaactacgtaattttattcttgtatcttttgggttgattgaaatagcatgtcttcattgtattcatactaattaccctatgcttgcaactcctctctttgtatgcttttatactttgtgtacataatgtttcagagctattgtttcataaaacttccaccaagaatcttcctcttgttcttcttacagagtgtggtaacgccattttgcagcccctttccaaaaaatccacatcttttgttttgtttgtccatggccttgtgcttgttatatgaaactgagtttctcaaggcattttttacacatatatatctcagcattagcttttcatgccccagatcgtattttccg

SEQ ID NO: 73075 - DNA, 640 bp, Prunus persica
  Intron number 1 from transcript ppa005108m (locus ppa00510 8m.g) derived from phytozome v7.0 (chr-ID scaffold_4; pos 4189795 to 4190434 reverse strand)
gacgtggcattgtcctccttcgcttcaaagctcaggtagtgtgacttgatcatttcgcggtatgcccaaccgttttttcacagcggttatttttcttgacgattttaccctttctgttgctttatatttgcttctattctgccttggatttgctgaagttctgggtatagtgagggaaaactaaataatgatggcgggtgtctgttttcgttcttgtccgtgataggggtatagcgggaactttaaaaaaatcgtttgattctttcctatttttctgtttttttccccatagatttcattctaattttttgaaaaacggatttattgagttcttttatgctttggatttattgggttgacacaaaaataatttgatcagataaatccgtgcgaatatagtcttgttttttaaaattaattagttagtatttgaactcgaaatctcttccaacgtataagttaaattatgttcttaacatgtgttgaaatgaagatgagtcgggttcttatttatttggagttgacagcctagatctaaccaaaaggccaaaactttatccacttggtttgaaaaatttagcaaacccaactattatgagttcctcaagtcaacacattcttgattgctacagaccactaa

SEQ ID NO: 73076 - DNA, 798 bp, Prunus persica
  Intron number 3 from transcript ppa014549m (locus ppa01454 9m.g) derived from phytozome v7.0 (chr-ID scaffold_8; pos 19342544 to 19343341)
accactggggcttcccactcaatctgcccatccgggtaagaacaaaatcagtattttgaagttggctgcaacctaattgcagctttgttgattgtctgaatatgatttcataatggttgttatgttgttaggatatcatgtcctgttgttccgttgtcgtgctgtcacgtaaagatgttagtgttgttaagttgttgataaactaatgccatttggggttcttgaatgtttgctgcttgctaacatgacggtaagaaacagctgaaatggacggtagtccttagttctttgcaggtcgttttctatgaatctatcagaaagttctagattgcttgagattgtaatcttccaagggacatgtttagtatcattgctataatgaatgcaaaatataagattgcaaggaacttaggtcttctctgttaggttccgaattaagttccaagaaaatcaatgttttgctctggaggaaaatgcttttgtgatgagttttgatgttgatgatttagttgacttttatttactcaactctctgaaatttggcaccagattgttccagaatacgggtgttttctaattttaattggaatgatttggaagtgtttgagatgatacagaaagtatactaaagaatcggttctattagttagcgcactagttgaaggagagaattctttgttgatctgtggctaccagtcttctgcataatcttccttggaaaaggttcccagttttttggttgttactaatctgttcctttgttcatcatcaactgcagcccgcttctcccctgacgac

SEQ ID NO: 73077 - DNA, 648 bp, Prunus persica
  Intron number 1 from transcript ppa003784m (locus ppa00378 4m.g) derived from phytozome v7.0 (chr-ID scaffold_2; pos 17043535 to 17044182 reverse strand)
agagtctgtactcgttgtattctgttctcttttgggtaagtttgatctggaatttttttttttttggtgtgggtttttatgctgttctgttttggttttggttaagatgtgtttggaggaaaagattagaaagtgggatttggaatgttgttttaattgaagtcaagtaggtagtttgagtggaaatggtcaagtgaagacatgatttttgaaatgtttctggcgacctgtttggatgctgaaaaaattaagcaaggatatgtgacttttagtttcgggagatttaagtgctgtaattaagtgaactggatactctcattagattcgaatgaaaggaattgtaggaagaatctaatgctctgtgaagctggtgtgtctgtgtttgtttttagggtcagctcacataacgtagagagaaaatatgaggaaaagaattgagtgaaatgatttgggctggtggtgataagtaatcggtttggcagtgcatctcttttcataccagagttgatttttttaatatttatttgcattcttgacaatggtggaattcgtatgagagtgtttttttttcttttctaataattgatgttccctctttcacctcttactgcagctaccattggataagacggaaaggaaaacctgctc

SEQ ID NO: 73078 - DNA, 832 bp, Prunus persica
  Intron number 1 from transcript ppa020971m (locus ppa02097 1m.g) derived from phytozome v7.0 (chr-ID scaffold_3; pos 5325107 to 5325938 reverse strand)
aaagaaaaccctctccttggtcctgctggactcacgtaagaatttcctctccctctctctcaatgatttctattttcagtttattttcttgtttcgcaatagaatttatgaggctaatcttttcttttaatgtgtttcataatccttaccattttctcttttttttttttttttttttcttgtggatggtggaggtttaaaattaataatcaactgaggtatgagagtggaaaacaaaaacagaaaccatttgtatggagtttgattacgactaaagcataactcatttgagctacctacaaaattgaaggtgtatggaaaatttgagcaacctatagagtcggcctgttggctagcattgttagaggcttgagacttgctcagaacatgaacatgccattcaatactctgtttggttctgtacattcatatacttccgtctatgcaatctcttcgaatttgaaagaaaaagaagaattttcttactcaaaaagggctagttccaattaatatttggattcttatgtcttacttaagtaacccaatctctctagcatagtgtcacattctcctctctaggtcttggcaacttcactgcccatgattctatgccaccccaaaatgtagggacagtggatttcagcagcccgagccaaacacgggaaatctgtccggttgctctgccaatttagaaatcattcctagcgcaactaggccaactctaagctacaacttattgcacatagtcagcatgctcaatacatgaaaaaccttgatctaattgctactgtttgcagtctaaaaaaactaggagcccttgaacggcaacgag

SEQ ID NO: 73079 - DNA, 466 bp, Prunus persica
  Intron number 1 from transcript ppa000388m (locus ppa00038 8m.g) derived from phytozome v7.0 (chr-ID scaffold_4; pos 4581287 to 4581752)
tttccacacctctcagccgcttttcgtctctggaggtataacatcaaaattcaaaattttttgttttctgttggttcattccgtgttaccgtctgaaaatttcagcacttgatttcttgttttcacggtgtgcttagatttgatatgaaattagtatattgcatgttattctgccatgttagttttgtgcaatattatgtgtcaccttcttgcacatcacccgttgcattcattagaaatgttagtttattaggttcttctttatgccgtgtagaaacagtcagatctagaatattcacccatatatttcttaatcttaaatatggtacctgtgtttttccaagttctatcaagctgagaagaatattacttgtttgtaagttttattttattacatgatggcgctgctgactccgaagagatcctcgaaggaagtaatttattgtgtaagcttaaatggcagggg

SEQ ID NO: 73080 - DNA, 688 bp, Prunus persica
  Intron number 2 from transcript ppa005610m (locus ppa00561 0m.g) derived from phytozome v7.0 (chr-ID scaffold_8; pos 16600006 to 16600693 reverse strand)
gacgaaggtattatcttttataagtgattagaagtttatgagtttatgtctatccactttatcacatgtgtttaagttttggaattgatattaagaagtgatgcacgcaaacactatattaggtgtatgagaaaatgatggtaacaatgtaaaaataaaaggttttagtttggatgtgaatgctgttaaatgttaaggaaactgatagaaggaagcaaaaatggcatttcggccaagtggtgtctcactgaagatgtgagtcggtatttaatattatataggggggcatgaaaaaagaaaaggaaagaaagtaagagaaggaaaggagtatcaacaagttttcttaccattgatgatagaaaactaagaattccagttaatcacagctagtcttgtaaattggcggttttaagctgcatacttattgggagagagataacaagttttgagactttaagtcattgtaaaacagatggaatgctctggtaggtacatcttggagggctcatgggtatatgactaaagtcaaaaggagaaggaaataaatgaatcactatgttatggggtggtttcaatgaaatgatgagctgttttggggtgacgtatgagtgtaatggaccctattagatgtcattctgattataagtatgcagggcattgtattgtctcaaggagtgaagctctggaa

SEQ ID NO: 73081 - DNA, 742 bp, Prunus persica
  Intron number 1 from transcript ppa017873m (locus ppa01787 3m.g) derived from phytozome v7.0 (chr-ID scaffold_4; pos 22672842 to 22673583)
ccacccaaaaccaaaaacaagaacaacaaactcaggtggaacatgaaactcatcactctctctcttccttcgactcgggttttctctcttcttcctcaaacctgcgacaaatagaaaaacccccaatttaacagagaaaactctagatgcagaaagtttgagaagtagaaaaccaaaaaaccataattgtaattaagttattgatgaatgggcaaccttcttagcaattaattttttgatgtccacaatgagagttccagcagcgtcagagagtagagaaggaaatgaaggaaatagagttcacagaatggagaagaaaaaaggggcaaaagaccgtcaatttgtaaaataagtgagggtattacgggaaagttaaaagttcattaaaacaaccggttaaattttttttgaagcagcttttaaaagcttggtagagacggcttcgaaaaaacagcgatcattgactgcgattttaaaaaaaagcaggattcctgatgttttccaaacacccaactcatgaaatttttttattaaagctgctttttaagaaaattaaacgctgccaaacaccaccttaaccattttctttgcgtgtgccaaatttataattttgaccagtgtcatgcaggaaaatgtttcatgctttgttaacagggggctttcgatgagtattttatttagatgaaaagtgattcattcctttcctttatggattcatcttgttaggttgatctattgaaga

SEQ ID NO: 73082 - DNA, 751 bp, Prunus persica
  Intron number 1 from transcript ppa005379m (locus ppa00537 9m.g) derived from phytozome v7.0 (chr-ID scaffold_1; pos 35478090 to 35478840)
gaaggtgcctttttttgctttatgcttgtatgtttcagctgaaagttggaaaattagttgttttatgctttaagattgttgttgcagtttctatgcctaattacagagatacagatattgacatcttctcctgattttgcttattgtgaagtgcttgtcggacaaactatgccattcagtgtttggtggactacattttatttagtttgtattttggaatttagaactggctcctgaatttgcttccaatcttataagactattctctccaagaatttccattggttgtatttctgagtgttttgcttcggtaaggttagtactggatggtttatcaggttggtcttcgtgttcttagattatacaaacaaatccacatcaatttgttatgtaggagaattaggaacagagatctgtctacatgaatcccttattttagaagtgcttgaatattgaggtcggtgcttgtgcttcattgatttgtaccaagtagaactcccaaactacttggtataagttagtacagaaaacatgggactgcttagaagtcagattgctgtcttaggatagttggatcaatctaccttgggtatccaaactttgtgtaaagggcagctctagtgttaactgattggttttgctcctttcactcttgcttactgtaatgtgtcattacaagatggtggattcacaagagatttcaattgtggcttaattgaccccctcttcttcttccaactgcagggaattt

SEQ ID NO: 73083 - DNA, 628 bp, Prunus persica
  Intron number 1 from transcript ppa010776m (locus ppa01077 6m.g) derived from phytozome v7.0 (chr-ID scaffold_8; pos 13552704 to 13553331)
ctcctccttctgttcttgggcccaaggtgagcttctaatttatatatatttttatttttaaaaattatgataatatatatgggaatcttcttagaacataattgaaatgggcattcttgaatcttattgtgtgaagattaaattttcttgattttgaatgttaggaaacgtgtttctggaattgttttcaatcttatgttcatttgtggtagaaatttatatgtgctttcaactttttattgtgtgctgatatgtttggttgatgggcaaaacaaatgcataaaatgggtctagaattgtcagcacaatcatattgtgatttaaatgatcacgttttattttttctgtggaaataaatttagaacctcacatcatctaatttatctgaattcggaaccgctgactttggcaatgttatgttttagtgagtaactttccccatgaatattaaactagttggcatgtagcttttgttcaattgggttgagtagcttcctcagttaacaactttcattttgttgttgaagggtttggcacagtgtagtaaactgcatgcctttggtcagagtgttaagctttctgggttgcgtcagaattctcagcactatatctcgtgtgcgataaatat

SEQ ID NO: 73084 - DNA, 488 bp, Prunus persica
  Intron number 1 from transcript ppa004505m (locus ppa00450 5m.g) derived from phytozome v7.0 (chr-ID scaffold_6; pos 25682554 to 25683041 reverse strand)
gctccaccactttcccaaagctaagctgaccaaaggtttgactaattactaaatcttcatgatcatcatgaacatcatcactacatcaaccaaaagattgatttcatcacatggcttcatgatttttatgcatagtagcttttatttttgtgtaataatttgttgagttttttttttggagatggggttctttgttagtggtcttgcctacttgatcagcaaactagctttgttctgcttcaattcttctctgcttttaaacttacccaacaacagcaatttacttcttgttatagttgaactcccttaaatttggaaattttaagaacttatatcatcaactcccaaaaagactgatagctagggcccttgagccaatgttcttgatacatcctaattcggttgctagatatggtgattgattcatcctttgattcttgtatgacttctgcaacattcagtttaattttgtcactctttttgacagg

SEQ ID NO: 73085 - DNA, 531 bp, Prunus persica
  Intron number 2 from transcript ppa013268m (locus ppa01326 8m.g) derived from phytozome v7.0 (chr-ID scaffold_7; pos 21232925 to 21233455)
caaaagctgcaaactttcagtcttgggaggtcaaggtgagacatattaggtgaaccatttatcgaaattttgaaaagggttgccttgcattcatttccttcgctcaagcacgttacttggaccgttttattaagttgttttcctagtgcatttcagggggcgacagatagatgggtaacgtagctttatgaagaaatatattagaactgaaatgagttaaatgaattgtaaactttgtttgtgaaataagagtgagaaacgcgttcataatgaagtttgattgccaaaagatgcccattttgaagtctaatggctttgatgactgcaacgctataaatggtcctgtttgatcatttcagaaaaatctgttggcttttgaagtttgatacatgtaagcatatgagtagaaaagcttgtatatgaaatcgcagacaagtaatattaggaaaagcttacttggaaacatttatagtatattgaaggttattctttttcttggacttcactttggttttgtcttgcaggcgacag

SEQ ID NO: 73086 - DNA, 826 bp, Prunus persica
  Intron number 3 from transcript ppa010235m (locus ppa01023 5m.g) derived from phytozome v7.0 (chr-ID scaffold_5; pos 18072157 to 18072982 reverse strand)
gagattttccttcatctattgcgagattattcaaggcatgtgttctgtatatatttatctagtatttagaccttggtttttattagtttttgaagtagaagtaacttttcttatatatatatatatatataaccatccataaggaaggagagttcaaagagaactctcccttaggtatgagaagtgaactatgggatgtgcttgccaaatgttgtgtgatgattgtgtattttccatattgataaagatttcaaaagatctctgtaaatggttgttgtttgggaaggaagggtagacagcgaaagaatcttttccgtaattagagttggatataattatttgatccaggtaagtggtataaatcgaagagttcctccatcttaaaccatattacaataaaaaagggaaaccaagactgaatacttgcatctaaatcaaagagttcccttgagattgtctgctaatcagaagtatagaccaatcttttcaccaaaaaagaatattagtgttcaagctggtacaagggcagggggagagttgaaggggaaagcaagtcagtactttgagcaaaacattgattcccagtgatgctttaagatgtggcgttttggtagaaaagagttcatgtcttggacgagttggtacatacattgatgagttgatatttagtaaatgctatttgatttcaacaacttactgtttgagtggatcattgtatcttaggaaaagtttactttcttttattttaaatgtgctgtaatgacttataatgagtcacttccttcatgtagcgaagaatcaggaagtttccagggcttgttggaat

SEQ ID NO: 73087 - DNA, 947 bp, Prunus persica
  Intron number 3 from transcript ppa012119m (locus ppa01211 9m.g) derived from phytozome v7.0 (chr-ID scaffold_3; pos 8682859 to 8683805 reverse strand)
gcaactcagcggacaaacacccgttttctccaaaggtaacattgttttcccctgtcacctggttgtctttttattggtaataaactttgtgatactactggatactagttcgctttaaatgggtttgtttccctcaagtgcaaatgacacagatttatacctaataggatgtaggtacagaaaatgatgctatagttcggggttttgggtttctcattgttttgattgatggtgaagaaggaacacaaataaaaaatcttccaaaaatcggtggtctaacatgtaattttaaattttaaatcttgggtttatgtttcaatctgttgactgcattgtcttggtaaggatttggaatgataaattattttggaatacatttagtcttctaattttattataaatagtaggatatgagttttcttggaatacatggagagtcttctaattttactataaatagtaggatggagtctcttctgattttgatataaacagttggacactgttcgtgtatgctcgtctgcttgcgattgttggatcagtatacctaaattgtattttcttttttaagatggtttacaattgaaaatgtttgactagtgaagggctggtttgtgcaacaatacattgcttgcgtagatgcagaaagttgaatcaagtgtggttggtttctgacttctgtgcttttaggccttctactttgatatgttaaagtccttgggtattcactttggtggtgaactggtgggcgtgacgttgttttaattcagactattgtgtcaaaagttgttgagtatagctgaagcgattgctgcagttattaacgccatgatatggttatatttgttgtattctttctttcatctgttttatattgtattctaatgcaattttcgcctttgcaatttatagcacggtacactgttcgatccttcggtatcaggcgt

SEQ ID NO: 73088 - DNA, 933 bp, Prunus persica
  Intron number 3 from transcript ppa012308m (locus ppa01230 8m.g) derived from phytozome v7.0 (chr-ID scaffold_7; pos 21661512 to 21662444)
cctgtttcctcttcctcaatccccgcaggaggcaggtgaagctctttcttatctgtataataactgaactagtttttcctgttagatttttactcaaaagctggtgaagagaattactcaaaaatgaaagttaccctggtttgtgataaagttactcttgatgttccctttgacagttccgcttcatggatattgttgaacatcaaagtcaacttgattttagaatattccagccgttaacatttcaacaagcgctatcattgcttgctttcagtcattgagagatgacaggtgtttgaggttctgagcatttgacctcgacacatacctttatatctcttggcatgcttcccaggtcatggagtatgcctttatttcttccacagatgttcttgactgactaacttggtgctagactatcaatcctgcataaatcatggaatagaccctccacggggaatgctttggttagaaatttcacatcttttcactctgatgtggagaacttttaattactaacatgtgttcgcttttgagagagcatcttattaaaattgttgagattatggttaggtctttagtttttctcttcgtcatgacatccctcaattccatgttgaacatctattggttcttccatacatggattttattttctttttttatatttttaaactcagtgctgtacttgcagtatttatttctattcagtttctctgcacagaaatcgctttgcatacatgaatttgattgctacgttgacataattcttgctgagttagcatctttacaggattgttgagttaaaatttgggttttgttcttccacatgatatactgacagcttcagacctttaatgatatcatcttctcatatgtttgaaaatattgaatgcagaattgctgaggaattatttgaagcagataagggag

SEQ ID NO: 73089 - DNA, 1036 bp, Prunus persica
  Intron number 2 from transcript ppa016456m (locus ppa01645 6m.g) derived from phytozome v7.0 (chr-ID scaffold_4; pos 6647019 to 6648054)
aatctcagaagaaataacaagcctcattgcgttgagtatcctgaacttgtcaaataagtggaaacattccttcaaagaactttcaatggctggaaactaaggatctctcaccaatcgcctttttcgaaaaattcctcgaagtgttttttctttaacctctttgtcccacttgaacttgtctggtagaattccttttgtccatttattacggcaaccggttactgtgtggagaaagtctttcaactaagtgccgtggagatgaaacttttactgctacaatgcaaaaggcactaacgcagatggaaatgataagctgtgattctatgtcagcatggtgttgggctttatcgtaggcttttggggtgtttgtggcacattacttgtaaaggagtcatggaggtatgcctatttcgattctttgatgacatcaaaaataaggttgcattggcaattcaactgaagttggctcatttgcgaagaaaatattgattggaaaaagaaaaagaaaatttagtgttgcagttcatatgattaatcatgatgcagcatttgatgtatttggttttttcccaacgttggtaacgtataactaatatattcgatattttcatcaaaaaaatgacatgtttctagtctctgtattccaaagagcagtttgtaaaagtatattgtaatgctacacctgcaaaactccactacctttgtgcatagaggacttggaaaacttgtaaaatgggatggggacttggaatctggagcaatgatttccagattgattttacaccctcctaccatcctgtaaattcttgaagataaagtaatggcaatggtacaggaagataatatatactaagaaaatacactaacgatccaagtacctgattggacttgcgaacttgcaaaatgggttgaggagatggatgaagactgggacttttactgctacagatgcaaaatatagtaacgatggaggtgaaaatgttagcatggtatatttggctttgtcataggcttttggggtgttcgcggctcatta

SEQ ID NO: 73090 - DNA, 760 bp, Prunus persica
  Intron number 1 from transcript ppa021793m (locus ppa02179 3m.g) derived from phytozome v7.0 (chr-ID scaffold_4; pos 18781754 to 18782513 reverse strand)
actgttttgggcactggtgaagccaaaggtgagttgacagtagacatattcgtttaagacatgtttatgtgtttgcaaactcataattttgttttttttttaatatttaagacagtagatatattcatttcgattctcgatcgtatagttaaaattaaataaataaatgtgttgacaaataaataaataaatgcaccaacaaacccttaacaatggaatcgaaacttggtagctaaaagtcggctaaatttattaggaaatctcaacttgttattagaaaaattgttctaaaaaattgttctcaacttgttttttttttttgttttggttttgttgttgacgaaaatgtaatttatattcatataactaaaatattaaaaaaaacatgtttattagtttttattttattcaaagtgagatggaacgtaactgaatatagcaaaaggcagaaaatggtgaaacttcaaaatactggaaaatttccttggttaattcgaacattagaattgaaattattaattaaatcaggataatatagtaaattcattttttttcatattaaaaaaaattaaaaataaaattagataataggtcatacttttatggaacataattacccatattattttttcttaattctaaaaataaaataaaataaaaaataaagaagaaaaccaattgccacatgcgtgagcatgtgccaagtggctagtttactaattatgtttgaagtaattctggtgtctagccgtgttgaact

SEQ ID NO: 73091 - DNA, 493 bp, Prunus persica
  Intron number 2 from transcript ppa023482m (locus ppa02348 2m.g) derived from phytozome v7.0 (chr-ID scaffold_8; pos 18428831 to 18429323)
aagtagagcaaaagaaagctgcccgcaaagaaagggtatggcttcagttaatttatcaagcatttggttttctttctgtgattgatttttttaaaaaaaaaattgggtaataatttatgaattggacgttggggagtttctgagtagtttttataaggattacaaatatgtgcatttaagcttgataatattactagcatattgatgcattggttactgagaataagtgagtctgcattttgagcttgtgtgctcataagttgcaaactcttcatgataatttagaaaaaagtacgttttttaatgcgaatgaagggcgatgttcaattcctaatgtatgttttgttggtactatatgtttgttttatttgcaccttcatcttttaggtgcaaccacttcctgcttttatacacacttttaagttatttctatcggtaaagaaactctttattttaattcaggcccagaagaggaagctggggatcttagagg

SEQ ID NO: 73092 - DNA, 913 bp, Prunus persica
  Intron number 1 from transcript ppa025942m (locus ppa02594 2m.g) derived from phytozome v7.0 (chr-ID scaffold_3; pos 12832167 to 12833079)
ggcaagcaggtaactcatttggctgtctttaatcatgaaaatggtttacttttcagataatttgtcttttgctattgcatttcttgatccatttgcatttctgggtttcttgggtttgttgttattttctacaaatttaggtgattgatggcaatacatggatctggtaggatcacttggtgtttcattgtacatattcatattttctgtttataattgtactagtgtttgcttgggtttaagtcatgtcttctggaagcctcttaagtaaccctttttatttggccttactagttgttgcttttttcatagtattaaaaactccaaccacacaagagggtatctgaaaaaagaaaaagaaaagagaaaggaatctatttctttttgttttctttcattgtaaagattaaagaacagtaaatgaaggaatttatatggtttccttattttctgtctgttgctgtaaacatttgttttgatttccagaatattgatatcactaagggatctggtttgtaattttatttgaagtcatcaagacattattatttttaatctggtggtaatgtttcccgtcttcaccaaaacaaaatctggtagtaatgtgcttctgtggaggacatttgctttgtcagttaacagtgctatccccccgtgacgtgcaagtgcctctcttgtccccacgggaatgaaaaagacatgggttcaggcacattagttattgaccaggaaatcaatgaacacccaactttgctatgtggtggttgtccaccaaacaactttctgaattacgtcttgttgaggttaagagctttgagaaattgatgtgattccaaatatctatcatttcaactgatagcttgttgaatttatgttcaaaagcagaaggtgaaaaccagggtggtgaagaaga

SEQ ID NO: 73093 - DNA, 1024 bp, Prunus persica
  Intron number 2 from transcript ppa007770m (locus ppa00777 0m.g) derived from phytozome v7.0 (chr-ID scaffold_7; pos 14603238 to 14604261)
tcttttctcaaaaaaccgattgcagcattttcgttgtgagtaccaaaccaactcagaattttgcttctcccatatatgtattgtgcaagtgttttctattttgagttatgggggataattcggttttgatagtgttgtggcatttgtttaattttacgttcttaattgttactattaatgaatgttttttggaagctgaagcacgctttctatttctttctttgagcagtgactgtgtttgtgtgtgtgtgttgtgtagtgtattgattttgcggttctctcgaatttggcttgtgatgatgcttatttttattgtacaatccattctcaaattgattgcttttacttgtagcatggaatttgtggagttcgctcagtttatgtttctaatatggacctgcctcttttattcttgtgacagttctgatggatttggtacgtgaaccaactagttttaggcatgtttggaaattgcagactctgaattcgtaaaagaatacagaataaaagcaaagcacccgtgaaactatttgtattgaaaagagaataatttttttagggaaactttcatgacaagaaagtagagtaacacagatatttaccagaaaatgtaactgcaaagaaaataatcttactttatgggattaaaagaaattttgaattgtcttttatttttgctttagctgcctgcttgtgtctgatacttgtggattttctggctttctgtataaaagattgccatttacacagaagagcatatgaatgaacttgcatattaactctattatatctttcgcacaataatttgatgagctttgattgcttatgtagggaacgttgttcttgtttgattatttgtcagagttaaaatttggaagcatttttaccttcatccaagattttggaatgccaatgatgctcgtttctctgcttgtgtttttttctttaacatatttttaaatttttttttcattgttcttattatacagtttggttctcactcaaagaaacggcctgacaatct

SEQ ID NO: 73094 - DNA, 476 bp, Prunus persica
  Intron number 2 from transcript ppa009585m (locus ppa00958 5m.g) derived from phytozome v7.0 (chr-ID scaffold_7; pos 21844686 to 21845161 reverse strand)
atatttgggaggtaaggggactctttcttccggtgtaggttgactgtcatctgtaataaaggtgttgacttacaacagtaatgtcttaaataatcattactgcaaggccatcagattaaagaataagagaaaatctaatcagctaattcgtgtggtgtcatgctgaagaatgaattgtgtctgttgcatgagcaaaacaagaaataaaaatagtaaagaaaactgatgttgtgtgacccaatcttggtcgcaactcgggattagtgagattgaagactgaactgatcataatggctcagaatgaccgcaccctatatctccccatttgatttaattatcttacatctatgcacttttggctattctcatgccccgttcttgggactgcttactttgtttttatcagaccttttgtgtgacaactagtctgcttcagcttataattacccttttggacaggtctttgcttgtggcaa

SEQ ID NO: 73095 - DNA, 916 bp, Prunus persica
  Intron number 1 from transcript ppa007007m (locus ppa00700 7m.g) derived from phytozome v7.0 (chr-ID scaffold_3; pos 18344332 to 18345247)
gttctcttagtaacactgtaagcttctctctccactctaccgtccatacaaatggttctgtttctttgcttaatgctagctcaatattttgttcaaatcaaaaccctcctagtaaaaattactacctgtactaatttactagcttttaatactataatttagttctagctgttgaaaatcctggcgggttattatccagtgaatcaagttcttatgctgctacagtattgctttctttttatcttgggaagcatgatttgggttccaaatctcatccaagtctcatttctgttctccactatcacccttttttttagtggttgtctctgtttaacagctttaaagctaagtttcctttcagtgctgcaacaacttctgagctagataggttctcatgtaattctatctacaagtacaaatattcttggagtatcttcagctaaatatatttttatctgcacttttttgagcttttttgtccccttttctttgcttttcttcataaagaaaagaagccaacaacgtcagtgtttcattccctttgttttccttcccctttttacaagtcaaaagtgttacaccataaggtcatattttgttgagaaatttgacttctgaagtttactcttcttgagtaaatacaagggaatttgagatcagatgattttaattcttcatttctattgtttatgtggcttaaggatttatggtcatttggctgtgatcaactcaagtagctcaaaatccaaatataatgaacaatctcgcatacataaatctttgttcgaaaaattcctgtatcaatctaaatgatgaaaatgataacttatggtcctggttcatgagatagatttcatttccacatatgttgaggtccattttctttgatcatgtcacacaggtctctgtttcgtcc

SEQ ID NO: 73096 - DNA, 394 bp, Prunus persica
  Intron number 2 from transcript ppa003416m (locus ppa00341 6m.g) derived from phytozome v7.0 (chr-ID scaffold_5; pos 12072669 to 12073062)
atatttgccgagtaggagtatctcctgctgaggaggtaaaaacatttctttttttctttgtttttttgcctctttctttcagcatttggttttttcccgagcaattacatttgtattttataaggaaactatgataaactcataattgccagctttaactgcccctcacttgtttctgttggctgatgtcggttttaaactattaattgattggttttcaattttggacacttgaaaccagtagtcaggaaataagacactcaaatcattttatgtactttaattgtcttcttttcctttattcaatttgtcttggacacatgtgaaaaacatctgactggctttaatgtggttttcaggtcccatttgggaaggttgttaggtgtccaagctg

SEQ ID NO: 73097 - DNA, 373 bp, Prunus persica
  Intron number 1 from transcript ppa021339m (locus ppa02133 9m.g) derived from phytozome v7.0 (chr-ID scaffold_3; pos 16056023 to 16056395)
aggtatgtagggatgatgcctactcccccttttgtttttaaatgggtgcttcaaacaaagtcaagaatggttattcatgattttgaattatacgaaatgaatctggttgtactttgatactttttaaacaatcaataaatatgtcatgatattgagtcgtcctttagttgtaatgtaaatgaaaatgttgctttcacattagtggtactaagtgttttgtgcatttaataagagatagaagattctttttcttttgaacacaactagttgtcacatatgggttcacatttgaggcctatgtttaatcaagcctgtgtaataaaatatgcttattttgaatctgtacttgtaataaccatatgcgtaaatgcag

SEQ ID NO: 73098 - DNA, 849 bp, Prunus persica
  Intron number 1 from transcript ppa018107m (locus ppa01810 7m.g) derived from phytozome v7.0 (chr-ID scaffold_3; pos 6311218 to 6312066)
gaagctcaatctccaggtatttcaacaatctagagtttttctttgttttctgttttatgttaatttcacattattttaattttaatttctgtttactagatgggttagtgggtttgtatgattttaaaattctgaactagatcactgaaattccaaactagaataagcaaattgtcagtttagatttgtttatccttctaagtatttaattctacctctcctgccctgttgtcttctttgaatgccttgcttggttgctgagaaaatgcaggggaaaataatgagctgaaaaattcaatctccaatcattgtttacttgaaagttaaagccataagaaagcttttgggtctaccaatgatccacttttacttttggagaatgcttctcctactttttggttaaaaagatacttaatttgcgccctcttttggttgcgtagagaatgtgggaaggaaagaaattcaaattgtgaacctttactttataaattttctgaaaccaggaaaagcaaaaggttattcgcaatggtgacttcgttttttgaatttaagagatttggaaaagcataggaaatacagataagaaattcagttctcttctcccctccatttttctatagatgtttaggttcaccagagttagataacatcctatctggattttcagataaaaaataaattgacttccttactctttctttgctaaataaaagtgatatgattatctttaatggacttcacacatggacttgttcatatgctgggttacactaattactgattatgattttggatatttttcctcttaaaacaggattgcctgaggttagagtagttcaccatcaagat

SEQ ID NO: 73099 - DNA, 219 bp, Prunus persica
  Intron number 1 from transcript ppa008926m (locus ppa00892 6m.g) derived from phytozome v7.0 (chr-ID scaffold_3; pos 16983776 to 16983994)
gagcgtcgtcactgagtcagtcaatatcgccgtcggtaagtcatctttcttttccctcgaattttcagtcgatttgtttgttttctattattactgagtcttcttttctataattcaaatgattgggttgtgatcgatatgaattgtagtttctcttatcttaatggaatgatttttgtttcagattgtgaaccagcaaaaaaaaatcttgagaaccca

SEQ ID NO: 73100 - DNA, 1019 bp, Prunus persica
  Intron number 1 from transcript ppb024122m (locus ppb02412 2m.g) derived from phytozome v7.0 (chr-ID scaffold_6; pos 11547500 to 11548518)
gagagttttgtgaatcctgaaagttttgtcctaaggtttagtttctttggatttgttttttattttatgttattatttttcttgatcaatcttattttaatacaattattattattattatttttacaaactgctattaaactactctaatctacaagagggcactttgaactttgttgtaagggggcgggaaaatgccatgatcaactagcataatctacatctcctctcttatattattatttttgagaattcattttgccaaccatttttgaaaaattaatattacacccctatttgcctttacaaaaacaaaataaaatcctctcaagttctacctcacatgcttataatattcttagtatacgtggagtgtttgtttcttaatttttttttttttaatacaagtgataatttactctaaattaatccaatttatggggagggggattcaaactttcaagggaactagctccctgccctcaccaactcaaaaatttgggccttgggctaattttaaattcctcataaaaatgggatgcacacaattataattatagaccctttacgaattatgtgggtagaagttcgaaactctcaggcaaatatttatggaaactctaaaaatgcaaattaaaaataaaataaaattcgaggagtgaagacttatatacggataaagttgtcctttaaaataaaataatatttatatcatgcgaggagtgaacactttatcctttaaaattgtccatgttacttaattggtgccaacttgttttgagagtttccataaatatttacggataaagtcttcacccctcgtatgaggtaggcttatatcatgcgaggagtaaaaactttatcctttaaaattttccgtgttacttaattggtgccaacttgttttctttatgtagccaaaaaaataaaaaaatatttttcttttacattacaatgcctgcattctgtatgtatttctatcagttccggcaagaagcctcctgcaagcggtgaaggaa

SEQ ID NO: 73101 - DNA, 610 bp, Prunus persica
  Intron number 1 from transcript ppa002362m (locus ppa00236 2m.g) derived from phytozome v7.0 (chr-ID scaffold_6; pos 3274855 to 3275464)
tgggactcttccaagcagtacttcattgctcatccgtacgtgccattgttctttcttttctttttcttttttctttttttgttcgaagccatttatctttctttttagttgttagtttgtcctctgtttggctgccaagaaaatggggaactaagaaaataacagaaatttagggatagtacatgagtttcttgttaatggcacgttgacttttcactagtttgctgagaaattgctgggataggacacaattttgattttgagtgtttttcactggcgtttcgagtgaaaagctcaatttctgaagttttatttaaaatgcaggtaaatttaaattacaaaaaaagaagaaaatttgagattgatttgtctgaaattgcttacattcctggtttatacatgtgtttgttgtatcagaacctttagttgtgtggatgttaagctttgttttgtgtagtttgaagcagatgcaaaagcacattcatctgagataaaatgattttgtgtaacgaagttgccccattgtaaatcttttatttagtttttattgtttaacaatatgtatactctggcaggcacaatttctatatttttccgcgtcaagagattt

SEQ ID NO: 73102 - DNA, 996 bp, Prunus persica
  Intron number 1 from transcript ppa008063m (locus ppa00806 3m.g) derived from phytozome v7.0 (chr-ID scaffold_1; pos 11313545 to 11314540)
gccagtttttggactggtacttgttcatttttcctctttatatgtctttaaaacacagaagaaagattctcatatttctttttaattttggtgttttcttgtttatcggtgtgtgttttgaaatgggtatctgtttgtttctccaatttcattgatatttggttttttaatgtgaaaacatgttcacatggaattgtactttgaaaactcggttcttgccctgtttggattttgtttttgtttttttgtttttctgggttggaaatggaggtatgcttccttggacttgagagtataattcaaaggaaatatgaagtgggatttgttaatacttttattttggtttcaaaattcggttgggttttgcagttgttggacttgttactgtggattcatgaaagtagtatcttctttttcctttattgggtccccaacattactttagactatacttgttggcgtttgctgtgtctctctgaaagggagcacatttgatgttttcttgtgctttgggaaacaaattatttacctttgttctctctcctaagaacattatacatttggttatttatggaaacgtgcatgaacaagaaataataaagccttacgtaaatccaagcacattggcggctgcaaatttcgactgcaatatgacctcttaagaccaaggtattctgatgtcggatacagttaaatgggtagcagtgcttgtgatttacttggcttgtgcccatggtaaatagcactagcatgtagtgccttgctcagagaatcctgaatctacaatcttgaacatatgagctcttgcctttctgcttggcatatctagtctttggcaggcgtggttgaattattgcttagaatgtgtacataaggcctatatttcagtcacttgatatcgtatctgctgttgagtagtttcatttttgttttaccacagcatgttctaatgacatgttaattggcttacagctgaggaggttgatctctcccagg

SEQ ID NO: 73103 - DNA, 208 bp, Prunus persica
  Intron number 1 from transcript ppa001672m (locus ppa00167 2m.g) derived from phytozome v7.0 (chr-ID scaffold_6; pos 4363693 to 4363900)
aagcaggtgtctgggccaaacaactcaaaccagtaagttttttattctatttcaagtttgtgtctttttgtacatcattatttttttcatttttctcaaagatatttcttttcacttttaaaagccccttgtcagtatttcattgctacctatatgcttttcattttgtatctttggtatttcatattttgatatctttgaaacagag

SEQ ID NO: 73104 - DNA, 744 bp, Prunus persica
  Intron number 1 from transcript ppa001305m (locus ppa00130 5m.g) derived from phytozome v7.0 (chr-ID scaffold_5; pos 3610834 to 3611577)
cggctcttcctctaatatctgactccaaggcaaaggtgggttttcttactccactctgaaatgattgtttaaagcctcctttttatggttggtattctcctctttcaagttgcatgcgactttttggtacttctgttcacttttccatttgggttttgagtagtactgctgctgcttttattcacttacttagttgactctttctctgccaatattatttttttactttgataaatggaacatgggttgaatatgcattttgattttttacgctactttgatggattttgcccgtgcagataaactcttttgaagattcttgtttttctgggttgctgctttactggactctgaaagtaaattactttaaagtgctagacgtaatttcttcagatttagcttctgggtgactccaaatctgttggtagattcttaatttttctgcgtttgttcagagtagcttttgagtgtccagattttaatatttggctatttgttacatttaaatgttcttgttctgcattatctggatgtctgttgagaaggaaagctaaagtagctttctgctaaattttctttgtttgtaaagcatctctctgtgttgtaagggcttgtttgcagcttttgtaggtttttgttaacgatttcattttcaatgagatttcaacaatttcttgctttctgtgttctgattatatttgttcaacaggaattctttgtagaagttgactgagacaaatcaac

SEQ ID NO: 73105 - DNA, 616 bp, Prunus persica
  Intron number 3 from transcript ppa015197m (locus ppa01519 7m.g) derived from phytozome v7.0 (chr-ID scaffold_1; pos 10766743 to 10767358 reverse strand)
atcctttgcatttggtaaggttcagatcacattgttttgtcatgctatatggtatggaggtctatgaagtaaagatttggtcgtaaacaatatacaatatgtatttggaagtatatatttggccatgtatgttgggtgtttccgctttggcccagaaaaatttgtatactggtcatgtggatataacactgttcaagctggctttttctttctttctctcgtcctaaattaaatatcaatagcttcatatttactacctgtgtgcttcttatacaattaactctcataactacctcttaacggaaattaaaggataccttaaccacttgaagaatataagttaccctaaaccctgtgtgaattcctttaacaatgtggtccttcagcctactaccactactactaccactgcctaatatgatattaatggagtgctaatccaaaatgaagaatatgttttctttattttatagctgatctatttttgagttaaaataaaaatggtaccaaagattacccaactcatttatgtaattgtttagttctgatgtgtttgtgtgattatatatctacataacctctgtctaatctgattattaactatcactgtgaaggt

SEQ ID NO: 73106 - DNA, 907 bp, Prunus persica
  Intron number 1 from transcript ppa008898m (locus ppa00889 8m.g) derived from phytozome v7.0 (chr-ID scaffold_2; pos 13018343 to 13019249)
ttaattcaagcgattcaagctcctatattcgtgaggtaatcttcttttcatctctcaattttttgatgttaaaattaggggattattttttgggttgatgaagtatcaattagggatttgcaattgatacttatgaattatcaaataggatttgcaattgattttggtgttcttgcttatatgaatgatcaaattgggattttgatgaattgattagttgctgaaatgctgttttgctggttcaagatgtgataaaggcctagtttctgatttaaaattaatgacattttctggattttgaagtcaggttagtttttgtaatggttcgaatttttttggttcatgtctcataatcgtagctggtaattgggctcttttgtgtgggttttaattcttacttttgttaaacgttgaagaataggggaagagagctgagtataaacaatttttctttcgtttttgaaagaagcatgccagggaaagagggtgcaaagaaaactaattttcacggagaaaaatgtggtggtgggtggaaatgttaaacattgctataataaatgtcttgcgaagtccttttggatggattagtacgcttgcttttcatcaaagaaaaggttcttgtctccttatggcttcaggagttaatttaattgtaataaactagttaattttcactttactctgatttttggagtatttatcttgattatggtctattatataaaagtctttgtacaatttatgcccaaggcgccccgttgcaatttccaagatatggccatttgtaattattgtgtatctgcaacaaaaagttaacctaattcaggaaggtagttatagtccttgcatattccatgtttcttattttgttttgttatttgatagattgctgctgaaggcatatctt

SEQ ID NO: 73107 - DNA, 608 bp, Prunus persica
  Intron number 2 from transcript ppa008898m (locus ppa00889 8m.g) derived from phytozome v7.0 (chr-ID scaffold_2; pos 13020172 to 13020779)
aaggaaattcagaagaacctaagaagtacgttcttctgtctagcggtcccattgagatttcttttttcctttttcattgtgaacagttgatctttggaagaaaggtagtggaaatgcttccttatgaaataatgaacttgaacttgtgttggattcagatatcaaaaactaaatattgtattgtgcaaaacaaaagtactaatgacatcattttatttgcttccatgcattatatttttttaaaactcagatgcatgcttttgaatagatattcattttgtaatttagagaaaaacatggacgttggtcctctggatctaccaggctctcttgcaaatggcaaactgggcctgtctgttttttatatgttgagtagttgatgacaggacgtgaagaaactttcctttattttattgtattcaatttttcatgtccattatggttaatcttacacatccttctgccgatcaaaaaattattagcactcttgattgcttttatttttatgtacgtttttttttttttttttttttcacatgagtgtacgtatctgattcattgattgacctataacattatatgaatacgttatatctgcagataatcaa

SEQ ID NO: 73108 - DNA, 436 bp, Prunus persica
  Intron number 5 from transcript ppa002458m (locus ppa00245 8m.g) derived from phytozome v7.0 (chr-ID scaffold_3; pos 1133976 to 1134411 reverse strand)
tttgggaaacttactaaactcaaagtgctgtaagttattctaactttgcattaaaggttgtactcttcgttttttttttggttggtgtttttcactattgtacattttcttttcaagaagctagggtatttgagtctagctagcaccaaggtttcatgtgtgttttttatgtcgcttactgtaatacaaacttaaactcctcttgaacttttgtaaatggcttctactgtccattacccctcattgggctcttaagctttggaaatactattcgtaccctgattgccatgaaagaatgtgaccagtggtaatgccatttttgaattagatagctattcttgtatttagatatgacatagatatgtgctgtacttgaaggattattgattaactcatatatcatgaaatggcttgcagggatttatcgtacaactca

SEQ ID NO: 73109 - DNA, 349 bp, Prunus persica
  Intron number 1 from transcript ppa008249m (locus ppa00824 9m.g) derived from phytozome v7.0 (chr-ID scaffold_5; pos 14605558 to 14605906)
caggtaatttgagagtaccttgactggaatcttacatagtatctgtttaacgtatgatatagaagtttctttggaggtctggctttctgttttactgcacctatctcttgaatcttgagtacttaatggtgttttcaggattgtgtttgtttttgtcaaatcatcaccagtaaaatcttttaaattactaattattgttgtgagattactgaaatactctctagttgtttaataactattttcatatttaaatcatggctttttgttgaagtttcttcttcttggtttgtttttcctttaaaataaatttgaaatatattgtttttccttcttgcatttcagggttctt

SEQ ID NO: 73110 - DNA, 784 bp, Prunus persica
  Intron number 1 from transcript ppa018002m (locus ppa01800 2m.g) derived from phytozome v7.0 (chr-ID scaffold_1; pos 26505501 to 26506284 reverse strand)
aatttgggttcccacttcttcctcctcttttcgtaattttatatctgctttgcatttttttaatttgttggttctcgggcctttgagctagctagttattgtccatctgtttgatgcttttattcttgttgggattgttgcctttcttttcatttttcattttttccttttccattccctttctcagctattcaaactaatgggttttctcgtttgactttggttatatttcgttgctcttagattgatcactgtaaagcttgaaactttcgctcatcccattttgaattatgttacttaatgtgtaaaattcgaattttggcagaacttttttactacttgaaaaaaattctggatctttgacattctttcgactatttgttacctgtttcggttgatcaacagggtaaatctgcttgaccaacatgttaagatggaaagtttgaagctttctgcatgctaagattggaagtttgtagctctttgcatgctaagtagaaagtttgaagctttttgcataaactctcacaatattctattgcgtttctgtaagatttttttggtttgtaattgtttttttgttctggaatgaattcatcctgtagttgctaatttcagttcctctctgtaaacaaaatggggagactttcatcaatagaagaaagatatatagagaaaaccccaccgaatacgcttatctgaaatttacactattgagttcttgaaaaaggtgtggccgtctaaaatttgggtgatccttgtttttgttccaggttcaaattca

SEQ ID NO: 73111 - DNA, 972 bp, Prunus persica
  Intron number 1 from transcript ppa018966m (locus ppa01896 6m.g) derived from phytozome v7.0 (chr-ID scaffold_3; pos 4176618 to 4177589 reverse strand)
agggttaattccacatcatactttaagtaaaagtaaatttgcgataaagtaaacgtgcttgtatgggcactaattctgccccatacatttaaataaaagtaaaggcgtggacgataaacccgcaccacccttttaaatagatactgttatatgggtaataaacctacaccatacagtaaataaaataaatatgaaaataaaaaccatgatgaaataatataatcttattatactaatatactagctatatagcatattatataaaatatgcaaaaagtgatggatatcaagcttgctactgcctttccacctgcagaacaagttaaatagtgtaggataatactaaagtaattgaaagataaggaagcagatgacttattattattttttttcagtgggttctctattctttcggtgggttctatcaataccaaaatgcagaacacttctcttccttcttctgtggctgctctgcttccacctggtttgagttgcttctcttcacctttgcttgcttctttgcccataaacccttcatcacctcttgagtggtgttgagcttgtaaacttggccaagaacaagagcattagttgactggttttatatgcattgatccaacgtcgccatctccatcctcaaactctaccagaagtgatagccaaaatttgttgaaccttcatttacatggaaggccacctgcctcccaggatatttacatggcgtagaggggttttattattttatcactatttttgttaggattggaggggcacaaggtggtggagatgagcagatcaacatagtggctaggattggtcttcgtgatctcacttgtactcacagaccaaattttttttctttctttcccacttggatgttgataaccaaaattgctgcatcaattgcttgacaattttctattatcttcctctgtctctctaacacggagacatacaaggaaagctgaagaa

SEQ ID NO: 73112 - DNA, 580 bp, Prunus persica
  Intron number 1 from transcript ppa020371m (locus ppa02037 1m.g) derived from phytozome v7.0 (chr-ID scaffold_6; pos 27425376 to 27425955)
gacgccgtataataacagaatcaatcgctggacaggtcccatatatccctttcccttgtgtgtgtgtgtgtgtatctatatatatatatatatgtattcacataattttaacagtagttgtgttttgttttcaagggtttcttcttttattcggttccttgttgattggtttagggttcggattcaaatacaaggaatgtagatcacgaaaagcaaaggaaaatctataaattggttgaggtataaagtttgacctcaaaaccaattaaccactactgcgtaatattaatctatacaaattgaaagcaagcacctactaaacataacaccgggaagcatcattttctttgaatattgaactcaaaataataaaattctaaagaaagtatttgttaactccttgcttttattattattatttttctttcattgattaattggttggggtgaatgttttggttttttcattggttgcaacttgcgcatggaaacgtaaatatataatacatgtatatacgtttatgtttgttgtttgtgaagggtaggctgtggggcaatatagccagagagctcctttggc

SEQ ID NO: 73113 - DNA, 985 bp, Prunus persica
  Intron number 1 from transcript ppa023499m (locus ppa02349 9m.g) derived from phytozome v7.0 (chr-ID scaffold_7; pos 5932120 to 5933104)
gggtttgctaagaaacaaaatcaaagtttggtccgggaagagattaatcatgatgagcagcctatcaagtccctgctttgatgtctcgtccatcacttgtgcattatccaatgttgccaagtgcatgggtttcaagctcagaatcggagaagagctaatgacaacttgacaacctcggtgtatatctaatcctttgtaatcgaatttctagtaatgtttagtttgattttgatgtaccttttggctagggataatatagccctatattctgttctgattacatttggacctttgcgtttctgtttttattgaaatcattttgtgaggttttcaatatgtgtgtttctttcaattgtctgtttctgggtttggattcttttgtgggttagctttgatattttaagcaagaaattgatgtgggctagttcagcaacaaactatatgggtttggattggatcatatctaactttgtcttctgcttattttatagttaattaatgatcatttctggagtgtccatttccttcaaaaatggagtactagaaagctggagggctttagcattaataggtgattaactgttaggaggttttcatgtgatgttaggagattaactaataggtcatatgtaagcaatgcagtgaaagagctataaaatctgacctaacgccatggccaggagcacaagttatttgctcgattcacaagtcctttgttccaaaaagcaacacactcatgcatacaatgatgaaacaatagcagcaggtagattttttctcaacgatctaaaaatcgacattatactattgaacagaagcttcgtgaatccatatctctttgattcgtactgctcgtaaatgaaaaacaacgtgaaagcgaacaccagtgctgcaaaatatttccagaaagattgtttttaaagagactgaagaatgctaaagaactaaatttatgtgaaagattcagggaaaaagccaaacatac

SEQ ID NO: 73114 - DNA, 426 bp, Prunus persica
  Intron number 2 from transcript ppa025093m (locus ppa02509 3m.g) derived from phytozome v7.0 (chr-ID scaffold_7; pos 17484611 to 17485036)
gagaagagttttagggcaagtatataacaggaagttattgtgtgtcttagttgcttaattacaacttgaccaccttaattttttgcacccatgtgagcacagtgcaagcttaatttactataatctactcatacaaaaacatcccacatccagccactggaaattttctatatttaggaagaaaccctttggccccttgtttccctttcatgaccaaattaaaaaaaccccatttctcaaatcaagccaaactagttgaatttacagtccactctaggactggtactaaaatgaaaaaacagtttgagtacttttaacaaatgtgaaattcattaacccatcttctctcttcttcttttttcttccttttttttttttgaattaattgcaggactgctcaatatcagctgcaggaggtactagtag

SEQ ID NO: 73115 - DNA, 488 bp, Prunus persica
  Intron number 1 from transcript ppa008484m (locus ppa00848 4m.g) derived from phytozome v7.0 (chr-ID scaffold_2; pos 11438467 to 11438954)
taacattgatagctccgctgattacagagttacaggtttttttttttgttgtaattaatgctaattaggatcaatttcatcaatttattgacattgtttcagtgaattattgagtttgttctgtcaagtatttttattttattttatttatatataaataattaagaagaaagctctcatctttttcattttgggtgtttggattcaccactaagattaatctattgagaaatgctatgtcatatgtgcactttttggttgtgaatttttaattggttttattgaaagccactattcttaacttttctttttggaactttttggtgcttttgctaatgctttgtttggtgactgtgtgtgtttgtttgtgggtgcatgcatacatgagttactttcgttgtcgttgtttgttttgacttcaattttccgtcaaaacatcctgaattgtacgttgattctgtttgagataataacaggggtgccagccg

SEQ ID NO: 73116 - DNA, 454 bp, Prunus persica
  Intron number 1 from transcript ppa006258m (locus ppa00625 8m.g) derived from phytozome v7.0 (chr-ID scaffold_4; pos 14151722 to 14152175 reverse strand)
attggcagcggtttacatgtgggttttccttttactttttctgggtctctgctcaaagtttgaacttttctctctctgtaacaggaaaatagggtattttgtttgaagcccatttcttaatgtgcataaattttgctgtttatatatctcagtttgtacattgtttgtattttaaacatgtatctcttcttgggtttttgcaatgtgttataattgccttactgtacaaacccacttctgtttcatagttgttaaataactttgatttttctttttcttatttgtttctggtactggattggcttgattgagtaaccaactttagcatggcatggtaatttaggcctaaaaaggaattttctgaaagtagtgttagcaatgccttgaagattacttgcaatgatttgattactgatggtatgttgcttattttgacattagggtgttgatttct

SEQ ID NO: 73117 - DNA, 515 bp, Prunus persica
  Intron number 1 from transcript ppa000686m (locus ppa00068 6m.g) derived from phytozome v7.0 (chr-ID scaffold_6; pos 2121281 to 2121795 reverse strand)
cttcccaaaccaagaaggttggtctatgatttacattgaaattctgcaatgctcatcattcgcattgaagtttatttatttatttatttattgaaaacccagttggagaaacttgataaaatatgcatttattttatgaaaattgcttttgagtaggaaaataatattactttgtgtttgcatcactaattcccaattagaggaacttcaagatcactgctttaagattccagcatcattctttttcttaaaattaaatagtttctactttcatacaatgtttcataggctcatgattccgatttccaagtggagcttctcatgtatgctgcttgtctttttataaactttttgcgttgtttttggttattctatttccaagcatacgtactgagaatgacattgatcttcaatctacttaatgatcagagtcatgtctactccgctcagttacaagaatttgatttaattggataacaaaagatgcttgatcatctttgtaggcagctgcagca

SEQ ID NO: 73118 - DNA, 1017 bp, Prunus persica
  Intron number 1 from transcript ppa009325m (locus ppa00932 5m.g) derived from phytozome v7.0 (chr-ID scaffold_4; pos 7332843 to 7333859)
ctgctgtctcggctcttcagtctctcggaattcaggtatcttctgttttcaagctcttgccttttgtgtttcttcatctgggctatcttttttagctttgggcttgtttggttgctcagaaacttgaggaaaatggaacagacatacttctgttcttgcccattttgggtctctttgttttcttttttatcagtgaactactttggtaattgggtgatgagaaaactgaggaaatttattgaatttcccactatgctttaattccccatctgttttttttttccccgtgtcgtgggcttgtttggttgctgataaaagagggaagtgaaacagattttttttgtccaggaaataaaaattgtggttctgcttggttgatggaaaaagctggtgaatttctgaatttcgtttcggagtttaatttatactttgatgccaaggaattacaagtgttaaattatgcatgtttgcctgtctcttttgctatatgatcctgggattatatactttggagttgcaaaggtgtgtttcatttattttagttacaacgaggtcaattgattaaaactaataattcgaaggcagaaatgcattatggtttgagatatgaaattaaaagttgaaaactatgagcaacacaaggaggtaggttctagagtttacttggcggcttgtgggtcgctgtggtcttattcactggcatcaactggctcaaaatccaactgtgggagtagtggtttaatgttagttcataagttctaaaagtagattgcttagtttacgctggctgcattgacttgttcaacaatgttacaaaaaattccagttagtctgctaagggtccattcaaaagctttctgagtcgcttttcttggctgcttccaggcacttatctatatgacactgacttgcttgtgacatgcagacattgtatctgacttgaaattagttggttatatagctctagattttattttattttatttctttcgtttcaggctgttggttttgaggggg

SEQ ID NO: 73119 - DNA, 984 bp, Prunus persica
  Intron number 4 from transcript ppa013348m (locus ppa01334 8m.g) derived from phytozome v7.0 (chr-ID scaffold_3; pos 1891894 to 1892877 reverse strand)
actcgtgtttcggctgcagaaatcaaaagtgtaagtcttaccagcttgatgttatctatgaatggtgtgttgatatgaactcccacagttccttcatgaagtaaaactttgttttggacttcaatttgtttaagttactgagttgtttcagattgagtttgtaaagctgcatgattttaaaacacttggtttgaaaataaatattgagaagattaggggaataaaattcacaatggaaattagtaggtgaatgatgcagtttagaagcatatgttcgtcacaactttggaagtttgattccagtgtatagaatgcttgagccggtgtatttaattttgcgctatatgttcaaaatgtaagcatacaaatgtctggcgggataataggatcacttgttctatgtgtgtttaagtatccataagagaaatcattaacatttctagaagagagaaatgtctgacattgctagagtaaaggtgattgtaatgattagcccaaatatattttctgaagagtttgtgttagtagatgaaattctaagcacctttaatgtctatgccctttttttcaaatgaccaccataaaaatgtttacttgtatttctgtttacttcatgtattggagtcaacagatcaacagaaaaggtttctaggtaaccaaaactggggtaaaataattctgtgaatttgagtaaacttggtaagccattttgcaaaagtcataccaagaggcagaatgtctagaaacctggccaaaagatgttggtccctgagtggggtttgaattagggctttcctggtggtagggtacatgaataaatggttttccatttttcctttccagtgttcttgttatatttggttctgctttgtttgttatattttgatgtgctttgctttgccacttttattggaatcctgtacaaatgatttgccttgtaattgtgcaggcacagaaagcagaacgagaagcgtctgatcttaa

SEQ ID NO: 73120 - DNA, 510 bp, Prunus persica
  Intron number 1 from transcript ppa013348m (locus ppa01334 8m.g) derived from phytozome v7.0 (chr-ID scaffold_3; pos 1893257 to 1893766 reverse strand)
ctacctctccacttctcttgccagctatcttgacagtatgctttctctaagttctacttttttctgtggttatgaatttaatggttgcatgaagttatgatatcatttctagttctttcctgattgttttcatgcatctttgtcactgtgccattgatttgttcttgtttgtgttctttatggttcaatttgtttattcaatttcatctcaaggtttttgttttcaatgtattctatgttatttataggtttccatttgaatttttcttcctctcgtatttgaattaccttatagatacattaatacttcagaagtgtgtaaaagtatgttatgtggtctgaagttggtgcatggtgcataacaatatttctttaaatctcgctgtcaatgaattgactcgaagattgcatgatggttttagttgtggctttttagttttcttgcagtaaaggcccagtggtctgatgttatttttcatgctgcagaaaaacttcttgtgctgcttagag

SEQ ID NO: 73121 - DNA, 999 bp, Prunus persica
  Intron number 2 from transcript ppa018890m (locus ppa01889 0m.g) derived from phytozome v7.0 (chr-ID scaffold_8; pos 16103291 to 16104289 reverse strand)
agggggaaaagggtgtatacaacttgggggtgagttctgataacttggggtatcgttagcattagtctcataaaattgatgatatttgttgtcaatgattattttctgttgtttcattatctctcttatagattttgtctttatttatgctgtttcatgctttaatactctctcacactcttaattaattttctgtttcctgcttgctgaattgtgaatatgctggatatgcttggtgaatgtttaatgtgttggaaatttgtgaacttagatgagtcattgaaggtttgatatgctggaaattaggattgtttgatgaaatgttgatgttttgaaagttttaaatttatagagtgcttagtgcttgtaagcaggttgggtttgactggactttttaggttttgaaagtcagtagcagggtctgtaaatgtaacaggaggtggaaacaatggatttgggttaggcccaaacctgcaaaatcaaacccaccgacaatggttttgtttggtttggttacccttgaggtgctagtcaaaaccaaaccaaaccaatgtaatcggttgagctgtggttttggggaaaaaccgaactaatccaatccttgcacattctctacatctggaatatctaattggtttgaaagtttgatccttttcatttcccagatattaaacttgtataaattggaacccgtttttcttttctccttccagttacgctggtatctaaatggtttaaaagtaggatccttttttatttctccatataattttaatgcgttgttctttctcttgtatataggtgtgttttggtgggtattattgttattattattgttttgtttattattctttatgtaaattgaatataacaatgtgattgaatcatgaaattagaagtttgagtgcaacttgggaaatcaacgcagatgttgtgaaggaaacaatgagggaaaaaaaggtgtgtacaacttgttggacagaattagtgcattgccag

SEQ ID NO: 73122 - DNA, 699 bp, Prunus persica
  Intron number 1 from transcript ppa018890m (locus ppa01889 0m.g) derived from phytozome v7.0 (chr-ID scaffold_8; pos 16104328 to 16105026 reverse strand)
caactcggtagtgagttctgactgatgacttgtgtatctgttagcatttagtctcataaaattgccgatctttgttgtcaatgattttttttttgttgtttcatgatctctcttatagactatgtctttatttctcctgtttcatgctttaattttctctcatactctaattaatttgctgtttcatgctcactgaattgtcaaaagtgaatacgctggctatgcttgctgaatctttaatgtgttggaaatcagtgaacttagatgacccagaaattgcacattctgtatatcttggatatctaattggtttgaaggttgcatccttttgatttccaagatattaaaccggtataaagttggcacctgttttttttggttacccagatttctaaatggtttaaaagttacatcctttttatttctccgtatctatcttgtagaaaatttccatactttgttctctctcttgtatatgggtgcgtgttggttggttttattgttgttatccttgttttcttttcattattctttatgtaagttaaatttaacaatgtgatgaaaccatgaaattaaagagagatgatcaaccggtaaaattcctgtctttactcttttcatgttttttttaatttaaaatttgtttgtttttctggtctgattcttccattagaagtacaatcgcaacttgggaaagca

SEQ ID NO: 73123 - DNA, 432 bp, Prunus persica
  Intron number 1 from transcript ppa017062m (locus ppa01706 2m.g) derived from phytozome v7.0 (chr-ID scaffold_1; pos 40237347 to 40237778)
gcaggctcataatcgattttcttggtacgtttatttaaggaaaatgtattatatatttatgttttcaaatttcatctttgttcttctgtgtatgtttggcacattctctgtaaacaaccattcctatttacatgccaatcacaattcgtgatattatctttacacatgtttgtcaaatttcatgacttgatgatcgacctaaatcgatcaaatttttttgcctaagtacttaaaatctctatatccatgaccaaactttttacaaatttaaatggaaaaatcatcccaattatttcccacatggttgcaaaggtgcaacttgcttttctttgctctgggtttgttttgtttctttttttctctttaaattgatcgtctgataaaacttgtggtgtagcaaagaatcttggtcaaccctttctaagtgcatat

SEQ ID NO: 73124 - DNA, 510 bp, Prunus persica
  Intron number 1 from transcript ppa011405m (locus ppa01140 5m.g) derived from phytozome v7.0 (chr-ID scaffold_6; pos 3222171 to 3222680)
ctgcggcctccgtcaaattgttcaaacattccaaggtaaatcctatgtcttctacaaattctgtaattttagcttccaataatttcgttttgtttgatctctctcactctgtttggatgccaaacagggcactaatgggaatttatttgttatgattgtagcttttttattatatcgcaagttttaatctttttttccaatttaccggtcaatctgatgaaaaagttggaatttttctttcagcattcaatttatgaatcagattatttcttggaaacttgattcttatttgttctctgtttgttttggtagaaaatggtttctgggttagttttgattttcagttttaaggaacaaccaagtttcgtttctgccctgttgcttgactgaattgtttgcatgaagcaaaaagaaaaaggaaactaaaaatttcaggcctgtgatttgtcatattttgtgtgtaataattttgttagcttgaatgttaacaatcctgcttttaatctgcag

SEQ ID NO: 73125 - DNA, 588 bp, Prunus persica
  Intron number 1 from transcript ppa002234m (locus ppa00223 4m.g) derived from phytozome v7.0 (chr-ID scaffold_5; pos 16042846 to 16043433 reverse strand)
agaaattagagaaggttctttctctttctcactcatgttattaagttctgtatgcgaagttttgagtttttgtgtgatggatattaatttaatttgcttggtttctcattcctgttcaaaaaagttttggcttttacagaaatgttgaagattaacgttaaaattcaatctagtgtaacattcccattagtcatattttaaccttttaaaaaaaagttggcaattttgtcgagaaaattaagctattttcaacagggtgatcttgcacttaacttttcctcttctataaaagataaaaactttaagcatttacttgcttgaaattggtggcatgcatcagagtaagctttttaaaaaaaacctttttcagattgtttggaattttcatgaaacagtatctggttttgttcacattaaaatgggatgcttcaaatccaaacgggtgttttttggactgtcttctctgctgtctaaacttttagtacataactgtactaaatcaatttttctgcccagactgtgtgttcttattcaattacaactctttatacagattggacagggtacgtacagtagtgtgttccgagc

SEQ ID NO: 73126 - DNA, 573 bp, Prunus persica
  Intron number 2 from transcript ppa020339m (locus ppa02033 9m.g) derived from phytozome v7.0 (chr-ID scaffold_8; pos 8418077 to 8418649)
agaagcttcgaacagcattcaccgtgacagtggtaagtattcttattatttgacattttatttgaaaattttaacttttcctttcaatattgtaatttcaacttaatgttgatctcttatttctaaggctacaatagattaattcctcatctcagcagggcagacctgcaattttaaaatttgagctgtcctatcttatcatgaaaaagaaaacaatgataatacgctagttctctttctgaagagacagtgctgagacaatgcagtttgttcacaatgaatatgctagaaaatatgccaatgtatcataggtttgaacttaaatgttaaatgtactaacatatattagaaaatcaatgaccacaacagtcagtacaataacaaacccattaaaaagcttaaactatcttgtttaggatatttacctgaattgtccactgacaatatttccagttgactcaattgcagtgttgtgctttatggaaggtttgtaagttagttgttgatgtttttcatttgcgtacttatctaactctttctcaactttgattttgcgttaataacttttttagg

SEQ ID NO: 73127 - DNA, 587 bp, Prunus persica
  Intron number 1 from transcript ppa012704m (locus ppa01270 4m.g) derived from phytozome v7.0 (chr-ID scaffold_3; pos 12023013 to 12023599)
ttcttccctgtccgcttctatcacaaagctcgcaggtttgaaaacccatttactttcctgaactattttcatacacatcagttttcttcgatttcttcttcaaatgcgatttttgagcatttacagtccgaggtttaaatatcatgttcaaaagagctctgatttttcgcttatttttctttgctagtttggcttctttgatttgtgttggttttgatgccttgtgggttggttttatttctgtgtggatatgagatgatcaatatgaagctctcgctgaatgtgatagaattgtccaaaatgctgaatttacgtttttttttttttaaagtaaccatgaaattaattagtggaacgaatttggtatgcttccttattggatttcactgcttatttagtagacacaattttagcttgctgaaattttaaatatgcccagaagctatttgatgaaagtctccaaataaaatctagaaataagttgctgcacagatgtttttgcggttagagtggtaaatttttacatctcatattcagcagacattgatttcttctgtgcatgtgggtgttctcttccgcagtgaggg

SEQ ID NO: 73128 - DNA, 507 bp, Prunus persica
  Intron number 2 from transcript ppa018151m (locus ppa01815 1m.g) derived from phytozome v7.0 (chr-ID scaffold_3; pos 13561129 to 13561635)
ggttaattgcaaacaaggtatgtggtcaatttttataccataaaatactaatgcgtatatatgttttcatgattcatatcataaattgagttgcaatattatcatttggttgtttgctctccttttttttcttttcctcacactgtgtgcataaaattactgcaatacatttgtgattgtaccttgtctcaacaacttagcagcaatgaggttctgagaataaaggagaacaaatgttagaaaacaaaatagtatgcaggagattttatgggttgttattttggggaggattttcattgggttatggagaaggatggttggtgctccagctgtacagtacgggtttgatttgaatagaaaaaaggggttttagataggttgggagatcagtttttgtccctcgtttagcaaagtgtatcctgggctaatcaatgatgatgtctttaccccactgtggagataatcatttgggaattgggggtcaaagtaccctctgattttgatcag

SEQ ID NO: 73129 - DNA, 895 bp, Prunus persica
  Intron number 3 from transcript ppa008968m (locus ppa00896 8m.g) derived from phytozome v7.0 (chr-ID scaffold_1; pos 46063743 to 46064637 reverse strand)
tgcttcccggaccggcaatacccatattgagtcaggtattttccgttattccagcaaaaaagtaaagaacaagaaagaaaagaacatatataggttatgccctatgtggtatattggagttcaggaatggagggcttccccatcaccatcagcagcattgaggcatgccatatgtcattagaaggataatctattttgtgagaaaatataatgtataatcaatgagagcagtgtttatgacgaaggtgcttgaaggacagaaactttgtgaggtcaagataattttgtagtaaaatattgcctaaaaaagttgaagtaaagagaaaggaaagctgccttaaccatttagtttccagaaatgtttatggaaagaggagaataagtcttaactttcttacagtgtaaaatcatgttagatgtgaccatgccaattggattcgtctagcggctgatttttatttttttagctcaagcgaggttgagtttggtcaaggatcctagatcctattccggtttggactgaactaatttcttatatgaacaattaatgaactaaatattttggggaaagaagttctgttttccttttcctttaaattgaataattagaacttagcagggctgcagaatattgtcccccagccctgaatagttggacaacgggtttccctggttataatctagtgtaatagagatatgaagagaaaaatggaattcaaagagtatataatgaaacgtttaccttagtctagatccaaaagaataatgtgcttattactttgaatatttttttaccattatttttgcaaaatccctctcctcagttttactttttacttttatgtctccatattgtgcagacgtttttggtgtggcagctgagtttttctgtcct

SEQ ID NO: 73130 - DNA, 1021 bp, Prunus persica
  Intron number 1 from transcript ppa005149m (locus ppa00514 9m.g) derived from phytozome v7.0 (chr-ID scaffold_5; pos 12447712 to 12448732)
cctccacgaaccagaggatcgtgctgcttcaacaggtaaatgattctttccttgttttttttttttttttttttcgtattagaattatttatacgaaattcatagctctgtaggcttaattaggaatggcaattattgcatgtatgtcattgtatctttttaggccgtactgaagctagaaaatataggtttcttagctctctctcgagataaagttccaatttgggtcgttatctcatcggttatcagcatgacatactgaaagaacatgtttgactcatcttaagtgactcctttctgtttcttgtaaatgagtcaactggtgtcagcagtagtgattctggggtttaactgcgaatgtcacagaccggtgtctttttattgaactaagggttgagttcattggctttccctattcggattgttcagagtgctacaaacatcccattttcatgtaatgctagctgaaactttgcatggaaacattgcttagcatgttcactttggtgtgagtaattttagcagaaacacgattctttggtagcggaaacggggttggacatcaacctattcctgtagtttagctttcttattcttcgtcctttttttttccctctctctaaatcttttatgtttttgttttttgtttttttgtattcttgtttctttttggactttaggtggatgtaaaatttgtaattgagctatttgagtttaaataagctcttactgagtaaattctgcacgtccatagcttggtatgagcgttttgtttaatgccttacctttaacatgttttccttatgcatcttgaacatgatgttttgtaagcgggtttagtgtatatgataatgttttgactttgatgtgtgtgcattttttttcctttccatttccctattttcctttcaacttcctggtaactagatatgaatgatgacaacttattgttgttcattttatccttaatgagtatctttgtctggtttggcaggttgaggggccaaagtctcccgaagaa

SEQ ID NO: 73131 - DNA, 754 bp, Prunus persica
  Intron number 1 from transcript ppa020848m (locus ppa02084 8m.g) derived from phytozome v7.0 (chr-ID scaffold_1; pos 40260278 to 40261031)
gcagggtcataatcgattttcttggtatgcatttttggtttttggttttttttttaaatatttatttaggaaaaggtattaatagtatatgttttggtccgtttagatgaggaaaaataactcggaatttaactaagagtcgggaatttaagaggagaaattgacaattcctttgtttggcaacttaagcacaaaatttattcaatgacatgtggaaaaaatcgtgaaaattggggcatcaaattcccggatttaatttccaccgaaatatgcgtcatttcacaatttccacagtgttatttacaaaattcgacacatataaatccaaacactgaaattttcaattgccagaaattaaaatgatgaaaatctaaattccgttattttagaatttcatgtaaatttcaattcctttatccaaaatttaaattaattctcatcttattcttatggccgacaattcaaacatatataaaaaaataaaaagtcgtgatttgcaggaaagagtcgtgatttgcaggctggtggttctaggttcgaaatacttgacacggtgtgtataaaaaataaaaaataaaaaataaaaaccttcccataatatggacatgagttggcataatacctctatttgcatcagtactttgtactaaatgataagtttttttccttttccacatgcatttttccaaaattcttgtctaataaaacttgtggttcagcaaagaatcttggtcactcctttctaagcgcatat

SEQ ID NO: 73132 - DNA, 454 bp, Prunus persica
  Intron number 1 from transcript ppa003249m (locus ppa00324 9m.g) derived from phytozome v7.0 (chr-ID scaffold_6; pos 100622 to 101075 reverse strand)
tctcttccgatctcaacccacctattcgagctcaggtagtagctagctcttctgttaattaattcactttttttgtttactaattgggttttcttttctgggttttgtttgtttcccgagaaagtataggaaacttcaagaatgtacatattgaaactctgttagctagctagcttgagtggaagaatattccttgcgtacaaattccagtttgacacatgtgcaacatgctgctagagacttgtcaatgtcatagatggctcataatctagtaatgctcatcagcatatcaaatatcttgagatttaacttcttgggctagtttgcttgaattcattatcaaatatcatgaggtcttaccgcatattgtgcattttttaatgtcgtttattttgatttggagacaattttttaaatttctgctttggatattttgtttcaggttcatcaggat

SEQ ID NO: 73133 - DNA, 568 bp, Prunus persica
  Intron number 1 from transcript ppa000821m (locus ppa00082 1m.g) derived from phytozome v7.0 (chr-ID scaffold_8; pos 21492350 to 21492917 reverse strand)
tctcaatttggagtctagaaaagctgaggaagctggtaatcacttttccattcttgtttctttctttcttcttcttctttttgtccggaaaaataaaataaaatctccagctaatacctaagaatatgcattaatcgaagtttcttctataattctcttcaaattcaagattgcgttttcatccattttctcagcaaccaaacagaggatcagctctcgctctctctctctctctctctctctctctttttgttctgatttaactttaccagttagatacttgaagaaccagttagatacttgaagaaccttgtttatttgctttaaattttttgaattttgctccaatcttatgattgtcctaccatctgaccgatgattctgtatgtgtggctttctgaagcaatgtgggcacacactggcgtggcgaattgtgttacttattctctcttaaattgtccaattttgaacgagtttgaaatagtaaaaattgagtacttgagagttgggttacatttcattgcttaagctaaatgagctaacctttgttgtgtagcatcaagaagaa

SEQ ID NO: 73134 - DNA, 420 bp, Prunus persica
  Intron number 2 from transcript ppa019412m (locus ppa01941 2m.g) derived from phytozome v7.0 (chr-ID scaffold_8; pos 12671225 to 12671644)
gcgtttgaaagatggagacgtaaactattcttcttttaactaattcttcctgtttgtaccagaaagtatttttgctttttcttgttctaaaaaatcaattgaaaatagaaaagaaaaagaaatataactgcagactcttccatacacacacatcaataacacagaatttcagaaacaataatctggagtgtacatattattcattattaattactaatagctacctttatgagaaaagttctataaccatggaaagaaatagctcttcgtaattaaatactagtacttgtactcaaactaataaaaagataaaacctatgatccatttttaatttgaactgttttgctttacctcctacataaatgtttcatttatttatttgcagacccgaatcggaagttgttgaagatattgtagga

SEQ ID NO: 73135 - DNA, 699 bp, Prunus persica
  Intron number 1 from transcript ppa004264m (locus ppa00426 4m.g) derived from phytozome v7.0 (chr-ID scaffold_8; pos 20788533 to 20789231)
accagttacgttcgtggccccatttagccgtggaggtaatttccctcataaagtttgagacttcaaactaaaaggtcaaagtttttcggttttaggcgtggtatatatgatatatgtaatcccagtggtttgtttgatgtgcatttagtataagtttttgcttattttactaattatgcagcataagaatcagctgaaatgccattgtgtatctatatgggtccaattgcttttcaaaaagattgcttgggttttaggcatgctaggagtttttgacggatagcatatctcattttcagttctctgttcagaatatgcactgctaacatgcaaacagattttgtaaaatttaatcacagcagaagtttctacccctggtttatcctgcttagggctctttcgaagtctatatgcatggtgaattgttctgaatttttaagactatctaaaagacaaaacacaacggaattgatttggtctacgtgagatgtgcttgcgtctgtagaaaattatcacaaacccacaacaacagacagatgaatactaaatgtagggaatggctaatctttaccgtgccttacctatgttaatttcaggtaaaatctattggaaatgttggttttaattatctattttcttttcatctgttttgcttatgttataggttttttattggagaagaaagcaggtggctggtgg

SEQ ID NO: 73136 - DNA, 484 bp, Prunus persica
  Intron number 1 from transcript ppa018644m (locus ppa01864 4m.g) derived from phytozome v7.0 (chr-ID scaffold_4; pos 839045 to 839528)
caagaaggggagaaaagtccagttcgattctgaaggttgatcatgtttctacactctcttatcttttcctatttaacttattctcatattttagtcatgcttgtgctcatcttcttcaatcgtcaacatctataatgttggtacttgaatttacaggtttgcatgaacccaaaacattctgatgaatttccattttgatcactcatctgatgttttcttgttcccttttcacaaaatgtgatttttaaagctgattggggcaaagggggaaaaggagacaagaaagaaagaaccacagccactggagctcaaaattgagcagggtgagcactttccttggctatagagtatttttcagctataacatgttatgtttacttactatagtatagtatctcagtgctcagttctgtgtgtttcatatttcctatatcaaatagttgtcatttttgttaatgcttgcagaactgccacagagtgccaa

SEQ ID NO: 73137 - DNA, 964 bp, Prunus persica
  Intron number 1 from transcript ppa007617m (locus ppa00761 7m.g) derived from phytozome v7.0 (chr-ID scaffold_4; pos 502089 to 503052 reverse strand)
gccactaaagtcgccccagaaactcccaaagagaggtttggattttgttttcaaaatttcaaatcagaaatggtgaatttttagggttttactttcctttagattgcaaaggttgcgtttctatgaaatgtaagtggtacacgtttatagagtttccaattagcaatatttcgttaatggccgttttgaaagttttgtacttttcctgtttcctgctaaccaagtttcgctaaattgcatattttaattgctagtacttgctatttgaaatttttatggtttccctttttgggtaaaactaagactgataaggtcaaattgccggcgtgtatcgctttgtgtgaatgagagattttaaaatagtttgtaacaaataaagaaacatatggaaattggcaattaaaccctgatattactgtaatgggaaagttttaacctttttgttaccgtattgtcttccatataaaagtcaaaactgttattgtttgtccttactcccaaagcatgaaatacaaatcaactagtacttactcttgcagttgcagtctcaccctaattatattttaaaaagtgcttgacttttcaatgtatgaaaaactataagtttgagcttagcataaaatcaaatttgcgtattaaagagctggcttagcatgtggtcttgctaattaaactagtaagcttatctgttaggttggggtttaacatttttgcataaatttggaggattagtgctttaaagttccattatattaaattcttcttcttttcttaaaattttaaatagggcagttttctctgtagttggaaaagctcaaatctttatctttttgttttgtagttgtaagtaatctattatgattcagtgctttattcataatgcaataaaatgacctggcatgtttgtgtcggtcataattttactgcagtgctccggcttctggaaccaagagaagaggtgggc

SEQ ID NO: 73138 - DNA, 728 bp, Prunus persica
  Intron number 2 from transcript ppa010918m (locus ppa01091 6m.g) derived from phytozome v7.0 (chr-ID scaffold_5; pos 11690206 to 11690933 reverse strand)
aagaaagagaagcaagtcgacgtccgaaagaagatgtataattacttaaacctgcctaattttgtttatatttctcattccaacaaagtcatatcattgtttttccccgatgggccaaacaatcattgagcattctgctgttagaaatatatggatatgtatcagtagtacggtttcaaatatcagttactgttaggttgaattttgagttggaattagtaatcgcggatgttgtggaatacgatagtgaggttggaaagttgggaactagtgaagatggtgattttgttaactttatggatttgatggaatattgaggaaactggtttgaacataagttaaaaatgagttgaataagtgggaaatcttattggaaatcttattgtcatgagaggcttgatcaattttaatgtagcccaaaatttaggagcttgtatgtatttggattttgaaaaccatactttatgaagctaataggctctagctcaaagggcattggagtaggcggggaaggagtaggacgaggctcaaatcttgttgtaaagaaatcagactgtatgttcaatcaaattgagttctttgtttcttcgctgttgaatttgggttgttggaggatgggttcactaagggaagcttttcctttcttgtttcccctatggctatgcaaaaatggcacatatgtgggtaactaacagtttgttgtatcggtttgttgcagtgagtactct

SEQ ID NO: 73139 - DNA, 618 bp, Prunus persica
  Intron number 1 from transcript ppa008694m (locus ppa00869 4m.g) derived from phytozome v7.0 (chr-ID scaffold_8; pos 10885029 to 10885646 reverse strand)
cttgatcatcttcttctcttctctctcctcagacggtatcgcaattctcaccttcaattttccacttaattaccgttttgtttctcgtttagttttccaattcataatctatttaaatcctagatccatcaaattttgcatgcccagcaaaaacccatcaaattttggagctttctcttttgaccacatgtttttcttttgaagaaaggtcaaaactgtgttgcttttgggttcagttttgagtaagggtatttgaagttctccctttttttgggttgctgcactagtaagacattgatcaattatctgtatttagaaatttaatacaatatattgattatatctttcctactgatatgaatgtaattgtttatttgattactctagcctaaagttttcgctccgagtacaatgaggaaaactaaggaaaatttgatagaagttggaaaagttggaacctttcaatatttgttactgtgatctgggcattaatttcttgttggggtagataaatttatgtacggattaattgttgggttttgtgtaagtatttaagcttgtgcttttcttttctttttgatagggagcttttggaggttgttagccagtgtgcaaatc

SEQ ID NO: 73140 - DNA, 738 bp, Prunus persica
  Intron number 1 from transcript ppa005381m (locus ppa00538 1m.g) derived from phytozome v7.0 (chr-ID scaffold_4; pos 1027890 to 1028627)
ttgttcctatgtgagtattcatatgtttcttgttgatttctttagtgggttctgcttaattttgcatgatcttgagttttgtcttctgggtcattgttaaagttgctttattttgaagaatgtaactgggtttcgaataatttgacctttggtatttttgtgcaactcagattctgtgaaaggttctagattttgatttcagtttccaacgatatggtgcatttggctcccaaaatgattgaactcctattctcctcaatctcctaatatgttgcttgttgtaagccacagcttcacttccactactatttagttctttagtcacttgttagaatgaactaaaaatatcccaggtttagggcagtgttgggaatttgattgctgttcgagttggtataggtttgctcttataactttatatgacatacattagtattgaactacggatttaagatttcaccataatcgccatcattgctagattatggacatattgaggcacattacttgcctttggttgaagtattcattgctaagcagttctaggatttatgatagtttgtctatacttccttttttctcattctttttcgtttttgacttcctcttagttacctcaacaatactagttgatttaaggctttagaactactgatcgaaaaattcatgaagaaagtatccatctacatgtttctgatagtaatctttgtaaatgatttgttttataggtctccatat

SEQ ID NO: 73141 - DNA, 484 bp, Prunus persica
  Intron number 2 from transcript ppa021050m (locus ppa02105 0m.g) derived from phytozome v7.0 (chr-ID scaffold_6; pos 26673520 to 26674003 reverse strand)
aaggagatgtgagtgttacttagaagaataattccttgtattgcttggccgtataaattgcatctaaccgctgacatctcattccttgttgattagcatttgtcattgcttatctcctaagtaataagtcaaaataaatatgattggcattcggaggtacaagataatttgttataaattccagaatatttgcatgttctccatttttcagcctttagagtctaggatgctatgaccatttattctgcagtgactattgcttaattatatatcgtttgagtatttcttttcatattcattgatattgtggcatgccgcatcccatattggaaaaatatagtatctgaagggtgcagtttcttttcctcatccctcgtatttatttgtgcatatggatatgaatgcttaacttaagcattttttgtaatgagtattcattcgtattccaggtttgcagttcctgcagtttaagaaattcctgcga

SEQ ID NO: 73142 - DNA, 614 bp, Prunus persica
  Intron number 1 from transcript ppa011953m (locus ppa01195 3m.g) derived from phytozome v7.0 (chr-ID scaffold_3; pos 338493 to 339106 reverse strand)
agcaaatctctctcggactcttgattccccttgaggtaaatccagtaaccaatccgtttttattttatcaccttcgaattatttctctgtttccagatgaagtgcaggaatttttttattttatttcttcctctgcaccgaaagaaatactgaagtttgaattctttagcaatcgtacgggatgatatattgttagaaaccatgattggaaaatgtatgttggttggtttttgtgaaatttaatttagaataaattttaggttggggcttttggcgttgtttctgtaaattgtgttgattgctttgttttctttccgggaaaatgtgataaaccaactggcgttgtctttgtttttgattgagattttgaaggagctaagccctttgcttttgcttatactgatactgaaacaataagctaaccagggctcatattttgttattctgctgactttggaattgattttaaaattggttcagttgtgtatgggttttgaaaatgattatactgtttactcaagagtagttaacctacattgtattctcaaccttttcatgtcttcaaaatagttgtaattatgtttcattcctattgtttagtcagatttgtcaag

SEQ ID NO: 73143 - DNA, 623 bp, Prunus persica
  Intron number 1 from transcript ppa022473m (locus ppa02247 3m.g) derived from phytozome v7.0 (chr-ID scaffold_4; pos 21944666 to 21945288)
ttatctacaccaaaagtagggtaagcattacatatgttcatttttccagcaatggaaatccggttgagattttaagttaattacgtttcattttaataacataattaagttaaatagttttgcaagtatttaaaatgatttaaataattaaaactatttttacaataatcttcagatgtgaataattgtgtaaattaactattaaatttaaatcttaaagtaatttaatataatataaataatttaatactgttaaattattctcaaaattaatttgaatgttcttgacaattgagccagtacattctcgaaaaatgaaaataagccattgagcccaagccgcgcttgggttgggcctttgcggtccttgcttgagcctttgctatagaatacgacgatttccatcactatttctaaagctttaaccatgttgcagattgcagtgcaagcgctgatatgaaaaccttgagaagaaacaaggagggaatctataacactgctcaaaactatcacagaaagttctcagccatcaccagggtcgttagaactgacagacccagaccccaagaatgccttgttttggtggaggcaagggacactaatactccacttctgcatcaaat

SEQ ID NO: 73144 - DNA, 592 bp, Prunus persica
  Intron number 1 from transcript ppa020081m (locus ppa02008 1m.g) derived from phytozome v7.0 (chr-ID scaffold_4; pos 14646384 to 14646975)
gctcgagtacttctttgcctattgtggcctttctgtcacttcaggtgtgtatatatacatacatatatattagtcctcttctattgagggacaccctttagggtaccttatgattttttttttcaacgattcaaaccatctattgtttaggtctacattcatatatcatccttgcaaaaaattagacaaatagaaaaccgtttcgacatcaaattgtatcctacaaaatcaatgaacacggtgcttcaagaaagtactaaaatttcaataacacaattgactggtcaaacgatatcggattcaagtgattttttgtagagatgatatttgaatgattatctaaaacatagacagtttgaattagtgaaatacaatgcaaagtgaaccttacaatagtgtctctccaataagctagtttttactttcatgtttgagttatagttataagaattttgttcttatcagtttttatcatgtaaagtaaaattgtgaatccccccacctgtatgtacctaatcaaaagattattcaacgtttgttggtgtttcgatttgcagggcagtccgattgaacgtgtgagtacgcatcggta

SEQ ID NO: 73145 - DNA, 638 bp, Prunus persica
  Intron number 1 from transcript ppa020747m (locus ppa02074 7m.g) derived from phytozome v7.0 (chr-ID scaffold_3; pos 8966983 to 8967620)
cgaagactgtgagcagctcaaaaaggccttcaaaggttccttctttattatttttctgatcttttactccctcgcatcatttcttgttctgatcataaaccaccccatattttgtaattggctttatgattgatgattgatcaatcccatttcacctatccgattcttagtgttagatacaacgtaaatgatctgataatgtaaaaagaatcctttttgtttttgtttttcatttcgttctgctaattctctttcgactctctctgtcgtcaatgatcagatgcatcagatttgtgttttgtgtacatgaaaggcccgtatgaatgtgattgcttgctttggtaaaacggtgatgctcactctgcaccaaagctctgtttgtatcagaagaaaataatgcatttgggattatttatgtaaaaagaaaaaaacaatgatcggtacgtatagatttataaaaggtttgtaaaggacctgatttgacatgaaaatggtattttgacatgaataaataattatagaaaacagctaaaatagttaagaccagagtttatcttctttctttcttttatgtgacttttcatgtttggggtatttggtttcatgtaatcttgaatttttatcaatacaattacagg

SEQ ID NO: 73146 - DNA, 330 bp, Prunus persica
  Intron number 1 from transcript ppa020917m (locus ppa02091 7m.g) derived from phytozome v7.0 (chr-ID scaffold_7; pos 15783968 to 15784297 reverse strand)
ggctctctccaacaaagtgatccgctctctcaaaggttcttctttttttcttttttcgttgagaattttttttttttttggagttttctatttccactcgcatttctctgtctccaatgtcgatgcttcttttaactgccgataattcgaaatgatgcttttgatttcggaagttgagtatcagagttgagttttctttgattattgattaggtcttgattaaggaccttaaaccctgattaacgtaaaactaacagcgaggttttttgtttttgttgtttattgtgtttggcagaagggagtgatttggattctttaaatctcaaagag

SEQ ID NO: 73147 - DNA, 631 bp, Prunus persica
  Intron number 1 from transcript ppa014939m (locus ppa01493 9m.g) derived from phytozome v7.0 (chr-ID scaffold_8; pos 13510846 to 13511476)
gcctgggaaggaagaagaagagaggaagaaaggtataaaaataaaaaaataaaaaaaagttgctggcctaggattttgggaaggaagaagaaaataggaagaaagcaaaaaaccaaaaaaaaaaaaaaaaacaggctgggaaggaaaggaagaagaaatggagacaaaggaggaaaaaaaagaagaagaaaagataatatagttttagcaatctttaattattaaatattagaattttatttatttataattaaaattaaatattaaaataattattttttagtccgacacaataccaaacatatgtcttcactatttttacattccagctttttagtccgacgcagcaccaaacataggtcagtacttaatccaacttaggccaatccgagctaatccaaaacggtctcaggatttagtccagtccatgacaatccgccgtaccaaacgaccccttagtgctaagaatggatgtatgactaaatatctttcttttcttttttttgggtatccaaggtgttttcatacataacattgtcacttgaacaaaattggtcaaggatttaactcaattgaatctcaataacaggatttaactcaaaccctagcaaaaagcactttgtactggttc

SEQ ID NO: 73148 - DNA, 410 bp, Prunus persica
  Intron number 2 from transcript ppa014939m (locus ppa01493 9m.g) derived from phytozome v7.0 (chr-ID scaffold_8; pos 13511777 to 13512186)
gcccgaccctcaacatctccactcttaatcaagaggtacgtattactttcattaacttacgtcgttgaaaaatgctttgagataactaaaagtgttttttcttttaataacttgcagaaatgaacaaaagtactttataaaaaatcacataatcactttaagcgcttcgtagagaaacactcataagacgcatgtgtaattcacataatgtgcttccagtatttttcttttatatgcacataattttaaaaaataaaaataaataaatatatatatatatatctttgaattattatgggaagttccttgtccttttatgctgattatatctttttttctttgatttatttatctcttctaatttgaattataaagtcgttcagaagacaaagatctctattagacagcaa

SEQ ID NO: 73149 - DNA, 572 bp, Prunus persica
  Intron number 1 from transcript ppa010021m (locus ppa01002 1m.g) derived from phytozome v7.0 (chr-ID scaffold_5; pos 14347962 to 14348533)
tttccaagttcccttatcgatcttcggcctcattcgtatgtttcgactcgttatactctctctgatagtattttaaacatgctcattagttctttactttaaagaatatactttgaacatgtttgtagctgcgaattttagtttgaatatgtttatacttgtgaaatttactttgaatgtgtatgtaattgtgactttagccctttagaaaaaatatattctttgttttctgttgaacatttttatagctggcgacatttggatagagcattttatataaatgaatggtttgctgttgattcagttgaaaaaagaagttgttttttaatggtacttgatgccttgaagcaattgaagctgagaggtcattctgcattttacttttcataatttggaatgtcaattggcagtgttcaccaaggtcttaagtcttaaccttcttatgttatatagtgtagaattcatctgaagagcaattctttgtctctctttccaaatatagacacttttatgacacttgtagcattattctaccagactacaaggggctttcaaactgagacatcaacatc

SEQ ID NO: 73150 - DNA, 543 bp, Prunus persica
  Intron number 1 from transcript ppa004482m (locus ppa00448 2m.g) derived from phytozome v7.0 (chr-ID scaffold_2; pos 16610395 to 16610937)
cccacttcactccgccactgcatcttataagttaggttgacaactaaagcactaataaggctccaatttggaagaaacattttgctagaaaattatctgaaaatgttttgctaaacaactttttattgtttgtttataatcaaaggaatttgggaagttttgtaatgcatttgaatttcaatataatccataagagtgtaaataacacctgcccatcatactttattttcctaggattttctgtattataagtgcattgatgacaaatatagtgtagtaataaaaactttaaaaaggaaagtagtttggtggtagatagaaaaatgattaaattaagtatgcggaattttgggataatagtctaaatcatatatccctatttaaaaacccttttattcattaaaataaacctccttttttttccatccgatgaaaaagaaaaacccttttcctttttttgaaatctatttattaatttgcaaaacccactgtctctctctgtacgaagcttggagcatctcatcggtatcaagctatctacac

SEQ ID NO: 73151 - DNA, 366 bp, Prunus persica
  Intron number 2 from transcript ppa002763m (locus ppa00276 3m.g) derived from phytozome v7.0 (chr-ID scaffold_2; pos 25551078 to 25551443 reverse strand)
taggttgacgtacagcgccgaagagaagagaagaagtaagttcagcattatgatttcacttttcttttcttttcatggattctatttatatcatcaacaagcccatgattgagtacaatgctaaccaacttgcattttcatttgttaaatctaccgtgtccttgcattattgcattcagttatttctctcagaatggcttctgctgcaatttacatatttttagatgaattcaaatgttgatattacttttcaaagtgaatcaaccttacatgataagtttgttttgatagaagatcatgtagaaactactgccgtataaatgaaatggtttcgtgcttaccttgtagcagtggttcgagaaaaag

SEQ ID NO: 73152 - DNA, 809 bp, Prunus persica
  Intron number 1 from transcript ppa002763m (locus ppa00276 3m.g) derived from phytozome v7.0 (chr-ID scaffold_2; pos 25551406 to 25552214 reverse strand)
tctctccgtcgagaaggaccaatctctttctctctgtaagttccttaaatgtctcgctatttctctttttcaattgcttcctgcatttcaaccattttcaaatatttgtttttcgtttctatttgtcgttgaggaattgaattttagatttggaatttggaatcttagatgtggaactttgaattcctttgtctggtcactcagatatgggggtgaacacagaagctctggtattttacagtgctttccgttcgccggaggcatcttcttcccgaaaaactttcgccggaaaataatttcattttcttttgagcttgttgggttccaatttatacattagatgttgaatttcgaaagccaatttggaagtatgcacatttatatagtggctgatgatactaatcataagattaattctaaccaatttggtaaaaaatgtaaaatgcgaggtctgtaagctggaaagagaaatgagaaccacatgaaatctaaatgaatgaaataatgaggatttggataagtctgcagactttgtgggagttaatatcaggggtttttggttttaagggattaaagtttacaaatttctgtgttggaaggaagaacaattgaacccaaacttgtaagaaacttgtaaggattcttgttatatgttaaattgcatccacaaaattttcttcttttttgacctttatgaaatttatgtaattgaacaggcgcagagacgtgaaaatcagctactcactgctgagttttactttgctccctctgtaggttgacgtacagcgccgaagagaagagaagaagta

SEQ ID NO: 73153 - DNA, 833 bp, Prunus persica
  Intron number 1 from transcript ppa007348m (locus ppa00734 8m.g) derived from phytozome v7.0 (chr-ID scaffold_1; pos 27718544 to 27719376)
tcgtactcttcggtttcctagccatcttagccttggtaacccctatcacaccttatgctttgctctcgtcctgagaaccatggcgatgtcctcttttgtcaccttcttcatcaaactcttttttcactaccgatttcttttgtatttttggatattcttttcttccatcacactttaggttttgccttcgaacttaagtttgattctggttgaactaattgctctagcttgtatacaatgtcgctgctcttgattttcacgtattgcacgcttaaatttcgtttttcatgtagtttacagtttcttaatgcgtttgttcgtatcattaatgcttaaatttttgtaaagcttgcatgtatctagtaaagtgaatctgctcttgttatgtgcttattccatagtaatttacctctttattaaaaacaaagaattgatttcgaagtatgtgattttttatataatggttttgaatccattttcagctatgtcaattgtctttcaggaatttgatgcatgacttatattaaatacagcatggcactctatgatgcggaaactaagattattcctggcatgtcaagcaatgacctgaaacaattgtgattgttaagtgtagcatttggcttaatacatgtgtctaaaacgacctactcaggttactggtcaaatacaaaatagattatcattcagaacgagtcatgaggcatacttccataatgatagccgtagtagattggataccatttttgctaattgttatgatatgctagccagggaacttcgagtattatgttaaattcttaaaacctgggatgtgttgatatttacagacg

SEQ ID NO: 73154 - DNA, 791 bp, Prunus persica
  Intron number 3 from transcript ppa005771m (locus ppa00577 1m.g) derived from phytozome v7.0 (chr-ID scaffold_7; pos 5328110 to 5328900 reverse strand)
aagaaaattcgtcatcttgctcgatcacttatcgagtatgaatttatatacccttgattcacaatggattatttgttctttgtgtttattgggaggaaattgagtaatactatgtagcgttctgctacggtacatgcatttaccgcatcttctaaaatttgttacttttgatactttggtctgcttattacttaccatacccttgcctcttcttgcattgtagtattcatcaatttttcccttaaactttctttgtactcttttgggtgcattaatgctgtgcttatattcagtatgaaagcgcataatatgctcaaacctcctatgtacttcagcttttcaagtctgttgactacaaccagtatcagataatttccaatttctgagtgctgccgattcatatgcttatgaactcagttcttattgttgtgcttactgatatcaactgcacactggtcatttttctcctttgaattttgtcaacacatcgaatccattttcttcatctgcactgttgactcctcttagctcattgtgtctttttcgcgttaagtcttttagtgggctaataagccacattcttgacaataattcttagacaagggataaatgatgactcatttcggcttttttgtattcatgactcatgtagtagataagtaaacatcatatttctataccatgtaagttagtgctatattggatgacgagcagttccattttaacattgtatttgttatcttagattttgaaacggctgtgctttaacatgatcttttgtattgcagtgg

SEQ ID NO: 73155 - DNA, 589 bp, Prunus persica
  Intron number 1 from transcript ppa025702m (locus ppa02570 2m.g) derived from phytozome v7.0 (chr-ID scaffold_2; pos 1174308 to 1174896 reverse strand)
aagtgtggaagtaagatatccctaaccctatgctctctctctctctctctctctctctcatagaattgaactaatatgtacttcaattattatcacaattgttcatattttttaatctaaatttctctacttatatttgtgtgcttattaatttatccaaacatgttcctattcatggttgtaattcaaaaatataatttaggcttactttcccttttctctttatttttgtttttattgttttaactaaagattgatccttatagtttgtcggatcttccacattgatttacatggtttcaattttggcaatttgacccatgtaattagttgatattcaatttcgtgatggaataagcacgtgtgtccttcacacatagaggtatttcagacggaattagatggaaatttggacgtatctttgcattgcattggatatcaaactataagaatcaaatgaccaaaattgaaatcaaaagtggaaattctggcaaactacacgtacaataaatatattttttctgcccaatgttgtttaaccatctatattatatatattacaggttttacagttccagggagtggttga

SEQ ID NO: 73156 - DNA, 445 bp, Prunus persica
  Intron number 1 from transcript ppa002745m (locus ppa00274 5m.g) derived from phytozome v7.0 (chr-ID scaffold_1; pos 22465039 to 22465483 reverse strand)
tgccccaattggacgagctagctcaggctgcacaggtacgcctcctcctcttctatttcgttgctcatagattacaccaacccaaaacggaagcttcaagctttacgacgctcattgtacaaagagctcaatttgatctaatttgaattcattttcaccgtgtggctgcacgggatgcgaattacaatattagggttttgacaacggcagagtcgtttatttagggcttgaggcttggtcgtggatctggaccttgatctaatctgaaattacttgctaaatttgtgtttcaattgtcaatttaagctcttctgttatgttcaacttggtacatgtgtttcaaatataatttttgttttctcagtctccgtctctgcgggcgcttgtttgtgcataatttagcttttacttatttgcaattaattttttcatgtttgtacaggga

SEQ ID NO: 73157 - DNA, 477 bp, Prunus persica
  Intron number 3 from transcript ppa003357m (locus ppa00335 7m.g) derived from phytozome v7.0 (chr-ID scaffold_1; pos 35169853 to 35170329 reverse strand)
gaacagaaggtaaagcaacaaatagagtttaattaacttcggttacgtttaatttcttcgaatttttcatttttcattagaatttttattttgtgattaaaattatagatctgaactcgaattattgtattcatggtgcgaatagtgccctttctgtttgtgttcaatgattgttgtaccattgtgcgttttgcaagcttaaattctatcttttaagatacatttagacagaaataatgatattctggacttagttttgatcttttagctttgagaggttggtggaaaaagtcttctccaattaagaaatccatgcatcaaatttgtattttagcttaagtagctgatacgttttgttttttctcgtcttctagtggtaaactgtggatgatatgaatatcagctatttctcaatttgtgatttttaattttagctcacgcaaatttgtttcattactgatatgttacaggtattgg

SEQ ID NO: 73158 - DNA, 925 bp, Prunus persica
  Intron number 1 from transcript ppa006973m (locus ppa00697 3m.g) derived from phytozome v7.0 (chr-ID scaffold_3; pos 20879737 to 20880661 reverse strand)
tttgtggccaggtaatttttcatatttttctcttcaatttaattagtataataaaagtttgcctctttttttttctttctttgtttcaacttcgagtttgggtttctgagtatttggtaatggttgcagtgggttttcatgtgtttgggattaagggaacttggatttttgtctctcttatttttttcttttcactccatgttttttcctctctgtgattttaaataccattttgaagtttcgattaatgggttccttgtattttaatctgtgagattttgaaattttatgttttttagttttattttcctaaatcaacgaataagaaaagggttgccaaacccaatggttttgcgttgttgaaaataaagatatggattttgtatttgagtcatttatgtcttaaatttttttgtggttctctgttttttttttctccttcttctctactcttagttttcagttgtcattatggggcttgttcttttgtgtaatggtattgtgattaccaataaagtttttgatattcccctaatttttggtaaccatttttgttactgaaattatatttttccatttttatgttcttgtaaaatcctttctgggtctgaagactctgaagggtctatgccattgtaaagaagtgctaatttgtacagggtctaaaatgcattattagaaatatatcgttaatgtttatgagatatttttttttccctttctagaattgctgttcctgaatttctttacatatgctcaaataagtgctaataagaagaatttttttctttctgtaccgtaatattctcctccaatttaatgatataaaacacggttactgaaaagacttttgagtatatgtaatctgggtatcttagaacgttttcattttcatccacagcagggctcacaagcagcattgagc

SEQ ID NO: 73159 - DNA, 437 bp, Prunus persica
  Intron number 1 from transcript ppa009198m (locus ppa00775 9m.g) derived from phytozome v7.0 (chr-ID scaffold_3; pos 21202573 to 21203009)
tatcaaaataatctcaggtttgtttcttcttataatttatgtgctgcctccgaaatccaaacttaattttataattatgtggcttataccttgttatatctttgatggtgttgttgtggggagggggataatctacaaaatcaaaaaagaaaaaaaaaagagactacaaggctttacaacttacatttatcagtagctaagctgtatttcaaagtttcattaggtattgttacaaggcgtccaatttatgcaagtgcatacaatttcattaacccctctgtgattttcttcatttgtgcaactgcgcaagttttaattccatgtaggaattctttttcctccatgcaaaatatcttatatgacttaaggatgatgtgcttttgtattcatgatttgtatattgtttttgtacagacgtggttgcaattgcagaaagg

SEQ ID NO: 73160 - DNA, 879 bp, Prunus persica
  Intron number 1 from transcript ppa019473m (locus ppa01947 3m.g) derived from phytozome v7.0 (chr-ID scaffold_1; pos 3859331 to 3860209 reverse strand)
gaaaactaaaggatttggaagctggaaagcgcaaggtattttttctattcgattactatccagttccgttcaaattgttcaaatgtaattttacataagtctgcatgtttgtgcataatatatgtatctgcaattgtttatttggaaatgtgaaatgattgactcttcgctttgaattttaatccaattgtctggtttgcacttgtacggtcggaatctatacttggttgctgtcatagtgaagatattgtgttccctactattgacatatgattaaaaacacattttttttgggttcaggaaatcgttttgtttggcttataatgcttagagacagtacaggaactgcgataaatattgaatcttgatgtttttgagtgtctatgttcaacctttacatcttgttttgagctagcaggaacaaaatgatttagcagtatttttgttgcatcgaataaacattagacggacaacagatgagattgcatgctaccccacttgttattttgaaaaagaaaatgcagataggactaggttgtcatagttatgtgtccagcattgttcgtgtatggatgccttatggtaagaaaaagaaagagaaagaagagcataatcaatttaaaacgtcaagatcacccatacttttacaaagaattgtttaaccaacaaaggctcgtgataaacagatcaacattttagttcttgtctgtgtagttcagtattttttgttaataaatacgcatgtagctaattttagtcaattctgataaagtaacttaccaaatatttcattatttgtttgtcgaatttcacatatatttggttttttcccctacttttgcagttggaggagttccgtaagaaaaaagcagcagagcg

SEQ ID NO: 73161 - DNA, 680 bp, Prunus persica
  Intron number 1 from transcript ppa003513m (locus ppa00351 3m.g) derived from phytozome v7.0 (chr-ID scaffold_6; pos 21709744 to 21710423 reverse strand)
gcatcctcttccttcttcttctccctctacttcaggtaaaaaaagttcactactttaatatttccgttttctcatttattctgtttgcttgctgataatttactgggaaagtttatagtttgtggaattcagccataggtgcttaaacataagttgggaatgattggtctttgtgtttaatcccaatacagcaactgtgtatgttgagcttttgtgtttctgagatgggttttacatatttaattgttgtgtttgatttttattccttaaacttgaattgatgcgctaaattgttgaacaaagactattagcataaatcttttcaacgtaaaatactaatgcaagagctacatttggaagtagcggatattttttatattctatttcctgttgaaacagttctcaaaaaagattattttcctgcgcttacttgcataggagtgtgaatgattgtgtgtttatccctctaggataaaaggttctagaatgagaattgagatgctgagttacttaagttaattctttagagtctgatactattggagttcatgaagagatgcagattattatgctgatagtaattgtctacaaaaatgtttgagtaagggatggtttaccccccctattgtcgattgttggttaacgtcaggcttgttggttctcctaatttttcagtgttg

SEQ ID NO: 73162 - DNA, 912 bp, Prunus persica
  Intron number 2 from transcript ppa009479m (locus ppa00947 9m.g) derived from phytozome v7.0 (chr-ID scaffold_2; pos 20417288 to 20418199 reverse strand)
cgcacactgagagttgggctattgacttgtcttgggtactgtagagctggcctttagctgcttgggccctttcaaggcctttttcatttttattttattttatttgtgaaaatcaatagaagcattggttcttggagctttcaatctcttggctcttcatacttaaacagaataattaataaataattgtggggctaagagtaagatttgataaagatatggatttaatgttaaacataaaaaattataaactgaccacttatgttttctgatttagtggtttaattatgcatttgttattgtgtgtctgtgagttgcgattggtgttttgtatttcatggctttttctcagccttgaagttttctttttcaaacctagttgtgtaagatatgttcagagagtatgttgcattgtttgtcacagctagttgatcttcttatcttgtctcttcttaaatgagaaggaagaaaggattttttttttataaaagaaaaaagtgatacattcatgttgggaattaggaaaatcctgattagggaattgtagcggcgtatttcaatacgcgaggtttctccaatgcaggatgaaagttgcgtaatgtgagtgccaattgatcgccacgggcacgttacatatcaatcagcacgcaaactgtaataatctcgcattactcatcctgcattggagaaaaactatgcaaagtagctttctgtctcatattgttgtttggtatttcaatcatgtcaaatctaagttattttattcaatttttaagttgaattttgattatttaaatcaattgtctttagtttttgaaaatctgaattggtttttttcatggttctattaatagtatattcgtattgattgttgtaggacataattgctaggtttgggaagcaagaggcaat

SEQ ID NO: 73163 - DNA, 208 bp, Prunus persica
  Intron number 2 from transcript ppa015319m (locus ppa01531 9m.g) derived from phytozome v7.0 (chr-ID scaffold_1; pos 42218536 to 42218743)
gattgggctaaggacgaagcttctctgtccactgggtactctcttttcgttatcaatgcacttctgttagccttagtgctcttcacatttaaaaacaacgacatggaaacataaaagaaaaaatagtgcctgttttgggtcgtttatttttctttttacattattgtttgatttgagatcactctattttctccactttgcaggtctg

SEQ ID NO: 73164 - DNA, 480 bp, Prunus persica
  Intron number 3 from transcript ppa015319m (locus ppa01531 9m.g) derived from phytozome v7.0 (chr-ID scaffold_1; pos 42218774 to 42219253)
agcgaggagtctttgagtatctggttggttatgctcctgtcttccagaacatatgcaattttaaaattcttatatcttaatatgtcatgtcatatttatattacttttggacagtttatgggtgaaaaatgacaatgagaagcaaaagaaacaatattaactatgaaatgaaataggatgccatccatttccttcaattagagcagaataataccataccagcaatgtttctgttttgcttccacataactcgcctcaatatctctgcaaaaggtttctcttatctgtgctttttgtcacaatcaaatgtgtaatgctttgcaactttttccaagactgaagcttgattattgcattacttttagctcatctttttctgttgttaatgatcaaagaattgcttgtttggagtatcgacagttaactatattaccttcaactgcagtccatctctctttggcgtgactacttagattttgt

SEQ ID NO: 73165 - DNA, 516 bp, Prunus persica
  Intron number 2 from transcript ppa003035m (locus ppa00303 5m.g) derived from phytozome v7.0 (chr-ID scaffold_6; pos 19224855 to 19225370)
aagttcaacagcgtgacccttcggtgtcgtccaaggtatgattttccagttttcatggatttcattatgcatttgagttctgatatgaatgagttttttgagttatgcattttgtttttggtttttttggtttattatagttggttactgagaattcaataaaattgggttataaacaaacaagtcctgagatttcatctcctggaattctcttgggtgcataactggtgagcttttctacatttggaaaattgccccatttccgttggctaaaccttttaagtggtgacctcacatatattgaattcttgaatctaatattcttttccaacctagtgaatttcatttataaattgaactgaactactgaattcataaacctttcatggaaaagtgtggccggaaacttgagcaaaaaaatttaagcatagaaactgtggagggttgttatatgattattagtttatgtctgtgtttgcagattcaatcaaaagcagcttttggtgttgggtcaag

SEQ ID NO: 73166 - DNA, 186 bp, Prunus persica
  Intron number 1 from transcript ppa016466m (locus ppa01646 6m.g) derived from phytozome v7.0 (chr-ID scaffold_8; pos 17155476 to 17155661 reverse strand)
gatcttcaccccttcattaagaagagacttcaaaggtaaaactctgctcactcaaactcaactaagaacatattgctttgtttattatatttcaatcaatctaatgatttttaaaaaaaatggagtttgatataccaagttacctgcctagttcagtcaagatgttcttttctttggcttgcagat

SEQ ID NO: 73167 - DNA, 989 bp, Prunus persica
  Intron number 2 from transcript ppa019925m (locus ppa01992 5m.g) derived from phytozome v7.0 (chr-ID scaffold_2; pos 17556553 to 17557541 reverse strand)
taagcatctcttacctcgccagcgcaaaaaagaatgtgagtccttcagaattagacttgtctcctttaactgttgttttatcaagtttgatgcaaatgaaaacaaatatattgaatgaaatggtatcaatccccataaactgtactaaagattgtttagatgtcttctttggacattgaatagtattctaaggcattctgaacgatattgaatgactaaagaaaaaactaaggatttaggattttgttggcacttaaaatttgtaatttgtggactgtgattgtaccttccactttaggtgatggcacttatgagggatttgtacctctctgtgctcaagggtctgcttttcttgcctcttgcacacaagatgtacacttcatgtacttgtgtcattcctctttttgttaataaactttattactaatcaaaaaagtgatagctcgcttttctttgaaaccattttcttaagatgccagtatggaattgctttaccacagaatttggtacaaactgaaattggccaaaatatgtaacatacaggctgagctaagtttctgaacgttgcggtatatttgaagccttattatcctcgagtgaattaggctggtagtagttttgaaccccaaaagctcttttttacacaataatggcccttgcatcttttattacaatgctttcagactttgacaaatatgtccagaaattaaacagacattcaatttgtcattaaatatcggttaggaatttttcatgtagtgtccggactgaagcttcataataaggtgggataagctaaatggcaactcagcatcgaccatgacatcagaagagaaatatttatacttttcccatttttttaatccgaatgatttcgagtattacatagtttacgctcttgattgtatataatttgcatgtttcacatttttcatttcattttttttttaaaactttgcaatgggacttacaggcagaggtgatagttg

SEQ ID NO: 73168 - DNA, 572 bp, Prunus persica
  Intron number 1 from transcript ppa019925m (locus ppa01992 5m.g) derived from phytozome v7.0 (chr-ID scaffold_2; pos 17557635 to 17558206 reverse strand)
tcacctgcctcgtctctgtgaaacctgctgttattgtaatctatctttccctgcttcttctctcagctctttgttttctcaatttgtgcttttcatttcttctgtttggttgctgagaaaaattagaaatgggtagtttctgccccaaaagtgggaaattttgaggaagggaataggacactttttgggttggcttcaattgaattcaattttgatcgtttcttaatctgggtttgactaaacggagctgtatgtatgcctgcttggcttagtcccattgtattagtttgtctggttgagactttcatcttatgcaaggcaaagcaagatgcttttttggacccaatttcagaagttattaactttgttaacaaattaccacccatttgctcactgatgttcaacttgtatttgaattgacctctgttccaattgttcttttatttctgataaaagaaaaggctggtgaacttcaggttaattttctttttgtttttgttcattgtcttggaaatctaacaaatgtaatgatgttttgttcatgaatctgcagaatttctttgcaggatttc

SEQ ID NO: 73169 - DNA, 1016 bp, Prunus persica
  Intron number 1 from transcript ppa003488m (locus ppa00348 8m.g) derived from phytozome v7.0 (chr-ID scaffold_1; pos 40808335 to 40809350 reverse strand)
aagcaatttctgagtaagtgcttaaaaccccttccatttccatatgattgccttttcttatagatatattaagataggaaacttcaatatctgaaagataatttggtgttattgggacttgggaagtagaatgatagaggttgagtttaaagtaatataacggttaagtgttaagcggtgatggctaaagaaagggtgccaattggtttcaaaattcaagggatggaagagacattagatgacttcggtcgacttggtgatattagtgatggaaagacaagctttgcttgatgtagtgttctacagataagaagcttgaaagacaataatatcttgcagtccaggtggttggctaatgtatggacaactgtgaattatgccctgagccgtttttcaacaggttacttctaggtggtaaatgacagatgaatttgctttcttacaataggaggaagttgattcataggagagaatgttactagatttaagagcagaggttctcattgagttgcttctccatttttctttgtggtttttgcaaattcttattcaaaacttggaaaggttccttatgatccctttggatccatcccttcactacctaagtaaacaaagcctgcaggcagcacatcgggctgcaaatgagccaagctggcccttgcttttggttggttaggctcagctgttgagatttttgctgaggttaagcctgacatgagcttgaacctctggctcagacttggcatgttagcaaaagattgaggatttacggtatcttttaataggggagtcaggggtgcgaacataaaatgtttattcatgaagtatttataactgtatattcaaatgaattaattctttcttttgcagcaaagctgtctaactaactgaaatacctcaattgacattcataaacaaatgtttattaaaagactggctccatgtttcaactttccattgattctgatattttttacaacttcgttgattatgagttttctttcctgcagttgcgg

SEQ ID NO: 73170 - DNA, 822 bp, Prunus persica
  Intron number 1 from transcript ppa011164m (locus ppa01116 4m.g) derived from phytozome v7.0 (chr-ID scaffold_2; pos 3194561 to 3195382 reverse strand)
tgctcctgacaaagaggtgacctctctctctctctctctctctctctctctctctctctctctcttctaggtgtaggtataatattgttaatgggttttcatcttgatgatggttatgtttatttttggtgacttaaacttgacaaaaaataataatggggctaatgggtagcaaaagctttccatttaacccagaaatgttataggttttgggagtaatggggctagttgggaataccagattacagggtttaatttcggagtaaacagaggtactaatttaggattgtgtatttcaacttggtcatttttttagtaattattttacttctaactatgtttgaggtctgaagacactaaacaagcaaatataaaatgtatgtgggagtaggatgtgcaacatcttatttcaaaacagttgagccccaatgttccgagctttgatgtccgcatccttcttcagtacaccactgtgatctttctcatgccaaaaacaaaacctggaatattttatacccataaacagatttccagaaaaaaccaatttcttacttcggaagatcataagccagaatgggatagaaatttgattgagtctcaattcaattgttttttttttttttcattcttttggctgttgtgcaattctgtttcttctaccctcaattaagtatagttggtttttaaggtaattgccaagtttatcagtaacactatgtacagtatagttagttgcattaaacttgacagaaaataataactaaataaatatacactgatgtttttcttgtggcatgaataggttggaaaggtcagcgtgga

SEQ ID NO: 73171 - DNA, 896 bp, Prunus persica
  Intron number 1 from transcript ppa006878m (locus ppa00687 8m.g) derived from phytozome v7.0 (chr-ID scaffold_5; pos 3502839 to 3503734)
aaaaaatttcccacgtcggttgcatacaagattgactttacattcttggaaagcttgacattgtagaaattacacatgaacttatacattaatttcaatttgtcaccttaaagaaaattttaagagaaatgtcatcttaaattttcaaaattcatgatttgtcatctatctttaacacaatccaatttttcatccatttttaagggtattttagtttttccattttcaaagaaaaaaaaagagagaaaaaagaaaccctaaatacgtcacacattatcccccctccccttcttctttctctttctctttgagcatgtataaattttaaaaaagaaaaaagaagaagaagaaagtggacttggtttgggtggaataagagaatttgtttgtggagggtaggtattctatggtagagagagaaggcagaaggggaagagggaagggggaatagatttcaaggtggcatggttggttggagccatcggtgtcacattggggacgaggaggtgataatttttttttttttcaattttaattgtttaaaagatatacaattttagttataatgattttttcatttttaaatttttttaaaaataaaaagattaaaatactcttaaaatatatagaaaattggaaaatgttaaactcaaataacaaatcctgtattttgaaaaattaagatgatatgtcttttaaatttttcttgaatgtcacaaattaaaattgaaattgaggtataaattcatttcttagaaaattccatttgtgggtccgcatcaacgtgccggcagcggcgtccgtccgcaaatagcttccaccagaaaaaacaacctcaccgcatcaataatacaatacgagacgtacacatacctcctctttctctctctctctct

SEQ ID NO: 73172 - DNA, 512 bp, Prunus persica
  Intron number 1 from transcript ppa013161m (locus ppa01316 1m.g) derived from phytozome v7.0 (chr-ID scaffold_1; pos 32946261 to 32946772)
agcagctccataagggaaacgagaacaagaaactggtatttcaaatctccaatcacacttgtatatctttttctttgcttacagaaaattcaatcttagtctccaggaagattgactggctttcattctgagttctgtgatgatatattgcctttgtattctacgatcagctttcattctgagttattgaatggggattttttgattttcttgttcaccatttgaatttgtttgtgcctagaaatttagttcaaaattttaaaatcaagagcaaaaattgggtttattgcagcccttacatttcaaaatagaaagaattttgtccgactctagataggggctttgtaatttgcaaatggcttaaaaacctaggtgtacggttgtgtcctccgctccgtttaacattttggttgtcgaagtggttttatactttgattaactaattaaatacattaatttggtgtcttaatttaataggtggtggtggatttcacggcttcgtggtgtggacc

SEQ ID NO: 73173 - DNA, 642 bp, Prunus persica
  Intron number 1 from transcript ppa026741m (locus ppa02674 1m.g) derived from phytozome v7.0 (chr-ID scaffold_8; pos 14082357 to 14082998)
ccatccaaggtccaatctccctgtttctctctcaggtatgtttatggttttgcttgtaaaccgagtatgtgactgttttgtttacacatggttttgcagagcaataggggaagactaccaaaggacaaggaaaagctgtttagcaagaaatattcatgtctcactcagtcacagatcactaaaagcattgtgagaaacactacgctctcttctgtttttctttctttctttgttttcatgggttctatttatacatatttgtattgggtttttgtttttatttttgatttcttctattttgaactgtatggagtttgaaattattgaatctgcatagaaattaatcttactcttttcaagttttaagctttggttttttttttttcctgggaaacccaatagcctaattaaatttctttacttgtttgtaagcatcttttctcttcaaaataatgaactgaatttttttttttaaatcttgaatacaggtagtcagtgctaatccaaagatgcctgaaaggtcagtgagtatatttaatttactttttaatctgttttttttttacttttagtataattgtttgatataattagaaagtgacactagaccatccctcaatctttttaccaatagtcgtaaat

SEQ ID NO: 73174 - DNA, 876 bp, Prunus persica
  Intron number 2 from transcript ppa002026m (locus ppa00202 6m.g) derived from phytozome v7.0 (chr-ID scaffold_7; pos 18957529 to 18958404)
aactggaattgtgcttgttgtttgtcctttaataggtgaattagatgtataaatacatttagtgttcgaaaaatcggcctaggcgctaggcgtgggcgggttggtttttttatataaattttttttcctgactttaaacctcatgttgcctctctcctctgagccgttgagagagagagagagagagagtttgagtccgataccgagagagagagggatatggagtggaggaagagttagacttggaggcctagcctttcatttcaagtattttcgttgtagtactattatatgctttatgctcaacttttttctcatgttttatatcacttatggtaatttataatttatatatccttttattttgcatgattttggtataaatttataatttataatacaaaataattaaaaagaaaagaaacgcctaggccccgattactcctctaggcgctaggcccttcagaaaactttgctgaagggcttctgatggggccctactttgtgctgcttgagcttcttcacttagcctttggctatgaaccttatccagggttttataaaagtgtgaatgcaaagattgatgctgatatcacagagtggaaggtggccaagaaccaaaagaaactctcttaattatctgagatgaattgagatgaatgtactggttattttagtattaaaattttgtcaaatctctttagtttatgaactttggttattttgtatgaaaattttgtcaaatcactatactgcctagcaatttttcgaacactgataatttttgatgttttacatgttttaacaaatgaaaatactttgtgtaaatgcttggacttggctctaagtttgttatgcattctgtgtgcagctttg

SEQ ID NO: 73175 - DNA, 707 bp, Prunus persica
  Intron number 3 from transcript ppa014202m (locus ppa01420 2m.g) derived from phytozome v7.0 (chr-ID scaffold_1; pos 10305741 to 10306447)
tccgcgctcaggttcatcttctttctatcatttcaatactattatgataaatatttgtgtttttttgggcatgttgcaagtgtatatgccaataggaatgtagaatgattgtgggtatatatcttgttgtctattcgttaagtttaatctcgtagaatgattgtagactgcacttctcaacctgaatttgaggaaaataacatacaaatcattcaagtttgatgcgtatctctgcgcgcaatatccaaaagttcctatgctaaaaaatcaccaattttgtttcagcaatcagtttcttcattacattagaaaacagttgcaattacatcgtcagaatttgttcaaccactctggattcacctctaattcgagtatgccatttaccaaatcgactatcagaagggccaagtaaacacaaacatatgctgggatccataatcaaaccgaaaaccccaaatagtacacacaagcatctaaacttttgtaaacatagttgtcttaagattttccttgcttctaataaagtttagattacgaggtgtcggttatttaggtttttgaataattctttaatgactatgtggtgctcttttttttgagttcataaatttgcactttgggagcccattgattccagttctgattatttgtattctttcttttatttttcagggagaggctgacagtggtctggaccgtctctggca

SEQ ID NO: 73176 - DNA, 536 bp, Prunus persica
  Intron number 1 from transcript ppa017525m (locus ppa01752 5m.g) derived from phytozome v7.0 (chr-ID scaffold_9; pos 950395 to 950930)
cagtggggccaagtaacgttccattccaaatcaaagtgagagtgaaagaaatagaatatcactcctaaagtgtgtgagtgagacaaagtgtggagagattatagtctgatgtttgcaatttctcattcgtctacattaagccttgagcattagcttggtaagatctttcttgttgaaccatattaattccttggtctccttcgttttatttcttgcttatattgtgtggttgaaatttaaatttcttaagtttttggctcaacaagtagtaccttgagtttctggatttttttggcctcaacaagtgatttcagttctattagaacatacaagggagtcccggagttgagggtgaacgctaaaaaggtgtaaagtgatcttaatagttagtgccctaatcagtttgtgcaggttatagggtcaatagcaaggcggactgcatcaacacaagaagaacaacataacattccaatcaagggggacattacttatttgttgcaggatcagattagccccttgccagacgaaattttaat

SEQ ID NO: 73177 - DNA, 911 bp, Prunus persica
  Intron number 1 from transcript ppa013580m (locus ppa01357 0m.g) derived from phytozome v7.0 (chr-ID scaffold_5; pos 16511769 to 16512679)
cagatccgatccaaagtccgcaaagcacaacacaggttagcctgcctctctctcgctctcttgtttgtttctcgagaaaatgtaggaattcaaattatcaaagtcatctgaacttagcgaaacggaattctgggcttagaatttactctagattttgtggatctgtgtcgtagccctggttttaattacatatattgaacattggggtttacacttgtgcttttactatggagtcgcctcttcttattcttcttgtcgaatcttactgttattaatttttggtggtttattatgatttagtgtgttggtgtttgcatggtttgaaatttcaagtacatattatttctatgaatttacaatgtgtgggggttttttgcctctttgcttggtccctcgcttgaacttttcagattgcagatgtgtgagttttcttaagctatctaattgcaatatattgaatcgcatctgttgttactgttttcaagtcaaatttaagtcaaattctgcactctgagttcaagttaaatttggctgtgacatggggatttcatgtgacatgggtaatattgggttcttagttcttactcacttttaaccatttttttttttgttttaatttaaaataaattgaggcacatgtaaggtgtagtctttttcccccattgtatactgttgtggtgttgattctggagagatggattgtggcttaagagcacataatgtatcaaactcggaacttgattacaagattagaacagtttaatgtgtgatggcgttttcatgcttctacttgtgattcattcaatgctgaagacttttagttgaaattgttttagtttcattcctttttggtttatttataaattggttagaaatatttgtgcaggattcattcactctagacgaaaaac

SEQ ID NO: 73178 - DNA, 429 bp, Prunus persica
  Intron number 1 from transcript ppa002353m (locus ppa00235 3m.g) derived from phytozome v7.0 (chr-ID scaffold_1; pos 31335616 to 31336044)
atctccagtgagttaacgtttccaattcaatcgtgcatgtcttttgtttgatttggttgcttattgtctctacttttttttctttttttttttttttctgtttatgcaatatcttctatacgtaatttgacattgaatgttataagtgatcttctatatgcaaactctccgtcgagataattgttctgcataaaaatatttcgttctgttaactataaaaaaaatgggtctcgtgagagcaaaagagattgccattaggatagatcattatgaaaatgttttgcgtctttttatcaaaatacttgggtgatctgggagctcatttgtgataataactttctattctaactcaatattcccttgaactgatgctatattcctttatttcatttaggtaccaaataggcctacgttatactggtggtgctc

SEQ ID NO: 73179 - DNA, 367 bp, Prunus persica
  Intron number 1 from transcript ppa016926m (locus ppa01692 6m.g) derived from phytozome v7.0 (chr-ID scaffold_8; pos 15482234 to 15482600)
gtcttggatcaaacccaacttgtttctgctatcaggttttgctttgcttttcttttctagtactagtatgtattatataatgcgattttgattgtgggttcaaatttaggaagctgagttcttggttttttcttttgggttgtcagatatgtttatgcgttttactctgtctgaaacatagtctgtctgtttaagaccattccatttgatctttctgttttgcttttcataaagacagaaaattggcatcaacttctgttttgcagtcaagatttttgctgagttaataaagtaaactaatttattcataattggcattaaattctgtaaagttccttgctttgttaacaactctgcagattctgtc

SEQ ID NO: 73180 - DNA, 998 bp, Prunus persica
  Intron number 1 from transcript ppa011498m (locus ppa01149 8m.g) derived from phytozome v7.0 (chr-ID scaffold_7; pos 4342326 to 4343323 reverse strand)
ttcttctctcgggcaaataagcaaacacttgtcaggtattgtgcatctctttcaatatatctttatctgcttcttggtttactagatgggtcttgctgaatttatagttgtaatatggttgtaatgtaggttctgtctgttaaggtcttatgatcgtgatcttttgttgttgttgttgttgttgtttttgttgttcaatatggattttggttaatggtacattggttttttcacagacaatcagttgctcttgaaatatttgattgtttggtcattttcttgttcaaattaaattttagaaaatttgcatattgggggcctggagtgaggagtttggattacattgtgatatctatcactgttagcggtaactcccaagtctaacaagcaaaaagtagtaataaaggttgatcatcatcactatagagcaatcaaaacgcttttatgaatttatataggagacgaggcggaaagtctttgtcctagtgtaagatttcggacttcatttggcttccgtttttgcctgagtttcaggatatatctctttctttgttgttgcagcttggaggaccgcatttgaataggcttcatcatggttttgtatttatgttggttgggtttttttaataggaaattatgtcttttctgtcgaatgtagtggactactcgtcaacaactttgtattcttacaaggctattagtaactttggtttaaaataaaatttaccatgaagcaagcaagaacccaacaatcaactatgacacaattggtgttccttgcatcaactttgttttgcaattagctgaacttatcaccattacttcatccaaaatctagaagaacctttattttttttaaacgttaaattgtaacttaaacaagtgtttgttagtaagattttgttttttgctcattgtaaatattgaatgtgttgagtacatttctggtttcccttcaatgattttattgttttaatgaaacagaaaaatattatctc

SEQ ID NO: 73181 - DNA, 601 bp, Prunus persica
  Intron number 1 from transcript ppa019414m (locus ppa01941 4m.g) derived from phytozome v7.0 (chr-ID scaffold_5; pos 18169532 to 18170132 reverse strand)
cccaacacctctaccaagctttacgtcagtggtcagtcagttctctctttcctaatctaatttcctttaacatattttgcagtataatgatgcacaaatgctattgggtttttattgttgacgatacatacaatagcgacattctctaatctttattctgtttacctgaattacaattctactcctgctgctctgtaaaagaaaagaagaagaagaagaagaaaaaacttgatttggactaggattagcctctgaaaactctgtccaatttacattgtaaagcaccatactttaggaggtctgtaggcttgatggacaatttatgcacttgggtcctcttggctaaccaacactcgtggagtcgtgtctaagaaatgaaaacaaggatccccacagttcaaactctacgttaatagaatgcatatttcgtatcaatgacggggcattgttcaatttctcatatggttctcaatattttctcaaaattgaagtttattgctctgtctacgactcttcagagttcagaggggaacaaaacatcacaattaatatgctttgtcatgcagggctttcatttcgtaccactgaggagagtttgcga

SEQ ID NO: 73182 - DNA, 380 bp, Prunus persica
  Intron number 1 from transcript ppa002943m (locus ppa00294 3m.g) derived from phytozome v7.0 (chr-ID scaffold_1; pos 46259537 to 46259916)
ataaccgaggaagatacagccaatctcttacaaaggtccctctttctcctctctcattgatttcaatgtttctgtgcttatgcgcgtgtatgtgtttttgtttctatttggaatgtttggattagcctcttcaggtccatctcatgtttcttgatgttttcttttctcggtcaagcatttgttgaattacccaaaaacaaaaaagaacaggctgacccctacttgtgtattggtttaattgggtttttgtattttgggctttctctggttttttttttaattgtaaaattttcttattgttttgatgttgggaattttttttggtggattggatttattgagtggttttgtattgttaatcaataggtaccaggcagcga

SEQ ID NO: 73183 - DNA, 579 bp, Prunus persica
  Intron number 2 from transcript ppa009729m (locus ppa00972 9m.g) derived from phytozome v7.0 (chr-ID scaffold_6; pos 8123934 to 8124512)
cgaaggggtcgtcaccttaagccaagaagacggtctcttcttatgcctacccttcattccccttatatctttgatattctaatcgaaatctgcttcttcttcttttcttctctcacttgggttttttatggtgtttccgattgttttattttatccttaacttgtttccattcttacattctctatgtctgagggaatgaaaatgtggaaaaaatgatgtgttggtggaagctttagcggattagaactgaattttagttctgcattattgggtagtgaataggttctttatcttaaatcattagtccaatgtatagattttcttgtttctaaatttgacttctctttgttgacaattatgaaaatgggggtagtcaactttttcaaagttgagtttatatttgatttagtttattgctgtttcaatgcttcctttaattgtgagtgagcggtcggaattccatgctcaaaagcgtaggtgtgaagatagtctgaactcataatttcaatggcatttgatggtgcaatgactgctcatcactgatcgtgttgtactgttcctagggcctacaactgtga

SEQ ID NO: 73184 - DNA, 573 bp, Prunus persica
  Intron number 1 from transcript ppa010506m (locus ppa01050 6m.g) derived from phytozome v7.0 (chr-ID scaffold_2; pos 17730913 to 17731485)
cactttcttctctctcgcgataacccaattacaaggtacaatcctttttcttattcgagttatcaattattcattcactaatttgtttacagcttcccattagagaatgctcataatctttaaacctcattcagagcctgaatcttaaagttttcttcttctttttcccctcttttgggtgcatttaaatttgggtttctttcgtttttcagttattaatccttgttggttttttgggtacttttagtttgcaatctaggcctcattcagtcaaatgcattgtcaaagcaatgtactttcaagtagaaaagtactgggttctggatcttaatgctttttagcgtctggggagtatctgctttgctctttcctacaagcttgcttgatttactgggcgctgcttcttacctgatactttttatattcttttgcaatttggaattccagtccccatcccaattgtccattttgacaaccttccataagcagctgttgaaattaaaagatcaaattgttaattgagaactgtggtattgtggatttggtgacaggaaaattagatttcaagtgtaa

SEQ ID NO: 73185 - DNA, 823 bp, Prunus persica
  Intron number 1 from transcript ppa015085m (locus ppa01508 5m.g) derived from phytozome v7.0 (chr-ID scaffold_3; pos 1905904 to 1906726 reverse strand)
acaaggtatccattaaactcacggaaatgtttcttagtttccttggctaacttctggaccaatatgtttggatggttgctctttgcaagcttcatgtcaattacttttttgtatgcatagtacatctttgatggtttttctttgattgtgtttccttttttgctttcacatctttcttattctataacatgcattttacatgtcaacttttatctttcttaatatctttgcatctatgccatacacacatagatcatagatgcatgctttgcctatgcacaaatgcatgccaatggaagttgcaaagtgcaaaacttgtgtataagcgtagatatgtattttcttcacttcgtcacaactaatcaaaaaaacaaggcatcttttttcactcagtgctttactgattgcaattcaaatgcatcttacgcataagctatttatgcatgtacaagaattatctgaagcttaatagaactagttatttggagggttgaggttctccccaatttctcaattatgagaagtctttactgcgaggcctacctcgcttgtttaaaagcctttgtcctacaatgcactgctgttgtagcaaatatttccttcttttactcagaagattgacatattatgagggtagcattctcccctgggtttctttctagctctcatcctattgatgcttgaatgagcttcaattcacaacagatattggggtagtttctgtgatgtttttatgttgttacattatattgggactttgctctctctctctctctctctctccctccaactcattacttttatcagtggaccagtattgatt

SEQ ID NO: 73186 - DNA, 706 bp, Prunus persica
  Intron number 1 from transcript ppa006521m (locus ppa00652 1m.g) derived from phytozome v7.0 (chr-ID scaffold_1; pos 37574889 to 37575594)
gcaccgctacaatctcaagcgcaaggtaccgtccatttttcatcttctttcatctgcgtatatatcatttctagggttgtagtttgattgtttttgttcaatttgttgattattcccccaatttgctgctggtttaagataggaaaagcaagggatttgatcccagacgatggaataagaaaacgaattccaattttctggggcaaatatgtttcgttaggcgttttagtttctttctttttttattggatttcaaacagatattggaaatctttattgctggtttaagtttggtcctgctgatgtcttttggatgcttcattgtttaagatgccaatctttggattctaagattttggtctatgagcaaatatcagtttatgaaggcatggcttataaagctgagctgaagttgtctttaaatccacttttgcccacatgggggattatagattctgtcttctattttggtttgcgattaattaatttgacattggctacaaatagtgtcgtctagttagtactcacttgatgaaattcttttattgaatgttgttgtatatcatggcatgctgttgttgctttgtagcgcagcatcgtgttcgcttacattattacatacatgtttgattatctctaataaattctgaagtattctttaaaataatcaggtagccggtgttcccggggtgacagaaacattatt

SEQ ID NO: 73187 - DNA, 905 bp, Prunus persica
  Intron number 1 from transcript ppa002697m (locus ppa00269 7m.g) derived from phytozome v7.0 (chr-ID scaffold_8; pos 1810065 to 1810969 reverse strand)
attgagcccagacaccgactatcttcttcagctaagtcagtctctctctctctctctctgagttttttctcactttttttaagtgtaatttgacttcattttaatttgagcgtttgatttttggtaccacaattaggaccaaaaaaaaaaccttatgtgagaaaagcctcattcataaacagtcttaagctacgcggtttaattccagtgcatctctgcttctgttggttcatgattttggcactcattttttttcatttaccaatttcactagatgggttggtttccttcttcattatatatgtatacgcatacagatcaaggcttttaaacttggggggaatttttttgttcgcgcttaatttgggtcatgattcatgaatatggatgagtagcaggagttgaaagaggttttattctgaatttgaacttgtcttggttaagtgaggtgtcatgctaataatttggccacaatttacactgtttgaaaagggcatgacaaaatcttgagcaacatgttcaaattgtgcggcttgtacagggtcaatggtcatggttcattttgatatcagattcttgggctcttgctaatgtaaattttgcaaataatctgagcgcttttatttgtaatgtgctgagtggtatgtagaacattcatctatgtgctgtttccacatttgaatgtgcaatgcatttctgatgatggagtcgattgcagggcagttgcctgtctttcgagtggaacttgtttccaatcacgtatttagtgctctatctagttttttccattccatttgttgttctttgcactttgtttcacttgcgatgcagacacgtgcttatgttgtagtgaatccatttttgtttcagtgaagactctaacaaaagaaggccccagagaaata

SEQ ID NO: 73188 - DNA, 473 bp, Prunus persica
  Intron number 1 from transcript ppa019791m (locus ppa01979 1m.g) derived from phytozome v7.0 (chr-ID scaffold_9; pos 319879 to 320351 reverse strand)
tacaaggcagctcccttgctcttatacttgtcgtggttttggtcgctggcttatagtgaaataaaagtctccaactttattattattattaggtatgtgcggttatacccaaaaaaccaaaaatcggcggtttctgaccctttgttccgggcggtaaaccgctatgatcggaaagtcaacggtggtccggtttttattaccgagccgaagcgtctcagacacggaagcagtatcaaatttccccaaaccgccggttaccgaccgaaccgatatatgtatattatttattaattattatttaaattacacatgttagaatttgattggttataatggagagttctatgggattatactagaaccggctacacataatcacctgaactcttcttcttcgccaaacccttcgatctctatctcattttcaactcattttagccaaacccttcaaaccctctcctctccggtcgttc

SEQ ID NO: 73189 - DNA, 571 bp, Prunus persica
  Intron number 1 from transcript ppa020954m (locus ppa02095 4m.g) derived from phytozome v7.0 (chr-ID scaffold_2; pos 4181766 to 4182336 reverse strand)
cctggggtagaaattgatcgatctaccttatggaagagagctagacaggacaaacatggtaacatccctgatccaaaggtggcagagaaagcaaaattaattgtaagcctactatcactctgttttaaatttttattaaactgtgaattattcttattacgtcgtatgttatatttttcgtcgtgtgaatgatattaccacgtcgagaagtttttaaaaacgtcgttaaaggtctaaataggaatcactactatgttttctgtaattatagcataagacgtcggtggttcattttggcgtcgtttgaatgatattaccacgtcgaaacttttttaaaaacgtcgttaacggtctaaataggaatcactactctgttttctttaattatagcataagacgtcggttgtttattcatttcgtcgttttaaataaataaccacgtcggtataactaccgtcgtgataagttataataacgtcggtttatacgttattgcgtcgtgtgaaattatataatacgtcgtttgtacataaataaccgtcgtgtgtttttttgtttatctttttttagg

SEQ ID NO: 73190 - DNA, 979 bp, Prunus persica
  Intron number 1 from transcript ppb021533m (locus ppb02153 3m.g) derived from phytozome v7.0 (chr-ID scaffold_4; pos 28926163 to 28927141 reverse strand)
gtctacgaactcttattggtgaactctacacaacggtgccactcaattccctaaaatccttctaaatcaaaaagtgactaaagtgcccgtactgaaggaaacatgcttctaatgcttaggaaatgaactttagctacaacctatacaacaaaacattctaaaaggcgaattcattttgtttataaattatactagttgagctaaacctcattttaaaccaagtatcttagcctagtctctttgaacacaaatagaaaagggaaaaagggaatagtgttagaaatatgcccttaaagccaactaattatgtaatagttagagttaaggacatctttgataagagatatattatgttatcaatggacatctttgatatgacatactaggtgatttatactatcaaagtttggttgtaaagtttttagaaatctctacacaacaccattcccacaatattttcagatatacttgttcatagtaaaaataaaaatgaacataggaaacacctataaattattttgaaagaatttatcgataatggtatagtcataagtaggagtaaagtagagcttgaaaaagaagacatataatttttaggtatgtatattaagtcaggaactatacatttacaagagcacatagctaaaaaagtgttagaatttccagaaaaactagaggataaaaagcaattgcaagcatttttagttttatgaaattatgctagaagttttatccctgatttaagaagaaagattgcatcattgcatagtaaaactagtaaaataggtcaaaaatattttaatagtgaagatattaaattagttcaacgcatcaaacaatatataactcaacttaaacctttagcattaccattagataataattacaaaatagttgagatagatgcatcatcaataggatgggcatgaattttatatcaaaagaaacataaagaagaaccaaaatctgaagaaaaagt

SEQ ID NO: 73191 - DNA, 707 bp, Prunus persica
  Intron number 1 from transcript ppa001261m (locus ppa00126 1m.g) derived from phytozome v7.0 (chr-ID scaffold_2; pos 24854830 to 24855536)
aaacgtttcgctttttacagctcccgatttctgaggtcagtagcgggcgtacatttatctaattctatttcttttaaaatgtttgctccaatttttttcccactagttaattaatcgttttggttaattatattatgctctgatcgatctctggactgcaaaaagctcactctttttctttgttagctgtctttcaaatttcgttgctgcggcgtttcgatcttcttcttcttctgcttaattaagacttctactagtgttattttgtttgcggattgttatagttatagttttttcttcaaatcgagctactttgggttcgatctttgtctatgattctcactctctttgataaaaattaagctaaacctgtctcccttcctttatttttatttttatttaaaaaatttcggttcagttgaactgagttgcgtttagatcctctataaatgatggcttcacggctcataagcttatgacattgtctaatgggtagctcggttaaaaattagggttttgtggggctaactagaagattaacactttcgaaccccagggcttgggtttgggtctatttctttgatagttgttagtctttacttcacttatctggttaatattagtttggaatttagtttagtttctgtttttaattttctcgttctactgctgatagtgttgtttcctcttgtttatcttagatcccc

SEQ ID NO: 73192 - DNA, 282 bp, Prunus persica
  Intron number 3 from transcript ppa023382m (locus ppa02338 2m.g) derived from phytozome v7.0 (chr-ID scaffold_7; pos 14741565 to 14741846)
tgaagggattgaggagaaaattggtatttgcttgggtaagtacatatcatgctcttgttcttctaatgcttttattcatttccagaataatatattggtaatttgttcaaagttttgaggtttttttcttttttgaggatattttttctattgagaggtatgataatgtaataaactcacacacacacactacactagtaggtcctttgcggctttcgagatttttatgtgtgatgttctgaccctttttttttttttttttttgggtaaggatcaagctga

SEQ ID NO: 73193 - DNA, 805 bp, Prunus persica
  Intron number 4 from transcript ppa002160m (locus ppa00216 0m.g) derived from phytozome v7.0 (chr-ID scaffold_1; pos 43589422 to 43590226 reverse strand)
atgtaagtagtatgtttaagttctatgctctttaatacttcaattcttggtcatgtcgtttttctttttatttggttttttgtttgttgtgctaagaaagaaaggttcttctctttgctttgaggttttgaaaatactagtcctgaaagaagtttgttcttcaaatgtgctaaaattcattattggttgcatggtacaaaggagaaacataatagagattgatatatagagttcgtcacctttttaaatgacagtacccaaattcaatgtgatatacttttattccatgatctccgtaaatcatgaaataaaatatttctattcaagatttatttatttattgaatgacgtccaattagtgaggagggaaaggcaaattggagagcgctcttctgatgaggaggtgaagagggctgtttttctacttagtaagaaggctctttggcccaatgggtttctcatggctttgttttgacaatgctgggatgtcatgaagtgagatttgggtttcaggagtaccttaaaatgggtgataattgcaataaccaatgagacgtttacttttttctttttctttctttctaaaaataaatgattaggcaagtgtggatgattctaggcctataagtttgctaaccaacttgtgaaagaattactcaaatacattaatattttcccatctatcatctaatttgtgtagttttggatatatcttctagaggccatcactgaaatacaatattctttctactatctatcatctattttaggtagttgcgaacatattgtctaaaggtacgaaact

SEQ ID NO: 73194 - DNA, 353 bp, Prunus persica
  Intron number 1 from transcript ppa024216m (locus ppa02421 6m.g) derived from phytozome v7.0 (chr-ID scaffold_1; pos 1941617 to 1941969 reverse strand)
cttcctcttgatcggagccacagccgctcttgtcggtgctctctctctctctacttttatttgtcaattcaaaagaaatctgctttatagactctcaaacgttttttttttctgaattctctcgcatgttgtatcggctcatgtgagaaagttgggctctaaagcatcttcattttcaaatttggttctgatttttctttagggaagtcaaagtctttctgggttatctgagatcgtgggtttaatcattgggtaattttattggagacagaaactgaaaatgtgaagttggtttggtgtgtaatgggttgcttgcaggaccaaaggatttgcctagaattgctagaacagca

SEQ ID NO: 73195 - DNA, 999 bp, Prunus persica
  Intron number 1 from transcript ppa007632m (locus ppa00763 2m.g) derived from phytozome v7.0 (chr-ID scaffold_2; pos 9284950 to 9285948)
caggacctgctattcccgatcaagctccttccgtaaattttccatctttttgctttcactttctattctccgtttcgttgctcataaaagtttttggttttttgggaaatggacaactccaactgagataagctacggttgggggtgtcggggaaatgaaaatccaatttatcttagtagggtaagctaggctttcttttgatttcttaaagtgggaactttaaagggacaagtcaacctgttgtttgaggtcagtttagtggcaaagatttcgcggtagagtgtgcttggtttctgggggagttgtggacaagacaaggaaaaatatggtttgttgtgggcccagtgaaaaatttagcaaaataatggccgaattatgagggtttcttttttgtttacccctgtggcatggatatcctcttgttggtcgtcaattatgaggaaaaacgaaagagtctctcagtatgttgagtggatgattttttgcctccaaatttcacttccaattggttcttgttcttacttccattttccttcttccaaccaatcttctcttatcacatatatctcactcctcccatcctgctataattcttatcaagttacacttgcattgctttgtgatccttttagttcttagaaactaaacaagcaattgactgtttctgtcataaatgataactttgtaaaacattttgagaaagtataaaatattcttttcaaaatgtgtgtatattattcggaaaaaaagtattttttttgttctcaatgaacccaaatttgtgtgttttacaaccatttctagaaattgcatattaggaaaagaagattttcatttatactgaaggttatcatgggcttgcattcaacataatgacaattcaattcgactaatctaagctgatgagatagctgtggtctaaacctcatgtttctttttttagtttttcctcttaacttttattttctgtccatatgtttcagataattcctaaccaa

SEQ ID NO: 73196 - DNA, 857 bp, Prunus persica
  Intron number 1 from transcript ppa015218m (locus ppa01521 8m.g) derived from phytozome v7.0 (chr-ID scaffold_1; pos 44860410 to 44861266 reverse strand)
tacaactggttttgcttccgtccgggaaagaacaggttaagttttttctatatgtttgaggttttaatatctttaatattgttgctgtggctttagaaaattttggccaggaaaattaggtttaggattgctttgttcttatctttttttaattccagagggggctggttttccatctttgtttcccttaaatgtggttgggtttttattttttatttttatttttatgggatttcttagttggagctgttattttaacaaatttttttaccggtagcattctaagtgattgttcatttttattgcgtccgaaagcaaaatttgattttgatcttaaaagcaaggaaaaccacttcaaaatacatttcttaacactttttgtggcatggagaaattgagagtttgtgtagagctgcttatttcttgtttgctttcaaggggtttttgaaacataaaggttttaggcattttatattaactcaaatgactattatttagttttgtgggtgtagtttgttgagttttagttattatgatgggatggcagacttcgacatagagtccctactcttaaacttggcctggtctaaatagactcgggaatgtgttttgttcccttctcttctctgttgctaaatttttcttttcaaccgttttcataaaagctagaacgacttgtgtatttgggtggattctcatgatacatggaaattaggttttgaaacttaaaagttcgatttctttctttttcatttctttgcaaagaaacagagaataaggcattttctcacttccacgttttctgttaaaataatgttgcagccagaagaatcagaggtactctcgagcctacatag

SEQ ID NO: 73197 - DNA, 398 bp, Prunus persica
  Intron number 1 from transcript ppa013886m (locus ppa01388 6m.g) derived from phytozome v7.0 (chr-ID scaffold_8; pos 639371 to 639768)
tggaatcgacatcttcttctctactcgtcacagaggtattttgagtcggttcttcttttctttgtagttgctgctgctgactgtatcttcttttcttcttttcttatggagactagtattttgttttatgcattgaataattagaacatgacggatgaaatatcaattttgctatttattatttttaatttatattattttaatctccgtatcgggacgtacctgtatcctagtttttgacgtatcggcttatcgtattgtatctgtaccggtaccgttgcaacatagataaacatacaaatttatgtttctatagagaagaaacaacaaagtcaaaatatttttcataacgttttgaagttgttctcaaaagcaaatctggtgccaaacaaaagaag

SEQ ID NO: 73198 - DNA, 360 bp, Prunus persica
  Intron number 3 from transcript ppa025097m (locus ppa02509 7m.g) derived from phytozome v7.0 (chr-ID scaffold_1; pos 5036231 to 5036590 reverse strand)
aggtacagtgctcatatgttctgtcttaattctaatttggtaacaactcacacctggtttcacatttatctcttgcttcttattttccattattctctctttctttttgtttttgtttttttctctaaactttttcttatacaatgtataaataacaatgtcaatttaaacctatgacttgtattttcactcccatgaaaatctttgaggaaagtcagttcaagagagttattcttaaacaacacaaaagtttgccaatgaatcatattgcatttcttttctatgatgaatattttccaaaactgtttcttccatttgatttcagtttgactgggaaggagatttaccgctgaattatcc

SEQ ID NO: 73199 - DNA, 808 bp, Prunus persica
  Intron number 3 from transcript ppa000903m (locus ppa00090 3m.g) derived from phytozome v7.0 (chr-ID scaffold_7; pos 9680942 to 9681749 reverse strand)
ctttggaggatagttactcaaagtacatcaccgaggtacttattgccagacttcacagctacactcgggccttttgaatgctttcaatcaaataaattttgaatggatttttattcttttccatgcttctccactttctgtttcttattgtcaaacttagttgaacgtagtggaagttaaaaatgatacaaaagcaaataacacagcatagactaagacattcttgctagcatacaggcaaacaacataaggatttctcttctggagagtagataggaatcaatgtttgaagataatttctaacgtgcatcttctttgagatttctgacaggtgttcttattacttttatatgttttttgagatcacaatggaaattctgagaccactgtgcttttttcgattcgtttatagaattgtgattgtgttgtgcgccatcatttccttaatccaatctcatttatgggctacacttcccattattatgccatttatttatgtttgatgaatcaaatagaagatttggacggactagctagctcttccctgattcttttgtatatctgtccaaattccgtaagatatgttttgttccattgcttttctgccaacctgtccctctgggactctctaattcgagagtggccctttgtcggagacatgtctattataaaatgttttggtggtgttgtggaaatacagaataacaaagataatgttaaacatattctcttgataaaggcccctatgattgcttacttatgttgtttttcttcaacctatatgtggtttattttcttggtgcacagc

SEQ ID NO: 73200 - DNA, 466 bp, Prunus persica
  Intron number 2 from transcript ppa000903m (locus ppa00090 3m.g) derived from phytozome v7.0 (chr-ID scaffold_7; pos 9681778 to 9682243 reverse strand)
gcctagagggccttgcccatttccttggtaactttaatttctttaatgtttaatactattttatcttgttctggtatatggattttggatactatatttggtatatatttggtatggtgttgtgtacgtagttatataaattttatttccattaaaaatcagtgctaaagaatagcacttctagtttgattctgttgccatttgggttagcagttggtgttctttctatggtacatggtagtctctgtaacacttatagaggttaatatttcttcttgtcaaacaaaaatcgggttggttaaattgatcactggaggggtttttttaatggtgaactagaagatgagttcattatatattttcatgacttattgttagtaagctttcatgaaaatggggttgaaaaagaataagatgtttcatgacattcttttctgaatattgcatgtgttttattgcagagcat

SEQ ID NO: 73201 - DNA, 910 bp, Prunus persica
  Intron number 3 from transcript ppa020101m (locus ppa02010 1m.g) derived from phytozome v7.0 (chr-ID scaffold_8; pos 7475236 to 7476145 reverse strand)
aagctcctaaagtaatgctgttgtttattttattgcatttgctttttctggtttccaaataaatgaatagaaaagaatacaaaagttggaaccttgcatattttaggccacagaagctttaacagaactttcagccaagttattaggaaagcctgtctggaatgagtttgagtgaggtggtgagtttgaaacggagatgtcgaaataaaattgtacaaggaatctcaaagattttctagccttcactagaatcacaaggagagcagaaattttcacaatgtggctgttgttctcagtagctatggaattttcagaggtgaatttgtgtggcatatcaattcattgtggtttattgagacaaaacagagtctcataaagaattttgaagttactttttaggacggttgtgatatattgttcatgttctcagatatgtggtagctttctggtaatacattcacaattatatggagacgcatttggtcgtaaaaccacattttaaaaactaacagatatgaaaacatgcctaaatcataggttatttgaaattgttctcgttgctcttttcgaattcaatttaaacatatgaaatggatgtaatttattcgttcagcttcagacttcttgttccagaaaatgccacataccacatctatgtacatagttccacggaatttttacacagaaacttttagttttttttctttttaaatgaaaatgaaatctatcgagttcccaagttagatatcacttaggtcctttcgggcatagtgctgacatttgtttcaacttttcattgtttaatgatcatgaggagctataaaatttgtttcatctatttgtgttccttgtttttccatttctgtacctgtcaggctcccactgtggccatactttaggctaatcattg

SEQ ID NO: 73202 - DNA, 898 bp, Prunus persica
  Intron number 2 from transcript ppa010995m (locus ppa01099 5m.g) derived from phytozome v7.0 (chr-ID scaffold_5; pos 3528016 to 3528913 reverse strand)
tcccactagaggcggtgttcgtggtggtcgagatcgtaagcgctctctctctagagagattcttttctttcatttgcttcagggaaaatagtgaacattatggtagaattgcaactcaaagattaggtttttgttgagattcatgtaggcagggagggaattttatttactttcaaaaaaaaattcccaccgatgggatacacagaagtgtatagttaactttttagttcttttaccgataatttcctctgattaatgcttacaaataattgcttctaaaatcctattcgtagctaaccatttggtcgttagtagaaatcatgaatttagtgacttggtgagaaagttgttcgtctattctagagaggtgcatggaaaaacttgaacatctgatgtgggacagaaagggaatttagggatcagaaaaacaggggaagtaagaaaggaaggtagagaagaaaaacaaaacatgggggcaataggattttaatgttcaacattcaatgttcaactccactcaattagcttggagtaaggcctcttgtataataggaagttgaatcacaacaagccaataaaacctacagtgaaaccctgataatagtagcgacataaaccctactagttaaagagatcgcaattgaaaattatgtgtactctaaatagtaggaagatcccaaaatggaaaaaaatgtatgtaattcttaataacataaacaaacccccagtagatgcctctatatgatctccatcacatatttgtttgtaaacctcatcgacatggtcaatgaacatagtgctcgtacatttaggtgcatccttatgcttggaggcttaataatctttttatgtctaatgaactttatgcttctcctttgatgtacagaatttagttggg

SEQ ID NO: 73203 - DNA, 599 bp, Prunus persica
  Intron number 1 from transcript ppa010995m (locus ppa01099 5m.g) derived from phytozome v7.0 (chr-ID scaffold_5; pos 3528990 to 3529588 reverse strand)
tgggttgcccaagcatcgagtggtttgttgccaaggtaaggatttttttcgctttgtttttttgggttcctgttgattgctatatggatttctcaatccctgcgattttgcacagaaattgaaggttttgttcttgggatccaatttttgggcgtgtttctctgaattgagtatcctattggcgcttcaatgttggttatatgaaattatttttctgccgtggtgagctttgatatggctatgcccttaggtttgtttgtggcgtcctttttgaaatagtggttgtgatttttgtcgattaactttcttcatgggtttgattttatttctactcaattgggttttgctgtcttactttgcttcttgatttaacctaattttctgtttggattgttgcaatttaatggggatgctttattttttgtttttccttggaattttctattccttctgctattgtttcgtggatagcctcatgatttggactggattttctgtttcattttctttttgtctgttgctcatattgggacatgctgatgttgtgttgattgctattgacagaatagcgtcttccgaaagatccatcgccaaacaac

SEQ ID NO: 73204 - DNA, 422 bp, Prunus persica
  Intron number 1 from transcript ppa013816m (locus ppa01381 6m.g) derived from phytozome v7.0 (chr-ID scaffold_6; pos 20250444 to 20250865)
cccgtaatctctctctctctctctctctctctctctctccggcgcgcagacatatacattcgcaattatgcgcttatttagtttttgatcttcaaagacctctttttatttatttttattttattttaaaattttgatctgatagcttaattgacattggagctatggttgcatattagggctttcgctattgttccttaggtttgggttttttatcttatgttttgttcaataaaattgattgatttggaaatgtgtgataatgagatgtaataaattttgggatctcatctacgcgttgtttgaatttgatggaatttcaaaccttgagacttatcttgatttgtaatatgaaattcaaagtttctatgtttttaatgtttttgaactgtgtttatctattttctatttctccttttcag

SEQ ID NO: 73205 - DNA, 747 bp, Prunus persica
  Intron number 3 from transcript ppa013816m (locus ppa01381 6m.g) derived from phytozome v7.0 (chr-ID scaffold_6; pos 20251219 to 20251965)
gggtatgattctgaacatcattagctcgctgttttcttttctgagaaagattggttagatttgcattgttgtttcatgtaataaacattggatagagtgttccagcatatttattgtcgatgatggattcgatcttagccattattttggttttcattgactattaatcagtatgtgtcatgaagaacagcactctaggtagttcagccaatggagggagcatgttttaattttttttcatgaccttagatgcattttggtaatctgaacaagaaccaatgctgtacctagagagtgtgatgcggccacaagttgattttgatactagaactggattttaaaaatcgatgggggtttgtgggcacaaggaaagatatgagttattccgttttgaaactgcttttccgaaagatgagtcggataagtaatatcatattggtgtatttaacctcaaacggttgataataatgctacagctgcatcttgggctggggctattaggctaaattattgttgatagcctaccatgtcttagaagtgtaggcactaaggttaaggtcttgcatcaattctggatggaagtttacattggattttaaaatctatgttttgaggatattgttatgttgaagcttaattattttgaattatacttgttaatgaggtttcgttttttattaagaagaattgcctggatttagtattgctcgaatatctgatatgtttttcattggtgttcaggtccga

SEQ ID NO: 73206 - DNA, 729 bp, Prunus persica
  Intron number 1 from transcript ppa007732m (locus ppa00773 2m.g) derived from phytozome v7.0 (chr-ID scaffold_1; pos 28489529 to 28490257 reverse strand)
agttcgaagagaacgctcaacaatttttcatatttgtaagttcgattgtttttccttttcatatgttagttgtttcttttcttcatttcaatgggaatttgattatttgtccatgtggtctgtgtggaaaatgaggaacctttgataacctggatatgctatcattctttggtaaaagttttcatttttatctgatgttttgtttaccacggtagagctggttgggttatatgggtttggatttttggggctggaataaaatttgtgttttggaattccttttgttgcatcaaatagggtgatttaacttgcacaatgatttgatatattcgtattttcataaatattttaattaaatctgtccacgaaatccatctaaaatgaattaatttttgtcatgtaccagtaatgttcaataaaattttgcccttttttgtgttgtaatctaatagtttttattgttaaatcatcaactgtataattcatacgcattaccaataaaaaaatttcatatgggttttatgttgcgtgttggttgaagaataatttggattctgaacatatagactcaaatctgtttcataagctacatgttgtgatgttgagaaaatttcttttctgggatttgttccacattcctctccatgtagatctaaaccttaattcttttaattatttgtttctgattagtgaaatcttttttggttggctgtcaacaggaagaactga

SEQ ID NO: 73207 - DNA, 1023 bp, Prunus persica
  Intron number 2 from transcript ppa013073m (locus ppa01307 3m.g) derived from phytozome v7.0 (chr-ID scaffold_4; pos 19367140 to 19368162 reverse strand)
gctcccagcaaggtcaattctgctgtaatcacctctctccctcgctctttctctctcaattacactctaattaatcattattcacttggaaggtttttcttgaattttgtggacttcaattatgtttcttcttcctttttgttttggtaattagctctgggaaatgttgtggaaattttgagctttgaattgtagtgccattgtgggttcatgtagcatttctaggtggaactaatgtggaagaactttggctttttgataagagagaaaattttaagctcatatgtaattctgaattttgtgggataatctgttattgtgtccaattttgcttgattattggtgatcccccttatctggactttggatcaatccagtctttgaagtaaactgattgataagtgtttttttttcttaatttttctcaattggcatttggatcaataacctatcccaatcccacacactcgacctctattctacctgtgccaagcccaggggttggttatataggtaaactgaaatctgaagaaactagatttgagtgtttcaagtaaccaatgtgctgatgaggacacaacttaaagatgatacatgcgaatgagaaagcctaataatttagttttccaattatgcaactcctgaaataatgtaaatagatattaaaatttaattgtaccctttcccaaatgggattacttatagtcatagctgcttcttgttctgaagtagtggtaacatgattcttctgcattgtttcatgactttatgctgatgtattagttatttcttcatggcctggaaactaggacatatttccactgaactcaatttgtcggaaataattttttggctttcttctatttatcaactgatgtgctcttgttcttctatgattttattgaactctacttacctctgcttcatgcaactaataaccatgctaactatatattgttgacaagatatctcgtcttataccaagctgcgcttgttatctgatgtgcttctgtggacagggtg

SEQ ID NO: 73208 - DNA, 724 bp, Prunus persica
  Intron number 1 from transcript ppa010138m (locus ppa01013 8m.g) derived from phytozome v7.0 (chr-ID scaffold_2; pos 20591516 to 20592239)
cctgtaagctaatatctataactccttctctcaaggtaccaattttttccttctatttctctgacattttcttgtttttcagcttccttatcaagtaaatcgatgaaaaatcttatctttagaattgggtgttggatgttttgttattttctgagatgggtattgattcaaatccatcgttttgtctataggtcgatgatttcgatttctgtaagtatagtttaggccccgttccttgctgcacaataatttgaaagataatagacaagtaatttgattcaagctaaaggctttgacagacgaatagaaagatcctagtaatctggtagaggctacaagaaatattgaaactaacatacgagcctccaaaaatttgatgagcttacatttactatcatgacaagaaaataatcatgtcacttacaatgcaggcagttgagatataaatttgtttattacagttgagctgattcggcacatgatgaacagcattctgatatgtaaaccaaaataatagagggccaataagtgtagattttgcatattcttttcagttggtaatttacaaaatctcaagtgccactagtagtttaatttcctttatcattcagtgaagatgcacaaagctgctgtattatttcctgcgtcgattagttttccatatacattctccgctttaccatttcactcttcttattctcttcaatgtttgacaaaaccagtg

SEQ ID NO: 73209 - DNA, 859 bp, Prunus persica
  Intron number 1 from transcript ppa022335m (locus ppa02233 5m.g) derived from phytozome v7.0 (chr-ID scaffold_8; pos 4306716 to 4307574 reverse strand)
tcgggattggctggaaaccttgctggtgtcttaccgtaagtaaacttttttaaaaacaaagccattggcgggaactacacttggtttcaaagtcatttcgtcaacttccttatacacatgtagattttatattttagtggctatcctgttctatgcctttgtgatcacgaaggccaaacctaacttttggccctagctatctgaaactttaaacaagataatgtaagaaagctttacatacattagtatattgtatccaagttcctaatatgaggattcatttgaatttggaaaccagctgcacattttcgtttaatacatgagttatctgactttagaaccaattgaaaaaagtttaaaaaaaccattatttcttaacattggtgtactgttgcgatattgtctcccttgcaggatgcattcttgttttctcttttttcctctttaagtaattttccttcatgaactgtgttctccctgcaagtaggtcaatgggagtttttgtctagtgtgcaagttggacttatctgtactatatattgctgttggcaactggcttctgtcaaaattttctcaatcccaaggattttgggcatttcttttcatgatccatggtaatcattctcgtagttaaatccaaatgcaagaaatttccagcggaaacaagcactccatcataggaaaatacagattttatgttgttccactggaacaaaatacagattttatcttggtacaattctgtcataggtttcagagttattttcattccagttttgttaagttgctatatatatatattttttaattgggtgtcttgctgatctttacagggcttctgccatatttgttggtgtat

SEQ ID NO: 73210 - DNA, 1066 bp, Prunus persica
  Intron number 1 from transcript ppa026496m (locus ppa02649 6m.g) derived from phytozome v7.0 (chr-ID scaffold_4; pos 8950132 to 8951197)
aatcagacggtctggctcgcatcaccaaccctcaggtactatgacgcttttgcttctttctgattctgtgtccgctagaacatgtatcttattgtggaccctcatatttgaactgcttcctctaaagcgttgctagttttgatgattcaattgaaatattcagcttagcgttcaagttgttggctaaaatgcccaagttgatgactttggtttggatactcataggtggtgcgcttgatttttaatttatttgtaaatgagaagtgggaaattaaaggaaacaaaaaagaaattagcttttctttatgaaaatattcaatgaattgaaaaactcgataatgcgagtgaaaatggaattataagtaagaaaagtaaagagatttggacgttttaccaatttgaaagatgttttaatgacattttgtggtgttgaaaaaaattcttgtatgagtatgccatgcttcaagatggcttgcacaaaagctccagtattcggctactagtttctcatcccacactttgcatgattgaggcttttacaaacagaactgaagtttgagaaaactgttggaatacaaaatgttgatgtcactagtttgatccggtaaacaagaggatgttgtacccaaaaaagttttgactctatcatcgtatagataaataaacttaaggacacgatatctcttctgtaggtatgtcttgtttgtgggaagttcggaaaaaaaaattacagttaagaatattctgtaaacttgtttcttcaattacattttcccttaaatggagcctcgagtgaagagcagagagccatgggcttgcttcttctcatagtgttccagacattgattgccttgctatttctgagggatggtttggttccatctctttgtgaattttgcagaggcatacaagtaactcatctcctgttgattcatcattttatgtttttgccctaaaccctaaccgtatatccttttgttgagtcagtttacaacacccttataattcagtttcttttgaaggaattgcagatattacattacttggacaacaggcgaaaggtgca

SEQ ID NO: 73211 - DNA, 956 bp, Prunus persica
  Intron number 1 from transcript ppa008653m (locus ppa00865 3m.g) derived from phytozome v7.0 (chr-ID scaffold_1; pos 11678622 to 11679577 reverse strand)
gctgaagtccgagctcaccatcagcagaagtacaggttgatttttcagcctctgcgttccacataattgtgtttgataaataatcttctttttcttcccattttgtttttgttttgtttttttttttcactctagttcttttctgggttttcatttatggtaatttgggtataattgtttctatcacttgagcttagtgttgcccatattgcaaattctaatgggaatgtaattgcaatttaccttattggccggcatgttcaaagttctaagcttttcgcttagtcatttactataattagactcttagagcatagatgtaggtgttttgtagagttgtcagcaacccctaagcatctacaaattaagtcaaaagtgttatataatgctaaattaagatgaaaaccaaactcgaattttcatttattgctctccgtatgtccaatgtcccaaaagattattcacataagatctcctatgagcctatacaattgcttatttattatgcttaaacagtgttcttctattcctccaaaatgttatcttttagtctctttcattatgatccaggtaagccctcaataagataaatgagataaaattccatgaactaaagctagctagttgtgattaaacttgtttgatccagctcatcaccgaagaagttctttctcgtttcttctgttatttagcgtagtgttatttggtatataagttaacacctgacagtattcttgtatatctcttagtatagaaggaaacttgattcaccattggtagtttttccaatgcttcagaatattctttgttgaaagtcagctcttgttttacagcaacaaaatatgtcaaaagaaattgtgacaactgctatttccaatgattcataaggcaacattcacctgagaaattacttttaaaaaatttgaatttctctggcatttgcaggaacatttctg

SEQ ID NO: 73212 - DNA, 883 bp, Prunus persica
  Intron number 3 from transcript ppa006552m (locus ppa00655 2m.g) derived from phytozome v7.0 (chr-ID scaffold_4; pos 4020179 to 4021061 reverse strand)
gcgctgcggcttcgacggcatcgaaacctgggtatgtttttatattgttgggattgcaaagtttcagttttttgctttttctttgcttgcttgtgagcttttgtttttggctaaacttgattctcatgcatcacaagttcacatttttgcacttatcaaacgtgtggtttttgcctgtaattcagtgttaagattcagtttcggtattgtaggctagcattagcatgacatttacaccttgtctgactttttatttccaattatttgttatcttcaattgtttaagagtaaaaatttaagcaattgtaaaatagggtctgtacatgacaagatgagaattacattttctactgtgcgtagatgcgaaaatttgcaatcttttacattgatgcttgagtctcgacatgcctgcaaaagaagtgtatttgttaggtccgcaatgacgacatgcattgttttttacaatttaggatactgtttagtataagaagctcataatttccttaattagataaaaatatgaatagttgacaatcatgctggatgtgtccttgtaggttgacttatattttgaattgaaatgtaatgaatttactttctttttttccctttccactgcatatggtcccctatgcataagcgggtgtatctttatcttgtgagttggcacaatatcgtgtgtgtgctatactccctgcacttatctttgcttgaaattgatgagtaggttatgaagtgatatatatatggccatgagaactacatctacaggatcatagtatggttatgttagttatttggttcctctgttactcattgagttgacaagataagcattctttccttaggcacgaacttctgctttttgaagccctacgtgaag

SEQ ID NO: 73213 - DNA, 384 bp, Prunus persica
  Intron number 1 from transcript ppa002530m (locus ppa00253 0m.g) derived from phytozome v7.0 (chr-ID scaffold_3; pos 20636096 to 20636479)
gtcgtaatataatataaccctatttcttcttgttttcctttttaaaggtttttattttcaggggtttatgaactaaattaatattttttagcataggttggatcatattcttgcttcagagggactctgtctggttgcagacgaatctcataacctcttttgtttttccacaaactcaaatttgtgaaatcgaacctcagtttctctgttttcacttttctgggtgacccaacggaatataaaaagtttgacttttttcaattgaaagtgttattttatttccaaagctatctttttaaaaaatatttttttataacccaaaatctgatttgcatattttctttttcagggttgtcagtaagtagaggaatcatcatagcagtg

SEQ ID NO: 73214 - DNA, 385 bp, Prunus persica
  Intron number 3 from transcript ppa011054m (locus ppa01105 4m.g) derived from phytozome v7.0 (chr-ID scaffold_7; pos 7761993 to 7762377)
atttgctcaagaaaatcaaggtatgctttattttctattcctttgtctcttttctccttcatcattatattcccttgctttttcctcaatctttccccattgagttttccatctatccactagagtttgacaattgtccttccttttaccacttggttttgaatatcaattaaaattctcttggaatatttcctcaccaattttcaacccaaattagatcaggttctagatgtcggaagatttcctttgttttacatgggtcctcttgtcatcaaaattacaaatctgttcatgaactttttgaacaatgtttgttcaagaaattaatgggattttgattgtttttacaggaatcttcatctctgagaaacataccagttgtgat

SEQ ID NO: 73215 - DNA, 211 bp, Prunus persica
  Intron number 4 from transcript ppa026691m (locus ppa02669 1m.g) derived from phytozome v7.0 (chr-ID scaffold_1; pos 34687567 to 34687777 reverse strand)
cgagaccggcagaaggaacaccaccaccagtacaggtgcttgctaatctttttaatcttggtcatgtccaaattaaggtttttcttgagttaatttctttatggttttgttttgattcttgaaagtcgggctttagtttctgttcttcaagttcagttcagactatggttttatatgaataatgggtaggagcacttattgcaggaaccag

SEQ ID NO: 73216 - DNA, 526 bp, Prunus persica
  Intron number 1 from transcript ppa009558m (locus ppa00955 8m.g) derived from phytozome v7.0 (chr-ID scaffold_1; pos 27358246 to 27358771 reverse strand)
cctccagcagaccttcgattccagcagctacggtacggaattttcaatttcctttgaaagctttggttgagtttgagattttgagctatcctccttgcacagttgcactctccctgctctctgtttttggcgagtgatcaataaattagttgacatagttatttattatttatttgtttgttcctggtttttgcccttattcatgtcctccgaaattcacgattcaattttgccggatgaatgttatatgatatctctctattaaaaatgttatagaaactcaactggattcaaacatgacctatgctctgtttttttgtgttctaccaattatcatttccaaaatttatacatgcaaatgaagagttgcaaaaacagagttatggatacaagttttgattgagtttgagacttgtggttattcagttgagttgagtgttggtctctgatctatttgatcacggttttgccctttctctattcttgttcagtgttggaggccaacccttggagagaaacttcgaag

SEQ ID NO: 73217 - DNA, 420 bp, Prunus persica
  Intron number 1 from transcript ppa016691m (locus ppa01669 1m.g) derived from phytozome v7.0 (chr-ID scaffold_1; pos 45142882 to 45143301 reverse strand)
accaacccagatcagtcaagtagtgctgttcaagcagtaagtgcagatgtctttgatattatattcaaacatgtccatttttgtttcttacactgttttgaatttttctaattacaatcaaaatctaatattgttatgaaattgaaatccagggaagccagccagggtatactagccctcgactcccggcaaacaacccagagcctactaaccctcaggttccgagaaataccattagaccaaaagctaatcggttgttttctgactaattttttgtttgtgtttcttaaagaaatctaacattgcaatgcaattataaaatccagggaaatgctgcaaacgcaaatgaagaagtggctgcaagaactacccagcaggaagctgacataagtagctggctgcccataactgctaatagga

SEQ ID NO: 73218 - DNA, 929 bp, Prunus persica
  Intron number 1 from transcript ppa001802m (locus ppa00180 2m.g) derived from phytozome v7.0 (chr-ID scaffold_2; pos 15655236 to 15656164)
gctatcaggtaattgcaattattggttttggctttgcttctgtcttttactcggaaagtaatgggatttgatggaaatttgaatcttttaatggtgggcagtgatttttttatttcaaagtatggggaaatggaaacttggcatataaggtgtagttgggttgttaaatttataaacttgttgaaaatggaggaagtgatcactctgatatgcttctacttttaatgttacaagtcaaagataattaaatataagttttgaatttgtcaaaattttagcaaatgtttgaaaatcttggattttgagtttaagatatacatgaatattgaatgacaattcggtttgttgcttctttctatacctggaacgtgcaagaggcttgagctagttctattacattggagagaattggtggaagatggacctgggtaatcttttattgatacgtttgttcttacttgagagacctgggaacaccaaagggagtgcgttgcaaattagaatgttaccttactcttggagttagtaggaacatgcagtattaacatgttctgtctgaagctactaatgctaaatgaaattagcattgtagatatttggcctactgtcttttccaacatatataaaatagaataaaaacctttgaaatcaccaaatgagatttagattctcttgcatgtttcccttcgctgctttctctttagtaaaactattacttgtcaaaaagtaaattgaggttagtaatcttacctttttgccgtgtcgttagtctgaaactgatgagttaatatgttgaatttatgagctgcaatacttcaactttgtgtttatgttaaataatttccagaatagaagaaaaaaatgtttccattaaccataaattttctattgcaggttaacataatagacacccctggtcacgttgattt

SEQ ID NO: 73219 - DNA, 586 bp, Prunus persica
  Intron number 1 from transcript ppa000705m (locus ppa00070 5m.g) derived from phytozome v7.0 (chr-ID scaffold_3; pos 19254081 to 19254666)
tcgggtgagcgaattattgtgtttattgtttgcatgtttgtagatggtgctcgtgcttttgtgggcgattgtttgcattttgtttttgttgttgttgttatgttctttccttggttggtggtatattaatataggaaaaaaacagaatcaaaatcttgtatgctgtgttttttactttttttaagactgtagaagactgaggctcccttcagttgaacctaatgtatctgtttggcttgttaaacatacttttctccttataaagagaaaaacaagcaagtaagtataggagtcaatttgcttgtctgccttcgccccttctcaagtttggtactgtgtggttagtgaattaatttgtctttggttgattaaaagaaactgaaccatttatgaaattggtagatctatcatggattatctatgtgcatattgtttcctttgttctctactctccttcattttgagttagtagttccttttttttcttctctttattgttaaataggaaaggtttcttaatgcattggttctctattgaatgattacaccaggcagcagtgcttttcagaagcttcaactcggcgac

SEQ ID NO: 73220 - DNA, 766 bp, Prunus persica
  Intron number 1 from transcript ppa000866m (locus ppa00086 6m.g) derived from phytozome v7.0 (chr-ID scaffold_4; pos 5864576 to 5865341)
atctccggcaccgattagctctcctactcctcctggtatggctgcgtgggggcccagagcggcttctccggtatctccagcatcgatcaactctcctactcctcgtgtggctgcgtgggggcccagagcggctgctcctgcatctccagccctgatcaattctcctactcctggtacgcttttttcttcttcattctgggccctttttgagatacaattggaacttgtgcaactgatcatatcatagactgtgagccaatgtttactttggagagtaagccgttgcattttgaatccctaattttgatttgatcaagttttactgttttgaattcatgatgtatttatcatgtgttgtgtattggatgtatataatgagattgtggtgataaatcatgtgtttattgcttacactaatttgctttaactaagagattattgtggtgataaatcaagcatttggttgattttactaagagactgtttaccttagataaacaatttgatttccagtctcattatgtgaaaaaactaagagttctgcataaatgtgttgagtggaatttatttttttgggttactatttaatgttagcttgttgctacagttagtttaaccatttgaatttacataaataatgaggcttggtgattataacacattttgtttgttcttttttcttcacagatactcttgttccccgagtgcaagctctggaaatttcgaaacagactcctccttcatcttctttggacaacacagacaa

SEQ ID NO: 73221 - DNA, 1021 bp, Prunus persica
  Intron number 3 from transcript ppa019506m (locus ppa01950 6m.g) derived from phytozome v7.0 (chr-ID scaffold_7; pos 6524431 to 6525451 reverse strand)
gttttctagatcaggtgattcgaggcactcttatgtaacatcttgtacaaggttatattactttctgctaagattttactcttttctcttattgtgttgcaactcaaaatgtacgatgaaatgggcttcaaggttgatcgtgccagccccatatgtaagtctctcgcctgaaagtattgttgaagttttgtattctgagtgtgtgtgtttgtttgattacagaagaagaaggagaggaaaattggatatctatttgttcatgctctgcttattagcagagagagtgttctcttctatatttatcgttcacacttgctctgtgcatatatctcaccgttatgcacagtagctcattacatcaaaaccgtagaaatgatctcagccattcatcatgctaaactaatggatcactctccacatgtcacttggacaaattataagaaaggccctacacttggtttaattaccaaagtgaatacacaattaactacaaggcatattttatgctaaactttaatcagctcacagcttatacactaacaagtattgggtacagttttattttttcttctccatcttcccctccctctaaatttattggaattgattgaacatcttgcattcatgttttggtaaaatacaagatgatgaaagtgctccatgggacatagagactaggctataattcttgggccgctgactgactagaaattgttgtacgtaggcttttcttgggtctcatgatattagaggcaccaactcttatcccagctttttaataccaactgatgaggcacataatatggtagtcgcttgctgtttgtaaatcaatgaggctcaaatttaaacaaatgaagtactagcacatcagtttgtatatgagttggtgtgcctaggattatatgtaaaattcattgataggaaggtattaaggagccattgcttaccaaattggttgtatatcattgaagtaggttgtgagatggttggtccagcttttggtggattattgcctcaaaga

SEQ ID NO: 73222 - DNA, 755 bp, Prunus persica
  Intron number 1 from transcript ppa001489m (locus ppa00148 9m.g) derived from phytozome v7.0 (chr-ID scaffold_6; pos 22727547 to 22728301)
cagcttttctctctccttaccttgcctaccacgaggtaaatataatacaaatctatatatgttacatctgttgtttgtcattggctttgcttttgaagcaactccatatgtttgcatcattttaatatggatcctaaattcttacatgcgatgagggcaaagttttcatgatatgcagatttcatgatggttcaaatcatgtggaccctatatagtctttctgttttttccggttataaaaggcaggctcacagaggattaaaaatggtaaagatatacaaagtcttacgaaatatgtttaatgaagagggacagaattaggaaagaaaaagaaaactcttaagtgtttgattaaaagaagggccagtggaggaatagatgctgtactgacatagcttcttcaaagcaagtagttggcagcattagcttcttcaaagcaagtagttggcagcattaagttcttagaacttatgcctatcaattcagtcttttccatattccaccacaaaattctgttttttttgttttttctacttcatcgaagtaaacctgaagtgtcacgaaagactggaacgggaaacaaaacagaatgtaccagattttttttgcacatgcaaccatccacaatcaagatttcactaacagttctagatttcaataagatttaagtgatgctcccttcttcatcttgtctcttgaatgcatgtgatactgggcctaatggcaatgctttgtgacatttacaggtgagagat

SEQ ID NO: 73223 - DNA, 1046 bp, Prunus persica
  Intron number 2 from transcript ppa014380m (locus ppa01438 0m.g) derived from phytozome v7.0 (chr-ID scaffold_2; pos 12920492 to 12921537)
aactcggtcacacgaagcagatacggagccacgaggttgcaattgcagagctcaatgctctttcaccgtctcgggtatattttatttatgtcaaaataaaaaccaaaaagttatatttcattttgttgcaatcaattgagttgaagagtacttgaattgtgttcgtgtagaattttctgaattgggttcttcgttttgaaacaaaaagtgaagttggttgttttaatttgggtgtttgggttcttcccataagcctagatggtttaggtttacatggttcagttgagaaattcatgttttccttagcatccagtcttttagggcccgtttgataactatttctatcttagtttttagttttcattttttgtgctagattatagaggaaaatgagagtgagaatgggagtgagtgtgagattgagagagaagatgagaggggaggatgggagggaggcgtaacaaaagtgaaaacaaaaactaaaaactgaaatctatttgaaatctatttcagtttttagttgtttgtacaagcataggagtaataagatgatcatttgttttatctctagcattgcgtatgtaattgttgcaaatttgatatggaatacacttttgttaaccaccttgccttgcctatcatcaatgctaaggatttcttttctttgagagtaaatgtttgttagttccacaaattttgttttactcatttcaaagttgtatgattctgttcatggcaaattctaggtagatataacaataatagtaatagtcattaaactaatacattttgcctacaatgttgtcattatctttcgaattgtaactctaaattctagaaagccagtgagctcaaattgttttcatttcatcgtttcaatgttccgagtattagttttcttccacggtctttttatttttttatctttttcattacaagtagaagcccaattgcccttctcatcagcttatttggttggagtgctttgttagtttacacagatgtaaatacagctctttcttgatcacaggctgtctatcagaaga

SEQ ID NO: 73224 - DNA, 413 bp, Prunus persica
  Intron number 1 from transcript ppa015182m (locus ppa01518 2m.g) derived from phytozome v7.0 (chr-ID scaffold_8; pos 18752010 to 18752422)
tggctcggttttggattaaatttggagaggacaaggtatgtgagacatttaaatttgcttacatgactttatttttgtctaaataaaacatatcacattatttgacgaacaaatttgttactgattttgcaaaattagaaggcctaagacgaaacatttaaattttaataatgtttaatgcacatttatttggatttttttgccttttgataagtagtcacaaagccactataaaataaacctagcgaagagtaaatttagtcttttaatatcatgtttagcaacataaatattccaataagaaaaacaaaacaccaaacaaaatattgaattgggcctggtttgatttattcatatctgttgcattgggccttgcagactgcaatttttagggcatattttcaatcggttgg

SEQ ID NO: 73225 - DNA, 741 bp, Prunus persica
  Intron number 1 from transcript ppa025664m (locus ppa02566 4m.g) derived from phytozome v7.0 (chr-ID scaffold_1; pos 41552691 to 41553431 reverse strand)
tctgaagttgctcaaagatctgggttaattagaaggtcagtttatttttattttttcggacatgtgagatttactggtttttcaattgaatgttgtgattttgctgtggaagaatattagtgaacaattgattgatgtttatgtgtttagcttagggtcatcattaagtagtaaaacatcaacaaacaaaattagggatcgttgtttggcccatcgacttaagatctgttggagtagaccggcccaaaatttggccgacatgatcatattttacttggtaacttgagctacaaacccccttgcagcaacttattaatcagtactgttattaagaaaatgttgttttttttttcaatgagaaaattaagaaaatattgtttgtcaagtgttagagtacaaaaatttaatgataacaacaataaaattaaaatttcagggcaatatagtaattaacattttttttgttctcacttctatacgataacttctttctacacacgaagacaatctaagtatattttacatatgtatggtataacacatatatatagaggggtttctgaaataagtttatttgagagacttttatagggtccaccacattgtatttcaataattcaaaccaggtttgcctattttattgatcacaagtatattcatggactaaatttaggtagtccggagtgtttgacttgtaacctaagagacaattctcccttttgcagatttagaaaaaatcct

SEQ ID NO: 73226 - DNA, 884 bp, Prunus persica
  Intron number 1 from transcript ppa015483m (locus ppa01548 3m.g) derived from phytozome v7.0 (chr-ID scaffold_1; pos 18447830 to 18448713 reverse strand)
atccactaactttgcacccccacaagtccaagcaggtgagcatgcattgatatcatatgttcctttcttttcttttgtttcctttatttatttatttttattttttatatatatctttcaaaataactattttatgtagttgaaagtttcaggtttaaaataatgaattgacatttggaatgagttaagagtaaattggagttgggattagaaattacaataaagctagatgaggccgagaaactaattcatgtcttcttctttttttggttttaatggcaatcctgccttggccatcttagctattgcaagtcaagcaagactagctagccaaaaatgaaagacatgatggtagagaaaaagaaaaatttgctttgaccacaatattttcgtaaaagacttacgagtcaagtgattccctgcattcaaggagtgttcaatatatttgtttttgtctcctctctcctcgccttggcgctttaacccttttattcttgttgcccatgccctcccttccccccctaaccctaccacttttgcaagcaaaattatcaattttaaatttctctggtgggtagaataatttttttcttttattaaaaaaagtcaatgaagggaagacaatagaagtcaccggaaaaattatcaaaatttttaaaattccaaaagacagttctattatgattccaaaatttcagaatttctatatgcccttcaaattcaaagtttcaagtttccaaatatgaagaagaataaaaattgaaacagaaactcaatgacaaaaccatgcaagaaattacaattcaatggaatcttaataacttccttaattttcttctttccaagagagcaaattgattcaggcaaacaatgcatcagagccc

SEQ ID NO: 73227 - DNA, 804 bp, Prunus persica
  Intron number 3 from transcript ppa008060m (locus ppa00806 0m.g) derived from phytozome v7.0 (chr-ID scaffold_2; pos 25666672 to 25667475)
tcgtgctaggattgagcctggcttcacgagcttgggtatgccactatattattccacataatttccttcgttttttttttcctctggatacatgggaataaagcctacctctgccttctgccttttctttgacatcttcataatttttcattgttcccaatgcatcataagtatcattagtcaatggtgccaaggaagagtttgacgttgtagttatattgctgctagttcaaaatctttgatgttccttaggttaatccataaacttggtttcaaagctaatcacgttagttgatattcattagattttaattgtctttacaataataacagtgacattattatttgattttggatttagaacttctcatttcatctcttcatggaatggaggccattcactcatttgacccgaaactcgtaggtatttagtttgaacagctaaatttgattgagaagccagttaactgttatccccactgcattattcagatatgtgttcttgcgaacatatcattttagctatctggggtcatttttggtagttttcctgtaatttctttttttccaattcattccacttaatagatggcgtgttgttcaccattctgctaattataaggaaagtactgcatcctaccacatgaccaaaggttggtaggaaaaatcacatatgttgtttttggtcaatgaaaccagaaattggagcacattttattatcatgatcttttttccaactgctctaatgggcctcttttttgttttctttgttaacttagtactgcagaaattggaagaagaaa

SEQ ID NO: 73228 - DNA, 851 bp, Prunus persica
  Intron number 3 from transcript ppa010143m (locus ppa01014 3m.g) derived from phytozome v7.0 (chr-ID scaffold_1; pos 29274431 to 29275281 reverse strand)
acccatcaggaagagaaaggaaactccctttgaaggtaaatgcttaatttgtctactttacacatgttgtggtggttaaggtcagattgatgttccagcattttgtcataacattcaattactcaaatatcattcgtgatatgctgctttaaagtacggcctctatatctctgttttactaatcgaagctgaattgaaccgcaagccttaaaaccatatacaggagagtacagagatcatctctagccgaaaactcctagtttggatattatttttttaaaaacgatagttgcttatatataactttcagcatgaacaagcctcttttaattgaaataactaagcagtctgtgcgtttttctacaattcaatctttcttcttaaatttgacttaattgttacttataaaaacacaaacttaatttccttgattttctgatccttttggttaaagaatgcgaaagtgtgatgcattctggccaaaacttggccaatccacatatatgatccagcttttatgccattgataatatattacttttgttctcgaattttataaattacaccttattcagcagctgtaatacctccttgacaattgacatgcctgaactatagattgaggcttttgtggaaaaaaaaattattgaataataaaaatgtagtagaagcattagggccacttcaagcttgatgtggcccaataattgccaagtttgatgacgggattgcacctacatatgggtttaggcagttatcagtgtgcactgctcattaagcatattttcatactagaacttgaggctctctttttttctttttttttttttttcctttctagattcttggtg

SEQ ID NO: 73229 - DNA, 574 bp, Prunus persica
  Intron number 1 from transcript ppb018589m (locus ppb01858 9m.g) derived from phytozome v7.0 (chr-ID scaffold_1; pos 22115212 to 22115785)
tctgacagtgctctgacaaggaaaaaagacaaaaagttttccctgggagattgaaatttttaatcgggtttggaaacagcgcatgtgtaagtcaggtagacgaaaagttgcttatatataaaaccatttcaaaaaaataatacggcggttacatataactacgacgtataaattacaaaatacgacggtacatttaacttcggatgtggtaaataaatatgacagtagagttgtaggtaccatcgtagtaaactcaaaaattaaagtacataagtaataactcgcgtcatggtagattatttaacacgtcgtttttattaatgtaccgacgtggatttctgtaatatacgtcggtcatattgacgttgattttacaatttaaacggcggtttttttgtaaggaccgccgttggttttaaaaatttattctataaatttgtcgctttcattcattttcggtttacatttagggttccaagttcttcctctctcagagacactgtctctcacatctcaaagacaataatttggatgtctttctcaaagagaaattgagcttactcgcatcaaatct

SEQ ID NO: 73230 - DNA, 1024 bp, Prunus persica
  Intron number 1 from transcript ppa000526m (locus ppa00052 6m.g) derived from phytozome v7.0 (chr-ID scaffold_8; pos 2206356 to 2207379)
ccaaccgtgacatcgaccaggtctctttctctctaaattttcttcttcaaaattttagtacgtgttcatttgaagagagtccttgtgaacctgagcaaatgtaaataaaaggagagaaaattaaaagatccttaacttgttttgtgcctgttttgttactttaaaatcagaagatttgtttttgcctcttcttttacatgtaaaaggtggaaattgggtggagaattctttatttttagccatatttatgttatatttttttggtaacagccttgctcacatgtatgtgaaaaatgatatttttcggaacatatcttgtaaggttttgatttaagaggttctgggttcatctttcttgcatagtgatgcaataatgggtgtttgtaaaggaacaaacaggccttaagatttaaattctttatttttattttctccaggcacatttagaatccagattgacatctgggttaggtccaaggacatgtgtacagtactgacgtcttcaattgataagtgtctagtcattattgccacagggtgatctaatggcaatggcattacgtgcaaccacatttcactttttcttcagggtgtaaaacctgctgctcaatttggaacagaatcaattgtaattttagcagattcaaaatattgtagaagtttggagttagagattaattctcttagttgccggacgggaggcagtaaagacctagaatgtatcttggaaggttgtaactgagagagaactaaattgctgtgcttttggttgaaagttacaaagttgttactatatgtggtaccaagtttaatgtaacattatgattagagtgaaatttgattttggttgtgagaagaactcattattccagcatgaatgatactactttcttgtgtgggttcttgtggttatgtgtatattgcatcaagagtttatctgctgttgttatctttcccattgtttccaatgatccttaaatgatttgcaggcaataattgctttgaagaagggtgctcaactact

SEQ ID NO: 73231 - DNA, 786 bp, Prunus persica
  Intron number 4 from transcript ppa011099m (locus ppa01109 9m.g) derived from phytozome v7.0 (chr-ID scaffold_5; pos 2519747 to 2520532 reverse strand)
taataaacccagagaaagccacccggaccagaatagtaattttcttcatctataacccctcttttttgttttttttttctttttcggaagataaataactgcagtttcacatttacttaggggactgtaatggactcacttactacattaatttctaagaagcagaaacggtaactaaaaaaacggaactcttctaaattagtttgttaaaaggaagcattctattctgttttaatagttgaaatcaatctgttactgaaatttgatgttctattttgtggattcttcaagataatgactcaagctactgatatttgcataagcgataagtctgaactaccataaactacagggaggggctttcgaactcaggtgcaaaggggcagcacctgccttggccagctggcctaacccatgtctgagaatatgcaatgcatgtacatgcgttggtagatgcatgtgatcacagttgagcatagatttctaagatttgttttctatatcaagttccacatgatacaagctttctgggagtgttgctgtgtgatagtttggttcaaatggctttatctttactccttaaggtgtttgcttgtcttcttgaaccacatagtagcatatatcatcaaaaatccttttctgtgatccacaactctgtagtaacctaactactctatttgttccttggttatcttttctaagtacctagcctgtaggtaaagtgtattaacctttgtatgaaagctttcagttcttccctgaggccagcgaagttaaatttgcaag

SEQ ID NO: 73232 - DNA, 295 bp, Prunus persica
  Intron number 2 from transcript ppb022997m (locus ppb02299 7m.g) derived from phytozome v7.0 (chr-ID scaffold_2; pos 26206090 to 26206384 reverse strand)
gtttacttgtttggtgaggatcacctgatgagctatagcattggcagactagacaatccatcacttatatcattttggatgaccaaaactcgagctcactttgtaattttgattatatttcctgttctttctttcttctttcatcttcttcccacttatcatacgtacataaataatatttggggttgtcagaattttttttttgacagatagaccggaaaattgagaaaaaattgaggtcaagttgccttgtactgtttctggttacttttcccacatagcccaaacgcttctt

SEQ ID NO: 73233 - DNA, 721 bp, Prunus persica
  Intron number 1 from transcript ppa008214m (locus ppa00821 4m.g) derived from phytozome v7.0 (chr-ID scaffold_8; pos 9052456 to 9053176)
cctccttatcctcttgcttttcttctctgagctcagtatgcaaccttttttcactttttctatttatcagctctctctctctctaccccctgtttatttttcgcttttctaataattctgaggtgcggaaaaagttaagaaattgtagcatttgggttgtgcaggattgcttctgtcatctatatctattgtttgtaaatggatcaactgagatttttgtttaattttattttttgtgttaaaagccaatttggttcacttcacacactgggcttggattaattgggtttttttcagggacaattaaaagtttcttcttgatgaataaatttgtggaggggaaattctagggtgttagaggatttgtggaggggaaattggagttagttagaggatcatatttgtagctattcgtcgtgatgaataaatatttgtggtggattagatgatggaaggccttgatagtagccattagccatcgatcaagggatcaaaactatcaataagcggcacaataattgtattaagtctgtttgtaatgctgagttctttttcccttttactgctgcagtcatcgatccaattggatgaatgctggagctatgaccacttattttgctgttatataatattataaagttgtattttatttgtttatttattcttttacttgcgtgtgcttgcaggactatacctccacactgttacagagtcaaagctg

SEQ ID NO: 73234 - DNA, 562 bp, Prunus persica
  Intron number 2 from transcript ppa012171m (locus ppa01217 1m.g) derived from phytozome v7.0 (chr-ID scaffold_2; pos 21769182 to 21769743 reverse strand)
ctttttgaaggccccggaccctcctatacccgccggtatgttttttatttatgatacaagccatagtataaactacaaggtggaggtgggtgtctcacacacactaccgagttatcctgtggctttgaacttgagacaactagtctgcaaattaaggattttttccactaggcaaaaccttgttggcctattgattctagagatgaaaagaagtaaaaaaaaaaaaaaagatagccctcccacctccctcctccttcctctttcctaatcctattggtatgcttttgattatacataatatatgtaaaaaaaatatccatactgcatatacatatatttcaccatgcatatatttttttttctctcttcctattatataatatctatgtattcgttgtacgacataatatctatgtatacgttataattctatgtcatgtgctcacaatacttatttttgggatttatcttcttcattaaccaaaaaaattaaaaaattaagtaattatttttattgcttttgttgtatataacaatgggtcgacaaattgcacacaggtga

SEQ ID NO: 73235 - DNA, 599 bp, Prunus persica
  Intron number 1 from transcript ppa012171m (locus ppa01217 1m.g) derived from phytozome v7.0 (chr-ID scaffold_2; pos 21769815 to 21770413 reverse strand)
tgagtcgctttggaattcaattttgaagtcaaggggtatgtatgtttttctggtttatgtggtagaatttcgttccgtacaatatcctagttctatttgatttgaaaatacttttagaggaagatcgttgctccattaattaagcgtatttctcaacaaaatttttgtctcttttatttttgggaagtaattgaagttggtcgaaacctttgctaattcattagattaagctataactgattttgttttgattgtttgtacacatatccaacaggttaattagaaccaaaggctttttctgtaaactattgggctttgtattttttggaaaaaagaaactgctgtttttgttttacttttgttggtgtaattagaggatgtatatattatcccaaatttttgaatcactttcatctttttcagtcaagttattttggtgcgtgcatgatgaatacccgatatttaataatatagttatttgttaataggatcaatgtcattcttccaacttctttgacgttatcacccattcttttcctttttacttttgtatttaacaatgtaattgcatgtaaacagaaaacaagtctaaaccacca

SEQ ID NO: 73236 - DNA, 821 bp, Prunus persica
  Intron number 1 from transcript ppa026271m (locus ppa02627 1m.g) derived from phytozome v7.0 (chr-ID scaffold_4; pos 3533978 to 3534798 reverse strand)
caaaggagtacccacctccaggtctcttttttttttataacggaattagtcgaattgggatgatgggtttttgtttgttgatcatctgtgacatagagtagctgaaaatttcgataattttatggaaatgggatgatgggtccttattgctttgaccattttgatgcaaatttgatgttgagttgtcttggttcaatcatcctgatgcattttccatgaatcatgatgggtcttctagttgagttttcactggttctaaaaaaatgatttttatttatatttcaccaatttgaggaattaaacttaaaagaaccagaatttgccagtgacctcaaaatgggtttgtaaagatgaaccatttttcttttttgctttcaaattatgtgcattatagttatttttagaaacccactgtcatacttttcagtaatttttttttgtggtaaactgaaaatgtacttagatgtggggagaacccgcattttccagctagcttctaaggaaaggtcagtttgacaaaagaaaagcactaaccttgttaaaccactacgtattgaacagtatattccaccaagaattaaagatatttccctcgtacgatgttcactgacaagaagctacttgcatttctttatgttctgtgtttttatgattccaaagtaaaattacaaaattaggattcaaagatgcaataatttattatgacaaagcgtctttaagtttagtgcaattgattatgtagtcacgagtagattgtagtactatttgttatatgtgattcctgtgcatttcattcccattttaggcacattgactattgc

SEQ ID NO: 73237 - DNA, 391 bp, Prunus persica
  Intron number 1 from transcript ppa004519m (locus ppa00451 9m.g) derived from phytozome v7.0 (chr-ID scaffold_3; pos 3713279 to 3713669 reverse strand)
ttagcttccaggtccctcttcaggtactgaacgcatactcttcttttagttcttctaacactctgtttgcctcctataccttattcattgagctaactataaataattaaaaaaaggctcaacaattcagttgctgaattctccgtcgccaaacaacgcctaattaatttatcaaagtcagcatgcttttaattaacattatcgtttttcttttgttgggttcctatgtttgtcttccatatatctgattcagctgtagaattcagttttgtttcgtggaaaaataaaccatttttgattttttacgaggaggagagttaaagaaatgatcttttaatccctatatttgaaaattgcagagtggatcgagttctgaaatttactactgctt

SEQ ID NO: 73238 - DNA, 711 bp, Prunus persica
  Intron number 2 from transcript ppa008329m (locus ppa00832 9m.g) derived from phytozome v7.0 (chr-ID scaffold_5; pos 16710339 to 16711049 reverse strand)
ccaagacaccttctagagaatccttatccaaaaaagtaagaattttatatgctcttgctagcttgctaattttggaataatcaactgttatttatgaatacttatggcgttgttttttaagtgatgaagctaatgtttgtttttttttttggtcgaaagatgaagctaatgttaatatacatttttttagacattaaatgcagtaaatacaattgtagtataaagtgtaatgatagcacttagcatgatagtataccaaaattggtggggtgtagaactacaatttgttgtccttagaagaatttgatgtctgtggatgctccagtggttttatcttttcgaagaatcaaataattttctttccttattgttttgtttgttttgaatttcccttttattagtcaaccagtaatgcaacagatgattgaacttctttaaaatctaagaggtttcttggatttaggggattattgatgacgaattttcattatcaatcaccattggaaactggaattgttgctactacatcaagaccttgggattttactttggttcttaagctctcactttgtatacctaacaatgtcgtttgattttgttgcttttcgttacgccgattttgctgtgaagggccccgtctgtatacctaatattcctctcctcttatcctctgaaggtaactgaacaaaaagggaggaatccagctcaatc

SEQ ID NO: 73239 - DNA, 933 bp, Prunus persica
  Intron number 1 from transcript ppa022463m (locus ppa02246 3m.g) derived from phytozome v7.0 (chr-ID scaffold_1; pos 11484634 to 11485566 reverse strand)
tcgccggtggttcgaattcctacatcgatcggacggtgggtttgctggatgaggtcaggagaactgaagctgacgaaacccgagcggctacttctaaaattaaagaaagcgcttgccaattgcaaaagatccgtcgcctgcacagccgacgaaactggaacatgcaccgcctcgatcgatgctacacaaattttcttcaagcaccacgtggaggccgatcaagcatgggaaaaactcgtggcaagaaccaagctcctacatagatgaagtgcgcagtggtccctggcccacatacctacaatctccatttgacatgataccacgtggcaggttgcatgttttgttttgttttgtttttgttgtgggttttaagctttttttcttttttcttctttgggattgggagtgaatccttctgtggcatcattgtcatttctgtgtcttgttatcttgatcgatttttaacgacgtgactttggaggcactcttgctgcctcaattgaacgtgcaatctatctaaacgttaaacaaaagtcaccaccaaggaaggagcataacattatttttatatgggtccaatgacccaccacaaacatgaaattatagttatatttcaagtattaaaaaaaaaataatgatacattttttgagttaaggtggtgaaaaaaatgttattattattgaatggtgctgattgatttagagctgtgatggatcccattgaatttccttttctttctcaaaacaagctttttttcttttatttgggtagaaatcgcttttcattaacttaaatagtttatagtgtgatcagtcagtgacgtgattggtggcaaattggcaattgtctcttgtctactactaaccaagacaaggcgatggtgttgctcatgcattggctcaatttggattgcgataatggcagttttttgt

SEQ ID NO: 73240 - DNA, 391 bp, Prunus persica
  Intron number 2 from transcript ppa011457m (locus ppa01145 7m.g) derived from phytozome v7.0 (chr-ID scaffold_8; pos 10273963 to 10274353)
gtcgaggtctttctctgtctctggaacgccaccaggcaagttcttcttcctgccctttctttttggccaatatttctgtcgtaccattggatattgaaccttttagttttgttggttcttgagtttattctttcttaaatgagtttctttgaacatctttgcaattgggttcaaatcaatttgcaatttttcaattgttttgagtgtttttgaattgcattttgaatactgttatgtgacttgtgaaattagtttgataaaatatatggtggtgaatcaagaagctttgctgggaaactaatctttaattggtgtcactttcttgcaaatgattgataatatattggactttacaggtccagtagagaattttcaacaaggtttcaattct

SEQ ID NO: 73241 - DNA, 929 bp, Prunus persica
  Intron number 1 from transcript ppa015139m (locus ppa01513 9m.g) derived from phytozome v7.0 (chr-ID scaffold_3; pos 3600827 to 3601755)
ctgcagaagctgtcgtgagtgtcaagagctggtttgcataactttttttattttaatttttgttattattattccaatagtaaaccaaatcaactatccatatcaaatcaaaactattttaaaggtaaaaaaaaaagatccaacgcctgaaatttaaatccaacagttaaatataatatttgaaattaatctaaatcatatccaaccccaaaactcactccaaaatttataaatacccacctatttctcaagtaaaattatatttatggaatttcaatttttttaagtcaaattgttcaaaagattaaattatgaagttagttaaaaagattaaatgaaaaaaagttatctatgaaaaaaaaaatagacttaagccattcttaagcaatttaataaaattacagacttaaaatttgagtcgggttgcgggaaaaattggtttgagtccagacaaatcccaaataattactgtttggaagataaaaatttgaatttatgaccaaatgggttaaagagaaaagaaaagaagcccaatctctatcggacccagaaaagcccaatagggattcaccagcaatacctaatagagcttcacgtcaacgcgttttccataagtagcccacacttggacggcttcgggtttaaccgtctccagcgtgcttcgcgcctctcgcattcttgtcaccctgttccctctctgtttctctgttgcttactctgttttctgtgtcaactgaaaccatttgtttctcatagtcatagcagggagcccataccaaaacacccaccttgttagtgttgtatttacagatgccttctacaaagggaaaaaagcattcaaagacaaagttgatgttaacaagttttcttcacctgggtcacttgattttgaagatactgaagagagttttgcagactctcttaaacta

SEQ ID NO: 73242 - DNA, 972 bp, Prunus persica
  Intron number 4 from transcript ppa024036m (locus ppa02403 6m.g) derived from phytozome v7.0 (chr-ID scaffold_6; pos 8036462 to 8037433)
caaagaatctagaaatagaggttagccctgatctagcattgtatataattaggaatgcaatcgaaatcttgacttttaagttcagtggaactaaaaccaataccaattttttacattgtgtacactatatatctgctggaactgttactgcaagttttcctgctgtttacttatatattctcgagtttttatggataactaatggcaatgtacttatataatttagctttacttttataactccttctcactccttttcttctccggcttgtttgttggcactcaaaaatagctgcgactattactgatcagaaattctcccacttctgattctgaaatatttatcaaatgcttgatttggtataattcatcatgatggatagagttgatctctgtttcctgctttttcaataagcattccccaaaagcaggcttggaaactgtcccgtgcctattttggtgtttctgaatctgttctatggataactttatactgttgtttttttcttaagtaattgtttgcttacttaatagaagcgttagttaagccttgttgttccacttctagcacaaggccttgtcttctagtaatttcctgtgcatacagttcctataaaaataaaaaataagaaaagtaaactgaaaataaccaacaacaatgttatagtatatgctatacaatgatgaagttgagaagagtaaatgccagtatttagaagctactacactaacttcttcagctgctctgcgtgtattcttgtcattccatgtacactcctgaaatctcccttttttctcataaatgttaagcagcatggatgagcagcaatcagtgacctgttctgctttagtaaatctgattctgttgtcattctatatgaagtcatgccttgagtcagaggtttcaattcaatgatattttgtttgattcttttataatataaccctcatattacaggtaaaagcagagaa

SEQ ID NO: 73243 - DNA, 654 bp, Prunus persica
  Intron number 1 from transcript ppa018630m (locus ppa01863 0m.g) derived from phytozome v7.0 (chr-ID scaffold_1; pos 3613998 to 3614651 reverse strand)
tggtgcgcatagattaccttatatttccattggaggttagttacaattcccttgccttatttcattgatgtcattccgtttttgtcaattttgttgatagttccctgttttaatatattcatgtgctctgttatctgtcattgttgtagagaaatctgttcatttttaaatgttaagtcatattgtttgtgctttttgttcaggttgcttgtttatgttgtttttattctttcctttgcttggtttgctttcttgctcttttcttcccattttgattatgctagagattctatttgtctcttccatgtgcacaatttctttggttaatctgtggagacaaaaacttattagattcctaaatataaggaaacttctctctttaaattggacaaattctactgctttttgtgctcatatccctgtaaaaggtagcttaaccttatactgctttccttgcaagttgcaacaatgttgaagtggaacctaaaaacactgtttaatggtgtgttaacataggtatcaatcagaaagtaatatgaaccatttggaaaggcaattaaaaaagaagggtatatttgtcctctaaaaacctatgggctatttctaatggagttcaaattttcagttcttttacaggtcctatcttgggggcca

SEQ ID NO: 73244 - DNA, 677 bp, Prunus persica
  Intron number 2 from transcript ppa012565m (locus ppa01256 5m.g) derived from phytozome v7.0 (chr-ID scaffold_1; pos 43352283 to 43352959)
gaagaagaaggaaaaggctctccgctgtcaaggtatgttcaatttatctttctccttctattggtgcagttaacaagtctatatatacacatagatatatatatatatatatatatatataggtgtatgcatacaatatatatatatatatatatatacgcatctgatatgctctggtattttatgcgtgaatggatccatctagtcaaacgggtttccttcaatttttctgttttgggtgtttggacggtgatcaagttctttgagttgagatgtgttgaggcctggaattaagggctatttgcgcattctaggtttggtcatagttgactgatttttttggaataaatagagatgcatggatacgcgactggcttagttgaagagattgaagtttaataattctgttgttggttcattcatattataaactgtgtttctaatttatataaaaaattgggaatcttgattactcaaaacccgtatgctgaatgcataatgtgtttatggttctatcacaagtatctaaatagtgaggatgttctgcatgcctgatgctatgttgctcattcttttctttttctttaagttttctatattgtttgactgaggattattctgatacgattgcgttttattctgattttaggttctcctacaaccagatccatttctaa

SEQ ID NO: 73245 - DNA, 635 bp, Prunus persica
  Intron number 3 from transcript ppa005153m (locus ppa00515 3m.g) derived from phytozome v7.0 (chr-ID scaffold_1; pos 25135802 to 25136436 reverse strand)
aggttagtgctaaaatgaacaacatgtaacagagccaatcccagaatttgtctccaagagtcgcagtcatataatttatttcagtcaattagttctttatcagactaaattaaagaaatgaatgaaagcgtgtaggtacaacaaactgcttttttttattttccattttttttcctcaattaagccatcttcttttttatatgagaccaaagtcagtgatccactgcttttgtccaccaccttttttttggtttttggttttgtttttttcccatttgaactgacatgtaatttcgtaaaaacaaacacaagtttctctcagtatctaaagagaaactgggtttccaatttccgtacttgtctgcttcttaaagcaacatagaaaacgtggtgcagctgatgttctatatcctattagtagtaattacagactttcatggctgcttttgctactggaacttgcactaattttcaaggaacttgcactcaccaagttttcctatcctgtagaatttctttaaacacattaaaatcaaattagaaaaataaaaattattataaacccatcaaagtaaataatattttacactactcattttggtttttgtgtttatggttattgggttgcttgcagc

SEQ ID NO: 73246 - DNA, 844 bp, Prunus persica
  Intron number 1 from transcript ppa008937m (locus ppa00893 7m.g) derived from phytozome v7.0 (chr-ID scaffold_1; pos 41606609 to 41607452 reverse strand)
gtgccagatccgttgattccatcggtgttatcgtggtacgaatcttttccccttttttgttttttgttttttgttttttgcttttaatttattgaaatttatgttttggtggtttatacaaagagttaattttttatttttttaatgttaaatttattgagaattatattgttggtatgtatctgggtttgctattattttttttatttatttgaacttatatagaagttaggcttttcagtgtgtgcattgaccttgcgattagggttgtatcgtcattgtaaaagattaaatggggcatacccattccttaaataatgctccaacagagctgcctgccactatctgagatgggttcattcaaagattgctgtttccaagaggattattgcaggtttttgagttttgctaaattttgtattgaaaatgctttggtggcttctgattatttacttggacaaacaagaacaatacatatctctaaaacagtcacttgatgaccagaatcccgcaaccattttctcctataaatgctttaattatcacatttagtttagtgccttgaagtctttttgtaaaacttatctttaggggcgagttaatagaatctgtattgattccatagtagaatgaatctgcaatgcataagtgtcctgccattttttttttatcttaattccttggattaatctagtgctgagatgactcagtaagcacttttaacttagcatttcgaactatatttcttttcttttttttttttgggctgtgaactttgaaattgtttttgacgtttatatatttgttgttctaattttattatgtattgttactttgaagggag

SEQ ID NO: 73247 - DNA, 895 bp, Prunus persica
  Intron number 1 from transcript ppa009984m (locus ppa00998 4m.g) derived from phytozome v7.0 (chr-ID scaffold_7; pos 19736568 to 19737462 reverse strand)
gctcacatctctcctcttcaggcaagtttctctcttaatttctctcctctgttactaaaaaggtttctttttgttcaatttttgagaaagatggtttttttaacagtaattattggttgaatttcagttttcatgaaaaataaagatacccctttatccatttgacaaaaaggagttgatttactggtgtctgttttagcagaaaagaaacacttactgttctttgattcctcaatccttactttcccaaatgccacattatgattgttaacttatgacaattacatggtgaagttaaagtggtgactgaagttactagaatatgacacaactagatcactagatgttgtaatcagaaatttcctgaaactcacatacagtagactacagtgggacccaccaattttgtttatatgcaacccacactacatgccccctatcaacctttcaacatggaccttgaatgagttggcttgactcagcatgatttttgataatgcattagaattagatgaaaaagagacaaaacctcatgatgtgtgggggcatctcatttgctctacttgatgataactggttgctcccattgtgaagcttgaagaatttgtgccaatattcacaggtgcctatcttcttaattattataagaaatcatggatgttagaccaaattaaagtaaaccaaaataacataactggggtcacagtttgtaactttctgttgattgaatcattgaagattaaaaagatcatcttggtgttgctgccagcttttagcacacatattgacaaaattcagtggtgtttttcctttctgttccatattattttaacatacatttctgttgttgggtttttttatgtaattttttttcttctactgttttacagtcagg

SEQ ID NO: 73248 - DNA, 1004 bp, Prunus persica
  Intron number 2 from transcript ppa010491m (locus ppa01049 1m.g) derived from phytozome v7.0 (chr-ID scaffold_7; pos 11958920 to 11959923 reverse strand)
gagtgactacaaaagtgagcgtgcaaaacttgcttcatcttttggtccattttctcattagtgaatctctagctgttggtttgattgctttggccttcttgcaccaactcaattaatgtttcttttctgcttatatttctgatacaatatcaaacgccctaaactctaaatgttaaaaactaacttacaccctgaagtgttaaaccctgttgcaacatggaaacaaaaatcagaaaaagataatccaaaaattgagccgccattggaacggtctgttggcatggcatagtctgcacctgaagttcaatatatatgcatgtagatgtacatatgtagctgaaaagaaaattaaattgtttattgttgttggattttccttttccttctctttgttttcttctttttctcggtgggtagttgtatttttagtgcaagttttcggggtccatggtgatatttcaagttgcatatatttgaacgttaaatggtttaattattcaaaacgtatgcagcatctataactacaaatgcggttacaaaaaaaaaaaaaaaggttaaaaaatacaaaagaaaaaaaagaactttatcttcattatcttcaattttttatataaaaaaactactactgtttcttttaatgtccctggagtttggcggaaatgataccactccataacatttaatcgttttcatttccactacaataatttccaaaatttcggaggatataatgtcttaagaaatcatctgttaactgttgaccattttaaaagggaacacagccataattttatgcatcattgcctctgtcatcaactccgtaacattattaaatccatggttctcttttcttatgttttttttttccgtatggttaattttttttattttagagaactacttcccttaaatttctgagagtttttgtgaaaaaattatgtaagcttctctatggcttattgtgatggaatttaagaaactgaaacatggttcaattgtaggtg

SEQ ID NO: 73249 - DNA, 479 bp, Prunus persica
  Intron number 1 from transcript ppa010491m (locus ppa01049 1m.g) derived from phytozome v7.0 (chr-ID scaffold_7; pos 11959955 to 11960433 reverse strand)
ttcttcaggtttcttttctttttctttccttctctgttttgttgtgaattttccttttctgctctgtggtggtagaaactaagaatgaaaggagaatttgaatgttaagttaggaaataggagatgatatcctcactgctacaactggtattttttttttcccaattaatgatggccaatggatgtggtgaaatatgatgtggtaaatttttaatttttaattatttgggatgttgtccttagctaaacagaaatgttattcttgttttggttgagagaagggttctgttgttttaggagttaggtcatttgttatgaacaaaaaatgtctaaatcagaattttggtgtagccaaagagaaaattaaattgttttattattgttattgggttttcatgctacgaatgtcattgtaggaatagttcttttgactctgtaatatttgcagcttgaaggaacagaaacttctgtgaacctgg

SEQ ID NO: 73250 - DNA, 502 bp, Prunus persica
  Intron number 1 from transcript ppa021994m (locus ppa02199 4m.g) derived from phytozome v7.0 (chr-ID scaffold_2; pos 25471054 to 25471555)
cccggggaccgaaccatagtttggtctgctaacaggtaaatcatcaaaaactacgtcgttttagtccctttagaaaactatggcaatacaattggtgcatgcagatgcagatgcaggggtttagtctttagtttcaactttcacaaggagtttagctgagtcatgcattgataattattttattagtgtgtttttgttttctttttcgttgaataatatttgatcaaattggtttctgacatgtgtccatgaaaagtcttaagatgcatgaaaatgatattaagaagagagcaaatgaagtctacttttatgtatgttttgcacactatcctagtccaagaattaaagaagtctccaaaagattggatggttactgattttttatcacaaaccaattccccatctttagtctttgcaaaagcttttgcaggtaaatatgatcatgatcacttaagccaacaaatttcattttctctcaatcatctaatatatagaaacgctg

SEQ ID NO: 73251 - DNA, 1007 bp, Prunus persica
  Intron number 1 from transcript ppa009267m (locus ppa00926 7m.g) derived from phytozome v7.0 (chr-ID scaffold_6; pos 28604015 to 28605021 reverse strand)
ttcgaagacgagtaagtccccactttgcccctgccttttactcctattcacgcttttacctttccgtttcttttcactttttacttttacttattccttttgtggttggtttggttgatctgtttcctgcctgttttgtcttgtgctctgtttttgctgctgataaagcgctggaacactaaaccaaatgaaatcataggcctgttttgccgtcatatatgttttattggcttatgttttttttctttctattgcttttggttcacctggaaaaaagaagaaagaataattaatcaccacaacacatgatcttgaggtcttttttcttttcctttttccaattcctccagtttctaagtaaccaaacagaaccaacaggaagaacataattatataataaaaaaaacagatggaaacgtaactatcctcccgctgtatgatattttgaaaacgccatcattaattatgtccttttgataagttaactaataagtcacattatacaatcaatcaaataagcaaaatacattatgcaaacgtaaattttcacttccttttctttggctatccaagatgcggtttgcacttttctttggaaaacaatgttcatggcataatgtactgtgcatgagtggtctttatcaaatttttgtttactttaattgcagcatcgttgctttgaaggtagaaatacgatatccgttttatcagtattttcctcgtctggatgacttggttttcaggtcttggtcgttttgttgaaatggtggatgaaaaatgctccaccctttttttacacaaaagttatttttagaaaaagaaaaaagaaaaaaaaaagggcaactcctcactctgccaccgaactccttataagaacgtcaatgctgtacgtccaatgagtgctgcctgtcctttccgattttatcctttggaattctgtccgatgtatattcaagtgttagtcatttcctggagctgtcaatctattttactctaaatttctgcag

SEQ ID NO: 73252 - DNA, 879 bp, Prunus persica
  Intron number 2 from transcript ppa026709m (locus ppa02670 9m.g) derived from phytozome v7.0 (chr-ID scaffold_4; pos 2614733 to 2615611 reverse strand)
accaccagcttccgggaaggcagctggttaaaaatgttggtcagagaatcacagaggtggctgtgaacattcatcagcatacagaagcagttgaagctactgtctaattattaatttattggattggaagcactaaatttatttttttttatgtaaaattgtaaatggaattacgaatgcatttaatttggagttgttggatggtaggtagcccagagaaatgtaatttgattgagaaaacgaatgtaatagagtttcaaaagctataaattagaagattaacttcatttttttcagtctatggtccaaaatttggtttctaaattgaaattttatattgaatggatagtactagtagatgtctacaatctatgaactaacagttggattttcacctaacctgaatcgtggttgaatattctatttacaaagaaaataagctgtagcattctatattatttttgaaggcaataggattgacataattggttgattgagttgaccaaatagaattattttttcagaattgtaaagcaaacacatgcgtgtgtgtaaaacatcctgccaaaccgcccgtataaacgaacattgactggcagttgtacaagtacacctcaagtttttcaattccaggacttcctgtaaccttgagattaaacccaaaaagaaaagcaaacaaaggctatgttgcagaggacataaaaaacctggaagttaatgcatttatgatcaatgaaatttgatccaattctacaaacttgaagctcaagaaattaataatgcactttcatttacagccacagctgaggcaggccacttttgattattatctgacctcttgaagtcgtggcaagataagatcacaaccgttgtgacaga

SEQ ID NO: 73253 - DNA, 599 bp, Prunus persica
  Intron number 1 from transcript ppa023744m (locus ppa02374 4m.g) derived from phytozome v7.0 (chr-ID scaffold_1; pos 25604882 to 25605480)
ccttggggatcagagactttcagcaggtaggcagtcctctcctttttttcttttaggcagccagacaatcagcaaagatatttgattctatttcatgtcttcatctttatatctttatacaataataagttgtagcatttttgttacttaaactccagctaagaaattgcctttgcttccattgcagatgaacagcgtagctcggggactaatgctataaacttgagcacaggtaatttaaatacattatggtcatcacagcaccttttgagtcctaaattctaggaagtttctttgctggcagttttttttaaggtcggtcatgatgaagtgaggtttcatggtaattttgattaatttcatgagaatgtcaggtatatggattgtctctggtggtctagcaggaattgcagcaatgatactcattgccacatggaccttatgtagaaaagggcctcaaaagagtgtttcagctgagaaatatggtatttctgcaaaaagttccacatctcacttgaaacccaacggtagttaaatgttgctaacttgtgttttactggacagcatcaaacgattcactgtctgaagaacctggcagc

SEQ ID NO: 73254 - DNA, 790 bp, Prunus persica
  Intron number 1 from transcript ppa013887m (locus ppa01388 7m.g) derived from phytozome v7.0 (chr-ID scaffold_6; pos 21180614 to 21181403 reverse strand)
ctccattgatccctcgtagtttttctctttctgcggtgcgtcttgtacggggaattttcaatttcatcgtcttttttttttttttcatttgtgtgttagatttattgaactgcaagtgtaatgagaaggaatttcaatagaaaagagaaaaaatggaaactttgaatatgtatgtatgtgtgtgcaatgcactgtttgctcagctgtctgctagtgtggtttctaatacttagcactataagcttgtttgatagggaggactagacatgcctacatgatgtgcattcaatgcataatatggatattgttgtctaacttgtaggaggatagaggactgtcatagaggttgatgaataagttttagtcattaacgtcttatgactagtcctccttaatcctccaagttagccaacaatatccatgttatgccttgaatgcacatgaaatgtaagcattttactagtctactctagtatgtcatgtcaggcatattgtcattttggaacccaataaccatttgattgatcagggagtttctatattttgaaattaaagttctctcaggtggatttagcatttgcgtctgcatgtccctatggagtgtggtggtggttaatgaaaatattctcatatgtgtaactcttcctccaattaacagaactgggactgctctcttttcaactgtcccaaatgaatgcttcttgggttattgtctatttagtttagtggtgtctgcttagttctacatatcgacttatcagtcttctgggtgtgttgtaggtacttgaac

SEQ ID NO: 73255 - DNA, 778 bp, Prunus persica
  Intron number 1 from transcript ppa002815m (locus ppa00281 5m.g) derived from phytozome v7.0 (chr-ID scaffold_5; pos 1222293 to 1223070 reverse strand)
gtctgctgcagattccaccacctcctggctttcccgtcagtttctctctctgctttttacttttgggtttcctagcccattgattttgttattgtttcttacgcttatccttcaatttctatcactttcatcacatattggaaatgggtttttgagattttagttgcccgttgaataattcaacgcttatgtgcttagcactggaaattgtattttcattgtcttttattcttgtggagtcgcaatggtgctcttgtttatacaggatccatttcactcttcccgccacatctctaactaatggcaaatactaacttatatcgctaagtgatttaactgattcgactgtgacagcataagctcatttagaaactcaactcaactttgctcttgtcctgtgatcaaacgtctgacttttggtgctttagtttagtttttttgtgttttttcttgggttgaaaaaagtggatcaactttgtggttcttgtttgttgttacacaccaaaagtttcaagctttaaacattgtggcacctttgtatatcgtattttcactttattaatgattacactgcatgcggttcctacatagtaaagtagtaaatttaattttccatggtgccatcagtaatattgtagaactcaagccatttgcttcttgtcaatgcaccctttcttgcaatatttggtgttcattcagtaagctttctgtctatgatttcagtcatctccctctccctgcatatctttaatttttgtgaattcacaaattgctacag

SEQ ID NO: 73256 - DNA, 782 bp, Prunus persica
  Intron number 1 from transcript ppb018294m (locus ppb01829 4m.g) derived from phytozome v7.0 (chr-ID scaffold_7; pos 14613060 to 14613841 reverse strand)
tcgtgctgataacgtgttataaaactagagggagaaaatgtagagagaagtgatatgctaaagataaagcttcaccatgttttttttcctttctaaatctttggtagaaccacctatttataggcttacaagataggagattgaataccatcatttacaatatacctataggttacaagcattaattacaaatacttagtgcataggttacataaaatccaacggtggaatattaagagatatggtggtcatccaccaactcatgcatttacaacagatggtgttaaagtcagatgaaaaattgtggattttgaaaaattaaagtgatatttctcttaaatttttctttaaggtgacaaattggataaacctagaacattacattctaatttggaaataaaagcatccttataaagttggaaaagctattactatttaagtgggaaataaagtattgtttgagtgagcagtcatttaagaaataaataaattatgcattttttgcatcttcaaaataagtcagaatttgagaaatggatcaataaatacagtagtccacatgcaattctcaatttggtttttttaactcttgcatactcatctagatagtactaatactagagcgtattttagtggctcattgtgtccatagttgacgttttggagtagtacgtattaccgtaaaaaacatgattgttgtgtcttgatatcaaactaaatctacttatttgttcattatatacaatgtaatctaccttttcacttaatattacagactgtaa

SEQ ID NO: 73257 - DNA, 637 bp, Prunus persica
  Intron number 4 from transcript ppa012085m (locus ppa01208 5m.g) derived from phytozome v7.0 (chr-ID scaffold_2; pos 2304504 to 2305140 reverse strand)
ggtcgccccttgggcccatctggtgaccgcccacggtaattgatttgttttatcgtctttattggttattggatctattgatttttgtaactgggattgattctttgagtgttttgcgaactgggtttgattatttgaataactaatagtggcgacttgtaactgtggccttatttgaaggatttctgtggttctttgttctaattgtaaatggctattcaaataggtggtttgtgttatttggtttagctgataagttggtttgcacgtgtaatttgtacaggaagtctttagtttggtaaactgcttcaacaatcattttgtttttggagttctgaaagaaactgcaagacagtttgaaattagattgtattgaatactgtaatcgattgaaatgtggtttggttgatggaatgattgagaagtttgttagaaagcttggattttatttgggttttaatttaaaggtctagagtatgtgatatcgatcatttaggaagaagttatttaactgatttgtgttagtaaactgtgacagatatatgcttccttttctagtttgtatattgaaccctttgatttgttggaatgtaatgtggatgttttgatgatgtgaacagtggcccacctcgctttg

SEQ ID NO: 73258 - DNA, 432 bp, Prunus persica
  Intron number 1 from transcript ppa015343m (locus ppa01534 3m.g) derived from phytozome v7.0 (chr-ID scaffold_4; pos 10567648 to 10568079)
gttcgtttttcaagattaatcttcagcatgcgttcaagtttagtcaatttgttagattctgaatgatgcccatgattcttacttgaaggttaataccctgttcgtggttcatgttttagcacacttttttagtccacactctaaacacaatgggggaatttttacttcgttgaaatatatcactttctcacacctattcttgcatattgtatgctgtgttcatgatagtgagacaataactgaacagggttaggtcagttcgccagggaagtgtccttttcatccaagttcgagtccccttcatataaatttgatttatttagagtaatttagactaaagaaaaaaaaaaactgatcatgtgtgattgtttggattttaaaaaagccattaaattttgtagcgtataccgcctaagtttgtcaagaacttca

SEQ ID NO: 73259 - DNA, 770 bp, Prunus persica
  Intron number 1 from transcript ppa012351m (locus ppa01235 1m.g) derived from phytozome v7.0 (chr-ID scaffold_6; pos 15625972 to 15626741 reverse strand)
aaaacccctttcaattcgatcaacttcaacttcgggtattttattttcatgttgttccccaattttgttttttatattttaatgaactaatttaaaatctttaatttgcctgttagaacattgtaatagcttacacttttagctgttaattgatcttttacttgtttttatccttcatctggtacataacaattgggatattatgactcttttaattattattttttaatgtttattttggtgcattttggggagtgatttgatatggtttgcttgaatttgaattctgtatgtggaaaatgtatgtgttagtttttttttttttccctgttgaattacattgaacatgttgtacagtacaaataatagctgcttgaattttggatgtaaaatatagttttcttgtaatatccgaattcatggttctgtgggcttgctgctgaatttgatggtaatatatgctagttacgtgattgtttttgttttgaagaaagttatgtgactttcacaggcaagacatagaattattgaaaagaaaaaagtttggtattttgggtaaatgctgcgactagacatcatgatgttgggccaggttcatttcaagagatttttcaaccatgaacttgtcatgagatttgttgagaaatgcattccacatagtaattaagtgtttcatgaatttcttatcatttatgagactgactgtgctgatgctaagatgcttctatgtttcagctgcaccgaaaactgaggggcttgcacctgcaatt

SEQ ID NO: 73260 - DNA, 774 bp, Prunus persica
  Intron number 1 from transcript ppa002863m (locus ppa00286 3m.g) derived from phytozome v7.0 (chr-ID scaffold_1; pos 30623327 to 30624100 reverse strand)
ggctattgcgcccacgaggtcctcggtcggaactggtagtcatttttttctaatttctttttcctgttttgcttgttttctgtgtttgggaaaatgatgcaagagagttgttttttaagggttttaaagagaatttgtggaaatatgcaagagagtagatttggatgttatatgtaattacaaatgtagaacaaaatggacgtctcactcaaaaacgatgaaatgtggcttcaaagtcaatctttagaatttgttctggatgatgtgatttttttttgttgaaggtatcagtcattccgtactcttcacttcagcaaaatcccctgctagattttgaacttttaaggagaactgtatgtattcattttgatctaattctttgagttaggttgggcatgacaatacaaaattttcctgcgaggctgcaactttaaattgtcatctatgagtgaaacattttattcaaattttgctttctagtgattgtgatgccgtgatagtcaactggagaactatgaaacttatatccaaaatagtgctgattttgcatttttcaaggaatgattccgtaggattctatggattaattcaatgttgtttacatttttttttaaagtttgttgagctgattcatgtaactaatatccgtgtatgcattcatttgcatatctgtcatacgataatctattttgctgataaactgtttcagaatttgtcttggtcaattaaacaaaatgttttgtttcagtcgattcctacagtatagggaccctc

SEQ ID NO: 73261 - DNA, 604 bp, Prunus persica
  Intron number 1 from transcript ppa022883m (locus ppa02288 3m.g) derived from phytozome v7.0 (chr-ID scaffold_4; pos 11895645 to 11896248)
aaatttttggtctttcaattgctgattggtggggcgtgagaccaagcattgatgcgctcatttggccaactggtttgtaccatacctctacgcagttacgtgatctatcgatcaagacagaaggtaacaaaaaaaggtttcaattttgacctgcaatttttccaccatcgtttgatgtttgaatgaggatggcattggctgcttaccagtcatttgggttatcagtcatgcattcacaacatactgagaaataaatatgctatgattatctatgtgaattccagcatataatgttcttttcttgataaatacatcagcattttgtaaagatcagaagttgcctatgttttcaatgcgtacttactacttaccagtcaattgtcgtgtccttcacggtacatacagggtcttctcagttaacaatcacaagggtgttttctaattctatccttaacttgaatggaaccagtaggaagggagatccagaacaaaaactaaatgggtcatcttcgtttttcgtttctgatcggtactaatttgctccttctgttattcacactttccttcgcagttgacggcattagtccctcccagtctatccgtg

SEQ ID NO: 73262 - DNA, 699 bp, Prunus persica
  Intron number 1 from transcript ppa013108m (locus ppa01310 8m.g) derived from phytozome v7.0 (chr-ID scaffold_2; pos 17894832 to 17895530 reverse strand)
agcacaaggttcatcgtgtatagaagaacaaagtaagctaattcaacatgaaaatgcttacttgtgaagaactttgactgctatcaaattagagttactagatctgtgtttgtcattttgtttgacatgccttgatgtatatacctgatcgatttatatttacattgatgctatggaattatattaatgtgaaaaaaatttaggccatgaagactttcgtatgattcaacatttttttcttttgtcatccggcagttacatgggacatagttgcttgaatagtacttatggtctaatactttttcccaaggttgatctatatacagttataatgacaatcttttgatccttacacatgttatgttattagattgttcttggatcgcacgtttagaaatggttccactttatctatattcatgattaacaagaaatagtgtacgtacaaagtagtttcacttgcttctccgttgtaattttatatgcatagactggtgtgaaatcgatcgtggtaggcaaagttattctcgactgtcaaacatgttatgttattaaattgttcgagttttgaatataatttaacaaggagaaaaatgtagaaagttgcagaaagttgtctcactttattttaagttctaataagcacgctatactttcggtgtgaaatttatgatatggtaggcaaactcggcatctgga

SEQ ID NO: 73263 - DNA, 789 bp, Prunus persica
  Intron number 1 from transcript ppa006135m (locus ppa00613 5m.g) derived from phytozome v7.0 (chr-ID scaffold_3; pos 4848571 to 4849359 reverse strand)
ggttgtacagagccattgatacttatctcaaagtaaggtctatggtatttaatggatttaattgcctaattagttgacaattaattgggataaatgtgaattaattaggtaaaaaaatgttgcagcatgagtgtacatatattttatcgaaaagaacatggtacatgaagaagacttaaactaaagaaacaagcttaaatcttatcatgtcggtcctgaggacatggctgtcttgtcaccaccagcaaagatatctgagaggggtttaggtggcttctctcataggactagtaaattgacataaatgccctttgttttgggtaggaagtggtcggccctaaagctttctgcatttggtttttctgttgttcagtagtgagcatgagaaaaaaggtgcatatttgtatgattgaattatttttttggtccaattgaagcatcctaccccttactcagtatcaaacacttttatattctaacatttagagcttttaagtgtaggaaaaatgttctatcactaaattgtttgatatgttatattgttgcaaaattagaggcggattctcatttaaatatatgatctaaatcaataatttgacgacataacataacattttatgttatcagattgtaaaaagaaccccaataaattacctatggtatgcaacctacagaaacttggggttgatgtgaaacatggatatctaatttaaccgttattcaaaagtttaatatataacttccgtcgtggcaggcgcatcctggagtatccaagcaagatcgaaagag

SEQ ID NO: 73264 - DNA, 787 bp, Prunus persica
  Intron number 3 from transcript ppa011674m (locus ppa01167 4m.g) derived from phytozome v7.0 (chr-ID scaffold_6; pos 27422864 to 27423650 reverse strand)
ttaaacaggtgagttatattcaacaccctcagcctgaaaagttttacttcaataagacatatatctttttttggtggttttttactattaatcttatgacaaaatgtgagtagacatgggaaaagggactgcgtcatttgataacataatgcacatattattaccagtaatgtgcgttaagtagtcacttgttcatggttctatttgaagaaaatctcaattgttgatagatatgaattggtacaccacataactattaacttttgagggtgatggtgatgatggagattgtgcttgtaaattgacaatcctggcaagatatgagaggctggtgccatgtttaggtctagagtttgactctagtcgggggttatcagcatgtaggaaagacaacagctaccttactgcctactaatgtcatgttataaaggtctgcattggtatttattgttatgttgcaatttatgcgatgaaggtggcatgcccttatgaaatgtcatcccatattaaacacactttgatgaattgttaagttgtcgactgtacctgtaaagaaacaatcgatcttacgagtgctgatgattgttttgtgaatgcattttccttggatcttaaatttgtatcactctattccatgctgttgccaacttttagtctagtttagagaacaccttttggacactgggttcatgggaggtcttttgactgcaaccattcatgctggataaccttgcttgttcatatgagttatgttcttttgcttttgcttccttactcatttaggtga

SEQ ID NO: 73265 - DNA, 521 bp, Prunus persica
  Intron number 2 from transcript ppa010490m (locus ppa01049 0m.g) derived from phytozome v7.0 (chr-ID scaffold_8; pos 12634667 to 12635187)
ggtcaaccgacttgcaagaataggtatatggcatgtctttcacaaccactgtttatttgatgtttgacttgcaataattgtattcttctcaaatatcatggtgaggaccaaacacttctattaattgaccgtggagaatgattgaactgaaaatctttgtggtttaattccgtgtagatttatctgccacatgcaactctttagagcactaggctttcatgagtcactcaaatatgccatgaggctcaccatttgtatagtgaaaaatatatatagtaatttattgtcccttataaaaataaaaataaaaattattgtcagataaaagattaagtaacgcaaaaagtgcctccttttctagaaatgttcagtgtcaagcttgaagagtatttaattttggaacatacttttccttcatcttcttaaggaattattgtgttggtgagaccaattcatactttattcatcttttcttcttccttttaggttcactgtgcaactgtatactcccggacaccctt

SEQ ID NO: 73266 - DNA, 371 bp, Prunus persica
  Intron number 2 from transcript ppa009424m (locus ppa00929 3m.g) derived from phytozome v7.0 (chr-ID scaffold_1; pos 32270210 to 32270580)
agcgctacttatccttttttgaacacccacccacggtatgtatgtatcctgaatcattcagatccaaccatacctctattcccctccctctctttccctcgtcgtctcttctctcgatttttgcttcaccgcctactttttgtttcctttttaattattttccttccgttttctcgagctcttttcaatatttgttttcttctttttcgtgttgtgtttttctctttggaaatcggttcagcagtgagtttgcagttcgttattcttcctttcgttttcgttttccgtggattttatattgcatgatgtatgtatgcctgcttttgactaaaataattttgctgtttttaaaaactgcagcgcggaaaaag

SEQ ID NO: 73267 - DNA, 493 bp, Prunus persica
  Intron number 3 from transcript ppa011356m (locus ppa01135 6m.g) derived from phytozome v7.0 (chr-ID scaffold_6; pos 23189270 to 23189762 reverse strand)
gcagacacaccggtaagaagtttctgcttttcttcggttggtcttctgtcaccatgtgaggattggcatcaaggttaagaatttctcttaaatgtattaacaaataaaagagtgaaggaacaactgagtcctttcggaactgttctttacaacatttattgacatagtggtctggaaaggcatttattttaagcattttcatatcacatttcgtcattttcaattttcatactgccgtgatagtctgtagtccgtagtcaatatcagtgtgatattcacggattatcgtgtgtctcataggatatatgaattaggggtttaatagcatgattaggatgcaaaaagactacccttgcatattgatcgtatttcattgcagacagctgacaccccccttattttgatattttggtaaccttcactgagtatttactttgtttttcttaaatgcatgttaggtagttaccttttgggaaggagagatcgttgacac

SEQ ID NO: 73268 - DNA, 618 bp, Prunus persica
  Intron number 1 from transcript ppa004983m (locus ppa00498 3m.g) derived from phytozome v7.0 (chr-ID scaffold_1; pos 30892259 to 30892876)
cgagcattttggtgctttgcagctctcagttaccggtatttcttttcatttttaattacgttagatggacttatatttacggtgaatttttattttgtttttattttctgggtcttgttcagaaacttgtataatgtgtggaagcacttgattgtttttgcattacactactgcttgattgctaagaaagtgcatgaaacaaattgaaaattttgaagaagccatttggtgagtacagcaaattttcggttacatgcacattggaggatagaggatgagatggtgacaaatttcccaagggagtaagagtccattattaacatggaccaaaatgtaaccagcatagagcacagagagagctcttgattttgtctgtgtaccacctctctaatagaagtaggttccattggataggtggactctacctccattagagcggtggtacacaatgtggtcttcctagcattactcataaccataatacttgcttcagttctttcttatgtattgtgtcacaccaaaggaactgatttcaaatgtgtgagcctgaaagcttattcttatttcttatttatttttgtaggtctctggtttcattccttgggctgctcgcttttg

SEQ ID NO: 73269 - DNA, 552 bp, Prunus persica
  Intron number 3 from transcript ppa010188m (locus ppa01018 8m.g) derived from phytozome v7.0 (chr-ID scaffold_7; pos 20974838 to 20975389)
gaggcactggtaaattttacgtttccctgttttctgtctgattttctgaatagctgttttgtttgactatcctggcacaagtatttcatgtttagaattaggtttttgagaagaatgtgattcgcctggataaaaagttcactgtttcctggtagtttttgtattggattttgatagatttgattaacactaatcagcacaagggcaaacaaaaacaaaaccagaaaaatactttgttctactatggtccctgcctgagatgctaaagaaatcaattcccgtaaaagtaaagaatttccgtggattatttttttcttgtgtgagatttgtttttctgtgaagttgatgatttttctggagttatttcagtctaaaacaaatgcggtcatgttcgaggctttccagcatgtttttcagtatatgtatatgttcgtaccttcgttttaatgggaatttcggagctataatgtgctgtgttttgatttggacttgggctgaatggtgatgaattgtgcaggaaaaaccacttttgtgaagaggcatctcactgga

SEQ ID NO: 73270 - DNA, 934 bp, Prunus persica
  Intron number 1 from transcript ppa003987m (locus ppa00398 7m.g) derived from phytozome v7.0 (chr-ID scaffold_1; pos 2820546 to 2821479)
gctacggcatcaggtaaagctacagactttacaactctcgttgcccccaatttctcgaatatcgctgccttttaaatcgaaatgacgacttgggttctttgttggccaaattttagacgctatacaatgtagaattgaaataaaaggcttaaaatttgaggaaattttcattgtttcgcgtcaattttgagaagtatggtttgggtttaatttgttgtttgttcttttgctatagcctatatgcaatgtaccttgtctctgttattaaaggttcgattttgggatgtgtgaattgttggggaagattggtctaggttgctgctggctaaccatgaatataatagcaccccatttattgaaaattaaaaaggattgggtgtttattatttttgagatacataataatacgatgttatgagatgaagatgtatagatatagaaatcaaaagttaggatttgtgtttatgtgtgacttttatgtgaagcttcaccggtgcaacgctgagggatgacagtaggtggacgtaggatgggattgagaaatggtatttcagatatctatctttgaacaatagttggtgattggtgaatgaaaatgatcccttttgctaatttcacaatgtactagcacaaatgtgggtgatttttagagtatagttaccgaacaatacaaaaacgttgtttgcgtaaactaaagaacaaaacatcatgttcatattaatgcttcacgaaggtgtatcttcgttccaatattggagtgaataatttcaattcaaattctttttttatataaatgttgcaagaaaatttgccctggtaatttaaacttcagcgagaaagttatatcataatttcattgttttctaaagttttgttattctacttcgtggtgtgtgcagtggctttcaaatcaagggaggatcatcggaagcag

SEQ ID NO: 73271 - DNA, 953 bp, Prunus persica
  Intron number 3 from transcript ppa005566m (locus ppa00556 6m.g) derived from phytozome v7.0 (chr-ID scaffold_2; pos 10361186 to 10362138)
gatttgcaaccatatttgctggcgaactggtatcttggttataaattatatcctacatgcatgatgagttattgtgcagcgtacaaactgatatttcttatctgggccattgcttctttgcatacattctgacactcgttcctatccatttttcactattcttcaataaagcacttagttttaccattacttgtaaaatattgttctctctgcatttttttttctttcccaaatttaggaagggggagggggaaggggggaaactcacacacacacaagtaccatgggagcttgaacttaggaccacttgggagcacaccaaaggccttgaccagtccaactaacaccccattggtctctgtgcatttaacttctactcttctgtcatttttggctgcacttcacatggatttttccatggccagtcattttacatggcctaaattttgtgcttttgcttctatcatgataatggaataggaaattatagcattgagcagcttttttatttgttgttcgagtccatatgtatttatggacaagctgggggtattagatatggttattatattttcaaggatcatgtcctttttgattgggggggatatagtgactattgaatcgagatgatttttggacagtgttatataacgacatgagaagacaggaaaatttgttcagaatctagtaaagacttcattgatctctgttcttgctgcagatgcaagagtagaatgacaaggcctttgtgatccgatccacctattctatttcccaaattattgaaatcataccatgccaggaaaaaaaaacataccaattaattattgtgaaattttcttatttccttttcagttttggcaattgcaaccacctcttttttttgggcaataatattctgtttctatttttaacttgatagatagacaggtttggacatttcaaattgtggc

SEQ ID NO: 73272 - DNA, 213 bp, Prunus persica
  Intron number 2 from transcript ppa012272m (locus ppa01227 2m.g) derived from phytozome v7.0 (chr-ID scaffold_1; pos 29977156 to 29977368)
gcgaaaattccagcttattcaagaagcctattcaggtatataaacataatttttttaaaatggtgtttttgtgtgtgtagggtttcttcttgaattattaattattttcatttaaaagaatcttcgagtgttgattgatttgatacagcttttgtttaaccctgttttttggttttgattggagcagtgttatcagaccagaggaagcggacc

SEQ ID NO: 73273 - DNA, 467 bp, Prunus persica
  Intron number 1 from transcript ppa008129m (locus ppa00812 9m.g) derived from phytozome v7.0 (chr-ID scaffold_1; pos 35668374 to 35668840)
tcagcggccgaagaagttcaagaatccgcagacaggtagcatttctaattgtccatttatgtcttctctagggcttcatttttaatcttttcattttcccaataaattttgaacttttctttgttttattgcaaccttggtttacatcttggatttggtagcttccagctaatttaaatcaacttccagcgttaggaagctttcagcagattcgttttttgccccaattaatccaaaattcctctcttttttccctgcatttcctcaacatttgcaatttgtgcacgtgctcattgagttaattgtgtttatctgcaatctgtatgctgggaaagacgaaattagggtttttctatatgcacttatttttcgcgatgaaaggtgcattgaatgctgggaatgatattcagtttggttttggttgctgtcattgatttgttaatttaatgtttatgtggttttcaagg

SEQ ID NO: 73274 - DNA, 769 bp, Prunus persica
  Intron number 1 from transcript ppa013555m (locus ppa01355 5m.g) derived from phytozome v7.0 (chr-ID scaffold_8; pos 17417420 to 17418188 reverse strand)
aagctgcttggaaagctgagctctctcgccgcgaggttcttttttctaccacttattcgattaggttctttaatttttttcattcagactttctgccaaacacctctagtgcaatcctattttctggtttgaatttaattttttcatcatgggcatctctgttttgtttgtttagattatcaattttgtttctttgttgtttgatttaagaacccaattggatttcaatttcttgttgttgcagagatgcagaggcaccaaatttgaagttcaaattggtgttactttgcgtagttaagcaatgataaatatgcccaattgtctacagttatgaaatcgttttattgttgaatgcaaccttgccaagttcacatcaagctcagttcttttcactcttcatgatcaagttgctttttaacaatgcccagccagcaacttcccttgttaatatctgaattaaatgctatgtgggtgttaaaaatatcaatagaagctagatgcagttttctcaggaccataagtttttctctgctttgctgcgtagtttgttgtgtgtttattactagtctagactgcttcataggaaattcagaagagctgtgtggcctgtaatcacgtttatttttgaaaatatttgcttgcaattgctaatttatcaaacatttaagttccgttggaggtgctgatgcacttctgttttctgttttagcttcatgaacattgttctgtttcaggcagagattgccaggcaagaagcaaggctgaaaat

SEQ ID NO: 73275 - DNA, 545 bp, Prunus persica
  Intron number 1 from transcript ppa013088m (locus ppa01308 8m.g) derived from phytozome v7.0 (chr-ID scaffold_1; pos 3322515 to 3323059 reverse strand)
tcgaagcgaggtcagctcgcctccttagctctcttcctttgtttcttctttgcctatgtttctgcttaattctctgtttgtctctcatgaaaatgtagcccaagcatgctaatcaacaccgtagattaccagtattgtttatcatgtgttaaatctgctttggagtttttgagttctttgcccactgagctgtcgtagggaaaaaaatgaaaggggttttagtgttacattgatttgattcagcagtttctatgtttaccttcgtttttatcaatcagaaatttgttacgaaaatcttaataatatttcagtgaatcatgtatttcaaggattgcgatgtgggtttgttcggttgataagaaacctttgtagaaccctagaaattatgtttttcaatctttgatactccgcagatgtatcgatctatgatgtttcatttttccaaaagaaattaaattgacccttttttggtatatagtatcttatgattctgatgttgatcttcttgtttagggcgtggaggatccgctggtaacaagtttagg

SEQ ID NO: 73276 - DNA, 757 bp, Prunus persica
  Intron number 1 from transcript ppb018847m (locus ppb01884 7m.g) derived from phytozome v7.0 (chr-ID scaffold_2; pos 2803665 to 2804421 reverse strand)
gaaagcggcttgattcaggtcaggtggactatttgccaaagttgtaaaattgtctaaattgtaaatgtttacctttactaattttaaattttaaatacacctctttttttttcttttttttatccaaccgttttcaatttttttcggttcagaagaacttcaccagtatttctggcaagatactggcaccatcaatcaagtagcaaataagggttcccccttgctaatcctaaaagcagccccaagactttattttattttatattttctttgtgtcataataatttacgaattattatggtaaaaatttatatttcttttttgtctctctgggaaagaccaaattttgtgcttaagtggaaagtgggtggagagccctcctgtctcctcccgattcctgagtcaaagtttttaggacatgtgttgatgcagatactactgtgttgaattcaacaaacacaacaggaagagagtaaagtggtcgcgaagcagctgcttcttcttctgatcgcctccacaggacacaagaacttgtgctaacatctcaaagtttgtttcttttctttttctccttggatttcctttcaagtgatgaagtttccattttgggttttttcgtttatgggagtagcttttcaaatttgatttctttgttttctgtgggtagtttttcttttttcgttttgtttcttcatttctgctgatttggccaatcaaaacagttcttctcatccgccgtcagaggtttgcagtcact

SEQ ID NO: 73277 - DNA, 881 bp, Prunus persica; identical to SEQ ID NO: 72444
  Intron number 1 from transcript ppa011982m (locus ppa01198 2m.g) derived from phytozome v7.0 (chr-ID scaffold_1; pos 37938717 to 37939597)

SEQ ID NO: 73278 - DNA, 969 bp, Prunus persica
  Intron number 1 from transcript ppa007780m (locus ppa00778 0m.g) derived from phytozome v7.0 (chr-ID scaffold_3; pos 12673090 to 12674058 reverse strand)
ttggaagaacaatgtgagtatgaccagaaagcctttaacttttgaacaaagctgatgaacaagagagagaaggaagtgaatgaagtaaagaaagaattggaaatatttcaaaagaaatacctatcagaagaaggagaagataaggatgcctaacttcccaaagttgcacaccagtttgagtgtccagtttcttcttggaagattcttgatgcttcagcctatcacattgtgagtctggagggggctgttcagaaccagatagactttttggtatccccatgaaattttaacatttcccatgggactctagcattttccattagctttttacgctatcttggatatcttggactatagcactttacatcaccttctcaaatggggttgtaactgctatcttggaattatcctgatattgatgttacttgaattactgaggatcagttaggccacattgaccctcatcttttaccatggctgtcattttataaatttctcctcttattttcttcccttgatggtatgcatacctgctttttaattgaccaagcttccactctcctgaaatacgtctatttgttatgtgccactctaattgatttcctcttccttttactcccttgtcaattataactgtacctacaattagttcgctgtcttttattaatacaaatttgagtttgaattgttgttttttcacttatcagaaggaggtacttcatgaatttgtttaatgtcttgtgttctccaatttattcctcatttattactgtctctcaatttttaataatgatttatttcatcttctttcagagttttctctagttatatcttcaacttgaccaaattagtctgtttctcaacttgaacaaattaatgcatgaagcttgtaaacactgccattttcttttgcaatatctttgaaagaactcctgttgtgtactagttcacagagtggggataaggaag

SEQ ID NO: 73279 - DNA, 1032 bp, Prunus persica
  Intron number 2 from transcript ppa011604m (locus ppa01160 4m.g) derived from phytozome v7.0 (chr-ID scaffold_6; pos 27138969 to 27140000 reverse strand)
tacactgctgcttatactcccagggacagggacaagtttgaagggaagattagggcagttgttcaatccctcattgatagtgggattgatgttaaagtttatcttgactgaattggtttttctttctcctttgaatttaattttctttggacgctgtgagaggttttgtatggaactcttatttgtgattataaaggcatatcattgccaatttctgatagttagctaaaggcagatgagctttctctgctctctattgccatatgttgaaatttttggaagaaattttttggtgtggtgagggttattacaatacatgttaaaaagatactgtgtacgattaaatacgcggtatgttaatgtggtgttaaaaatccactgaaataataatttcggattcgaaagactatgtccctatgtcacatttgtgacactaagactgagtaattcaaagtccattcaagcacttcatatcgtggaccaacataagcatgatcggaactaggtttttaaagcacctcgtacatgccagtataagtaacatcgaccaacgtatgcacaaacttttttttattttatttacaagagcactctagacacatatctagattttggaaaacacaaacctgttttccacctacattttgattattattgtttttgtttaaggagggaaatatggttattttcttttgatgcccttaaaagaaaaaactgccaaaagaaattagcgggtataaaaggaggctactccggtcattggcaaattccagacggagagaaagaacaaatcgttcttgattttattatctttctttctgttccagatattctcccctcccctttgtaacgttcgtcggagtctctcagtctctgattctcttgaagcaacaaaggtagtctctctctctctctctctctctctctctctctctctctcgcaaaccattacagctttttcacttatttgaattttatttatggtttttcttttcagattctgtggcttctgtttggtcgttgagggaaagg

SEQ ID NO: 73280 - DNA, 320 bp, Prunus persica
  Intron number 1 from transcript ppa009136m (locus ppa00913 6m.g) derived from phytozome v7.0 (chr-ID scaffold_1; pos 34531163 to 34531482)
atttcgtgcaggtaccaattttttataattataatttgtttttccttttatatgtaatttcaaaggtcatgtgtcatgtggaccacattatagatacgtgttcttcatgagtcttgatcagttaggttggattagatcagagggacccatgatgatacatgtttgattgataattaaacttagtcatggttttcagctaggggttttaattaattaactagtattaatctatgattatacatatataatagatggtttttatttatcatttggtgggggcatgaatgcagaaattgtactcagataaaaggaaggaaaag

SEQ ID NO: 73281 - DNA, 436 bp, Prunus persica
  Intron number 2 from transcript ppa005116m (locus ppa00511 6m.g) derived from phytozome v7.0 (chr-ID scaffold_5; pos 16996539 to 16996974 reverse strand)
ccctctctaggtttgggatgttaattttattagtttttcgaataatggaaatcttttagtttgaaacttgaaaatttaagtcgaagaaaaaaacacaattgtagaaatagggaatgagagagtattcgtaactactattgttgactgaataattagagagaaaatgtgaattagggttggtgaagtggtgtagtgagcagctattttggctgaatttgtttggtaatttgattatttgattgtgccaaacttcaaaaactagttcaatatccatacctgtaatcataagcattgccatgagtgtttatgcaaaaataaaagagatatttccatgtgtattgctgggagatggcgtgtgtgtgtgcaagctcttttagttcatcatttgcgttttcttgcgggtaatatttagatttttttttaatgccagacgaca

SEQ ID NO: 73282 - DNA, 179 bp, Prunus persica
  Intron number 1 from transcript ppa005116m (locus ppa00511 6m.g) derived from phytozome v7.0 (chr-ID scaffold_5; pos 16997050 to 16997228 reverse strand)
agcatcgagcctttcaacaagtactcgttcttcaactcctagggtttttatgatcgattttatcaatttactttcgcattaaaccctagagaaaattaattttgttttctgattctgtttttctctgttttcaatcggacttaggttagtgaagcttgtggggagagcgttctacgacg

SEQ ID NO: 73283 - DNA, 553 bp, Prunus persica
  Intron number 1 from transcript ppa004611m (locus ppa00461 1m.g) derived from phytozome v7.0 (chr-ID scaffold_5; pos 11826573 to 11827125)
agctgcagaagctgaaggagttcaaacccaccgtgtgtatttctcgatcccctttcgtttcttcctttctgtgtttactgttcttgtgttgtgtagttgctgagaaaatgtattcaagatttgaaatgtggtttgattattcttgatttagggttcttatatgttgtttgggtattttttgaaaaaaattaaaacctcgattcttgatttaggttcttagggttttctttgtcgatcccctttatttttcttcaattttatctttattttctcctggactcttttgttgcatgagactctggctggtttctgagagaatgggcaaaacattaaaaacctgaaatttggtttgatgatccttgattttgggtttttcgtttgtttggttactggtaaattgtgagaagatgtgcaagcttcataagggttcttgatttataggttcttaggtgtttgatcaaattaatgctataatcttgaaatgggatttgacacaattgttattatatccttgtcaggcattcccaattgttcaatcactgaacgacaagaa

SEQ ID NO: 73284 - DNA, 766 bp, Prunus persica
  Intron number 1 from transcript ppb014210m (locus ppb01421 0m.g) derived from phytozome v7.0 (chr-ID scaffold_7; pos 4349665 to 4350430 reverse strand)
tgtaagtcgaaaagttgcttacatataaaaccatttcaaaaaaataatacggcggttacatttaactacgtcgtttttaactaacacgacgcaatatttttcgttcgacgtggaatcatttcatttaacgtcgttaggtttaatataaccgacgtggattttaatttttaaattatgaatagaattttttttcccgtgacctttcagtttatttttcaattacagtgcgttataaatagagttttttttccggaggaaatttaaaacgaaggaaattaatattctgcaatatgtaaagtttcttttttggatgacagatttaaataaaataagaatataaaaacaacaaatgtgtaagtcaagtagacgaaaagttgcttacatataaaaccatttcaaaaaaataatacggcggttacatataactacgacgtataaattacaaaatacgacggtacatttaacttcggacgtggtaaataaatacgacagtagtttgtaggtaccgtcgtagtaaactcaaaaattaaagtacataagtaataactcgcgtcatggtagattatttaacacgtcgtttttattaatttaccgacgtggatttctgtaatatacgtcgatcataccgacgttgattttacaatttaaacggcgatttttttgtaaggaccgccgttggttttaaaaatttattctataaatttgtcgctttcattcattttcggtttacatttaaggttccaagttcttcctctctcagtctctc

SEQ ID NO: 73285 - DNA, 538 bp, Prunus persica
  Intron number 4 from transcript ppa016048m (locus ppa01604 8m.g) derived from phytozome v7.0 (chr-ID scaffold_8; pos 15350153 to 15350690)
cttcattcagcttgcctgattaccaatcaagcaaggtacttggtctcattattgcatattggaaagaaaaaagaatatatattcaatcatgttgtgattacttctgacctgaaaacagctcttaaaaatttatcatggctcagatgattacctttttgtactggctcagctgatcacaagtgagaaagttcaaacaaattgaaaattgtcactgctaattcagaatttctactgtgaggacaatagctttctagcttctgccaacctttatttgagacatttttggtttgaaatactacaagaattggtgctctagttagaaaatctgtgacaggaaaaagaaaatttctgtgacagaaatcgctcatttcctcgggacacatatttctacttgccacttaacctttgaacagattgtttttggaagagacagagactagtcaccctatcttatcccgcacaacaataattactattctgaactaaaaaacaactcacccatcttgatttcagctccgggttcgaatacaccaagaat

SEQ ID NO: 73286 - DNA, 697 bp, Prunus persica
  Intron number 1 from transcript ppa013501m (locus ppa01350 1m.g) derived from phytozome v7.0 (chr-ID scaffold_1; pos 41049285 to 41049981 reverse strand)
gcctaaaggttttatttcttttcagcttgctcttctgttgaagttctgttttttttttctcgtcatatttttgcaaaacttatatatgttattgaggttcttttgctttttatatgattaggttggcttcttgagagctttttgcatcaagctttctcattaagcttatcagagctttaggtggtgttgtgtactttgaatcttcttagaccattttagcaattttgattggaaacaatgtattggacactgtacgaattgaagtccaattttatgggtttgagtattgaaaattctgttagtaaatttttcgttgctcttatcattatctgtagtaccttgtccatgtaagttgaggctcccactctgtccttcattgtagatatagtctgaagatgccgaaaatgaattatgacacagttctgagtcattctcgagaagtgtatgctcaagttagtcacacatgtaggaataatgttatcaatgtaattgtttatggtactgcattagaacccttgtttcatatgcgttgctgatgttggcaccaatcaaaacagaatattgaaagaggacaaagcctatattttgacgaaaataatgatacttagtttgctccatgatcacaccattgtgctttggtttgaaattgacttatgttttctcatgctatgcaatatctatttgatagagaaagaaa

SEQ ID NO: 73287 - DNA, 519 bp, Prunus persica
  Intron number 1 from transcript ppb003710m (locus ppb00371 0m.g) derived from phytozome v7.0 (chr-ID scaffold_3; pos 18048634 to 18049152 reverse strand)
gagatacatctttcattaaagtggtgagtaaaaattctctcttaaaactaaatagatatttgaagagacacagttttgttgaaacaattttggtataaatttaagacattttttcttctcatgctttctcctattattgtgttcaaagaattgttttccaagttaaaaaggaaaaaaatccctaaaacctgagtaatgcggacatcatgacaataaacaatttgtactaatccaggattagcaatttggacagccaatccaaaagcttttagacttctttgcaacagtttaataatcatacctttcgatctgtcgtcaagtctcaaagcctccccaaaaaaccaaaccaaaaccaaacctgactcaaagaagaacaaaatacaagacaatgctcctcttgttcctcctacaccattgcaatctcttctaacacagactacaagtaactcaacacaacacaagacaacaaaaaatctcagacagttgtgttgttattgggtcatcttcagtcttcttcta

SEQ ID NO: 73288 - DNA, 857 bp, Prunus persica
  Intron number 1 from transcript ppa005081m (locus ppa00508 1m.g) derived from phytozome v7.0 (chr-ID scaffold_3; pos 20557613 to 20558469 reverse strand)
gtgaactctgcataatttctgaagaaccagtgagtattttctccctttcttctcaatttgttttttatcattcatggtattcatgtctttgatgggtatatatatgctcttcacaattgggttattgctctttcgaacatttaattctgtattcgaaggaaaaaaaaacagaaacagaaacattaattcttatatttttcacattccattcaatgagatatcaattaagttgatggaagagaagccaagggcttagaattgtattggagaattgttgatattctaaagaacagtattggcgcttgtattaatctgtgttccaaatattatttttataggcgctatcagctttttggatttacaatgtggaccttcccccctatgaacacacttacatacatgatatatgcttatatagttctaaaccattgcatattctttgggtagttgttcaaaccagagtgaaatttttcacttaagttaaaagtggcttaagggaagaggggagatgatatgcatgttaggaagattttgtccaaaacacctctttctaatatcaaaaaatccagtgaggtgtttcctttaaactttagatatatttgactgatgaactggatctgcaacaataattaaacattgaaccgccttattaagtgacatgctcttgaactggtcctttccgttgccccttgctaaatgaaatttgtgttatatatatcaaaccttgtattttgagaagaattcatatcaagtagataacctgttccctgcgtctctgttttacatgtaatgttctttatttttttttctttcttggatgaatttggatgaattttttttctttcaggtgccgcctt

SEQ ID NO: 73289 - DNA, 1032 bp, Prunus persica
  Intron number 1 from transcript ppa009250m (locus ppa00925 0m.g) derived from phytozome v7.0 (chr-ID scaffold_6; pos 10380258 to 10381289)
acgtcgccactaacgttgcaactgcagaaaggtctctatttgtactttcttctttctcttcattcatctaatcttgttaacatcataggctaagcgagcataagcagggcctgttatttgatcaatgaaaatttgctgaattgaaagacccttttgttaaagatttcattttgaacttggtatgtgcatttctggaactgaataaccaaacccagaaagttatcatcttgttttccttgagtgagatttttgcactggatgaatttcggggttcttcctctttttgcaatcttcctaattattgccagtgtttctccttgtttttggggccagaaaattactctaattgtataatcgtacgggtttgtttgttttgccattcctctcaatttgtccaataccatccaccattccataagagtaaaagtgggtggttgttgcggattttagtcgcattaaggcggattgaaggtatagtttgcttgctctggataatagtcttttgttcaattcaccgttgaactttgatccagtgaagtctcattaaattactcgagagtaaacatttgaacatgattgtgtgtgtgttgatgaaaatctaatgattaatatgaaatgtcttgtacttacttgccctgtgcttttgttctattaacagtttgattttgatcaaatctaattcgagcatggcatgtgtctcatttgattacttaaaagtatgcatctgaacgtgcaatgaactattacatggaaaactgtttgtgcttatccgaagtttggaaggaatatttttgttagtgtctaaatttggaaactcttcttagtcaagaagatgggtgtgtgagtgttgggtttagtccaggagagtgagccgttttgaacttgggttatgacacttttttgagattaaataagcataatgtttttgtttaccctctaaaaattatatggagttggatctagttggggcctaatttaaactaacaagtggaattcattatctatttccattcaggttggttagagctgctc

SEQ ID NO: 73290 - DNA, 610 bp, Prunus persica
  Intron number 2 from transcript ppa025106m (locus ppa02510 6m.g) derived from phytozome v7.0 (chr-ID scaffold_8; pos 1014757 to 1015366)
ttcttcaaagtgcggaaaagtgtgaagatcaaggggtaatatattctgtgaggttaagaattgctattttaactgtttgatgaacttgtgctttcattatgttcctcgattggtggagtggtttactatctctcaaccagatgtgtctagatctttggtatagtttctttccaaagttgcaaaaagttattttcattttaccttcttcatgctagaaaatcttgcaatacgtaaatatgacgacattcctaatctaagaatttgagctaaatgttgtatcagaatctgaaaggttgggctaccttagtagacatattctattactttgcaacattataatcaacatagtgactgtcaggtgtccatttttttcttggtttctttctgacttctgtcactataccaaaaaaaaaaagagaaaaagagaaactgaatgatgctgctccaatactgcttttgtttttgtgattatgcagagtttccactttgtcactgttatataaattaagaaattattttttatcctaaatatattgctatattgttcaccacactagtttccatgctatattcaggtcagcgttgaagtcaaagttactgctggttttcc

SEQ ID NO: 73291 - DNA, 962 bp, Prunus persica
  Intron number 1 from transcript ppa012731m (locus ppa01273 1m.g) derived from phytozome v7.0 (chr-ID scaffold_3; pos 16304110 to 16305071 reverse strand)
acacaaggcgctatccctcgccgccgtcatcacaggtaacaactccgtcggaaaacacagttgaggtcatctctctctgtatgtatatacatatgtattttctctctgtttcttccttattttgagtttgtttatctgctcttttatatttttctatgctctcattttttttaaatttagttatagttcgtccattgcgggtagacgttgaatctaacattgaaaaatatgattttgggtgatatgaagatgaaaaggtttgttcttgagaagattgagcttaggcgacaacgggcttggtttcctcccacctttaggagtaagtgatcagagattacgataaattaatactttcagtggaaagcattagctttttaaaactgggtactaatccaagttcatgaaaattcagcttagtctccatttttctttttttcatggatcgttacatgatgtggtggctttggttgaaccgtgaagtgggttgtggtaaaatgaagagaaattagtgtttcaaggtcatgagcttggtttacaagtgggtccttgttctgctttttttgttcaagttttatcaacaaatgtttggaaatgctagaaagatgggacgataaataaatggattctaatgtaatcgaggcagataatttgcattagccagtttttaatattttgatgtttatctttgcaatgctgccttaatagtgcttgaaaccctttaagcaaagctttaccattttctagtaaactggaaatcttcaatagataaatagtaagctatgtttaacggcacggtagaactttggccctgtttttgcatagactttctgtcttcccaatttcttatgattatcttctttttggacttttcttcattctaatgcagccatgtattagtaaattatacatatattgaagttatggcttaggcaccactttgggatgtgtaggttggagaagaa

SEQ ID NO: 73292 - DNA, 621 bp, Prunus persica
  Intron number 2 from transcript ppa009526m (locus ppa00952 6m.g) derived from phytozome v7.0 (chr-ID scaffold_2; pos 17661493 to 17662113)
tcatcaaaacccagtttgggaaactcgatatcttggtatgtatatgatcctagcggcaagtttcttgaaaaagtttatcttggtatgtatatgatcctagcggcaggtttaatagaaggagattaaatatggaatcatatagaaaatgaaattggagaataaaaatagcaaaccaagtaataactagcgtaataatatcatcaacaagttaatctttgaaatgattagaagtcttcggctttttgaagaacaaaacaagattcacgtaactaccagttgtggaagattttactttcaaatctaactctatgtctgccactctgtttttgtttctcggaatcttttcatatttgatatgatccctttctgtacaatttacaagtaccctagaaagatcagtggctggaattaaggggttggcaaagtagcataattattgtgcttctttaaaggcattggcctttatggttggtatggttgtaaaaacaaagagattgtcagagtactcagaggatctatcaactttcttttcatttcattttctatatataaaaaaatctgttcttttctttgctaaaaggaaacagaaagtgaaacagttggactctgcacaggtgaaca

SEQ ID NO: 73293 - DNA, 1044 bp, Prunus persica
  Intron number 1 from transcript ppa001880m (locus ppa00188 0m.g) derived from phytozome v7.0 (chr-ID scaffold_15; pos 45443 to 46486 reverse strand)
tcaatcgtggatttcgtctgttttgccaatcaaaggtgatttctaaatacccttttcattcgcagttgatttcgttattttggttggtctagctgtaatactgttggcgagtctagttaggattttggtttcttaattagttagaattttggttacttaccaattattatttaattttctattgtaatttagatttattttctattttatttaggtcaacacatctttgtactgtataaatacgtccatattggagaagaatgagaatatagcatatatgagcataaaaaatataaaaaaagaaggaaatatatctaaattacaataggaaatatatctctattacaataggactaaataataactggtaagtaaccaaaattctaactaaataaggaaccaaaatcctaagtaagtaaggactcgccaacaaatacaaatttatgtttggtattttggcatgtaatgttactgtgtctccaattccatcaatattctgaattaggagcttagttgacatttctagacttttaaaatgaggtgtaagatattatttttttgttgttgaggaatataatgtacttctgactaaacgtactaggcaatccggttctgtgtttgtcacctttggttttgttaaagttcttatattgattcttttcaaaaatggaagtagaacttgatatatgtattaattccagagttttctggagctatcatctctctgcctagatgatttgctctgtttttcttatccctctgctggatttctttaaagtattccacattcatagaggcagtaagtgttgtgctctagaatttcaaaaagtgagatgcatggaatttctatcttcatcatgccatattcaaaaggatacaaccattttggttcttattgatctcattgtgcatatgttataaagtttttgtttgttttcccttaactgtagaaggctttgaatgtctgatatacagatggttatacagctagcgggcactttcatgtatttttactaaatgaaactcctgtttcagacagaggaa

SEQ ID NO: 73294 - DNA, 688 bp, Prunus persica
  Intron number 1 from transcript ppa018823m (locus ppa01882 3m.g) derived from phytozome v7.0 (chr-ID scaffold_3; pos 21302665 to 21303352 reverse strand)
gcaggtcactcagactgacatctcctcctctgttggttcgtttccctttctcttcgccgtctttctcatgatttgcttgcctttggttgacatttgaaaaaaatgaggggaaaatcacaacaaaaccataaatttttgtaatggggtttttttcttacaatatttgagcacacactgtttgctaacttttctctgattgtttctccaaaaaccaaacagtgtttctcttctttttttctctttggggcttctctgtttctttcgtttttaataaaaatattgatgtgcgggcagcgggtgttgttagaagagtgctaggaagattttctttttctattatggaaagggtattttctcttcacgggtattcatatttggtggcttaattacattgtatttgctctgaagtacattaattttgtaacctggtttctgggtttgccattagttactgttatcaaccatctagccatttgttggatccgcttagttgctccctaattcaggtttctgggtttgtcattagtcactggctgttttgcataagaagttgtaagaagaagacagaattttctgggaaaaatgttattcttttgctggttaccaggaatacctcttcatgttatttgacattgagcctgaaatatctttaaaccctattctcttggtgcagataaaattttgcaag

SEQ ID NO: 73295 - DNA, 732 bp, Prunus persica
  Intron number 2 from transcript ppa005583m (locus ppa00558 3m.g) derived from phytozome v7.0 (chr-ID scaffold_5; pos 11829970 to 11830701)
tcttaggtaactctgagcaaaaactctaacacgacgtcgtttggtaaaatggttggtaattcggtaaatgttggttgcccaaaaaaaaactaatcaactaaccaccacatgtttttgctttcctcttacttcttgaattttttgaatttcttttgaattttgcatgtttttgttttatttttcttttgttgcgcgaattttttttaaatgaaatcgaaacggtcgtgtttgcgtccttttggggcggcggcagactcgtttacacgttttgctccggttgtttctctggtgctcttctctttgagctttgacttctccatccgacgacgttgaagtacacgtggctcttgcccacaaaacgtgtggggtgtgtgaatgtagtgggattgtgacacgtgtattcaattgcaaattgagtcaattcgggtcgggtcgggtttgacctggtcgtccagaacccggcctaggctcttacgccggtagggaagtttgaaaacttgaaaccactaccaatctttgatcttttatttttttgttgcagctgggaatttattctgtttgttaaacgttagtctgaaattggtgcagaaattggatttgattaatacaaaaaaggctacattgtttattagtggtgctctgtgtctgtcctgcttgaattagaaatgtggaatctttaattgtattaactgcaagtgtgtggggcgttttggttttgtttacagggtcagg

SEQ ID NO: 73296 - DNA, 560 bp, Prunus persica
  Intron number 1 from transcript ppa010705m (locus ppa01070 5m.g) derived from phytozome v7.0 (chr-ID scaffold_1; pos 3316601 to 3317160)
caggggtgacttggaaaccaaacttcctaagccatgtaagttcattcatctctctctctctctctctctctctctctctctctctgtgtataaacgttagggttgtttgttcttcttccactattctctaacatgatcttcaagaaaatccgaagtgatatctatttggcaagtctgtttttaatggaaggattaatttatcatggggcactataataatttgacacatagtctaggattatttgaatcaaaatcatgtggtttatgacacttctttagttctgtttttcttttccagagatcctcatccattccttgagataaatctacatattgaaaatttctttaaactaaaattcaaattaacaagattgattttagtttctatctctagattgagcaactccccaactgaagcccagctacctaattaatttaagttgatattgcttcgttttatattattggaaaactttccttgacaaattaatggcaactacaacatgttcaagtgcgctaatatattttgtattttgttcgacaatatcccaatttcagac

SEQ ID NO: 73297 - DNA, 433 bp, Prunus persica
  Intron number 1 from transcript ppa003208m (locus ppa00320 8m.g) derived from phytozome v7.0 (chr-ID scaffold_6; pos 22955354 to 22955786)
ggtactcttactttcagaaaatggtttttgtttcttgaaagaaaaaacttttcttcttcctattttgttgatttgctttcatgttttttcactggtctcgatcaagtttccacgttttcttggacttcaagttgctccgatttgtgctggatttatttgggttttggatttaagtcttgtaattctctttaatttgcgtttttgtaacagttttttgatctggaaactctttttaagatctgggtcttgcttgtctgggttatggcggtgggatttttaagattttggagtaaatttagggtctgttttagggtttttagtgtttatgattcgtttgaggggttatttttgaagggttttgttttatgtttgtgtgttatgtatctaattattgattaggattttgaattttggagattatttataggaagag

SEQ ID NO: 73298 - DNA, 835 bp, Prunus persica
  Intron number 1 from transcript ppa017897m (locus ppa01789 7m.g) derived from phytozome v7.0 (chr-ID scaffold_1; pos 43975721 to 43976555 reverse strand)
cttcccttggctctcggatttgaaaggttataatattgctgcctctgtctttatctcttgcatttgtcccgtatgatgtaaattaaatgctcttattcatttgagttataagcccttgcgatatctgtagtggtaaatttttagcgtacaaattttgtagtactttcgttaaccttagggacattttgcggttaaaaaaagccttttgaaaggcttgattgtattcaaatagtagtgatgcataaattgtgggcttatctcattacacatggcaattaatatataattagtctcaatttacagggacagcagaacaaaacttacatggatggtactgtttcaagcttttctctgtgggctatttgggtaattaagtgttcttcatcttgtctttagtgcaaattatttaaatcttcgatcatgaccactctaagtacttttggttttgcagtttaattcatcattcttatatgatacaaatgtcttcactgcaaaaaacatcttttaacagtgatcatgttgtctcaaagttaattaattttttacattttaaattgaaaccaagtcacaagaaatttttgtgggattcatatctccagtaattaagcacacactatttatttcaggggttcactgtctcaaaatttatatatcgagagcatagccttaacatcagcaacatatgcagtggccatgtataatcttgtccctgccattacttttattctggccatatttttcaggtaatgtccttgcagggcgccgtttatatatgatctgcataaaatttaattaatgttcactgtgcttaaatttataaatttcatgtttcaga

SEQ ID NO: 73299 - DNA, 1002 bp, Prunus persica
  Intron number 1 from transcript ppa004985m (locus ppa00498 5m.g) derived from phytozome v7.0 (chr-ID scaffold_2; pos 18538491 to 18539492 reverse strand)
actaaagtcgctgttaagaacttgttgaataacaggtactcgaaaaaaactctgttttttgtttatttatttataaaaatgaaaattttatgtgtactttgtggtttctggtggttttatgattaggcaagatttgatgagaaattttggttttttaattggccatggattggaattcctagtttgtaaatctctgtttccgttgctgaataagcaacaatgaaaaatttgacagtttttggccttttcatttttgggtgttcaaattgcagaaccttactaaaacaggaaagctcaaaactaaaaatagaaggtttttctattccttttttttatatatttataataattcctaattggcgtttggatatgtctgaataatcattgtatcatttctagttgtagtgatggaaagatgcattagttataagataaccgtatgaagttgacttcatgtttgcggagtgaaattttttcctgtaattctatgagtttcaagtttaaaaaaaaattctgttcttacattttctcggcaacaaacagagtacctctctgttggttaattttatgggtggttcactgtttacctctctttttgggtttgattccctttctgcgtgttattcttgtcttgcgtctgttagaattggtgctgtaaagtcacatgctttctgaaaaagaagaacccttctttttatcaagttccttgtgcttatagtcaagcttgaattcatgatgtagtaggcatcagaataagtttctctctctactctctcgtcacacattgactaattcacttatcccaaatttctctttgttgtccttttgcctctgttcgtactgtttagtgtacggctgctatagccagcaattaacggatggtactttgtgccttggattttgggtatctcattatcttttatacgcgtgagtaatgcatttgcttatgacaccgattgattatcaggggtcaagctgagaaggaatttaaagtggaggtgg

SEQ ID NO: 73300 - DNA, 595 bp, Prunus persica
  Intron number 4 from transcript ppa004930m (locus ppa00493 0m.g) derived from phytozome v7.0 (chr-ID scaffold_6; pos 20756598 to 20757192 reverse strand)
caggtttgttataataggaatgtcccgattttcttcatggagtactttctagtattgaaatctttatattattttgtgctcaaacattatcttttgacttctttactgtatttatatattcttaatgcttatccttttctttgatgcattagcatttaggatgactgctgttgcagttaacgtgttttttttctttttgttggggtgggggttttaacttaatggacatggctttttaaacatgtattgtgtgccctgtttgatgaagtttttggtttttgttttttaaataaagacaggaggaggttaaaaaagataatttatagaagaaatacaagagaggtaaggaagagaagtgtgagagtagatcaaattgaaactaaaaaccattcaacgttgaaactaattttggtgtttattttaaaagtacctatatgtgttcttcctttatggttcattactgttctatgttccccctgccccgtcttctttttccatttttattactggaatgtgcttaatgacatgtatgtaattggaatacggtgtttaaattgtagaaagtggaagaggctttggagaagggttctgatat

SEQ ID NO: 73301 - DNA, 325 bp, Prunus persica
  Intron number 1 from transcript ppa004930m (locus ppa00493 0m.g) derived from phytozome v7.0 (chr-ID scaffold_6; pos 20757690 to 20758014 reverse strand)
cagtttgtttttcttaatcggctctacttcctcaggtatgtctaatttagggtttaatttctgaattttctttccggtatgttttttcatatcttctttctttcagctttcattttctgatttgatttttattttaaaattgagaatttgggtctggtgtgctttctgtttgctagaactctgtttttctttttcaaataaaagaattttcgagctataaatatgattactaaattgggttttctgctaagtttaatttctgtataaagattctgagttttaattttcagttttatcaggcaccaactgttggaagctcacgccg

SEQ ID NO: 73302 - DNA, 841 bp, Prunus persica
  Intron number 1 from transcript ppa025444m (locus ppa02544 4m.g) derived from phytozome v7.0 (chr-ID scaffold_4; pos 3325717 to 3326557 reverse strand)
tgaggacattaggattgctgtgaagaagtttgttggtgacgatggattgatgtcgtctgatgacgacggcgatgacgacgacgaattggaggagatgagtgatgctaagtctaaacctaccgtttcgacgccgtgctctgtcatcagtgtccatagagttcgcccatttgggccgccagttttggagtgggggacaaatatggtgatcgtgtgcagtttctttctgctaattattaatgtaatcgtgtgctttcgcacaggatttcatcctttttttttacattgagaaattaaagaatatattttgttatgaaatgaaacagtttttgtaggccttgatgataatcaacctttttttttttgtttctttataacatgttgcatgaaaacagcaagtcttacgtaaaaggtatcaccggtcggtctctttgacaattgatacttgtaaactgattgaacatcaagaacctggacaatctaagaagccttagaatgaaaccgaggtaaaatgtctaaacttgtgttggagttggaagactatcatcctgccgatcttctatcatccaacatgatgataatcttctattgcattcagttaattaacaacgacaatcaacttttacttaatataacttttcaaaattgttgagtttgatccgccattcttaaaatccgttaaatgataatatgtcgaaatgaaggtatggtcatgttgagtattactcaagggtttttgaaaagcatgcatgtctatagccttgaatttgatttcaaacaagaaataaataaaaatcccaaatttgcagttaagatcttaaaaatatttcgaaactcattctct

SEQ ID NO: 73303 - DNA, 1063 bp, Prunus persica
  Intron number 1 from transcript ppa010111m (locus ppa01011 1m.g) derived from phytozome v7.0 (chr-ID scaffold_2; pos 15897718 to 15898780)
tggagcaggaggaggatttcattatccggaataaggtatgcttttgttcttgattgtgctatagtttttctgctgtctccaaacagggttttagtgggatctgctatgtgtagtcttaaataatgcatacatagtttgtctgagtgagagaccaacattactttgtttgcctggttttggttgactcagtagagttgactcggtatagactgtgtcaggataactcggttaaaggtgggactattgccgactaccacaacaaggctgctaagatcaaagtttaagataaattacaaatctgggtcccactatgaacgttgttttaaaattaatcccaaatgtcttaagttaacatctagaagcaattaaattctcaattaagaattttaccttagttatcttgcccttagaatgttggaaacatgtctccaaaaaagacgattactttttattttcattttttataaaggaaaattggtaattatgttaacaaatttatgcatttactaatgacattctttcttaaattctttataaatataaagattcatctacttgtaaattacatgtgtataaatgacgtgagcatgaccaacaatataattagtaaatataacacatatatttttatattaaaaaaattagaatttaagaatttttttataaacgtgacacaaaaagatcaagaagctcttatgggtcctacaaaaaatctctcactttagttccactatattatgggtccaactcatgtaaaagggttgaaaatgacttattagtatagagtcgaaatatcttttttggcaagtgttattagcacttcattttagtttcatggacataatcatgtgtgtgaagaaaaaaattaatataatgttcaatttgagttgctagaagctaaatgataagtgctaaaagttttagttacaattttggatggaagtttttgaatagttttatttatttattttatcctagaagaagagtatttattgtaataaaaaactaactgcaggatatatgtgtaggaattacagcagagaattcaaaaggtgattgatag

SEQ ID NO: 73304 - DNA, 688 bp, Prunus persica
  Intron number 1 from transcript ppa007935m (locus ppa00793 5m.g) derived from phytozome v7.0 (chr-ID scaffold_5; pos 14873393 to 14874080 reverse strand)
tgctctttcggctgcaccatccaaatatcatctctgtaagctctgtttccacaatggttaatggttaatggttatgctctctctctctctctctctctctctctctctctctctctcgttaggttatggtgttgttgcttgccttttcagctctgtagaaaagaagaatgtggtcctggtttatgttttgttggtcaatggacatgcactttttcaattttcctgcttctgcttaattttgtaatctttggtctattgaaaaccaaagatccttccccagttccttgatgccttttaagtttaaccttgcacgctaagatttttctgaaagaaagcaatagaaaaagcttctgcataatgttagagagatgctcatctcctgaggcatatgcacgagtcatcgttgagtcattgattgattgttacagattccctgcttaagagctttccatcttaataaattctattaggctgagtatgtttttttgatatttgggttggcagtgtggagaaactatttgcatctcttacctgtcttattggtatcacatatattctggaaaattggaatcagtcctcttaacttgttgatgttggaacggtagctgtccctttgtgctctctgaccttcgtgtaccaattttattctgcagtttgttgcagcttgtaagaaacctcctgttttctg

SEQ ID NO: 73305 - DNA, 621 bp, Prunus persica
  Intron number 1 from transcript ppa024891m (locus ppa02489 1m.g) derived from phytozome v7.0 (chr-ID scaffold_3; pos 971998 to 972618 reverse strand)
cgagtaatttctgctgaaaatgttctcttttattgccggcccggccatcgttctgttcaatcatatcatatgtcgtaatttcagatgaaaattactatgatttgttgacttcatttcatctccaatagtttcttgtgttgcactaacttggaggcctgctatgagtctctgatgttcatacatgttttccttactttcatgaccggcatttcttcgcaatacacttcttgtttacttcttcctttttcctgccaaatgggtgcagcttataggccaaggcacttcattttcttagctgctaatcttaggaaatcttatttattatcttctagttcttgattttctttatcagtttggcactaaactaacaaaaccatgctttgagattctccttcattccccttagttcttgtttgttttcctcaaagatgtaacctcctaggcatcgatgccgatcggagggggaaatactcctttgcagataggaattagctgaatacttttctgagcttgtgcatattcattttcaactatagatgatgagactggatgatggatttacctttggattatacttcactgccctgctaatattactatgatatgtttgattctgcaggg

SEQ ID NO: 73306 - DNA, 884 bp, Prunus persica
  Intron number 1 from transcript ppa005641m (locus ppa00564 1m.g) derived from phytozome v7.0 (chr-ID scaffold_7; pos 4557923 to 4558806 reverse strand)
gaggagttaacatcaagtatgtcaagcttccatttctcaaatttttgaactttttaaaatcatgatgattttgattcttgttactgctctttgctatgatttctgatagcattttatttgttttgtttgttttacttctttgagtgcctattcatgacgttgtataactgccctacagattttttcttttctattctagatgttttataacagcacgacaatgaattcatagtaagtttaagcagttaaagctactttgaaattgcgtattggttcaattttgattcctgaaactgctgatacagaggagttatgtgcattgaatcttctgtcttttaattttcttctcataagttttttcttcttctgttcttttttctctagaaatcctattgggtatgtagtcagtttattctattcatctctctgtttcagtccagttctttgtctgctatataaagttgctgagaaacagagcagtaagatcaacacacaccaatcataagaaaagaaattaattaagaaaataaagatatccaaactttttgacatactattagttgcatttttttatgtacacctcacatttgcctaattatgtaaagaagagatctgtttgtagtactggaccaccaatttgatttttaatatttctgtatttttagaagagctgaaagagaaatgacatcaacctaaattagtttatgttagagttaaaaagggttccttttgtttttttttctttctgtgtaatgcaaaacctgacaatctttggagtctattgactccaccaactgctggaatggaacaagaactttgcctattcgcaaatgtgtcaaaagatttcatttttgtcttactatttctgctacttctgcataggt

SEQ ID NO: 73307 - DNA, 945 bp, Prunus persica
  Intron number 1 from transcript ppa005348m (locus ppa00534 8m.g) derived from phytozome v7.0 (chr-ID scaffold_3; pos 19000828 to 19001772)
tctgtctctagcaaagctatagcatttcataaagggtacttttttggcattcatttctttgattttttccatgtactattcatttaatgggttctttagcacccttattgttgattttttaaggttgtattttggtctgtcttttgaaagctattttcttctttattattagtgttcaaatgtttacttttgtttgtgtgatcaagcattatacaggtcgtagaattaatttaatgaattttgtaactttaagctcgccggctctgaatgttgggctgattatgtgttgatttatcattctatctaattttctgagatgggttttgtttattttgtggtatgaggttggtttacggtttaggtcttgagctttgctgggtctgaatccaaataatgtggtgctgttgcttcgaggatctaagtttttgcaagttattgtgccaacttttttggatttacctaaatattcagtactcactaaagcagattatgtggttctcagttttatggaatatcattttaatttattgtgcttctagggttttctcaaaatgtggttgtttcatttaaccagctctccctttctcccttgtatctgaggttttttttagaagaaaatgtagcagtatttcatatcgctaactccaccatgttctgtttccatgcaatgtaatcgaaattggtacatagttttgtggtgctagtttcctactgtctcttttgcagttgttactttactttttgggataattctttccctgatctagggatgaagggctagttttaagcatgggttctttgtgcctttgattttgtaaagtcaaatacattatatgtgccttgtgctatattgctaactcactgcaccttggtgttttgaattaattatcttccatttattgaggaattgtttagtagtgtttcatttctcagtcttttggcaga

SEQ ID NO: 73308 - DNA, 833 bp, Prunus persica
  Intron number 2 from transcript ppa005348m (locus ppa00534 8m.g) derived from phytozome v7.0 (chr-ID scaffold_3; pos 19001956 to 19002788)
caagtaagtttttggtaggcagtttttcttttgggtgtcatttcccatggtctattacttggttctacttttcgtgaagcaataacttttcgacaaatatgctataatcatcaaggagtacattaaataaacaaatgtatgttggtgattcatataggcagttctattgttagatgttgaggattctttatggtccacaggttgtttacctgattattcacacatgatatttttaagtctgaatttatctgttgcatttttggttttttttaatacttatttgaatgtatagtcctgtatgattctgccatgctcttaaatcctcagagatatggtaattttaggtctcagttatgctctgaatcatatagtcactacaatttcaggtgatttcctccttaagggctgacacatgattcataaagataataagaaattgttttatgttctttgtttatcgagtaccctagatagcaaatacatagattagatggtcgatgtcagaatattggtattactggcacatcttgaacatgtgactgcttggcacttgaacatactggatatatttttcttttaaatgtttttggactcaatatccataagtggttgtgctcaaatagccaaattcacataaatggaaatctgtacacaattttttcttcttttactatttttgttttatttgataacgatgatattatcttgaaggtttcaagatgaccaattaacatattttgaatattatattatgagcattacctgctgcaaggacatcactttttttttttttttttttttgcccctcaattttttgttcgagtagggaatca

SEQ ID NO: 73309 - DNA, 534 bp, Prunus persica
  Intron number 1 from transcript ppa020946m (locus ppa02094 6m.g) derived from phytozome v7.0 (chr-ID scaffold_3; pos 1459923 to 1460456 reverse strand)
tacttctaaaaggtaaaatctttatttgaactttattctttagtggaaccctgacctgtttgctttatgtatcccgttgcccccttgttgtgccactatcatcttcccctcttttttttttctttaaaacttgattatattttcagtttttcctctactgtctgattatggtccctgattgtattaaacaatgtagaatctagtttccaattttgcatgtattcgtttgctgtgtatctttcaaacactgggaaacacaaacatggtactagtttattaataaaggctcactatctttttactctgcatctctttatgcaagaaacctgtccttagaccttttagctgaaacatttactgttacattggaattggatcaatttaattataacccaaaatatttttcaagttggagctagacttgcaattccaagataacatgatacctatgaactgagttttgttttcaacaactgaaatttgagttttgtttgtgtagataagtttgtggacgatatagaaccagttttgccc

SEQ ID NO: 73310 - DNA, 1053 bp, Prunus persica
  Intron number 1 from transcript ppa025171m (locus ppa02517 1m.g) derived from phytozome v7.0 (chr-ID scaffold_8; pos 13827896 to 13828948)
tcaagctagaaaatttatatgtaagctgttgttatttttgttggtgaaggtaaccaaggtgtttcctaaggcatctttgtcatttcgaagtattcttggagcttgagcccatgcgcgtagcagctactggaagaaaaaagcccctacaaaaccttagagcaacttaattagaatatttgagaaacttatgtaaatgaaagactagcaagcatgtatttttacatctaaaatagtcagccccgtgcgcacagagagagagagagagagagagagcaccatagtttacatgttaatgattaatccgcataaaaagggagcaatataccacaattgcttttaaataagacgttttttctttatgtaaatcacaatttacagaaatctttcattataaatataagaaaaatttatgcatacatattaaattatgatcggcatcaagtttctaggaggtgggcattttctcccttttcatttcaacttgagcaacaaaacatctctaatggaccgacgggttctaaatgtccaagcccagctgctgggattgagcgaagtccacagctggtttcagcccatggaaccgaaccaaagcggggcctgaaattgaaagatccacaagaaaaaaatatatatttattcataaataaaacgtcctgctttgactctcttgtaattttcggcttctctgttctacttcccgctgtgcttctgataaacctctaacttcatcaattccggaaatgcccctactgaaacctcatattcacaagccatcttgcttcccctgtgctccctccgacaccctgctcgcagaaagagcaatcacataactcaaacgccatccccacaacctcacttctctctcttcctgttttacctctgaggcagcctcctatttactcctcaagtcccaattcgaccagcccctaacctgaagttcctcagctgggctcggaaccatggtttcttcaccttccaatgcaagtgactcgccctccacatcctcactcccttcaagctctacaagagcgcccaacccctcgccgaggacgt

SEQ ID NO: 73311 - DNA, 972 bp, Prunus persica
  Intron number 1 from transcript ppa000288m (locus ppa00028 8m.g) derived from phytozome v7.0 (chr-ID scaffold_1; pos 13488630 to 13489601)
actctgtccctgggacctccgattctggtgtccaggtactttcgcatttctagacatcttttcttgtttctttctttcgtttatcattaaattctgggaaaatctgtttggttgctgcgaaatcttgtgcgttttgttgaaatatttattacctttttgagttgatatcgttttttcccgtctattttagtatcgtttaccattcgtttgctgtctgtagcgtttggttcttgactcgcttctgcttggttgctgagaaatcttgtgttttttgttaaaatctttctaaattttaactttacatcatttgccctctattttagtatgtttacactgctattgctgtctgtagcttttgaatgctaactcacttttgtttagctgctgagaaaagtgtttatttttatttttatttttaaaaggaactttgaatgagaggaactaaagaaaatggcgtttttacctcaaatagggagtcgtttttatatatcgactttagtttcttattgttaattttccgtttttttcgaccttgttttgccttgtttcctttttcttttatttttaaattgataattgacgaaatcttctatttttattgattcttttaatttttttttttttagtggatatcatttctccctctattttagtatgtttgcactttgattgctgtctgcagttcttgattatagacccacttttgtttgtctgccaagaaaaatcaaaacaaattaagaatcaccgaaaatgtcctcttttttattttattaagtccactacagagcgtttcttatatgctaacattagtttctaattattctttagttcaccatatagctgttcttttttctttctgtttccttttgttttctttcagtgagcccttttgcatttccttagttgtgacaaaatctttattcattgctcttaattttttttctttcttaatatgtataggtagtagtgaga

SEQ ID NO: 73312 - DNA, 676 bp, Prunus persica
  Intron number 4 from transcript ppa024284m (locus ppa02428 4m.g) derived from phytozome v7.0 (chr-ID scaffold_7; pos 13538618 to 13539293 reverse strand)
tttttgttgtccaggttaaatttcacttcccccctaaaaagagctgcatatgtttggctggtaaatacttaatactgatactcttattaaaaaatacactgatatacaaagtgaggcactacggcagtttatatacaatttgtgttttttctttcctgtgtgcatttgaatgaactctggtgatatgcaagtatcgtcattcatgaagatggcctaaccatcctctccctctcttttttttttttttccttactgctgttcatgttattgagctgtcacaattctcataagaatttggagattcagttttgctttatcggaaagatattcagaaactgtctggtttagataaaatggaagcatatgatgttgttgcataaattttacacaccatgaagttatccgttttctgcttaagaagcacatatctttgattatattttctgcttttaaaaaaaataagttttttgcttatttatttatcatatgtttagctaaaaattgattttttgatattaatggcatcatattatgtttttctgtggatcgctatgtaatttgattgtaatgaactgacacatgcaaatactgcaggtctagattatctgattttattagttctctttggaaacatgtttcagatacaacatccaaggtcgcatctgaataggtttga

SEQ ID NO: 73313 - DNA, 726 bp, Prunus persica
  Intron number 2 from transcript ppa012467m (locus ppa01246 7m.g) derived from phytozome v7.0 (chr-ID scaffold_5; pos 9834285 to 9835010 reverse strand)
agacttgccctttgttgcttcgggttttcactaaggtatgtgcaagtccagttagtgttttattgatttatttatagtttttaagtattttattgttgtcaaattgggtttcggaaattgttcatgactgggtagtagtgttcagcttcttcttgtgctaattctttttctatattcaaaatcagatgacccttttaaaacttcaatctttacttgacttaaaggtctttttgtggaagtagatattgttgattttgttgcagagtagtgttagaaaagcattagggttgtttgggaatgctttttgcaccattagagagtgaaagggaaacgattgaaacttgttcttacaaatgtgcttatgaagtccctactcttaactacatatattagtggctcactcactcttggcctttaacatggttgctctaactaggctctgaaatcagttcggttgaaagttatggtggtgattctgagataagattcggatgggggaaagagaattacattgggtttcctgtaccatcataagcagtaataatttggttttgaagtctgaggaaactcacgttgtaggagaatttaccagcagtgttagcgagggaagtcaatgttaatacaaaggaaatgaaagagacacatggtttggctgatgatattccgatttagcattttacgatttcatttaacttatctttctgcagattggaagtcatcataata

SEQ ID NO: 73314 - DNA, 327 bp, Prunus persica
  Intron number 2 from transcript ppa021659m (locus ppa02165 9m.g) derived from phytozome v7.0 (chr-ID scaffold_8; pos 18308792 to 18309118)
atgtaggtttctcttcctctataactcaaataatgaaataaagttttgggtgtttttttaaaagaaataacataaagggacaagaaaactctccatttcagtgtagcatggaattgttatggatctcaatgttagttaccatttcttagactattctttgtttgtgcattttatgtcagtattttgatattcttttttagttagattaaaaatttattcagtattatccaagtgatgcttaatcagtttttcaagtacatatgatggtatttctgagatttagaactactgatttttcttcttcttcttatcttgtagatactggtg

SEQ ID NO: 73315 - DNA, 594 bp, Prunus persica
  Intron number 1 from transcript ppa004318m (locus ppa00431 8m.g) derived from phytozome v7.0 (chr-ID scaffold_3; pos 21137566 to 21138159 reverse strand)
caaaggaaacaagaagcaccagctcaactttctctgtaagtatccacaaacattcattatgttctccataatttgctctccattgcatgtttccagctaaaatttcccagagactcagtcctgtatattattatgtaataacttttcgtattttgggtttgcaaattttgcatgttaaacttgttggagaatgccaaacgggtttttccttttcgaatagatcatacccggatcttgttctcttctgatccagctgaattgcttgtcaatcttggtgaagagaggcaaacattcagtatgtttttcgttttttgtttgggttaagctcaagtcaaactttctaatcttagatacaaatttgatggttttctacatctgggtttcccgatataggtctcgatgtttacttttacctaagcaaactacggattttgctttgggtaatggatcagagatcagaagttacgcaagctgcggtttttgcattgttttgttgattagaaatttccagttttttgtattctgtttaattttcagctcgaaatggctttatatgcagctttcttcatcttccttgggtgggatatctctgcc

SEQ ID NO: 73316 - DNA, 362 bp, Prunus persica
  Intron number 1 from transcript ppa000549m (locus ppa00054 9m.g) derived from phytozome v7.0 (chr-ID scaffold_6; pos 1561192 to 1561553 reverse strand)
catctcggggattcaaggcctcggcgctgagattggtatgaatttcggcaactctctgcttgtttgagttatcgttttcaactttttttttccaagaagttatcgttttcaattgggtttgtagttaatgagagataaatgaaaagacaatgttgaattctggaagtgctcatctgttataatgttgcatatattgtttttggattctgctgtttaaattttttcacttaccatagtaagcagtgttgtgtatgtatgtgtgtgtatttattttcttttgctggtggtttttttttcttctccaatgtggacttttgcttcctgcagcaaagaacctcattcttgctggtgtcaagtctgtg

SEQ ID NO: 73317 - DNA, 542 bp, Prunus persica
  Intron number 3 from transcript ppa006837m (locus ppa00683 7m.g) derived from phytozome v7.0 (chr-ID scaffold_7; pos 11001583 to 11002124)
ctgtaagtatctcacgtttcccatatcattgcaattgtacccacttttgtgctaaattaccaaacttttttatggattttaagttagtttctctatttttgggtgatgatgtatgcgtagtacttgtattttgggactctttgattctattacttttgggaactggtgtaacattaactgtgtcctcctactttctgggcattggtaatagtcttgttttaattctcatattgatgtcatttaaaaacttaaatttatgtcaatttttaatgtacgttttcttgggtgacttgcaatccaagtgccattagttttgatttggttagcttgtttccgtggctactttcagatgaaaccttttccatgacctatatatgttttcactttaacatcttttatgcatctcaacttgttgcattggattccactcccttttcttctcatttaattattgcattacttccttccgtgcatcctctcggctaatatgtggacttcgtttttgattctgctgcacatgtagacagctgtttcttttgttt

SEQ ID NO: 73318 - DNA, 267 bp, Prunus persica
  Intron number 3 from transcript ppa005592m (locus ppa00559 2m.g) derived from phytozome v7.0 (chr-ID scaffold_2; pos 26602392 to 26602658 reverse strand)
atgtaattcctcctgctctttatcatatttacaactttattccctcctcctctatctatcttatgcttcaactcaaacccattttgatttgtacattcatcccaaaccataatgctgtgtgctgccttcttataatgcttcaccttaatcttagtggagatatcttctgaattgtctgataagagtgatttgtttttctttttcttcggctggttatctcacaatgatgttgacaaggtgttcaaatgtggcaggacggccctgctt

SEQ ID NO: 73319 - DNA, 521 bp, Prunus persica
  Intron number 1 from transcript ppa020208m (locus ppa02020 8m.g) derived from phytozome v7.0 (chr-ID scaffold_2; pos 14242516 to 14243036)
tgtaagtgtgttgccttaagaacattggagtttctcttttgttaggggacaaaaagaagaaaagaaacactccttttgttaatgttgtggtttggaggcattgttttgtagttatgattgggtttagattgagaagccttcttaaaacaagtcccattatctattattagaagatattgtcagtgcacaaatgttcatgcaggaaccgttttctgacaggctactactccataaagatgttgtttatctgggttttagtttttctcttttgtttttgatttatttgcatttggcagaaacacaatttctgagaaagtgaaacgaaggtatctttacgctgctcgtctcttacagtgaaaatgtagacattaaagagtggaaacaacccgagaatcactcagggagttggagtcacttttacaaaatttgcctaaattgcaacactgtgatctgggttttacaaacaaaagaaatgcaagttcaaaggctttcacttccaagttacaccctcactccaccca

SEQ ID NO: 73320 - DNA, 552 bp, Prunus persica
  Intron number 1 from transcript ppa002370m (locus ppa00237 0m.g) derived from phytozome v7.0 (chr-ID scaffold_3; pos 18504090 to 18504641)
gaaccattggtgaaagcttgaatttttcgaagactgtaattgcactatcccaactaagatctcatttttctttttctttttttacatttgctatgtttgctctgtccttaagtgctctctctctctctctctctctctccctctctctctctctctctcatagagattcatgtttttcttaaatttgattctctttatagctttgcttattgtccaaagtgttatctgtctctgggtttcaagtactcgtttctgctgggcaagacttgttcttgctctaaagagtgggaatcagtgtttttctggtgaaattggttttggggacaatattgcattgggattttgctggttttctgaaacccgccttttacatgaattattttgttagtttgagtgtgaattagtgtggatccgtttttgttcatttatctattattattttccagttaacattggaagattttggatattatctggactgtttagtttcactattgtctgtctgttgtctatgatggctacttatccctctactttcgggtgcagagtcca

SEQ ID NO: 73321 - DNA, 828 bp, Prunus persica
  Intron number 1 from transcript ppa000260m (locus ppa00026 0m.g) derived from phytozome v7.0 (chr-ID scaffold_3; pos 2772667 to 2773494)
tccagtactagtaggcatctaaaacttaataaattattaaaaaatagaataaaacttggattgtgcaatcaagtgggactaaataaagaaatgcacttttacaatgcctgaaatatatgatcatgtgaattgcagagacaagcaaaagtctgaaaacattgtttaaaatagtaatgcaagacaaaaaattgcatctcaaacctgtccatacaatcaaacaaaggaaatgaaacaagatgctgatgtgagggccctcttaaggattctagaggcctgttttggtgattatgagagaggaatttaagggggtacttgttccttccaatgaaattgcattgacatttttgctcctcccacattgttgggggcgccgcagagaaacaagttaagttaaccgcacaagttgctacaaatttatggcttctttgagaagttcagttggtaagtagcccatatgattttttattttttagatttatctcttagtttcttgtgtttatatgtatatgctatggtgaattggctaataaaattttatgtttccatattgaattgaaattaaatttcttggtattggaaaaacttcatcagtatggctttacatttttgccttctttctgtttgatgcaatatctccctttggctgtataaataaattatatttacacacacaattgcatgcacttcttcacatttacttatgttttccaacttatatgatgaatattctgatatgttcttccatccaatggatttattgtagggagtactttctcacggatgtgtgatggagaatttgatttgggttcttactgcactcaaacaact

SEQ ID NO: 73322 - DNA, 442 bp, Prunus persica
  Intron number 1 from transcript ppa004107m (locus ppa00410 7m.g) derived from phytozome v7.0 (chr-ID scaffold_2; pos 20155388 to 20155829 reverse strand)
gatttctcagaaggtacgctttcgcttccctttgggattgattggccttgttcttcactctccgtttggttgctgatcagaaaattctaagtataaataaatgaatgtgtaatgattttgagcttttgagcttcgaatttgatgaagaagagaactgataaacttcatctgaactgaggaaatgatgaagaagctcatatttcaacattcaaaattaattttattttcttgttttcatgttctcggcaacccagcagatggctaaaatttgcactaatagcttcagtgcatttgaaattgaactgcttaattgttaccaaaaaaacaaaaacaaaaatcaactgcttaattctgccttggtttcttctcagctgtttttgactagtaatggaaccacactcatctagggaagatttggccatcaaggtaacagagctgggac

SEQ ID NO: 73323 - DNA, 904 bp, Prunus persica
  Intron number 1 from transcript ppa012666m (locus ppa01266 6m.g) derived from phytozome v7.0 (chr-ID scaffold_6; pos 419505 to 420408)
tcgtctgttctttcaaggtccctccccgcctcactgtaagtcactcgtttggttgtatttgcaagtacattttcgaattaatttcttcaaaattcaaattgaaaatgggttctttaatttcagcccaaaattttgagaagaatttttgtttttaacttaaaaatttaggtaatttcagctgtagcttgattatttctagttggtaatttgatattattttgcttaattagttactccatgaaagttgtaactcacgttgtattgggatttgttccactaattgccttaagttataattaactattaaaagttctcgtcttgtagctacttatgcatgaacaatcatttctccttacaatttgaggacaaatttcaaatttacaatttaacctatgcccagttggacttatttatttatttatttttgtttttttgcttgtagggagaaatcactcttttatccataagagcaaattagtgttctttaactattgggtctcttccaataatggctgagtttttgttctgaattattttgacatggtgcgaagcttaaacttctgcattgccctttcgaatatgataaggtgttaatcattctagactaggaaggagcggaaaacctcactttaacagccactggtcacctgaagaaagataatttgtgtatgcatttcaccgcccgaaatccggtcttgaatgtgggttgagcatgccatagacttagttgaactaagtgcctagtataactatgtttaacttatgagatctctcgaccaaacagctttgatttttgtgttggacacttctgtacaattggtatttttatttgccaaatattttattttggttctttaatttgtttgcaggatagaactgggaagttggccagtggggcaattgc

SEQ ID NO: 73324 - DNA, 494 bp, Prunus persica
  Intron number 2 from transcript ppa018924m (locus ppa01892 4m.g) derived from phytozome v7.0 (chr-ID scaffold_7; pos 18157571 to 18158064)
aaggtaggtctatataatattcttacataattaattatttctcctgttctgttcacgttccaagcaaagcatggatatatatattatatacagtttttagttttgcactagttaattattatttttgtatattttagaaatgaccacagaaatactaaacaaggaaaaagatttggcgatagtggcagacaagaaagagtggaccccacttcactgcgctgcattctataaacttacattttcttttcctttttgattcactttcgaattattcattgtttttcattcactttcctttttggttggatatttctaaagctaactgaatcaagccgatgctgaaccgaccacggttagtaaaacctatggacgggtactcccaaaagacgtctcaccaatgacgttggttcggttgttagaatgtctctcggttcggttgcctaacccagtttgtattgatttttatttcgttttttttttttttaaatttagaa

SEQ ID NO: 73325 - DNA, 425 bp, Prunus persica
  Intron number 1 from transcript ppa008977m (locus ppa00897 7m.g) derived from phytozome v7.0 (chr-ID scaffold_7; pos 3244590 to 3245014)
gcctcaatcgaaatttcaacttttccgagagagaggtaagtcagctccggagctcctcctaactttttgtttcttcagcttttcttttctttttctcttgttcttcttctttaattaattaattaattaattaattatatgatttgattcctgatgatctatctatctttaggattgatgctaaatgctaattgtatgtatgattgatcattgatctgccatcttggagatttagatttaatttgcttgcttgctttgacctttggccgtctctcatttaatttatacatgcctctacactctgcactgcaattcctctgtatctatctatctatcctgtttggttttaattaattaaaacctgcttttgctgttatttgtttactttagactcctccaagggaagggaaaagagagagagagag

SEQ ID NO: 73326 - DNA, 406 bp, Prunus persica
  Intron number 1 from transcript ppa012123m (locus ppa01212 3m.g) derived from phytozome v7.0 (chr-ID scaffold_3; pos 12230594 to 12230999)
aaggtaagactacttatcaacatgttgctacaattaatttacattcaaaacaatatacccaaatgcatgttgaagtaactacttcacgaggaaccgaaatacataacttgtgaatatacaaatgaattgtctgaattacagtctgataacttaacatgtcgtaaaaaaatacaatttttttcataatcgtagcatatttacatacccactattaactataattaaagaaaatgtagtttatttccaagcttaccaatcctttcgtgtgcttcctggccgctaattagtaatagttcctctatttttttggccaagaaggtactaatcgaagtactagaacatcgatttatcgaatattttgattgatacaggtgtggcctacagttggactgaagaagttcgagac

SEQ ID NO: 73327 - DNA, 757 bp, Prunus persica
  Intron number 3 from transcript ppa000928m (locus ppa00092 8m.g) derived from phytozome v7.0 (chr-ID scaffold_6; pos 26335078 to 26335834 reverse strand)
cggtattgtaattcttgtccagaacaaaattttaatttgactgctttagtaattctgctctttaagaatattcatccataagatctaaagactttagcagtttcaaatcactcagtagttaaagaaggcatttgtagattatcgagtgttctccaaggttctaatactttccttcgtgatcttagcattaaaaacaactcactaagattctattacttctaacttcctttgagaggatttgcatggtttttggcgcgtttatggtactgggtaatttgttgagatttaggtgaatttgcgtaaaagccttgttcttgctttgaaggactgaaataatggatttcaatcaatcagttgatgaactcttgttttttttttttttttttttgttcaacgcttactaggtcttgcaaagggtcctttatttgaccctttctctttagagttggaaggatagtttgtagctttgctgtatacctgggttttgttttagttaacttctgttagagaaagattaatgtctgtttgagttttccacctcatggacccagcagcacactgccaatcgtttttttttttttgctatgaccatcgacaacatcattaataatgatatatattccatatttgagtttaatcatggtatacttttgtggtttgtgtcgaacagaagtttacaatttgctttattgtgatatttaagaattctatttgatagaagaaactatggtgtctgattgaaatctgttatctttag

SEQ ID NO: 73328 - DNA, 592 bp, Prunus persica
  Intron number 1 from transcript ppa000928m (locus ppa00092 8m.g) derived from phytozome v7.0 (chr-ID scaffold_6; pos 26336624 to 26337215 reverse strand)
cttcctctctgtgcatagcattgcggccacttcaggtaccttctctctctgtttctctatctctccgagcttctactccaattgaaaccttcttctgttcgtaataacaactgtccgtaatataaactgtatgaaagttcgctcttttcccgatatataaattccacgatgagtcgctgaattgaatagaattctatgcaatttgttgaaattttggacgccatgtatctcacagatctcggattcagataaagtttttaactttttcccgagaaatccgtccggtttgtcgaattaaagcttataatcattgtttgatgatagatgcttaatgtgtatccctgcatcggtttcccgattgcaaaattacatctttgttctgtttggattttctttggaggcataggtgctggtggtttttatcctgggagaatgaatcgttaaacgtgtgccatgttttcttagtatttgtttgattaatggtttaatggctgtttggattttgatgttttgttatccgacttcaattgtgacaacaagtacattttgtggttcaggtgactgttgcattgtgcggggcagctgaagtttc

SEQ ID NO: 73329 - DNA, 334 bp, Prunus persica
  Intron number 1 from transcript ppa008708m (locus ppa00870 8m.g) derived from phytozome v7.0 (chr-ID scaffold_1; pos 31908594 to 31908927)
ttgaatcggaggtgctctccgaggtttcagaccaggtttatcttattcgttattcttctcatcttcgattctgtttctgtttgatctatttttgtgcctaaacaattctcttaatatatcgctttcatccatttcaaaactttatatttcctgtggcttttgaagacattcaacttgcggaattagggtttgtttttcttgaatttgctctttggttgtttgttttataatcatattatatagatagcggaggagaagaatatcgtacattgggtaggactaaataaatgatgttgttgggtttttgattgcatggtaggaggaggaggataaa

SEQ ID NO: 73330 - DNA, 377 bp, Prunus persica
  Intron number 1 from transcript ppa003300m (locus ppa00330 0m.g) derived from phytozome v7.0 (chr-ID scaffold_2; pos 25360072 to 25360448 reverse strand)
cggcatctcccctcctcgtaagctctctctctctctctctctatctccttctccactctgtttggttactgagaatacaaaagggaaaacaaagaaagcgtatctcaggcgcatttaccaaattgacaacgcgttttggttggaggctaagtcgttgaaaaaagtcaaattagggtttcgaattggaagacatgcattgcgaaacatattattgaggaagagttgatacagttagtgtctgatattcgatttgtatttttatttttagtctctgatttgatactgttacttccaatgcatatttgagttattactctggttttgaaattttgattttacaagaatctgctttgagggaaagaaagagaagcaaaagc

SEQ ID NO: 73331 - DNA, 757 bp, Prunus persica
  Intron number 1 from transcript ppb019047m (locus ppb01904 7m.g) derived from phytozome v7.0 (chr-ID scaffold_4; pos 26341684 to 26342440)
tgtgtgtgccatcaatattttggaccttcaaagaggtgagagagagacacacgcacacatcaacttccaaactattgcctcccactcaaatccgtaacttcaaagatttagagagagccaaggccatatgtggcttgagttagagttggaaccctaatagaaaagtaaaagtgaagaaaagccccaatttatctttacatccaggggtttatacgtaaatagagcggtgttattcatattaaccatgacagtgtattcgtaaatagagtcacatcaaccaaaatactcctttgtcgtgtaaaattgtaaataaccacgacgattcattttaaacagacgatgtcttaactaaaaataccacattagtaaaagtaaacttttgtcatgtaaaattctaaataaccacgtcggtttcgtaatactcaaagtcatttgactttattgtcaaccacgtcggtttataataaacaagcgacgtattaactcataatatcacgtcagcaaaagtaaacttttgtcgtgtaaaactgtaaataaccacgtcggtttcgaaattctaaaagtcgtttggctttattattaaccacgtcggtttctactgttttgcgtcgttttaacaacatactagggcagttttaacaaaaccgtcgtgttattgaactttacggttgtatatagactttttcgtcatctaacctaaatttttacgttctctctaacagataaaacatttcagtttcctctcagttcccaaaag

SEQ ID NO: 73332 - DNA, 854 bp, Prunus persica
  Intron number 2 from transcript ppa013578m (locus ppa01357 8m.g) derived from phytozome v7.0 (chr-ID scaffold_3; pos 5869899 to 5870752)
tcaacccaaatcgcatctggctttgcatctggaaggtatacctttactgtgttatcttttaaatacgttggctctcgtttgcatgcttttgtcacatgtttatagctttgaactcgaaagattgacagatttaaaatgacaatttgagcccatgaaaaagttctctggaatttagaataacggctgccggactttgttataacctaaaggaaaattcgtgtgttatcagtcaatacctaactcaagttaacatggagagatgataatatgaagaaaggctccaatggtcaaatcattgacagttttgtggggttctatttctgtttttcagatgttaaagaggagaaacttgtacatccattggtctttaccgttttgattaatatttgcctcaaagtaacactagacctaaaaaaattgcaccttttgtgcatcctctagcacgaagtctaaagaattctgtgacacaagatgtttcagccaagaatagatagcttagcgttttatttgtgcctctataatatcgttgtattgtataaaatctgtccaaaaaatgaattgtataaaaagtcgtttagctgagagtgaatgtgcacaattcaaatttataaagtatctagagttcttttgtacttcagattggccatttactgcatccatagtgataggtctcttatcaacttgatgattgtcatttcatggtcaacaagacaactttgaattttgtataactgttctaaattcatttatcttcatgtttctgataatgtattttactttttgctgatggcttgctaaaaaatggcttctggacttcagttgggatataccgactctagttgcttgggggattg

SEQ ID NO: 73333 - DNA, 697 bp, Prunus persica
  Intron number 1 from transcript ppa013615m (locus ppa01361 5m.g) derived from phytozome v7.0 (chr-ID scaffold_3; pos 7193143 to 7193839)
caagggctttgataggtaaattatcatatacgctttgataccaaaaaaagtgtgcattaacagcttcggagctcttaccaaagccaattttttcgatgttttagtacagatacgtactatgtatgtatatataattcttctattttattaacattaatatcgagtctttcatttgttcaaacaaaaaaaaaaaagggttcatataggagataggcccttattgtatatgataccaagattttgcatgttcaacaatttacctcatatatggaagaaaatgcgggtaatttattgaatcctagtcattgggttttaatgaagaaaaaatgaatttttgtcgagaaaaaataatgggattagctgtaggtaagaaaaaactagttttaaagggaaaagtaaaatttactataaaaaaaaaaaaaaaaaacatcgggtctgtcatttagctgtgctcgctagttgtccacatttgaagggtcaaccagaaaagcaattttctaaaataattcatgctgtcatcgtatgatgaaacaatttaatcgataatcatcatcatcatcatcaatccttatccctatcatcattatatcaacagaaaaacaacaatagttgatagatttggttttgttgatgccaaccatttttattgtgtgtatgttcagatcaaagtccttccaagcatcccccgtcttctttc

SEQ ID NO: 73334 - DNA, 702 bp, Prunus persica
  Intron number 1 from transcript ppa026926m (locus ppa02692 6m.g) derived from phytozome v7.0 (chr-ID scaffold_1; pos 8530829 to 8531530)
actcttgggtccctcattttcaagaagaggtttatttatttatttattttataaaaaatttaaacttgttttctatgttcttgcttgatgggttcttgttttttttttttcctggtgaaactttggtgcttttagttttatgtttgtgcttctggtgctaggttttaatttatttatgaaaattttgaagttcactctgaaattgatgcgtttcaagtctattttaatttcctttttatatccttacggtgttttctggtagatagaaaagctataataagagtgcaatgacattatataatttgttatatgtgtatgtagattcttgctgcaagtggttgtgattaacattcaattattatattgtatatatattttcaagcaaatatgtctcaggcaggcaactaaggaaaatggtttgaaatcataagtcaattttaaattgcacatgttgtcagctgttatgctttgctttgtttcttgatgtttgtgcaactatgtaaagtggcttatggtatttgatttctgatattgacgttatggtaattcactggttgctaatgcctgccatgtgtgtatggtctagttatgcatttctgtgtgatcgttcttctataattttcttggtttcgaatgtctactcagtttgtgaaatcttgagctgcagaaaacgtcaccggtgaagtccagaaagttggtatt

SEQ ID NO: 73335 - DNA, 595 bp, Prunus persica
  Intron number 1 from transcript ppa019065m (locus ppa01906 5m.g) derived from phytozome v7.0 (chr-ID scaffold_2; pos 17879765 to 17880359)
ctgtaagttccatgaactccaatcgtgctagctatatataaagatataacataggcattctatcttctttcatagtgtttttgtgtgtgttttgttttgttttgttttttttcagagtaaaactaataggaccaagatttcaaaaactagaaatatttgaatggggttttccagtcaccttattcacgatctctctaactaaggtgaaacttatgtctcttagttccaaccctatcagatcggtggtcagattgttttcttttagcttgaaggagagtgtgcttgcattagatgtgagggagagcgagagtcaaattttcgtgacaagtatggggtatgtgagcaactaattaagtgagaatggcctaagaaagtgtatactaaactgatattactaagaaacgaaatattagttatcaaaaaaggaatacaaagaaaatttattgaaatacaaatcatatatagcttttcattgcatggaaaagttatttgtatcaaaatctctcctttgatactaacgtatacaattcatgtttttctctcttagtttatattttcaggcgctacaacaaccacaaacacaagcacacccaag

SEQ ID NO: 73336 - DNA, 478 bp, Prunus persica
  Intron number 1 from transcript ppa007167m (locus ppa00716 7m.g) derived from phytozome v7.0 (chr-ID scaffold_8; pos 1729297 to 1729774)
tctacagctggtcaggttatcaagtgcagaggtaaaccccgacctcttgctctcctttgttagatggttctgcttatttcattcatttttacagaataccatttatgtttttagtttttttcagttttttttgttgttttcatttttctgatcaagttttattttttgtgttttttctgcttttacatggtcctggtgatcttttccttttttctcttctcttttagttaaagtgttttataaatcaattaatgatgatgattgacttttgatctgggttttcttggattggatttgatggggatgccaatttcagtttggaaatttctaaacttgactgaacagaagaaagaaaccataatttttttggtcaattgtcttggcaggggactgatcttctagttggttaataatattgattaaatggatgtattgtttcctaattacattggcatttgtggattgtagctgcggtggc

SEQ ID NO: 73337 - DNA, 980 bp, Prunus persica
  Intron number 2 from transcript ppb014725m (locus ppb01472 5m.g) derived from phytozome v7.0 (chr-ID scaffold_7; pos 8417239 to 8418218)
gaacccgacacgacacgacccattgccagccctaagtaagagtatcttgaaaccggacgtagttcagaaaaaaaaattaataatttaacaagggctttcaaagagtggatgacccccttgaaagaattttgtgggaatttgggttttggcgtggttttgcaccacttagaaaatttaggacttttgtatcaattatttgctaattgatacatttttagcattagagaaatctagcttgtgacttgtgactttgagacttggaaatccaaagaaaccttctcaatttaggctttgagaagtgttgggtcttggtcttctcaatcttccaccatgttgcttggctcccactccttttttctatcatggatccttcttgtaaaacaagtttttgacttttgtaaataaaatttacacaaaattgatcttcccttaagtgacataaagtctcattggggtgccccctgaaccctttttcgaggcacgttgcgcaagggtaaaaagactattggggagcccctttggaaaaatgcaaaggaaaacaacaacaattctattgtaactactgagcaaggtcaaggttccagactaaaacacaaaagccctgcgaatcacccattgttcggggtgagacgatacatacataagaaccacaatgcatccgatcccatgctacatgtcaaagtcattgactatttatcttacaaggtagatattggtaattattgtgagctcatttgattaatttttgtttttatgttttgttttgtaagcatcattttgtttctatgttcaattaatccagttgcgtgctaagtaaatcctttgcaatttgatgattgttgggagtatgtttagttttcctcaacttgtttttgtaaatctaattgcatttcaagttttctgaatatgttgcatggaaagtattcttgtgactaattcaatgtttgacacttgcagaattcgggtagccacattaaggc

SEQ ID NO: 73338 - DNA, 690 bp, Prunus persica
  Intron number 3 from transcript ppa022273m (locus ppa02227 3m.g) derived from phytozome v7.0 (chr-ID scaffold_3; pos 13403085 to 13403774)
ctgcaggcaacttgctttctacacaggaccaacaggtatgattagaatttttaccatgccaactgatggtagcctaaatgttttttgctttttcatgaatttttgttgtgatatacatatctctaactgaattacgatttcggagaatctttgtctgaatatataactatatttttgaaggttcctgtcttagtttagactcctggctcttccactgctatataataatattctcttaacaaattatctaacacgaaattttgctaggttgtcaatcgggtctttacctacgttctagtgatcactatgtacgtgttctggttcagtggtttatgtgaagtggattgtttttgtacacgactttgatcataccaatgagtgtaataaagtttgtgccactggttgattagattgtctgcttacgagtgtgtgtactgtacattccttaagatttttagttgctagaaaaagaatgattcagataattaaaggttatcacagtttcccagtgccagataacctgatgtactgttcattatggaaatggataggtagttcctcttattttcaaatggagaagtttcttaacctacttaccgattcaatgtatcttatacctttatgtaaccttttcttgttatctctcaagtgggccggtttttgttgggattgcagttggaggtcttttaa

SEQ ID NO: 73339 - DNA, 671 bp, Prunus persica
  Intron number 1 from transcript ppb022850m (locus ppb02285 0m.g) derived from phytozome v7.0 (chr-ID scaffold_6; pos 22318540 to 22319210)
aagctttgcaggtgatttcttccatgttacttctttgattttatacttctcttctctgtgttttttttttattgctttgtattatgtacctggctactctggtttagataatttgaagctcatctaggttcatccatatcatttatagttgttgaagattggcgctatgtgagatttttaaatcatcatttctgttgattctctgcatctttcaattatttgtagattaatagtgttccaagttctcaatttcaaattgtttggattttttttttataaaaaaaattgtgcatactggtatcatcttatctttaaaagaaagaatttgatgttaatgctttatggtgtattttttttactgatatggtgttctggtcatacagggtgaaagcaatttgttgggtttcaagccgtttttagccagctaacaacatctggtgtaaattggcatcacttgtatatatattcggttatggattatcatttgacatcactttgtaaccggtgaatacccattgtgttaggtttagaagggtctgtagttgcagaggtttggtttttgcagccaacgctatgcgccattctttttcccgattcaagaagtttttttttcaatctgaacttgggccgtttttattactagtcttttgtctgactgatagagtatcctg

SEQ ID NO: 73340 - DNA, 893 bp, Prunus persica
  Intron number 1 from transcript ppa011065m (locus ppa01106 5m.g) derived from phytozome v7.0 (chr-ID scaffold_5; pos 11785355 to 11786247 reverse strand)
gaggtctgcgaatttcaggtatttgattagggaattatatcatatttgcaatttgatttactatatgctaatgcttaggtatcggctaattaagtttagagccttgaattttgttggtaaattggctatttttgtcgcttaggttattttattttagtttataagacataatcttacaaaatgagtggctccgatgaaatgcttgatagtaggcccagtaaggaagggaagcgctcctcgtccaaacttttgaatcagaaatcgaaaccaaaattcaaattaatctcaaccaagaggttgagttgttgaaatagatactacacaataagccaaaacaaaaactggtgaatgaaatcataaataattgcggaagcaaaaccaaaatcgaaaaaataaaaacgacatgttaatatcaaaaacaaaacccatgccattttatccatctcatttgagtttcattgaaggatattaaaaaccgaaccctaaggatgttgagttggctctgataccacatgtaagaatacacctctagcagcatatcaacatcacataggattacaacatgagacttgtgcaatattaataacagattcactattgatacatacttgacaaagaatacatagctggaacaagaacgatcttctactctatgcaagtctcaatatgttctagctatcaataggtcgggcacaaaatagaacttggagacttgtgagcgcagggatcagttccttttttattgatcaaaccttaaccatatctctcatattatagatagagttagtgtttaaacaaaactaataaacgtaagcaattgagtccttatcaatataatatagctaccaagtctgtatgtatgtatgtatgtaggttatacaagggtggcaaag

SEQ ID NO: 73341 - DNA, 811 bp, Prunus persica
  Intron number 1 from transcript ppa009316m (locus ppa00931 6m.g) derived from phytozome v7.0 (chr-ID scaffold_7; pos 10917133 to 10917943)
gtggcttcaagaagaacaagcaaggttcgctctttgcttctcccactctgttttctgtgaatttgataaatttacatatctgttagttttaagcttttattttttactttgttttctatttggtttatgcgaaggtatctgaagcttgaaaatttatcttctgtaaaataaaaaattttaaaaaacccaagtactggtgtccctagcatggcaaatttttttgttctacttgggtttgttggatttggaatgtctttcaaatctatgtgatattacacgcttcatacttgttcaagtttaaactgttccgtatgttctgttgatgtgaatttgtggcatgtgaaattctttcctggtttttcttaaatctttgttatctcataatttgcttgtttttcccattgtctgtggttttataatgtctcaagttgttggtagtttattatcaggcaaagttgatttttgttgtgctttcttgtgctgaaccaatccttcaaatgaagttactttggttggctgctttgtttacgaaagtcaaacatgccctatataaaaaaaaaaattagccgtcttcaatttgctggttaatatagctagataaaaatcatgttgtactgggattatttggactagtactatacaggtaactaactttactaatttttattatctctttggtttcaagcttcttaatgggtttgaaatgctctagaataattggattaaggatcaggagaaaatgtaactgagaggaagtaattaatgttttgtaacagaattggagtccttttcaactggtgtaggaagcaaa

SEQ ID NO: 73342 - DNA, 728 bp, Prunus persica
  Intron number 1 from transcript ppa002014m (locus ppa00201 4m.g) derived from phytozome v7.0 (chr-ID scaffold_2; pos 26014165 to 26014892)
ttattcctgccttgctcgttttgtttaccactcaggttttcttcttctccttcttctttggatttcaaatgatttcatctttccttgtggaaaaatttaacctttctggtaatttcgattttagatttatcagaacagagaaacaaaaaaactgaaggcattgctttcttggaatacactgtactatccagagtttttttaacatttgaaagtttaaaaaggatcaattttaaacttcccaactccatattgtgtccaggacctttaatttaagtgttaaatggttgatacgtccttgaaattagaatcctgtattgacaacttctttcttgccatcgttcttttttaacaactctttgtgaaaatttgttccggaagcatttaggaaagtactggattcatggataattggaatatttaaaactgtacctatgactgctatgatttttgttacatattattaccctaaagggagtttgtattttactttttatcttcggggaaaatgtgttcatattatattcatcaattataagactattaaaatggctcaaatttgctgaattttaggacaataacagcacaatgaactttttgtttcatactgaaattatttcatatattcattgtgcatcagattgttatgagtgacgtctgatcttgtagtttctattcatcttgtttgaattataggtgttagggtttggttgggctggaattttccggag

SEQ ID NO: 73343 - DNA, 613 bp, Prunus persica
  Intron number 2 from transcript ppa006769m (locus ppa00676 9m.g) derived from phytozome v7.0 (chr-ID scaffold_3; pos 19537455 to 19538067 reverse strand)
ccctattggggaacaggtatatttatcttaattttgttgttttaagtaaaaattagtgttaatctaaagagttatcatgcacattgtttcttaagtataactaattagtagtcttaattaaactgtcttctcactctttgtaattaagtagaaaattcatctagctttttctttctttctttcttttgaataattgtgatgcttttgatctgcaaaaccatattttgcctgagtatttggttgaattatgagatgctttgaattaatgtgatgccctcgcaagcaagtaccttcaaccaaccactcactctctagcccaatcatctattcaaagttttgacctctgcgaacatttttcatttactgcttctgacatccaagtctattatttaaaatgaaaagggtcctctcctcttgaaattctcttgaaacatatatatatatatatatatatatattaatgaaatgaaaaggtgctagtaaaatggatggatcgatgtagtttatgatttttctctcggggttttcatagttttgatgctcaactctgtcgtgttgtgttgggctttggtgatcaggtggtcggccatagcaactcacttgccaaagagaa

SEQ ID NO: 73344 - DNA, 986 bp, Prunus persica
  Intron number 1 from transcript ppa007180m (locus ppa00718 0m.g) derived from phytozome v7.0 (chr-ID scaffold_4; pos 7430797 to 7431782 reverse strand)
gtcaaaagccccaaattttctcttctctgttcaatgtaaatctctctgcgttatttctcagcaatctcccattcgatttgtgggctttgttggatgatattctgaatccatttgtgtaaatttattatcttttgcttggtttatcggttttgattttagtctttctttgttcttgctccatatatcagattcttgatgggtttttgttttatcagtgaattgagcaggaaaaatttggtttggaacgttttgtagtgttttcctgagaagggatttcttgtttgatcactcagtgatttgtggtaatattttaatttactattgtgaaggtgtttagtgtaattattatgtacatggtctcagttcctgactctaaaggcgtcactaagagtgtagcagctctgttggactccagtagccatgaaataaaaaatagagaaaatttgttggagtctgcttgtttattttctagattcctgttttgattgtcgttatgaattaaattattggtcttgtatcttaatcaaaattatgtaaatgcagagttcttgcggtgagttattagctgtgtgtttaattgaaaatcatatagagtttttaaatattggttgatgtacccgtctttgtcttactttacaagataacttcgatcagaccattgaaaattctgtatttttttaggaaagggcttccttaaagatattttttctggactaagtgtttgcagtgaaattattgtcttcctagggtgaaaagattactgcataatagggttcctcactgataacatcagtatggttttgcatatcgtagtctatttgatgaagttgttaacttgataattaggttcatttattcattttaaaacgcactagtcagtttgagctacttattgaatcttatcttgtttctcatgctaagatctacatgatgtcttttctgtcaattcagaggggaatagaacacttacgagctgaccctgccta

SEQ ID NO: 73345 - DNA, 456 bp, Prunus persica
  Intron number 2 from transcript ppa013342m (locus ppa01334 2m.g) derived from phytozome v7.0 (chr-ID scaffold_4; pos 1356145 to 1356600 reverse strand)
aggttaaggtaattaacttggcctaattccttgacacaaaaatatgtctaatttttgtatatatatatatatatatatatatcctagaatcttctttgtgtttgaaattgaccatcttccactgaccaattgtcaattatgaaagtgtttttgactatatcagcatatatatatatatatatatatctatctttttctggtacttgagccttgctcaagactgagctgctaggtaacatagtcatctgatattgtttatcttctttgcttatgcttttttggatattgcttttcataagactttgctgtctggtattcataatcatttgacaattaaagatagggactaaaaactcttggaaggtttgatgctgtttatgatggtgatatggatataaaaatctctccttttttttgttttcttaggaggtagcgactcgactggagataaaggct

SEQ ID NO: 73346 - DNA, 961 bp, Prunus persica
  Intron number 1 from transcript ppa010532m (locus ppa01053 2m.g) derived from phytozome v7.0 (chr-ID scaffold_5; pos 2187694 to 2188654 reverse strand)
gccgtcaattctagagataagcactccagaactccgtatccttctttacaaatctctctctctctctctctctctctctctctctctctctctctctctctctcaacttgatgaagattttatatttttctttccttacaaaaataaatgtggcaatgcatttttttatgttccaaatgaattcttcttcctatgatttgttatttccatgattgtttttcgagaaatatttggtggtatgcttcagttactcgaggagctcttgcctctgagaaaagagcccagtaaccagtttcgggttaagtcgttatacatttcattttttattttttataattaatcaggagggtttagccctatacatttcattttaaaaaaattaaccatgagggtttagccctatacaacagaaaactgatatatgcagtggggatcacttggattaaaaattctataaaacagttttaatttgttttttgttaaaatatgatgccatataacatacaaatgatgagttgttttatattaagtgtagctgcaaaaatgtgtttcaacttgtttcttgtcttttgaaaatttcacccatctgatatttagtaaatgtgtgattgtatttctcatccggtatctagagagtgtctgatatcttgctgtggtaagggatggccgaatccattccacagtcacccgaaaaagatgtatctagtcacgacattattcatgggattttaatttgtgcttgcttgactagtttcactttggaaataacgtactacggcatttttgttgaatatttattcatcgttgaaaactgtttatcgttttagtctaaacctcgaaatcacttggttctgctgtttttttgtgttgttcaagtttcgacttcctaccgttcacaatgtagaattcaaattaatgtttccttgacaagtgatcttgatcaaagactacatttagcagc

SEQ ID NO: 73347 - DNA, 970 bp, Prunus persica
  Intron number 1 from transcript ppa013514m (locus ppa01351 4m.g) derived from phytozome v7.0 (chr-ID scaffold_4; pos 13159781 to 13160750 reverse strand)
gaagaactcgtaccctgctttgattcttgaaacgggtaggcttctttttttgcttttagaattttggtgggtctggatcccagatgtgttagtgatgctgcactgaaattaaaggaagttaaggtgaaaagaaaaacaattaaatcgtgatctgggtctttgtttcttgagataatgctttgaaaaacattaatggatcacaaaatatgcaagttttgtagtttgattaattttatagcgttgactttgctgatatgcaggaaatgtgacttttttcttttgttgaggttatctgggtctctgtttcttgagatatggatcacaaaatgtgttagctttgtagtttgattcatttgatagcattgactttgctgatatgtaggaaatgtggattttttttcaaggttgttattttgttctctctactgatttggaagctgtgtgcttctccatgattggaagcctcagcttatttcctgttgaaaactgtttctaggtttgttaattgaatctttatagtttgtctgcggatatgagttgcatacatccataacagatttaggcatttcttcattgagcaatgctggagacaccaaaaaaatcctaaagttttggatcccaactcatataaaagcatttcctccgttcatatctaggcttactttaagtaacatttattcatatcatataactacaaagttttatctattattgattgcaaacttggtagggtgatttgaaagatgtgctttatgtgtaatatgctcagtgattgcctttcaaaatttcaagaattttaagaagtgaagagattgagatagagagagtttgcattctgttcttctttttcttcgtatttttcttttttcatcctgcccactgttacgttgatgctcaatctctgaaaaatttgttttggaactgattcatgtcccttaaaacagtttgtgctgccatactcacgtgggtc

SEQ ID NO: 73348 - DNA, 823 bp, Prunus persica
  Intron number 1 from transcript ppa010589m (locus ppa01058 9m.g) derived from phytozome v7.0 (chr-ID scaffold_4; pos 29285674 to 29286496 reverse strand)
gacctttgtgagttgcttttctctttgatgatttcatttttattagactctccatgtcaaagatttgttaaaattgtatgcttaattcgtcttttagtggtatgcttatgaacatgtttttttttttttccgttgtgaagggaaaaatttacatgataaatcctataagaaataacattactttttgaatgaaaatagagcggtttctagctttgcttagggaaacatgttatcttcttacttgtgcttctttatttatttatattaagttaataatgtctttgattgaggattttttttctactgccaccatgactcttaaaagtgatgatggaataactgactattgttttggttaatcagtttgtgtttgttgtcgttggctgtttaaatttgttgatcaccctatggttaaatggctgtttaagtttgtactttcttctctcttggttctggcactaatgtttgttctctacgttgagttttaaaatttctttttttgatctttgacttcaaggcagagagaatctataatataagtggtgatttgttcatcttctaaggtttccaagtgatccggtcagtgtaaggtgtaggtcaaattttaaggtttctcctacctttgcattttctaccgagagaggtttaaggcatcttggtgtaatttgattgtgcaaattgattcatctgtatcttaatgtttgtgatgcatatttagtttttttaaattataaaggcttttataatacttgtcaattagataaaatttgaattaacacaattttgctctctataagaatgatgattcaaatgtttttgcagg

SEQ ID NO: 73349 - DNA, 462 bp, Prunus persica
  Intron number 2 from transcript ppa007253m (locus ppa00725 3m.g) derived from phytozome v7.0 (chr-ID scaffold_4; pos 6344320 to 6344781)
ctttcgagcttattaggcatcgagtgatatcacaggtagagttggcttgtatttttagttgtttatggttcaatatttttggtgatagagtttgttgggtaggtgcacactctgtttctcccctgtgtcctctgttttttgctctgccattcctatgaactacttcctatactttgtaattacaatttacaagcatacaggtatttgaaattattcccagaaggaagaagcttgagtgagtcctgaattgaaacattttcttatctgattgatcaaagaactcttttgttcaattggttacaaactatggtggtcctgcattgattagtttgttttaattttacaattttcttttttgtttttgtgtgttaatttcattttcctgttctttttgctgctctagttttctgatgtaaacgttttacaggttctggagcttgggatcgtggttcattcagtcat

SEQ ID NO: 73350 - DNA, 871 bp, Prunus persica
  Intron number 1 from transcript ppa1027162m (locus ppa1027 162m.g) derived from phytozome v7.0 (chr-ID scaffold_6; po s 13471457 to 13472327)
ttaatattgaatttgttgattctgtagacatattggtcttttggtgaaaacaggatttgaactgtatgagatctaatcttctattgttctttactagttcagaaatccaaaaggaactcgaaatcgtctagaaattaagacaattaaatttcgttaaaatagtttcattataggacttcaagtataagggaagaacgtaatatagttatagtatttttatgaaaccgattaattagtagatttttttgatatcacgtatatgtctttaataattcagaaataaagataaaagtaaaaaagagttcaatgaagtaagaaatcttacaattaattacacctcaaaagccctcgatttggtttgcaatatgcaaagcatgacctggtagttatgctgaagaaaagacaaacttcatccaatacgatccaacatgatatctttatttctcgagcacacatcaaagattttcttgtagagttgtaaaagcgataattataacataaaattgcataaagggttttctttttacacaccttcaggatgatcaagcccaaagaatcatgctcaacaggtacaacaataacaacataacataccccttttctcatttttctcttctggtacctttttgcatgagacatgcatgccctgctaccttttaagcatggagggtttgatttttagcaaggccataaattaatccgagggagagagagagagagagagagagagagagagagagagagagagagagagaatggagggtttgaaaagtagagttaggtggttgatgattttgatggtgatgattagagtgctgcatgttgaatgcaggcagcctgtgcttcatagagttggagggggaaggttcac

SEQ ID NO: 73351 - DNA, 877 bp, Prunus persica
  Intron number 1 from transcript ppa003095m (locus ppa00309 5m.g) derived from phytozome v7.0 (chr-ID scaffold_6; pos 25245813 to 25246689 reverse strand)
ccaactcccaagctctgcagctccttcaccactcggtacccttaactcttcttcttcttcttctccttccctctgtcttgtgcatttgcattaatttagctcatcatcttctcaagctttaaagttcagttttgttcagtctttttgtttcttttttttggttctgccactcctgctatgtgcttgcttattttgatttctagatgtttcaatcatttgtctggtgttctatataatgtgtatgtatatatatatatatatatagatccagtgcccccttttgtacttgatagttctgtctttggcatgcttcaacttcttctttttttattcttgatcgtgggggctcacagatttagtcaattcattaccatattagacagaacagaacaattttaaattaattagttaacagaatatacaaaagatacaacattttaaaattgatcccctttttcaataaatcgtttctccaaacatttttgcttttgtttagatgaagagttgaatctaggatctaccctttactccatcacattgttacttgaggctgaatgtctttagccacggtcggattatgactttagctacgcctggtatctgcttccactggatttttcaaccatagtgttgattcttagtcaaagaatgcactgttaggacatgaggtctttaagctgtgctacagtttctgcatgaaaacttggatttttgcccaacctgtggattacttgttccttctgcaatttggattggatttgacaaaattttcccttatttgctagtcattttctaggataatttatgtgatgtttcaaccatgctggttactcattactgatattagaggttttatgtgcatgtagtatcttttcag

SEQ ID NO: 73352 - DNA, 580 bp, Prunus persica
  Intron number 2 from transcript ppa011212m (locus ppa01121 2m.g) derived from phytozome v7.0 (chr-ID scaffold_1; pos 1875799 to 1876378)
tgggcaccacacttaccacgaaggcgaggacaaaggtacccttactttaattttgtatataaaaaagcagttgaacttgacaatagcatagttatgaaatcatgagtaacattccttttagctagcacttaggccgggagtgtgacacgttatgttgctaaactttgaattagaaccgcatcggatatgatttcttctaatcgatgtttaccagtgcagtgatgtaacatattagcttgttggataaaagaacatttaagagtatatggtgtttttgttatgattgacaaatatgttttggtctttttgtactaaaaacgtaatgttaacaagattttaaggactttacaagggatggtaattaaatttgcagtgttttccccctctagagccagttatagagaatattagacaaccaaaacacagtagtatgcaagaggttattgagcaataacatctaaggagtcattttagagctatgagtttggtacaattttccctccttatggttgagattctcacaaacagctatctctctgatccaggaactttttggggatccatagcagaagacattgaa

SEQ ID NO: 73353 - DNA, 1019 bp, Prunus persica
  Intron number 2 from transcript ppb018385m (locus ppb01838 5m.g) derived from phytozome v7.0 (chr-ID scaffold_4; pos 21359156 to 21360174 reverse strand)
aagcactaagtgtcctatcaggcttgatcaaggaagtgagaaggctagttgacaagcttcttcttgtcaactagcctaaatgtaagctcaatttctctttgagaaagacatccaaattattgtctttgagatgtgagagacagtgtctctgagagaggaagaacttggaaccctaaatgtaaaccgcgaaaatgaatgaaagcgacaaatttatagaataaatttttaaaaccaacggcggtccttaccaaaaaaccgccatttaaattgtaaaatcaacgtcggtattaccgacgtatattacagaactccacgtcggtacattaataatcccgacgtcttaaataatctaccatgacgcgagttattacttatgtactttaatttttgagtttactacgacggtacctacaacactactgtcgtatttatttaccacgtccgaagttaaatttaccgtcgtattttgtactttatacgtcgtagttatatgtaaccgccgtattatttttttgaaatggttttatatgtaagcaacttttcgtctacttgacttacacattcgttgtttttatattcttattttatttaaatctgtcatccaaaaaagaaactttacatattccagaatattaatttccttcgttttaaatttcctccggaaaaaaaactctatttataacgcactgtaattgaaaaataaactgaaaggtcacgggaaaaaaaattctattcataatttaaaaattaaaatccacgtcggttatattaaacctaacgacgttaaatgaaatgattccacgtcgaacgaaaaatattgcgtcgtgttagttaaaaacgacgtagttaaatgtaaccgccgtattatttttttgaaatggttttatatgtaagcaacttttcgacttacacatgcactgtttccaaacccgattaaaaatttcaatctcccagagaaaccttttcatcttttttccttttcagagcattgtcaaagtttctcatcgtcttcctctcgt

SEQ ID NO: 73354 - DNA, 461 bp, Prunus persica
  Intron number 1 from transcript ppa007408m (locus ppa00740 8m.g) derived from phytozome v7.0 (chr-ID scaffold_1; pos 31639703 to 31640163)
caggtcaccttaccactccactcactcactacttacttatgtcttttttcttttcgcttttgatctgttttgctctctctcactccatggagatggaagatagaggatgtgccttctttcttgtctttgttaattaaattgcaaacattttggttattgctcatatcttgctcctccaaatctatctatttgctgctattagattggctttactgctgaaattcaatctattgctattatgcttccgcaagcaacctcttaaattattgtaaaacgagggtcattcttcagtatgttcgactgctcctagatagtaccaatggtccaatgcaaatgagtgagaagaaacttagtattgtatctgataaaaggatcttgtgttgtttaggtcctcattttcatgtcattttctccttgtttctgatttctgttccatgtaccagataacaattcgtttggct

SEQ ID NO: 73355 - DNA, 581 bp, Prunus persica
  Intron number 1 from transcript ppa001695m (locus ppa00169 5m.g) derived from phytozome v7.0 (chr-ID scaffold_2; pos 25777151 to 25777731)
ataagagggagctgattattgggccttcttagcaggttattcttctcaataatagcgtggtttagtcttgattttgatttagtttgctaacaaccgctggaaatcaatggctccttatcttctttttggattgagaaaattgtgttgagctaaaagattatattttttttaattgggtttttcattttgattttgaatggctagctttcggtttggttggtgaggaaactgagaaatttgtattgcgtatcatgatttctgctgtatgtgtttgaaaaatcggcctaggcggccgcctaccccgcctgggcaggtcgggtcgggtcgggtcttatatatatatatatataattttcctcactttaaagaaaacctaggtaatgtgagctgttcatactcaattattagatagcaaaatttctgtttatagtttattcgtacacttggtcagcattacgaaaatgaaaaccaaagtggaatctttatttgcttaattctttgttgattatatgggtttttattgattgctacctttttgttggtcagattcatatcctgcgattgttgaaccaataccagtt

SEQ ID NO: 73356 - DNA, 701 bp, Prunus persica
  Intron number 2 from transcript ppa003087m (locus ppa00308 7m.g) derived from phytozome v7.0 (chr-ID scaffold_3; pos 462301 to 463001 reverse strand)
actggtataatatagttaccccccttttattattcccttatcctttttatataatatttatatgtatgtgtatgtatatatatatctgttgctgttcataaagaaaataaaatatcaggatttgttgatttactcaagataatcattttcttgtttcttgaattatgatcttgcttttatgtttctttagggtttgtctgatgcaaaattcttgattacttggaatcctcagctgattgtttatcatgtgaactgttattaatcataaaatgtattatttgtgttcaaatggtcatggcttgatgattttgacaagtaactgaaaggaattaaagaaaattgaatgcctcttttgaggagaaacacccagaaactttattaagctcgaagctagtcaatcaaagggatgacatggtatataaaagcaaggaaagcttctaataaaggttactaatacaggcatgagctcctgcatatagtgaggcagctccaaacaggtttaatgtttctgtattggtgagttcctgatatgtattatcattgcgactatgactacttttacgtaaatgagctgttttttgtgttatcttctcttgaaccagactttatatgtatatatatatatatatatatatatatggttgtactgtattgctacaaatatacactgtcttacttatcaatcaatctgaaggtagact

SEQ ID NO: 73357 - DNA, 745 bp, Prunus persica
  Intron number 1 from transcript ppa003087m (locus ppa00308 7m.g) derived from phytozome v7.0 (chr-ID scaffold_3; pos 463101 to 463845 reverse strand)
ccactacgatttcatctgctgcttcttttttctcagtaagtgtttactgtatgtactttcttcttgtgttatctgggttcgtgaaaaattgaaaattatctctctccgagaacaaagaatagctgaaaagggttttgattattgtttgaaattcagtaagattgttagtcttaattcaaaattggcacggcagaaactcatttgtggtgtggatatggatcaattttagctttctgataaattgccggttttctgtttactttcagttccgcgatattttatagtttatttgtgtttccgtagcatattaatatgttctcttcaagcctttgggggatgaatgaaatgagcacttttaaactgcaccaaattattttacgtctccaaatacatcaatttttgcgagatgtatgttcaaatacaatggtttctcgttttaattctttgtgtaaaaagtttccatgcaatctaaggttggattggattgcaaacttaacaaactgaccaacatggattggatttagttttgcccaaatttaaaagctttgggcccatcaacaaccctagtttgatccattcaattgaggaagagaaggaaactgtaggtgcatgtgcactacatgcattagcaaatatagacaaagaaagagagcagatgcctctaaattctagctctgcccgtgtgcatttaatcctttgcttaatttgatccatggattttatgtcgatagaagaagattaggag

SEQ ID NO: 73358 - DNA, 901 bp, Prunus persica
  Intron number 1 from transcript ppa006185m (locus ppa00618 5m.g) derived from phytozome v7.0 (chr-ID scaffold_1; pos 32471443 to 32472343 reverse strand)
tggaggtgaaagtggtgtcattttaaaaaattaatgatgttattttgggaattaaaaaattcattaaacactcttctatgcttcttttaaaaataacttcgaaaagcaacagagagcttgcttttaaaagatactgtcaaaaggctactacttttaaaataaacgagatattttatttttaccaaatactttagattgcttaactttaaagtgaagcatgttttgggaaaaaaaaaaacacaatcctaaacggggtcctaactctacctttgtacaaaaacaaaccaaaaaaaaaagaaaaaagaaaaagaaaaaagagttcaaatgtggtcaaaggcgctttccctaccgtgcgtattgcgatattttttcccactaaaaattgttaatttggtactgaattcactttaattaattttcaatggtttgttgttattttaaattttatatagaacatacattttttattgctaaaatcatatattttgcgtattctttatactgagctaggggtgatataattaggttttttatatattaaagaatgaacattttagggtttgttggtttgtttactttgttacactcactcatcttattgaaaaaccctttctctatttatttttttttgttttggggtcaaattccatttctctcttattagttattgcatttacggtaccagccaccttccacgcccatatggaccgctaattgttttgtccaaaaatttgtttcggtcgaacattgttgtccaatttacatcatcaaattacactccatccaacggctcaaaacgcaaggcaagcaaccacccagcaacaccaaagcgtttcccgtacacaattgacactctcggcgtacaggtcctcaagaatctaatctgcagcccccactttct

SEQ ID NO: 73359 - DNA, 531 bp, Prunus persica
  Intron number 2 from transcript ppa010127m (locus ppa01012 7m.g) derived from phytozome v7.0 (chr-ID scaffold_2; pos 18556221 to 18556751 reverse strand)
agccacttgggattgctgtcacacttagaggaaatgtgagtttgcttttcccccttaatagtgtatcttatcttctgcttgatttcgtttacgtaggtactagcaagactgattcttttttattgcttgtgagtatgtctattattcaggtttcttatcatctcccgttcaataattgcaattttgttaatgaaaatttaagacaacactataaatcatgtggaggcccatctggaagttctttacattatgatggtaacacaatactaatatcttgttgctattgtgtaacatatcgttaataacggaaccagaaaggagcagcttcttcatttctgtaaggttaccataggcaaagaatgcctatgattgaagagcaatgacccatggtgcaattgttggtgttatatgtgctcaaaggatttgaaccagtatttcctgtggcaatacttttcaaaaatgtctgtttctctcaaaaacccaaatgcatccaatctcatgcactagacttactattctattttgtaggtg

SEQ ID NO: 73360 - DNA, 884 bp, Prunus persica
  Intron number 1 from transcript ppa025463m (locus ppa02546 3m.g) derived from phytozome v7.0 (chr-ID scaffold_8; pos 18649548 to 18650431)
gctcattccataagtatatataatggattaggaggtggtggagtcgttgtcagagtgtgttggaattttgattatgcttagcactcaaatgaacaagtacaaagtaataataaaggagaagaaaactataaggagagacttgttattttctccaaacttctcgcataggcttgctcggttcacactttctttaattgaaacatccttgtggtatggggacccttatcatttctgatgttttagttcaagtgtagtttgctttgacatcaaacatatgatcgcttgttctatattaaaaaaagaggtgcaatgcaagagtttaaactatcattggtatcgaaaaggcaatcgggcttatttgtatggaacttagttttattttaaaaagatggaacaaattcaagtgttttaaggccccaaagaggccatcgggtcctgatccagtcaagaaaacagggagaaactcaaccgctaattgaacccgcgtttgaattacttgaaccccaagaaagacaatcctaaacgcgcggggatcaaaacgcatgttgtataaagagatataaagatagagaggccttaggtcttcgttttctttgacttctcttagctttgcgtggtactggagcagagcatccatcgggtgagttagagttactccttccctcttcttagcccgcgtttgggagtgcggtgcttcttttagaagcagcttatttttaaaaaatttacacattaggtgtttggtaaagtagaagtaggctgcttttttcgaaattacccacattgccatatttgtttcatacaagtacacgccttatcctgtctttttctcgatcaaaagttcaaaacctaagctcgtattggacaagaggcccgcgacaacc

SEQ ID NO: 73361 - DNA, 456 bp, Prunus persica
  Intron number 2 from transcript ppa008151m (locus ppa00815 1m.g) derived from phytozome v7.0 (chr-ID scaffold_1; pos 1538555 to 1539010 reverse strand)
aagaggatctcttcgaagccatcgacaagtgtaagcttcttcacgacctccgcttcacttcgctttccgttcacatgcttaattctcgatatataccacttcgaatcgcacattattttcgtttaaattcagaaaaatagaattcgttaactatttttctcgatttatttcaacattcatcgtttcaagattgatctttgtgattcagtgttcagagctgaatcgattttcgattttcttttcgtatttttaaaattcttttcgatttgctctgtttttctaaaaaaagaaactccaaaaattctatgagtatctattcgtttaagtaattcagtttgatttctcggtgagatcgaactagttttccccgattctcactgtagacgtaagttttgagcgacttttgcttcaaaactgaggaaatcgagttttgtgcagtgattgctcagggaatca

SEQ ID NO: 73362 - DNA, 863 bp, Prunus persica
  Intron number 1 from transcript ppa004927m (locus ppa00492 7m.g) derived from phytozome v7.0 (chr-ID scaffold_6; pos 3452755 to 3453617)
cgatcgcacggaggccgactgcttcgagctccaaggtaccattacccatcatcacattgacttttgcgttgactaactattactttgctttttcctttttgtaattcatgtgaaaaacaattatactaggcaaaagataatttttgatcaaggtagtgtgtcggttttaccactctagtcccgtagttttaattttgtaaatttagatttaaaattcctcataattcaatgatatgttgtaaattttgtcaaattccttttaattttgtacaaaatttcattccaaaacaaccttctacatcatgcatattatataagagagttgaatagaaatttgacattttgcctttgtattttgttactgctgtggtggaaattatctatttattaattgggccacttggtgatatttttttgggcatgcgtttcgttgtatgaaagcaaaaccacctttagaggcagcacacaacaacttctccacgtggagactcgtgacttttcttttcgtagaaaattagaaactgacatgacctaatttggtgctacacacacagcttttaatttattcattcacttcggccaacttccattcacatcattacaatagtttggatattggactaatattgtacatgtgcattacattcccactaggaagagaagaatgatgtgatgatggtgatatgagtaaaattatgtcccatcaattaattgttcaattcaacttttattgtttaattaaataatactagtactgttccatgatcacttcaaaaaaaaaaaaagtatgaaatagatgatgagttgaatgcatgcatggtgcatgtgtgtttgatacatgtgcagcttcaaggaactcgagg

SEQ ID NO: 73363 - DNA, 937 bp, Prunus persica
  Intron number 1 from transcript ppa010255m (locus ppa01025 5m.g) derived from phytozome v7.0 (chr-ID scaffold_6; pos 7313102 to 7314038 reverse strand)
cagacctgcctgtaagttttttttttttctgttcatctaatacaaatttcatatgtttactcttgtttttcattgtgtgtatgtgttttttttgtgggttttttttaatttgatggtctgcagaatgtggtttctattgcttatgtgtgtaaaaaatggaggaattcagttggttaatcagatcaagtgagagttttgctcttgtttctcgtgttatactgtaatgtggcaagtgggttttcaatattttcattgttgggtgcaaagaattgtgccttgatgcaattgcttttggtctctttagtgaatgcatgaatgtgttttagtttgatttaaacttcatcaactgtataaagcttaatttcttacaaattactatataacgcttgatgttgtttggctttcattactctgttatattggttggtatggttggaatatccatttccgttaatgaatatatgggattcaaaaaacaatttcgttctataatcaaatttacttgtactcatttaaagcacatctatgaatgtatgcttccttgcgcccaatgacatgccattttttgtgaggtcttggtttatattatgtgtattctgcttggtttggtttatgttatgcatgcctatatgttgttcaaatcctgaattgaattccaataatctctctactcttaagaactatatacagaatgttagtttctgaccttgtacattctgccttatccattctgacctagagatggtccgtctaaacatttaagctggtagatgttaaaaaattaatgcttatagaaaattccaggggcttgtacagatccttgttttcatttataaattctctttattgtaatttcattgtatggttacatcatgactttcataaaataaactcaaaagttttgggttaatgacagttttcaagactggtgctgtaa

SEQ ID NO: 73364 - DNA, 653 bp, Prunus persica
  Intron number 1 from transcript ppa000649m (locus ppa00064 9m.g) derived from phytozome v7.0 (chr-ID scaffold_2; pos 9037024 to 9037676 reverse strand)
agaagctgctagccgagatatttcctcggtctccggtgaatttctctattcaccttcacttttttttccttgtgtgtttatgaattaatgtctaatgtgggtagtggaaattctcaacaaaaattgatttttatgctacaaagtgaaaagaaatcgcaattgtatacagaagcaatgtgggaacttttggttcttgtgtttggggatcttgtgaaaataggactgaaatttgatttatgttaaaaagtaacttgcttcccaagaaatgaacaattttttctttatttattctatacatgatcaggtcagaaaatatggtgaaacaaaaggaaaaccatggtcttgtattatgttcttcttgctaaataaaagttacatatcaaataggttatgctttacggttctaattgtattaccaatgtgttatctgaaaattctccacaatttggtatttaaattgatatttgttttttcttgtctgtctgaaaaagcatcactcggcatgccacaatttggtatgtaaattgatatttatttggatttgggctgtttaattaggctttcagcataattggtttttatgttacaattttcattttatgccagttccttcagtttgtgttattggaacttttccctcttattttggcagg

SEQ ID NO: 73365 - DNA, 360 bp, Prunus persica
  Intron number 1 from transcript ppa012615m (locus ppa01261 5m.g) derived from phytozome v7.0 (chr-ID scaffold_1; pos 30223319 to 30223678)
ttctggttccatcaagctttggacatacaccgcaggtaataagtccaaccgcgacgtaatgacgccaacacatatgttgattttactttttaattctcaatttttcaaattgtataacttttactgtgtttactcgttgcaaatgaaatatttagttggaatgtttttttttttttctttttgcatatattcatggtttgacattaggagtggacacggtccagattggatcggtttcacttcaaaaccacagctgaaccaataacaatataataatttagtttgattcaattttaacaaaaatcatgaagaaaaccgaactgtctacttactttctcttctgcgtggcctcgtgtgtag

SEQ ID NO: 73366 - DNA, 377 bp, Prunus persica
  Intron number 1 from transcript ppa001954m (locus ppa00195 4m.g) derived from phytozome v7.0 (chr-ID scaffold_4; pos 8718098 to 8718474 reverse strand)
ttgcctactttttctctctgatttatctctacctggtatggatcactgctcttccttgctcatgttttagcttttttcttcattcatattttttattgaaggggtcaaattattgtaaaagattaaagcaagaaaagtaaataaggaattttttttctatatgcaaagaattagaatcaaattcggtgcagtttgctagatttggtaattagaaagtatggaattttcttttgtggcaccttctataaagtttcttgtttatcatccgttatttgtgtcaatgatgtgtaatgtaatttgataaattggtatgtcctaatctggatgtgcaattgcagtacttaatattcacttttgcttgtgcttttgacaggttc

SEQ ID NO: 73367 - DNA, 370 bp, Prunus persica
  Intron number 1 from transcript ppa002962m (locus ppa00296 2m.g) derived from phytozome v7.0 (chr-ID scaffold_1; pos 42284919 to 42285288 reverse strand)
agagctgctgcatttgttcttggtatcgtcttcttcttcttactttgtctttgctgttttctcttttagtacttttgtttgttcaatttctacatataaatatataagcaaagcatgttctcttcatgcatacccatacatattacatacacaactcaactgggtttcttggttaagttgatacccttcaaatcaaaagggattaattttgtattgcttaagtacgcattaagtacttaattactcttgttattaagcaaacctatggagctagttttttttctttttttcccgtttagtaagttggtactgtatttgtttgtttatgatattattattttcgttttcaggacttcaatcatttgagata

SEQ ID NO: 73368 - DNA, 722 bp, Prunus persica
  Intron number 1 from transcript ppa020485m (locus ppa02048 5m.g) derived from phytozome v7.0 (chr-ID scaffold_8; pos 7541559 to 7542280)
ttgtagcttcaaggttatccaaagattttgagtctgtgcattctcaacatgcacagattagggagaaacttgagtacaatcatcgattgtctcgaaaaggatatgctggtttggaggatcaattggaggaaaccatgcctggggtagaaattaatcgatctaccttatggaagagagctagacaggacaaacatggtaacatcccggatccaaaggtggcagagaaagcaaaattaattgtaagcctactcactctgttttaaatttttattaaactgtgaataattcttattacgtcttatgttatattttgcgtcgtgtgaatgatattaccacgttgaaattttttaaaaaacgtcgttaaaggtctgaatcaggaatcactactctgttttctgtaattatagcataagatatcggtggttcattttcgcgtcgtttgtattaaattactacgtcgaaatgttttaaacaaggtcgttaaaggtgtgaatattgaatcatccttctgttatctgtaaataaagcataagacgtcggtggtttattcatttcgtcgttttaaaaaactaaccacgtcggtataactaccgtcgtgataaattataataacgtcgatttatatgttactgcgtcgtctgaaattatataatacgtcgtttgtatataaataaccgtcgtgtgttttttgttcttacttttttatatatctttgttttagg

SEQ ID NO: 73369 - DNA, 668 bp, Prunus persica
  Intron number 3 from transcript ppa007755m (locus ppa00775 5m.g) derived from phytozome v7.0 (chr-ID scaffold_6; pos 10773347 to 10774014)
aatcgccggagtactggtaagtgtatttgcattttgttctaattcttgatacatttgtcattcggtgctttgctaattatttcgacttgaagttttattggtgtttgacaatgggtttatcagattctcttgttacaagctaaactctactccttattatatgcttgaaattactgaaattgaatgatggaaaatttgctatgatactattgatacagggtttagggtttactttgaaagtaagccaaatgtcacatcattactggagtctggaccacatttctgggttattttttctgttcaatttcctttcctttctggttcgatgttcttctttgcctctcgtcttaaaatcctttgcatttgctcctgcatgaaaggttaaggatcaagaggacagtatttgagattaagatttgacaagacatttacttaagacttccacttgatcttttggtatggttataagactttgtagaaattttgttttgttttgaatatctcacattactaacaagcttgatgatgtttttgtcttttaatttttaatttttgtatggcttacatttttgtttaattatttttttctcagtttctgtattttaaaacaattcagtatgtttggataagcagaaaatttggtggaggatcttttgggagattttgaa

SEQ ID NO: 73370 - DNA, 1002 bp, Prunus persica
  Intron number 1 from transcript ppa023158m (locus ppa02315 8m.g) derived from phytozome v7.0 (chr-ID scaffold_3; pos 10149397 to 10150398 reverse strand)
cgctcagtgtcttggtgaaaaagaaaggtattttcaacggtctttgaagttttgattggtttttttttctcttgggttttgtataatttactactagtagttttgggcaatttttaggtagtgttttgagtgctcagtatccaaaaatggcttctttgtcttctggttttgttaccttaactcctatgttgattttgatgacaccaaacagaggaatagccttttatgcactgttttgcttttaatccctctttggaagaccattgcactacttccctagtgttaggatctcaatgtttcatagattcatttactttggcacgagtttttggttgcttcggtttttcaaacgggcttaggactaaccacaatctttaagacaatgaggagggacgtgtgacacactttggattggtttgataaccatttcattttttattttgtgttcacgatttaatctttaatggttgagttgactttcccaaagtaaaaagttggattctgaaagtttataggaggcaaaggaagagatgttaaagggaagagtaggactagtgagagaagaagaagaggaggctatagtattggccatgagagtagagaaagaggataagagaaaaaaaagaataaattgcctaggctcttgataccatgtagaaaagagatgctttcatatatttgcaattcaccagtacaggctttatatacaggtagctaaatggtttacaacggtagtgtagtaattatatcaaacctaaatgctgtaattacaatacaataaagctataattaagatacaataacaatgtaacgaaaatactccttgaataggcataactatgattgaatgtcatgattgtggtggtaactccctaacaatgataaagacaaaataccagaagtttcaatctttgctttctttcacaaatcactgaaatgcataacttgaacaatttttccatgcaagcattgcagttgctgttctgctgatcatcgtaatca

SEQ ID NO: 73371 - DNA, 738 bp, Prunus persica
  Intron number 1 from transcript ppa025126m (locus ppa02512 6m.g) derived from phytozome v7.0 (chr-ID scaffold_4; pos 12365972 to 12366709)
ggattccagccgtctttttttgtctttctagagttgatttttccctttttaattttgtagaaggcagttctgcctaaaacagtccactttattatcatctatttggctagaactaccaattttatattgtgataaattatgaagtcctcaccagtttgaggcaagaaaaaaacttacttgggagatattcttcacccaaattcacaatcgcttgtttagaaatcagtaacttggggtgcaagttatctatatcaaagaagtctgccaggatttttcattgttagcagtggcacgctcgcacaccaaagaaaattggcttgttgactagtcaatggttttcaaggcaatggggaactttgcccttccatcacaggagtaaaaataaaacgggtgaacaatggcgcacatgttgtaagagcatctataatcatactcccttttttcagttaaaatttaactaaaaacacacgaaagttagtttagggagtcataaatattatagttattttttaattcaatatgattgattcatctatacatatatacagtcccgatctcttggaccacaagagtccaagagattgtgaagtcctttttctctcgtcggatttaggagctcctaaaagtctccctattttagggcatccataatgacctccctaaatcacctctttagacaaattttatggagtaattggaaaaatataactccaaccatgctcattatccacctccagc

SEQ ID NO: 73372 - DNA, 582 bp, Prunus persica
  Intron number 2 from transcript ppa007331m (locus ppa00733 1m.g) derived from phytozome v7.0 (chr-ID scaffold_1; pos 33513699 to 33514280 reverse strand)
gggtccaggtatatgattatatgatggaaaactatattgtcaactttggtgctagttcatttcattattccttgttgttgcttagtgcttgattaccccttggatgtatagaatggtctttgaaactataacttgtaattgtatgaagcaatctcatttctcatattttcatgctccttagtattctcagtccttaccctctctgttttgtaccctgaatcattcttttatgcttccattacattgtagttttttatttcttttgcttgacctgattgcgtacgatgatggcgttttcaaatcactgtgtttgagaatgacaaataaagaaacctttttttttttttgtcagaaacttgagttgatgtgatgttagtttatgacatttgaattcttagcaatttattcagtgttgaaggatgtaagttttggaaatctagttgtttttctctgcatcaaccacgctgaacaccaagctgcctgttgatgcatcaataatctgcaacttcacatttttttccatatttgactattgttgatctaccatattcattctttgtggtaggatttgtgctggttgca

SEQ ID NO: 73373 - DNA, 814 bp, Prunus persica
  Intron number 1 from transcript ppa024997m (locus ppa02499 7m.g) derived from phytozome v7.0 (chr-ID scaffold_3; pos 410526 to 411339)
attcatttgttgaattctggtaaagcctctgtgtaacttggatcaatttgctaaaatatgaagctcatttctacatataaatgctttctgttttgttcagaactacaatacatgtgtgtgcgtgggaaagtagggggaccaggtggttttgggtggatgtgtgatagaatgaaactctagtgatggtgtttacaagctcaagacccgggaaaagaaaaaagcttgtgatctctgtatgggccagtgttcttctgtttctttgattcttcttgtcttgttagctatgtaagctatattttaaattttttgttcataaacagtttatataagaggcaaatgttttttttattttgtttttgtgcttgtgtgtgtgtgtgtgttgtcaaagaggcaaatgtattctgatggtagcaggatagtttaatgtatgtctggaacttcttcaattatctatgcataggatgaaagcataacacaatgacgtgaggattattcacataaggtcctaatctaattttgtgcattgttatggatttttcaaaaaatttaagcaaattaaaattttctcagaaacacaaacatgttatgaagaatatttaaccattatccagacttgcaattaggtctttagggtttcttctgttcttcctcattaaaatgcatatttttcttctcttgactgataatcatttcattgatctagctttactaactggcaatcattgttgtccccagaagcctgaacttttcaggaatctaatgcatttgtgcattttcaggtatattaaagtattcagagaataacattgaggtt

SEQ ID NO: 73374 - DNA, 913 bp, Prunus persica
  Intron number 2 from transcript ppa024997m (locus ppa02499 7m.g) derived from phytozome v7.0 (chr-ID scaffold_3; pos 411332 to 412244)
ttgaggttgacgcaagaactgtattagtaacaaatgtaagctatttgtgtatgttgctccttttttttttttttttttcctttctcttttttggttggtaaatacacacacctaagcacccccaagataatcaacattggttttctcactaaattgtttgttccttatctattagtactttttttcttattataaatataaattcttctccacaactgtcatttgtttttgttaacaaagcttactgatggactttctatgatgactgtcatgtaccttggacatggaatcatatgataatttagaaactaagtctaaaaacgtgacattccatatggggatttacagtaccaatcgtcattgaagggtttttatatttctatgttgtttggaggtttaaattatttgagttatttgcttcaatcttcgttttaagttgaaatactctgtgaaccttagaagatggccgtagagtatgtggaggccttgactttaattgggagaaacattaaagctcacagtagtgtgttgagaagagcctgactgtattgccaacataaaataattaaaggacggttggttggattgtaattctaagtaaagcagttgatagtaaaagatggaaaccagaggggtgtgccaattcatgcctgttatcctcgctttgagttcacttcttagttaatctaaccagaaagcagggtttgtagaacacttttgtttaaataaagtgaaaggtatttgtgattaatttccatggagatattgctattattccttctgatttatttaatgtgtttcaaattctgcatttgttgttcagaatatctcataagtataccatgtactatttgaaaaaaaaacaaacaaaaaaacaggtacatttttcagcaactaaagaagctttgtcatt

SEQ ID NO: 73375 - DNA, 492 bp, Prunus persica
  Intron number 1 from transcript ppa008334m (locus ppa00833 4m.g) derived from phytozome v7.0 (chr-ID scaffold_2; pos 80673 to 81164)
gccttggcgttcgaattccgccgatcccaaaagtgagccctcatttcctcacactaagcttatatttttccacaaatttcagttttttctatgtgtgcacatataatttatgctttacatgcatattaggagttaatggactcacataatttaagcttttctgcggatgctgtgcttctaagattgccaacttccccacattttaaattcgtataggaactttggtttatttgcatttcaactttcagtaggttttacaagtgacaggaatttcggattttcccccctatgttggtgttggttttagaaaatttgacatcttatgtatcagaacaggcaagaaaatagacacggtcactcatagtgctactttgaagaaattccttaaaattttgagcacaggtttttatgctttatattttttatgttggtgtcgttgtatattttgcttgatatggtgtagtgttggtttctgataacaggataaagttg

SEQ ID NO: 73376 - DNA, 625 bp, Prunus persica
  Intron number 2 from transcript ppa010967m (locus ppa01096 7m.g) derived from phytozome v7.0 (chr-ID scaffold_6; pos 7839639 to 7840263 reverse strand)
ggttctgcaaaggtactctttttgttcaattaaaatttggttctgagccaaagtttctactttcagttttcccaatttatgcaatttttttagctctattggtttcagtgactttgttgtttataaactttcacttgcttcacaccaaattctaatgattgcaacaaatacatgttgtggttatattgaacagaaatgaaatagaatattaaaatgctcactcatcatgatattgctgtttttttttttcccaggagaaaaaaactaacccagcatttacatgaattattattagcgtttatttttgaagttacgaaggtttgataccttttctacctcgaaggaactttaatcaataaatgtgtcatcaatagacgatgtggtttggaaactgagattttataggaaactgaagggccatctgtgtgattttgatcacttccattttggttctgttttctatcataatctttgacagaacataattctgattagtatatctatttaatttctgactgttgtcttatttgctgcagtcgtgcttcttcctttgtttatattcaatttctcttttgtgttaattatttcagtcacttgctaaagaaattgtgagatctagaaggac

SEQ ID NO: 73377 - DNA, 259 bp, Prunus persica
  Intron number 1 from transcript ppa010967m (locus ppa01096 7m.g) derived from phytozome v7.0 (chr-ID scaffold_6; pos 7840294 to 7840552 reverse strand)
ccaagagtgccgcaacatcgaacgccaaattcgaggtaatattttctttataatcctcttcctcttatttaagttacccaactcaaattttcgtcataattttcattttagtttgaaaatttacattctggagtaatttttgtgatggtttagattcatggatcatgcaattggaaggaaagggtttgtttaattttgggttttctgtaatgagtttgcttcagatatacaaagggaagagaaaagtgtgcaaaaagca

SEQ ID NO: 73378 - DNA, 526 bp, Prunus persica
  Intron number 1 from transcript ppa006428m (locus ppa00642 8m.g) derived from phytozome v7.0 (chr-ID scaffold_7; pos 16919738 to 16920263 reverse strand)
tgaaatagctgcgagctttcgagctggttcaacaggttggttcttgtctttccgcctattttttatgattagcgattaatttttcattttttaattatttaatttccagatcgccgaaagtttgtcattttcagagacaatgatagaaaataattttttttttcaaattttattgctaaaaataatgcggtcttttagaaattacatattttctgtgtatatattgttgatgctggttcaagaggttttgatacggaggagagaaatttcaaaggcattgaaaagattttaacttttgggtgggaagagaagttatgttgtttctcttgagatttctcgtaaatgaagccaatgttaatgccaaaactttggccgatttagcgtcttcaatgcactcacagaatatggcttcgtagacatttgaatttgattcaaattgactataatgggtttatagtcgtgtgctcgataccgaaattactaaggttttggtttcatgttatattctgattgatacactgcgtag

SEQ ID NO: 73379 - DNA, 853 bp, Prunus persica
  Intron number 1 from transcript ppa026605m (locus ppa02660 5m.g) derived from phytozome v7.0 (chr-ID scaffold_7; pos 15344626 to 15345478 reverse strand)
tattgtcaggtgaagaaattaaagctcaaatcacggtgagatattcttacttaccattaatttttttaagtagtatggatccttaatttgtcgatgtttttatgtttatttttagggatatgatttccccaatcccattttctccacttacactcccttttgttttttaatattttttaatcaatttgttctttctctttcttattttacccttatcctacactaatttctttttacttcacttttatattagttctttttctttatacttaattttccaatttgcactccattttcagtaaaaaaaaatttctttaatcgagtaagaaattaagtttttttccccctttaatactgaaaatggagtataagttcgaaaattaagtataaagaaaaagaaataatataaaagtgaagtaaaaaggaaattaatgtagggtaaggatagaataggaaagagaaagaacaaaatttattaaaaagtactaaaaagcaaaagggagtgtaagtggagaaaagggaagtggggaaattagctcccttatttttattcatgcaatagtaagggaacaaagattcaaaacaggacttccgcttgcatgatgaatgcttttaatcacttgagctataagccgcttgctaatttgtcaatgtttattgagctaaagttgtgcttatgaatactgaactctaaactcaaaacgctgaacttgagcaacgaggagcgctgaaaagaaaagcagatgatgctatttctgaatttttcatgtacgaagtaagaaaccaacttacatgtacatgttcttgtgcatgatcaggaactgcagcttgcaacagtggataatccgttcaa

SEQ ID NO: 73380 - DNA, 515 bp, Prunus persica
  Intron number 1 from transcript ppa006093m (locus ppa00609 3m.g) derived from phytozome v7.0 (chr-ID scaffold_3; pos 6788695 to 6789209 reverse strand)
attgagaggtgagcttgagcttagcttttgatatttttttattgttttgattgaatgttgattatgttttgaaattgaatatggtgttcaaaggaggtttaatttagctacattattttctagttagaagtaaacgtggttgtagaattttcttctttggtgcaatcaaacaagatgcttggaccttctgaagttctgaaatcaaactaacttttcttgttttgtttctggatggttcccagaagtggtttctggggttgcatacttcttgcttgcattgttcgcataattctacgaatattgtaaagtatggatctttatggattagaaattcttttgttgcttttgctagctttgggacgtttggatttttgtttttatgatggtgtatgagatgagtttatataagtcttcaaccacatccacgactctgtgctttctcaaacttatacgcggttcactagtgttattcaaaaaattaattttccttatttcccctttggtattcatcagat

SEQ ID NO: 73381 - DNA, 981 bp, Prunus persica
  Intron number 1 from transcript ppa004904m (locus ppa00490 4m.g) derived from phytozome v7.0 (chr-ID scaffold_1; pos 23708635 to 23709615 reverse strand)
cgcatcgaggttcatctgccgcagttcttgccgtaagcaatcaatttctctatccgcccacatcttttgttgaattttatttttgaggcttaacattcactgccctaggtttcactctgattcaagctcatttccatgtttctatcaatccatatttgttttgtatattattttattccgaaatgtgttctttagtagatctgtgggtttttcttcttttcctcgatttgctatctgattggtaactgggaaaattgagcaaaggagctggaaagggcgataaaatttaattatgaacgggtttttaaggtatttaatacctgttggagctctccttagctaagcccatcttttaattaggcttgattgaagaaaggttttgactttaggttccaaattggttacgagtctttcagtggacatctttatcatccccattatcaccattttctttttgtcttaaagctgctttgaaatatagtggtgattagggaatcaccttaggcttcttggattaatccaatttttgtcttgggtgagttttgtgtgaaactatctcccaggtcaaacgcatgtagtttggtgtagagataaataatagggaacacagagatagttaagataattctagaaatgctgaatcgaagatgtacaagccacatttcaatcttctagtgcgtgtgctcgtattgccatcttcattaaatataaagaatctataagaaaataaatgttgcgtgtaggccacactttatcgtaatattaatgtttcattatggttgctgtgctgtaatttgatgttggattttttcatccatgttttttggaagttgtttcatgtgaactgtagttttattttgattgttaactctgaagaatacatgttagagacacagttcactatggggaaatgaactgatctgacttctttattgttaattcataggcacccatcaagggtattctttctctgccgagagc

SEQ ID NO: 73382 - DNA, 831 bp, Prunus persica
  Intron number 2 from transcript ppa006077m (locus ppa00607 7m.g) derived from phytozome v7.0 (chr-ID scaffold_3; pos 5349901 to 5350731 reverse strand)
gtctccgccaagccctctggtgataccgttaaaaagttagtatcttgaactttttcttaatttcgcatcttccattttactatcacgagtcagttgggctgtttgcttatgtacgtatagataaaaaagtactttttaatgttgattttggtttctcttgtttttggttggtttgtggttctgctatttgtactgttttgtactttgcttggtcactgtgaaaactgaggaaaaaagtggagaaagtaattgtggatttgatttgttcgcttcttcagattgttttcatttttggaataaaagtttaccaaaaaaacaagagattttgtcaaatttgacttagatgtctttatggacagagacagacccaaatttcttttaataaaatagaacctaacaaattcagtttcgtgcttctacaatgcttaagtttctaaaagattactcgacaaataaggttgaacattgtgataaaacctcactgtagtttttattaagtccatgttctcacaaaagaaaggtgttcccggttaagctcctcttggcatcgctgtggttattgtgcctaaaactctggggtttagtattgtgatttgatagaattgtatttttcatattttcttattggagggtaatgctttaatgtgtatattgcctctgcctctgtatgctgtgattcaactacatcaaattttttatgaggttttgctgatacatcttgctaatcttctatgcatttcatactttcagattccatgaggttttatttgttatggatccctcaaatttatttattttttctaaactcctatgtcatatggtgcaggggct

SEQ ID NO: 73383 - DNA, 677 bp, Prunus persica
  Intron number 1 from transcript ppa021568m (locus ppa02156 8m.g) derived from phytozome v7.0 (chr-ID scaffold_5; pos 9125532 to 9126208)
ctcgtcttggaaataggtcattctcatctattcatatatttctgtggtcttgattcatttacatggatacatgttaatcatgacgttagtgtttgggagcatattgatccgtacatgttaatgattttactaatggtgttcggtggtgaacaaggttgtttcatcttcataataacttaaattatttataaagtatgtaattatttctttttctttttccttgaggtacaagcttggtttctactttcttgtcttcagtcataaagttgaaaaggatcatatatgcattcaacaagacaaagaaactttggttgacacgtttaagaaaaaatggtccttcaatttcttggtagagcattatatttgttttttgtatattgagagaatagtattccaacgtgtaccatatttactaatcatattactcatcacatcttttacaatacgtgacatatcgtctatgtagcaaattatatatccctcaagattttacctgcttatagacttaagctagtgctttgattaattacatccctagcatttaattagttgataacttatgagcatgattaagcttatgatcactagtgcaagttttactaacatattggtcatgctcttaatttgggtatataaaaataggtggtccaagattgcagccagattgccagggagga

SEQ ID NO: 73384 - DNA, 547 bp, Prunus persica
  Intron number 1 from transcript ppa007879m (locus ppa00787 9m.g) derived from phytozome v7.0 (chr-ID scaffold_2; pos 1692692 to 1693238 reverse strand)
caacgactgtcagaggctcaaaaaagccttcgaaggttttcttcttcttcttcttctctcactctcagacgtgattcaattatatgatggtttcattgaaaaagtttgtgtctttgaatgttttgttcaatgttggttcatgggtcaatggtgaatttgtgaatatatctgtgaagatttctgattctctctctgaattttggtggattaatttgatttcttcatgggttcatttgtggattagctgaaaacacatgtgtatttatgtatatcaaccatcttgtttccctttttttcttgttgcaaaaatatgggtggcagaagcctgaaactggttatgataatttttcatataaaattttctgttatttgtcattataatttgatatttgtttcctgtcattggatgaatgaaataaagttggctacctttcatttgaaagttggtctttttgaaaatctttataattgatttggcttccgctgatattcattcatgaatatatttatcaagtgtttgtacaaatggatttaggattgggaacgg

SEQ ID NO: 73385 - DNA, 413 bp, Prunus persica
  Intron number 1 from transcript ppa007706m (locus ppa00770 6m.g) derived from phytozome v7.0 (chr-ID scaffold_7; pos 20488759 to 20489171 reverse strand)
tcacgccagtcaccatatcgtactcggagctcaaagtaaccttctctatcactcaattttgtttgtttggttaccgagaaaattgaacagcagagttcggattgattagctttatttgatgcttggttgcttagaaactcaacataattcagcgaaattagtgtaatatactctctgttcacttttttgttgtaatcatcaaccgcaccgaattcattcttattttcttagcatccaaacggagtcttatttgttttattcttagttttctttaattgctatgttttgctctgctaaactcgtggatatcgcgcatgtcaagaatttgattttctgatttacgtcttttttgtttcatggattgattgattgaggcaggacaagaacacggacttgtcattgaagattgaaga

SEQ ID NO: 73386 - DNA, 910 bp, Prunus persica
  Intron number 1 from transcript ppa001990m (locus ppa00199 0m.g) derived from phytozome v7.0 (chr-ID scaffold_1; pos 7088728 to 7089637 reverse strand)
gaattgaggaaggaaaagcttgtcaggtaaattacccacaatatattttttgttaaaattgtttatctatttagtttttctctctgtttggttgctcagaaagtgtaggacttttgtttatgtatttttattttgtctttgagatgaaagagctgaagaaatagataggactgagctgggtaaatatgacagaaaatacctgccaaaattttctgggaatcccatttttcatttccctctttttgcagtgcttgtttgggtactgagaaaatatgataaaaaatttctggaattctttactatatgggacccgtgaaaactacggctttgctaaactataaatccagcgaaacttattttgcttatttttagtctgatggggccagtggaaactaagctcttctcagttaagcatatagtttaatatgcttgatttaggtaggtcttacctatctataaacgtatacaactttcaacatcagttgttggtatcattttctgggaattgtttttccctataattttctgtttgtttgttctggaaacatggacaaattaatgttttcactaattgggaactgaggacgagttccatccgattggagcctgcggcctaccacagctaatttgtatgatttgatcaggccttgccttactggaaaccttaacagcatagcacaggaattccaatttgtcatatgtttcactttgttttttttcatttgtttacaaagcgtcctttgtttacatcaattttgttgaaacttttcatcacatttcttcagcacgtaggaactataattaactttgaagactaccttactcctggaaatattttcttttaactcaatctgaggatcaacattctctaatactctgctcaccttaatgtggtttaggttttattcag

SEQ ID NO: 73387 - DNA, 549 bp, Prunus persica
  Intron number 2 from transcript ppa005029m (locus ppa00502 9m.g) derived from phytozome v7.0 (chr-ID scaffold_6; pos 28360617 to 28361165)
caggtaattcattaaaacgagtctgatacttatagttggtatcttaacatgattgctaatagaactatactgctttctatctgcctttttttttttttttttggtaaactctatctgcgctttttgtcttctttaatatgtcccaattttctgcatttgaatacttcacacagaaacatcaatccaattagttatttagtttgtaagagaactcattactacatacattttttaaaattctttatagtaagaatttaatttggctagttaaaaatgttggtttaggttttggcttataatagggtaagggaatggttatcttactagtgatttcactcgaattccgtacaggatccagacgaagtgttgttcactttatatgtgtaatagttttgctctttaactacatcacattttattggaattttttttttttcgtttctaactatatgcacccgctctaaaacttagtcttggtctttaatttgattactggagtacctattcatgtcagggtagaacttgccaagtgtattggaaacccgtcgt

SEQ ID NO: 73388 - DNA, 849 bp, Prunus persica
  Intron number 1 from transcript ppa004902m (locus ppa00490 2m.g) derived from phytozome v7.0 (chr-ID scaffold_1; pos 43061476 to 43062324 reverse strand)
tgggtccttctcttttccattattatcagaaccctgtatgattgtttatctttacactttcttctaccatttggattaaatgcggcctgtttctgttttggttgaaatcattttccatttggataactggtttgtttctctgttcttggacttcaatccctccggcagtttggctgctgagaaactagaggaaaatttaatcaaacggtattttcatgagaaaattttaaaaggaactgactataatataaaacatggtatcaatcttttttttttttctttttttaatcaagacttgggacctttcaattggaccatggatttcaggacccatttatattttgttacatgtatgttcatttgaattaattatgcactttctctgtggctggttcgttttatcgttttaaaaaagctttacaatggctctgtctggttaaaaaaaaaaaaaatcatgttgcttctcttgccatgcaccaatcaataagaagagaaatttgagtgacttttgacatttagctaaactctttcaatcttgtattattggtaaaactgcttgccgagcaattattcagtcaagttttgtggtagagtcttatgttgcatgtatcatagtcgaaaaattctggttccaaggcataagggtgttcctatatgatttattgcctttgctcaacaacaccagttcatttgctagtgaatggaaattattgtctccccgcctgtatgatgttgcatttgctgttgtgctaccggttgtccacttctatattaacacagtttatgcagaaactgatttctttgttttatttatcgttgtgtaaacagctcaatattgttgaagggaag

SEQ ID NO: 73389 - DNA, 1010 bp, Prunus persica
  Intron number 1 from transcript ppa015602m (locus ppa01560 2m.g) derived from phytozome v7.0 (chr-ID scaffold_7; pos 14608021 to 14609030 reverse strand)
atttctcaagttttgtccggcaacttaatacttatgtgggtatttgcagcctgtattggctgccgctatgatctgtatgtaataaatgttgttgttttgttgttctcttttttgtttttttatttggttttgtttgtttttttttatatgatgctgtttatcgtctaaattgggtttgatgagtctaattctgtagagatgtagtcatgtatctgaggacattagtattgtatcttttaaactcaccatgtaagactttgaaggaggtgatggctttgtatccttaactcccaattttttgtattgaagagattcatatgtaattgaccaaaactaaataaaagagggttcatttttatgtaaacagtttcttgtcgtgaaatgcatgggaatttgtttctctttttcattaatggtttacacaggtgaagtgatagacatttgttcttgatgatgatatgtattatggtttctgtggttctagaagatgtatgtgttggaatgatctctaccattttttaccttgaagtttgaatttctcaggataatatataacagttttgtaagatttgaatgtatcatgaaacttagtatagagaatctaatgggaatcgtaaaggttctttcattgatttcgtagttaggactggaggcttacttgtatgaaaagaacatcctcgtcttttgcaggtagaattcaggttcctattgttcagatctcgctatattatcatctcaattgctcccctcctcccaaccaccacttgttaatgcttcaagaagcttttctctatttgtttttggtgatttgcagattgcatagtgaggttcagctcctcatatgaatgaaagttgatggattaaaattgtcttgtgtgatcatttgtgtactacttgaataattatatctatcttttgatttctgtactgtttcgtttccattcattattgaaattctttgggtactgtgttcaggggtttcgcaaggttgatacagataagtgggagtt

SEQ ID NO: 73390 - DNA, 566 bp, Prunus persica
  Intron number 3 from transcript ppa010793m (locus ppa01079 3m.g) derived from phytozome v7.0 (chr-ID scaffold_1; pos 37536669 to 37537234)
caggtatgctgtgaagtaactgattttaattgtttagtaatccaagtgtctagctctggtatcatgtctttttagtaatgttagcaaaaagtatcattttttgatgtgacatcattattctgctgcttgtaatcttccattagaaaactgaaggttgatacttgataattcagtttatcaagattggtgtaacggctggatcagttcccctcatttttttgtttcttaatttagtactttctagtaatttacaagataccacttgcacctagcacaagtatcttggtggtaaaatgattgttttagtatcctaagtttgaatataggccctagggtcacccaccatttgaccctttcattttttcagttgcctaataggttggcttagggcttatatacattatagacaaaacatatttttactctcgagaaagaaaaaaaatcttaaatgaggttgtaagcacattcatcacttttggctttagcaccggagaagatgactcatctgcatctgcatctgcaatggtgcaggagaaccttgtgacctgtaccattgtgtgcttgag

SEQ ID NO: 73391 - DNA, 488 bp, Prunus persica
  Intron number 1 from transcript ppa026104m (locus ppa02610 4m.g) derived from phytozome v7.0 (chr-ID scaffold_7; pos 15756059 to 15756546)
ataaagtgagttgtttctttctttcttttttgcagttcctgctctttctttaaagctgagaggtcttctcagtgacaaattccgagatgagtgtgttggtttctcaagaaaaagagaaaaaaaaaaaaaggagattaaggttctatcttctagagcttgaaaatggatttttgactatgaaatgggttttcaaatttacttgaaaaagaaaggcttttaatttatgaactatgccattttgcatttattttcatacgtataggacattaaatattctttacttccaaactatattctttccaattatgttaatctcctactggaagtgtgaaaagtgaggcacttttgatccaaatccaaattgggttctttctttaacttctctcaagaaaagaatagtttttgtttcttttttgtcagacacaatgatctctttttagtttataacattgttatttgatgttgaatttacaaagagggagaagaag

SEQ ID NO: 73392 - DNA, 185 bp, Prunus persica
  Intron number 4 from transcript ppa019523m (locus ppa01952 3m.g) derived from phytozome v7.0 (chr-ID scaffold_3; pos 21385190 to 21385374)
aagtattaacgccgcagtggagctgcttaaacaaggtccttttcagttattaaaactcaatgttacctgtcatattttgtattcttctttgtttatatgtttctttttccggtttttgaatgttgaattatttttgtacttctttatataattttcaggtattactgaactaagcattgagccat

SEQ ID NO: 73393 - DNA, 368 bp, Prunus persica
  Intron number 1 from transcript ppa007335m (locus ppa00733 5m.g) derived from phytozome v7.0 (chr-ID scaffold_6; pos 1073263 to 1073630 reverse strand)
tctggtcgtcttctctccgattttgttgggttgtggtaagaatcaaaataattcatggtcttccccttttcttttgttgttcttgttttgcatgttctggattagaagaagtttcaccatctttatttttaaaattatttgtttctttggttgatcggaggtgctcttcaagttcttgtcaaaatttgatttttttttttttttcttttctggtttggagtatttatattttaaatggtctcatggaatttctttgggttttgaagaacaatatttaaattgttggatggcttagatctgggaagtcatgctaaaatcttgatctttttgctatggtcttgtgacagtgaccgaagagaaaaagagaa

SEQ ID NO: 73394 - DNA, 385 bp, Prunus persica
  Intron number 1 from transcript ppa003518m (locus ppa00351 8m.g) derived from phytozome v7.0 (chr-ID scaffold_4; pos 672045 to 672429)
cgacggacccgctagctccgccgccggcaatccaggtcagtttcttcttttcatattctactccgatccgggagttttagttggtcaaccgatagtagcgtttgatcttggagaatttcgacttcgtaagattagaagattttgaagtttcaccttagatttaatccgttagatttagttgtattggtgaagttattctcgttctgtttttgtttttctagatattaaaagcagaatatttgacgtgcaaaataatattttctttcggactttcactttcctgctgtttcttggcgatcaaacagaggattctgtgtgtctagttttttttctcttcccgtatttgacagttcgttttgtgtttttttttttttttttttttcag

SEQ ID NO: 73395 - DNA, 648 bp, Prunus persica
  Intron number 1 from transcript ppa007186m (locus ppa00718 6m.g) derived from phytozome v7.0 (chr-ID scaffold_8; pos 1700881 to 1701528)
tctacagctggtcaggttatcaagtgcagaggtaaacccagacctcttgctctcctttgttagatagttctgctcatttcattcatttttacagaatcccatttatgtttttagttttttttttttttttcatttttctgatcaagttttttttttttttttttttttggttataccctttgttggggtctctgtttctgataatttttttagtgattccaataattgggtctggtttgttgagtcctagctgatttatatatttgtttctggttacatatcttgttttcttttgtgtttttacatgatcctggtggttttatttatttatttattatattttatattttaaacatacagatgcttgatcttttccttttttcttctctcttttagttaaagtgttttataaatcaattaatgatgatgattgacttttgatctgggttttcttggattggatttgatggggatgccaatttcagtttggaaaatttctaaacttgactgaacagaagaaagagaccataattttttgggtcaattgtcttggcaggggactgatcttctagttgtttaataatattgattaaatggatgtattgtttactaattgcattggcatttgtggattgtagccgcggtggc

SEQ ID NO: 73396 - DNA, 418 bp, Prunus persica
  Intron number 2 from transcript ppa026827m (locus ppa02682 7m.g) derived from phytozome v7.0 (chr-ID scaffold_3; pos 1599453 to 1599870)
ggggtggtgctctatctgaaactcatcaaggatttgtatgggatcctccttatatatcagaattttgattttaggtttgaaaaagcatgttgcattgtccatatatggggctgtagaaggtgtgaaaccaaagttgagggcaccctttggaagccatgacttgctgacttgatcaatctcttctgaggagggaatcattgtcgcaatgttaaattctaaatgaaaaaccatacattctgtttggtggactctgccccaaaacagagacttcaaaatgtgtacattttatcttaaaatattgtacatgtaatgaagcaacttcatgtataaattatatattctctatctctttattagcataactatatatttcttgttttcaggtgaaagaccttaaaactcaagtgagttatttcaa

SEQ ID NO: 73397 - DNA, 316 bp, Prunus persica
  Intron number 2 from transcript ppa016821m (locus ppa01682 1m.g) derived from phytozome v7.0 (chr-ID scaffold_1; pos 22965790 to 22966105 reverse strand)
ataagtctgttccagctttaggtaaattttgtttgataatcagaatttattttgctataattttaattgtcggttggtgattttctttgaaatgttgacatcttcatcagagatgaagataaaaaaactaatgccaatggacgcagagtctcgcagacttattgattggatggagaaaggtacagattcttgaactcactgattattaatttcttaatttttatcttagctcactgatttgaaattttgaatgaggtttcggttttaattttcttgtttggttatgaatttatgtttctttttgtaggtgtatacg

SEQ ID NO: 73398 - DNA, 502 bp, Prunus persica
  Intron number 1 from transcript ppa003477m (locus ppa00347 7m.g) derived from phytozome v7.0 (chr-ID scaffold_8; pos 20300836 to 20301337)
tcacctgggccctccctcccgacctcaccatcaaggtacgtctcggttttgttgtgacgaacaagatcagactcatacgaaactgaagaccaattgagtggggtctgattgtgcaattttttttgatttcgcggctcgatttggaagagttgttgttttcctttcgtgtttgttttcgatttggggcttgtgtatctgaagatttcggagttgcattttagttgcttggtattattgctttgtgtttaattttctgatcactaatctgcatgttgcttaatgtttatgatttgtgttcttacagaatatggtcattttcaatgttgaaatttatcatctgcattggcataatgcttaaggctggtatattgtcattgttctgcgagaatatcaatatttagtgcgtcatttttgtgcatgccagaactactttatccttaaacatttagataggaagtgtgtgcattatctgagtatatgtgctgatatgcaggtcttttcc

SEQ ID NO: 73399 - DNA, 619 bp, Prunus persica
  Intron number 2 from transcript ppa018661m (locus ppa01866 1m.g) derived from phytozome v7.0 (chr-ID scaffold_8; pos 16574126 to 16574744 reverse strand)
gatcgcaattcaagacgttctaagggagttgggtaagtttttcttatgtcttggtgacaaaagctttggatggttgttaacagaaggttcactttaacaattacccattatgcaatggtagcgtttaagatgatgtgagagtcttaaattatccggttgttaatgaaaaatttatatggttgtgttgacaagaaaccaaagatttcattctaaggttcaaataagactatccttttaatgtcgcttggtcatttttggaatggttggcagttcctgctcccttcttgatggctgcatcttccttgttccaacgttttcttgtgcagtacgtagaatcatcacatcatttacaatgttcaaaatttgcaccatcatcttagaaagtttacgattatattgatcacctttgtactaaaagcagtacatatagtatatactataggttattctagttggtcaagatgatcagatatatcatataggacatttttctttccctgttttgaactatgtgtggagactccagtaaacttcgctattatatgcatctgtatgtggcaattggtttttgattatccaagagtctaatgttgtctagtttgtaggtatattgagtttt

SEQ ID NO: 73400 - DNA, 569 bp, Prunus persica
  Intron number 1 from transcript ppa004563m (locus ppa00456 3m.g) derived from phytozome v7.0 (chr-ID scaffold_5; pos 15121088 to 15121656)
acccatcatcaaccctgctagcgaagaaatcattggtctctctctctctctctctctctctatgcatttttattaattaaatcatttgtgttctaatttgatttactgtttaaacatcgcgtttgataatttgatgtatttggtagctgaagaaattgagcaaaaagaagataaaaaaacagaactaatctgggttgtcaacttactcttttttgtaaagttggaagcttggctctgtttactaacccataactggttttgcataaaacattttattggcgttttagattttttcagacctttttcatcttattgttccatttatccactttcacagcaaccaatttgggggattagtaaacatggaatgtggggtattcgactcttgcttgatcttctaatggagagatccaagatgttttttttttttcctatgctatctgtattcacacagaaaataatggaaatgaacttgtggcttttgtaatctgacttaattaaattaaatctgatatatgaacgggttgtgggatgtgctgtagggagtgttcctgcagctactgctgaag

SEQ ID NO: 73401 - DNA, 717 bp, Prunus persica
  Intron number 1 from transcript ppa014411m (locus ppa01441 1m.g) derived from phytozome v7.0 (chr-ID scaffold_1; pos 41021277 to 41021993 reverse strand)
tgggttgttgttgttcttttccgtgggattctgatgtttgtgttcatgggaacaatatttgcatgtttttgttttcgaagattttcatagtctgtttgtttgctgagaaaaaggtgggaaaagcaaggacttgtgaaaaaataaggcagttgaccaaaaaaaattatgtatgtggaggatagttgaattttgaccttggcagtttctctttcagtttgttttgccaaagtagatacaagctctcctctatattgagggagggtgtaatattgagggagtgagttttctttagtatgctccctctatatggagttccaaatgccagtgttactgttataagctgtgcttctggcacaattgagcatcatccttcttcaatatatgggattgcaccattatcaggtttttcagttttggataacaacctagattaaatcttagggttgcgcccgtaactgaaaacattctaaaagtctgttctagggttgcatgcaatttgggtaagaatttttatggaatacatgttgttgaacatttttatggaattggcatgccttctaaacatgtgcatttgtgcatcagtataaggatttgttaggaagtctatgatttcatatacaatggctactaatcccttggattgttatgaaatttggttgtcttgttattctgcctttggattttctgttggtggttgttctttttggcaggattctg

SEQ ID NO: 73402 - DNA, 233 bp, Prunus persica
  Intron number 1 from transcript ppa009728m (locus ppa00972 8m.g) derived from phytozome v7.0 (chr-ID scaffold_6; pos 24811859 to 24812091)
cagaacctggagaaggtatgtttagtactgtttggattttttccatctgtttccattgtatacactattaagtttttgacattgttcttttgcatttctagtttgcaacttcttccggaagccaataaagaagcaaaacattagaaagcgaagggttgatgaagatgaggaggatgacggctcaaaatctgggggcacatcattaccaagtcaaagaaaagcctcaaagcttg

SEQ ID NO: 73403 - DNA, 359 bp, Prunus persica; identical to SEQ ID NO: 72123
  Intron number 4 from transcript ppa008178m (locus ppa00811 2m.g) derived from phytozome v7.0 (chr-ID scaffold_1; pos 10996094 to 10996452 reverse strand)

SEQ ID NO: 73404 - DNA, 389 bp, Prunus persica
  Intron number 1 from transcript ppa023841m (locus ppa02384 1m.g) derived from phytozome v7.0 (chr-ID scaffold_5; pos 16957290 to 16957678)
ttcgcccccaaatctgcgccaagctccacttccgggttcgtaaattttgtttttcttcaaattttcgtcctaattttctttctcgttttccgtcaatgaagatatcgatttctatgcttgcttataagagtttgattggagaagtttcatctctcagcataattaggattgtgctattgaaatggcatggtcgctagctatcgttcaatgccagattatatcatattaatgcattttattaaataaaattaccataaaccgtttgactgttcttgtgtaggatttatggaaattgtgtttgtaattgttagctaaaccatagaatgctcattgtttttttctttttcctaacagttcatcgagtgcacaaacatcaagaggcaaaaagc

SEQ ID NO: 73405 - DNA, 382 bp, Prunus persica
  Intron number 1 from transcript ppa009066m (locus ppa00906 6m.g) derived from phytozome v7.0 (chr-ID scaffold_1; pos 8871734 to 8872115 reverse strand)
agcctccccctcgaggttattttttacttttcccatgccctttcatttttattttatgtaattgatctttgacttttggtttaatttcactttgatgggtaagttaagattttgataggggaatttcaattctatttgaattttgagtattgggttcgagctgaattgggatttttagcactcgaatttgttctaagataatttgttgtggttttttgaagaaaacattgggcatagttggtcacttcgcttttccgctattggaattgggcatgttgtttggccaaaatgctaattatcaatctgtcgatatctttagttgttagctcattggtatttgttttcaggagaacatatttgactggcaatttgcaatcagagg

SEQ ID NO: 73406 - DNA, 920 bp, Prunus persica
  Intron number 1 from transcript ppa003460m (locus ppa00346 0m.g) derived from phytozome v7.0 (chr-ID scaffold_5; pos 9079921 to 9080840)
ggtcaggtatggaatgcatatctagtgtttggtgattggtttttggttaaattgcatagtagtttttacttgtgggattttgttttgttgaagttagtacggttgactatgagcttgtattgttagcatatataatcaatttttatgggtttggatgaagttgcttaatgcagtaaatttcattgcttcaaggaaaagaggagattggtgtgatttagaaacctagtatgttattttttttttgaagaaattaacatactaggtttcggccaatacaataacatttggtgttttatagagtacctagattagctctttcagatgggttttatctttcgtaacccttactcatttttctactgcttattattaaaaaatgaacaaattgatgacaatggacttctgcatagctgctgagctctgagccctcttagattggattcagtttgacttacctgacctcttgtttgtgtcttttgtacatgttgttcttgtttttccttaagagactgagacaactttggccttgagatgtccttctaattatgcctgctcaactgaggcccagccttttctgcttacctaaatttcaatcattctcttttgtatagcaatttggatgtggtggactatcgtgaaacagtgaaactaattttggattcatgtgtgccactcttttatttcatattttgttttcctataatttcagtgttgtggtgtttgtttccactctccacttgttcataccatacttattatgtaacctttgattttccttgtgttaaagagggaaatagtattgttggaaactatctgtcttgccaccatgatatcttttagcttgttagtgatgttgatgcaagggtcactattatattcttgcagttggaggactgtattaaagactgtgacaaggctgt

SEQ ID NO: 73407 - DNA, 846 bp, Prunus persica
  Intron number 1 from transcript ppa025447m (locus ppa02544 7m.g) derived from phytozome v7.0 (chr-ID scaffold_6; pos 1410000 to 1410845)
gagcagggaatatctccacgggtattcttctttctcacctcataattaagcactttgcattattgcatgacagtgttaacatttttctcaatattattagttgcttggttttatgatgtcattgctatgttattattaatatttttgcacttcttgtgtgcttaatagccttatgaatgtcatgcattttgcaaggtttcttggacaaagaggttttagtgaaatgcttctctttaaatttagtgaggttttgaacgattttatgcatatatgaaatgacatctggagcatgcagctcctatggaacagggacatttgagagagagagagagagagagagagagcaggggttcctgtttttaaaattgttatttctggtttctgggtaaattggatccattttaacaaaaatgggctctgaaaggataactaaagcagtaatcattaccgaagaagtacatgttggttggttttgcttcactaacacagggatttagaggcatctatttttcatttcaagcatttgcacaaagtgtgcatcttttatagttttgtcaacagactttatattttctttgcttcgaaaggcgtctcctttttgtctctaggaaaagtagattgaatgataggatttaccttagaatttaagcagccagataaataaagattgagaacagagcataaaatctcaataaagtaaatttattcttcaatgcagctgctgaactatgggttcatgaacttttattagctttgagtactgacaaacctgcttagatctttctaaaccattgatttattgaacttgtccacatatgtttaaagtttgttgtcttgaatcagagt

SEQ ID NO: 73408 - DNA, 375 bp, Prunus persica
  Intron number 4 from transcript ppa003693m (locus ppa00369 3m.g) derived from phytozome v7.0 (chr-ID scaffold_6; pos 20499194 to 20499568 reverse strand)
aggtgggagaatatttagttacaaacagaagcacaaacatatttgtcagttttggccgagtctgatggaatgtgtattcatcgcttgcattcctattaattttgttcaccttaaaagactatttgctcctcaactaattttgttattcatacattacatttttcacatggtttttgaaatcatagatgctttgaatttaagactaatatatggttgttagcccttattactaaactaaaatagatgttaggcaatgtactcttttaggatattctcttttttcccattgtcaaaatttgaagaataattattggaattatcccattgacagatcattgaactatattttctttcaggcagatcttctgttgtcat

SEQ ID NO: 73409 - DNA, 731 bp, Prunus persica
  Intron number 1 from transcript ppa017395m (locus ppa01739 5m.g) derived from phytozome v7.0 (chr-ID scaffold_3; pos 10665144 to 10665874)
aatgtttccatgtgtattctattttttatttattctcttttcaataatccttataaataaataaaaaaactgaaaaaacaaattaaaaaaccctaacgtccctggtaagtggccgcacatctgttctcaactcttcctcatgtctccacagcactcccttccttcattgttgttgcactgtgatatgagtatcgctagaatgtggctgtgataggagtatcgtgtctccatagcactcccttcctaatctaggtagatcctagattttacccaggtatataatatatattattgtggtaatccttccaaggtcagtctctttgtctcaacaatggagttgttaatccttccaaggtcagttgctttgtctcagccatacaatactaaatagtaggatgtagaaaaccatgttgcatgagggattgcttatttaaacaaccaaccttgttcttgtctatcataattgttcttgtataagtgctcttaaattacatacacatacatatatacaatcttaaatttattggtattatactgcatatgtattacaggaagtttatattaatatttggaattatttaggatggaagaatcttcaagaagccattcaaatttggagataagtgaagaaaatgatgagtttgagattggtgagactagactggagaatacaatgaatctagaagaaacaacacaagaacctaaggtaaatatgatttttaacacagctg

SEQ ID NO: 73410 - DNA, 673 bp, Prunus persica
  Intron number 2 from transcript ppa017159m (locus ppa01715 9m.g) derived from phytozome v7.0 (chr-ID scaffold_7; pos 14336502 to 14337174)
catctaccgcaagtagtcagtccccgtcttcccaagttagtatctcgttgtaacatttactattttgatttcaatgttcaatttggagttcataggcatgtgagtttagatatgtaatgtaatagtactctgtcataactcacaagatgaagttgtgttgtctgccaaggtttttctgattgcctttttagaggaattatttctttctaacttcaacataccgttagtgttcgcatgctctccatttttcaatttgggtcttatgaagaaacgattggacttgcattgttaagttcattgttgatcaaaggttttgatcatgaaactaacaaaatatcagagtattgtttgaattttgtttccaagaatatgagaaacctggagtattttagccttccttattgtataaaacggatatgcttgggggttccatttctgtgtcctgttttctattttggggttcagttggatcatgcattcatttactttagacctttatattgattgctgcatctgctccttactgctcgttgttgttggtttgccttcttcttaaagacttctggtgttcaagttttttttttcttattttttccgagcttataagtatgcttgctgattccatttcctttatgcagaatttccaaggacacagccttttacgagtttcttc

SEQ ID NO: 73411 - DNA, 562 bp, Prunus persica
  Intron number 1 from transcript ppa025286m (locus ppa02528 6m.g) derived from phytozome v7.0 (chr-ID scaffold_5; pos 16293813 to 16294374)
attcatctctacactcttctctaccctggattttagttttgtttttgtttctgtttctctaaactatggaggagaaactcgaccccaaaaaaaaaaaaaaaaaaaaaaactacggaggagaagatgaatggcttgctttggcaccaagaattttctttttcagtttcctttcctattcctacccttgtttttttactttttatttcttatgcagggcttgcttgggcaccaaggattttctttttgcttttgtacttgtacacactccagcaccagaaaggaaattatatttttccaaggatacaggcaatttccagtggagtaaaactgtaaaacccccccaaaaaattaatacaaacgaacttttcctataataaatacagcttttgaaccaaatcttttcacccatattagaccaaaattcaaccttacagcttttgacttcaaaattttaatagaaacgacactatggaaaaactacataaattattatcattgtcccttcattatactctaatttataatatagttgttaccaaatgaagtttataaagttgagctt

SEQ ID NO: 73412 - DNA, 421 bp, Prunus persica
  Intron number 2 from transcript ppa025661m (locus ppa02566 1m.g) derived from phytozome v7.0 (chr-ID scaffold_6; pos 20177053 to 20177473)
gctgctacttctaaggtaagttttttgcagcagcagcttcagcttcaaggatcatttcttcttttggggaaaatttaattgttacgatgtcattttaaagtatagagtttagggtttagctcttaggggaaacaacgtaattttttatataagtgcggtatcaacatcaaaacatgtgcagaggatctgaacaccttcttttggagaagagggagtgtgtggctaatgacttatgtacatgtatgcattggtttcaagttcaaccaagtaagatcatgcattgtcacaattattttacatttagagtttagaacttgaacaaaatcaaaatgcgttttatggactgtagtggaaagagatgcatctgaggttttctggttaaacaggaactgtttgattttgttgctgtggagctaggaaa

SEQ ID NO: 73413 - DNA, 760 bp, Prunus persica
  Intron number 1 from transcript ppa004862m (locus ppa00486 2m.g) derived from phytozome v7.0 (chr-ID scaffold_5; pos 10733332 to 10734091)
gactttgcttggctcattcattcattcaatttcaggttctcaaagctcttctcgaattttcactttaaacaaatatattcttgctgttttttcgagtttatatgttttgagtaccatgctgtgctttgccgttggtgatctttgatttgagttaaaagggtctctgtttttgcgtgattttggttggtgggtcagtgtgtttggtgccaaaaggaagaagctttttgtttggcgtttgagagaactgggttttggcttagttggtaggctgtggactcaagttgactagctcggatcatagtgagttgacccagattggaatcgttggagaggtatcatttgtttagctgaaatgctgaatattcagtgatgtattgcttgtctatgccttttgaaatttcttcagtgatgcctactctacattgtttctctctgtacagagtttagcattagtgttaggactaaagtgtcccttgacttgaatcattgaaatttgaataatttgtcttgacattgattgcatcttttgctttctgtggaaaggaacatttgaaagaagctgtttttttcacaaaaagaacaaaacgattgttttttgaggaagccttttatgggcagaattattgaagttagtttcagatatcgagaaaatgagttgaactttgacatgggcattttgaggttttccatataaccgtagattctgaataatcaatctttgacaggtcttgctcagtgaagggaactaattgggctggca

SEQ ID NO: 73414 - DNA, 978 bp, Prunus persica
  Intron number 3 from transcript ppa004862m (locus ppa00486 2m.g) derived from phytozome v7.0 (chr-ID scaffold_5; pos 10734560 to 10735537)
cccggcaatttttggtaagcatgtactgactccccgattattctgatgtcattatgactacttccacaaaagttcttttatgatcaacattcacagatttttccatatttatgttcttttctgttttttgaccgattcacaacattcttgatattgctgatttctgagtaactttattacatctttctcatttttaaaactgtatgtaattgctcattgcccttaccactacaaaaattgttaaactattgcttatcctattaatgatatttttctccccagaaaaggagtctgcactatggcttacttatgagtggttcaatttttggagcatgttttgaatttgaataccctactgactttaaatggtttaatgatgtttgcatctcatggaataactcaatcgtccagtttgataccactaaaagaatttaatccccaatgtatttttattatcatcatttatatattgtggtaactactaccatttgctttaatgttcccatgatagtgatcttgtttaggatacacgcattcagttgaatgttcaatatacacttaatggcctcccccattcccgcgaagaagccccaaaagcaaaattgtgttttacagccctcttttactttttttttctttccttttgatcagatccagctattctagtttggggaaagggcattatatctggtctatttatggcatataataatggactgatggattcattgccattgatcaaccaagttagtttaatttaaaattttttatgaaatgccaacgtgctctctttactatcttcatgagttctttcattttatgcaatgtctacgtgtctgcacagccattaatgtagtattggtttttttttttttttttttcccatttccttgcattatgaattttgtatttcttcctctgacctgaccttttacaattttaggaagaagcaagggctgttgggcagcttcggaacat

SEQ ID NO: 73415 - DNA, 618 bp, Prunus persica
  Intron number 1 from transcript ppa004071m (locus ppa00407 1m.g) derived from phytozome v7.0 (chr-ID scaffold_8; pos 21345774 to 21346391)
ctggaggtttgttttacaaaacatactgaattattgatgtgactttgagattttggcttcatggtttattgttcatctttttccttgatggattgtatatccttttccgtgtcacattgttttatcatgctactgtcacttttacacacacacacacattgagatacactgcaagaaacatgagttttgcggtagtatcagttcaaaacttcatgtgttcaatggctgttagtaggtaggatactagatgacctgagtagaatagagtactgttgagggaagttcatgagttgttattcttctccaatatgacagaggtaaggagaaaaaggagaagcacaattcatctgcttctgatgagcatgatctcccaaaaaatatcttgtgattggaatcactgggaatgcactgaaatgttgataatgacgattactcaactgtgtgatttggttttcttccattttgaatctttttgcatgcttctgcaatgatttctccgattttattttcttcacacataggtttagttacaattattatctttcatatattttaacactctgctagtcttcttaatttataggtttgggtcctggaacactagttggttctgctgca

SEQ ID NO: 73416 - DNA, 984 bp, Prunus persica
  Intron number 1 from transcript ppa025075m (locus ppa02507 5m.g) derived from phytozome v7.0 (chr-ID scaffold_7; pos 5816295 to 5817278)
gaatacaacagcattgatcgtccgtgtcattctgggtttgtctgcaagctctcttctgtttctccgcagccaatcatccctgcaccaatcgaaagtcatcgtccccattggttcacttggcttctttggctgtttttccccttcaaggcaatgtttatcctcttgggtatgtttttcttttgttactttaattggattgttgctgtttggctttgaaactctccttttattgatgccattatcaattctttttttgggttttttctttttctttctttgttgcatttctatgtgctgctcgtgggtcaacagattatggacccacgatttcatgtctaactgctctgctttcctctatactttgatgcaaggccttccaattctctctgtgttcttgtgtttgtttctttaatttcattcagatttttggtagtttgggtgttcttggtttgttgagcacttcgatttttctttttatctggcgttaattcgtttagtgaaagctccgtttctacttatcttttgaatactttacctaatttgattgttagtgatgcatgcgtattcaacaaattcaatcgacccttttcttctgttcttttctttatttaatttgtttcctcttcaattgtcatagttaatttcctgcactagtacattttctttatgtatttcgttttcctcaatcttcatagtacttgaacataatgaaagaattgaagttgttcaattttggtctgtttatttattacatggtattaaggttgatggttttcttttagcttaattctttctaaatatgtgtattctttttatgtctaagatttgatggatactaggacttggtgttctgtcttctcattttggttgtccaatttttatcttttctcccttttgatgtgaagaatgacattgcagaagatttaatggtattacttttactctgcaggtactactactgtgtccctcaacatagggcgccca

SEQ ID NO: 73417 - DNA, 873 bp, Prunus persica
  Intron number 3 from transcript ppa000230m (locus ppa00023 0m.g) derived from phytozome v7.0 (chr-ID scaffold_1; pos 42822480 to 42823352 reverse strand)
tcgagcaacaagaagaggtaacatatatagagccactaacagattcatctcctttttatttttatttttgagaagaaacaaactttgtcaatactaaaaaaaaaattacactcagtggacaaggagtccacctagagaacaagcatgaaacaagaatgcgaaccgacagcttatcaaatcaaatgtagaatatttttttatccaaaaccatcctagacttcctaactgttctgctctaacgcactgcagcattccaatctagtggaatagcatagagagagctgtctttaaattctgtagaaactgaagccaataaaggcttaccaaaatctggtctcttcctaaagatcctctagtccgctgaaatattaaaaagttattttctttccatccatacaacccaaaggatggctaacacagtacgtcgccacacaactttgtttattttttatttccacctttgaaatatgtctttcatgtatcgaagaatgacagtcttttggaattacccagctcaccccaaactctctaacccgatttatccacaacttcaatgctattgggcaatgaataaaaaggtttacagttgacccccaatcatgtttgcacatgatgcaccattgtggagagaagcacacccatggtcttcttttctaaagcatctcaaacaaattgaacttagcatgggctaccaaccagcctagtatcattaccttcggtggggccctaaatttctaaatgactcttgctgcttgaaaatctgaagcatcttcatcatggcaaaattttcattcaaaagagaaagttcaacaggggatatattgcacccttcactagatgatgcaaaaggtctaataagtaatgattttcagg

SEQ ID NO: 73418 - DNA, 636 bp, Prunus persica
  Intron number 1 from transcript ppa021291m (locus ppa02129 1m.g) derived from phytozome v7.0 (chr-ID scaffold_4; pos 4570902 to 4571537)
gcgattctccgtacgtcagagccaaacaagttcaggtaagcaagtttgaatttttatgggtaaatttgattttagtaatttggcattcagtgttcgtttggttctttttcaagattagccactgtcttcctttgttgttaattggtctgtatgttttgggatttgtatcttaagctgactcaatttattttttatggaaagcaagaacttattaccaattctgttgattacattaatgcagattatcttggacccatttgttttggggaatttgttaagacaaggaagaaggaaatgaattatgaagttttgttcttgtgtgagtaaatggactgagttttgttcttgttaatacaagctgagttgattggttgtcctgtgaaatcactgtttaatgggctgggaagtattgggtaaatgtataactcaaagcatgtataagatttagtgatcacactttggagttctgataaaagttactagagttgatctttaaaacaaccatttgaattttttttggttaaagcatgattggggttttttttcattttttttttcactgttatatgtattttatcaattttcatttcttgaaatgcagttgatagaaaaggatccaagcaaagccatatccct

SEQ ID NO: 73419 - DNA, 497 bp, Prunus persica
  Intron number 3 from transcript ppa010916m (locus ppa01091 6m.g) derived from phytozome v7.0 (chr-ID scaffold_5; pos 11690206 to 11690702 reverse strand)
ttgtggaatacgatagtgaggttggaaagttgggaactagtgaagatggtgattttgttaactttatggatttgatggaatattgaggaaactggtttgaacataagttaaaaatgagttgaataagtgggaaatcttattggaaatcttattgtcatgagaggcttgatcaattttaatgtagcccaaaatttaggagcttgtatgtatttggattttgaaaaccatactttatgaagctaataggctctagctcaaagggcattggagtaggcggggaaggagtaggacgaggctcaaatcttgttgtaaagaaatcagactgtatgttcaatcaaattgagttctttgtttcttcgctgttgaatttgggttgttggaggatgggttcactaagggaagcttttcctttcttgtttcccctatggctatgcaaaaatggcacatatgtgggtaactaacagtttgttgtatcggtttgttgcagtgagtactct

SEQ ID NO: 73420 - DNA, 857 bp, Prunus persica
  Intron number 1 from transcript ppa002087m (locus ppa00208 7m.g) derived from phytozome v7.0 (chr-ID scaffold_6; pos 23378537 to 23379393 reverse strand)
cttttgtcaatcgtgtcaagcgtatcgtcgttaaggtacatccttcaaaacaacataacatacataatacattctctgcacatccttcaatattgcttctgagttacacaggcacatttatcttttttggtcttatattttttcaatgtgtttgtagagagagtatttaaaatatgaaaacctgtgtttgagcccagttttgtgtatttattattgcatttgttgactgcgggtggaaattctgaaccttttcttttggttaattactcacaacttttttattcatattttatagatgttggatattattttttcctctttggatcatgggttttcgtagaagtggtattcaaagaatcaactttttgtgtactgtaccaaactgtggtcagatatgacattattttggaaagtgcctaataatgtataattccagatttggtgattttttcccagattttatgggataaagtttgttttttcggcaccattgtgggctgctgttgatttacaacggggataccagccaataatgctgccgctcttccttcgtgtattgcatttaatattttttattagaaggttattagcttcagtggacaccactctattgaaaacagagcaacccttaaaacccaacatgagcatgtatgttaagctttttattagaagtctttttcctttctctctctctgttttctgggttcgaagttgagaaacaaaacttgggttgcataacttcatccttttccatttttatgaaattggttattcaagatgcttttgtcatatttccattttgctgacttgtttgtaccgaatgttgaaggtgggaacagctgtggtcactcgtggtg

SEQ ID NO: 73421 - DNA, 762 bp, Prunus persica
  Intron number 1 from transcript ppa000268m (locus ppa00026 8m.g) derived from phytozome v7.0 (chr-ID scaffold_1; pos 26224844 to 26225605)
gtcggtggtacagctgggtatattttcaacgccaggtagtaattaatcgaattaaatactaaaattataatcataattcataaccaaattcccactcaatcagtttgaaaacccttaaaccttagcttagcttagctaccatgcaaaaattgagatatgattagagatttagttatctaatgtttacggttttggtaatatgatattaagatataaaaaagtgttttggaagaattaattaaataagtgtggtggggtattcttttcactttgtttaattcattcattcatatgtaatatagtaatttaaattgggcaatactgtaaaagattaggtaatgtatctttctttcctcaccgcactgtcgtttgactcgttttcattcggatttacgttctgaagtgtgagacttttggcttgtttctgaggaccacttgttttcgtaaatagctgcttcgtgtgttttgctgcataacatgatttcattctgaggaccacccgttaactaattggtgttttcattctacgtcctattcctcttgtctgatcactgataacatgatttgcagttgatttgttacttttggcttgtttcaagatttagtaattgtcaagataaacaggcttattggtctgtaacagatacaattaattctcaggcgttcaatgttttgcttatcaccctaagggcctaagtgatgtatttgtgattatgtatattgacagcaaagaagcagagttgattcaattgttagtcaaaa

SEQ ID NO: 73422 - DNA, 904 bp, Prunus persica
  Intron number 2 from transcript ppa025256m (locus ppa02525 6m.g) derived from phytozome v7.0 (chr-ID scaffold_2; pos 22895251 to 22896154 reverse strand)
ggaagctttgggtttacaaaattgacattgaagctgtaagtctttgttctccttttctcatatgaaatcgtatcagtttgggatttggttttttcactttaattggaagatatcgaaatacttaactcaaggggcaaatttatgctctcacctaattgtttttaatcttgcaacaaaggaaaaaaaaaaattaatagaatcactcgcgaaattatattacatcacaaatcatacctttttagtaaattaagatgtttgaggttcaaccactaccaccacagaaattttactaagaagtttcattctttaattgctgactacgaaagggtttaatgataaatttataatcttgtggaaggtcaacatttttttttttttcttcttcttaacattgaaaacgtttaggatgcttctttgttaccagaatgctgctttttgtctataatccttgcattttccatgtttgattttatatatatatatatatatatcggtgtatttttccgcattttgcttcatcaaaaccgaaatctcatggatttttgtgaaaacacaattttttctttttattttgtttacttctctttgtcaaaatatgtcactacgttctatattcgaggaatccgtgacgggtggccgttttcagagatgggcagcttgctttttatatttgagtttgttgaccacatgccattcatttgcagcaactctgccacatattttgtcatatcagaataaacagctttctgccatgagattgagaatcttcccacactcatgtgcattcaaaccttgctttttggacaagctccatatttatacaaaatggaactgcaaacagttgatgatttgtcaaatgctaatgtcaacaatgtcatgtgtgcgcaggtttcagcttgcaaaa

SEQ ID NO: 73423 - DNA, 678 bp, Prunus persica
  Intron number 1 from transcript ppa000570m (locus ppa00057 0m.g) derived from phytozome v7.0 (chr-ID scaffold_1; pos 39380879 to 39381556 reverse strand)
cttcttcagtggctctgttcttctctgttttgcaggtaatcttctgggtttatctttttttacttttacctctgaaaaagaggtcagcttttgcttctttatgccttctttttcatccctccttcttctttatgccctcttgaattttactgggttgtggctactttactgtttttgatttctgagaaccctaattttctctgacatgggttgaaagctcttgctttcagctctccatttttgccaaatcatgaatgttcttgagcctcggtgacaaataattctgggttgtcgtcagggacgatttcttgtatccgatttgttcacagaaaagagttttgttttattaacaaaaaatattggtgtattttctggtttggtgcatctcagacaattttgattggtgtgaagccgtctctttcaatgaaatatcaattccatggagaattttgactctttttgactgtttttctcaatattttccaggtgatgtgattttttcttcttcttcttttgggttgataaattgtaacattttccattaaaacaaacaggcccttctgttgcctgcatgttctttctttgtattttggggaaattcttgcttcttttttttggggtgctgttattggtgatatcgtcttatttgcaggttgaggataaggagaagtaattata

SEQ ID NO: 73424 - DNA, 882 bp, Prunus persica
  Intron number 1 from transcript ppa000347m (locus ppa00034 7m.g) derived from phytozome v7.0 (chr-ID scaffold_1; pos 46315101 to 46315982 reverse strand)
cagattgcatttctgttgctcccggtgaaccccaggtagctttttcatattggtagaaattttaaaaatttaaggtgaagttttggttttcatatttgggaatgtcaaatgtggctgattgagctatttattttgttgcatattaatttttgcatgtaaattttgtacatggatggcttatttggtgcccctaagcttgggcccggatagaacatagtagagatatgagatgagaaggttctcttaattttcactcaagctaccaaaacatccaaatattactacttgaataaaatatgtgttcactatgtcactcttcattcttatttccaagtaaaatcctacaatctgattttacctttttataacttttagtttcatataatgactaacaaaccctgactttttatgttggtttttctaactttctcatattctatcttccaagctccaatcctttcaaaatcggggaaagaagaacttgggatcccatagattatttatccctcttttcttggcttttgtttttggtaaagaggtcacttctttcctatccaaccagtttcatggttgcttttttctcctttaccaggcatagtgtgtttagggtttcaatgatctttcggcatgaacttaatgaaaagtcatgattcaagtgagtaaatggtctaatcaaaaccctctgttggtgttagggggtgtttatgggacgaagctttacaagcttctttatgtcaagtaaaaaattcttaattctgtaatgtgtgttcaatcaagtttgatttttttctttcaataattaaaatagagcattgaacgtactagtagtgagtgatcatgggatatatgtgcaggtgcaaattgggtcacattcattcacat

SEQ ID NO: 73425 - DNA, 713 bp, Prunus persica
  Intron number 3 from transcript ppa009437m (locus ppa00943 7m.g) derived from phytozome v7.0 (chr-ID scaffold_7; pos 15262181 to 15262893 reverse strand)
ctatattgtggagcccaaaggagatcatgtaagttttttgtgatcatagttttgagctgtgcttgaaatcaaagattaacttagaacttttcatgtgagtaattatttcttactcgcaaaaactttataggaaagaaacctatccatccatcttctactgagctttaatgattgattgataatttgaatgctggtatttctgccattttcaatttttcaaagttgagtaataacctgatcatgccaaataattctttctctgaaattaaggaaaagccaagcgacatgacagtggcaattataaattgagagagagagagagagagagagagagagagagagagagattaaagagatgagatttggaatggtaaaaagcctatatatcctcattgagttgagaccctttgtcaatgatgcggagttttaagaccccatataatgaagggatgccatttgggaaagaaaaagctgtctccattatatcagtctctatctattgattgacaacaaataaaaaacagagggaaaaaaaagataataaatccaaatctaatagtacaaagctattggttcctcttgctggccactaagtcaataatataatatttaatctctgttttgattatatgccatatttatcttgttgttaggttaattgtcttatagttaaaatttatgccacattcattattgttacagatttttggtgg

SEQ ID NO: 73426 - DNA, 1024 bp, Prunus persica
  Intron number 1 from transcript ppa007578m (locus ppa00757 8m.g) derived from phytozome v7.0 (chr-ID scaffold_6; pos 16345950 to 16346973 reverse strand)
agtagacttgacttcctcagactggcctttcaaaggttcactttctgtttttgctctcttttttttttctttctcaaattccattttgggcatgtttggtttccgagaaaagaaagcagaagaaagagaaaggaagtctgagttttgggttttttttgttttgtttcagtttttagtttttgatacaaagatgctgcagctttttttctttttttttttttgggtcgaaaatgaagatgctgcagcttggcttaagaaagtagaagtttttcttatctcagtcctctgttacatagttttgctctgttattgttatgtttgattgtcaatactgttttgggctctcatgggtttgatgaagaaagtaagaaaaggattctcagttttcatttgtatttatgtggctgataagaggagctgagtatcttgtactaaaaacttttactgtatagttgataagcaacaagtacaaaatccatgtcaaacttttactgattaaaggaactgagagtctttggtggttaggctttttggaaccctgcaaagttctaaacttggcttgtagttactttttttttttctttatgagaaattcagcatgacaaggtgaaaggtaccgatcatttcataaattcctcccccccacccaacttctgtgttttcttcatctttttgttgtagctgtgttcaaatattggcctttttaccccaactgcgagtcatactctaattgggatcataacaaggagatttcaaatgtttctactgttggtgcaaggacggaatttaggctggttttatataaattttacaattatgtttttcgtaattgctgtattttattagtttaattggactgcatataaaagtaggccatttgtttggatttcagttttcgcatattgattgacattacagaaatatggttatcctacttctctctctgggaattcttctaggttctacatcacatgcttttatgtcaaagattcattggattccttccattgtcagttgaagaaac

SEQ ID NO: 73427 - DNA, 409 bp, Prunus persica
  Intron number 2 from transcript ppa019436m (locus ppa01943 6m.g) derived from phytozome v7.0 (chr-ID scaffold_5; pos 2116728 to 2117136 reverse strand)
tctaccgatatcttccaccggagctccaggttttctttctcttggattaatctcttattagtactagtcttgtcccctcatttgcttttgtgagtttgagaaattcatttgttctttgattaatgccctatagtatgtattcagtattattgacaatagcagctcgatacaataagagttacccaatttaaattcatagagtgtttcgtacgttcttttctcgcgtgtagcaatcatctttgttttgttaaaagtttcttctaatctatacatgaacctgatcgcgtcaaggaatatattgggttttttctttaccaatttctcagtctttgttcaaaactagaatgtttgtctgaatttagttgtaaattatttttgcaggtttgcttagtttctgctacacttgctc

SEQ ID NO: 73428 - DNA, 746 bp, Prunus persica
  Intron number 2 from transcript ppa019944m (locus ppa01994 4m.g) derived from phytozome v7.0 (chr-ID scaffold_1; pos 42570133 to 42570878 reverse strand)
cccacgtcaacccctctggtttggtttccatcccttaggccatctccaacccaatgacctaaacccaaaatattgcccaaaatctctcccaacccaagaaaatgaaagactcaaaatttggaaaaacctaaatttggatccaaatatgggtccaagtattgcatggacccaacactattcaacggagcccactgcacctaaaacagcttcatgtgcacaacatctgacatgggccccagctgacttgttggactgttgctgtttggctacttgtccagccacttgtcaagttgctgtttgtctgcttgtacaattgaatttggtttatttttatttttattctaaatgtaacttaaatcaacgatctagattaaatctaaactatttaaatggtatataaaaagatccagggctgaaatttaaatccaatggccaaaacaatattttaaattaatctaggtcaaattatatttgtggaatttcaattttttttaggtcaaattgttcaaaaattttaattatgaagtttatttaaagagattgaacgaagaaaatttatccctaaaaaaaaaaattagacttaaaccattcttaaacaatttaattaagttgtggacttaaatttcagtccggaaggttggaagaaaaaacaatttgagtccgggcaaaatccaaatagttaatttttggaggggggaaatttgggtttagcctctcataggttggagaaggccttatctgcacaa

SEQ ID NO: 73429 - DNA, 648 bp, Prunus persica
  Intron number 1 from transcript ppa006735m (locus ppa00673 5m.g) derived from phytozome v7.0 (chr-ID scaffold_8; pos 20143645 to 20144292)
ggatagtttctggcacaagaattcttcaacccaaggtttttcttttcactaagctcagtcttcaattactctgctttttagtggaatgcattcacattacttgtggttttagctaaattatctttaaattttgtttattttgcaaaatccatgatgcacagacaaaattcggtaatgatattcattattagagctcaaaacctatcaactgtgcttttgttcaattagctaaattatgaaatcgcttcagtttctgatggccgctgtacgaaaactggcttttgattatgtcttttgcatcctgaaaagagaaagatgtggtcgaaaagttattgctagagggagctatggagattttagcctgtaaaagtagtgtgtaattgttaggaatctgatttggcctaagttggatgagtagttggaaatcctgactgaatcagacttggggaatacacagacacagaaacgcatagtcgggctttgctcgttgttatatggaagcaagtttttctgtcttctatttgccttttttgtagattttttttttactttttttcaagttgatttctgttttgtaactttccatgataacttaaatttgttctgttttggatatgtaattcatctgtgcagattcttcactatcaa

SEQ ID NO: 73430 - DNA, 776 bp, Prunus persica
  Intron number 2 from transcript ppa004081m (locus ppa00408 1m.g) derived from phytozome v7.0 (chr-ID scaffold_6; pos 22652596 to 22653371)
agtggagaggagtttgaagtgaagcaacaaaagtatgtttgatgtctctttagtgaagtttggctttcaaaattggattcttgcatgtggcttttgcaatgtggttttggtaatgtcatggatgcatacctttgttattggaaatgaaagaacaaggataggtctggaatcactccaggggtttggcttcacaccaagaagtctccaatctctgtaaaataaacttttctttatatctcaacaactcaactccatagtgaattacatagaaggggtatttataataatctaactctagagtgaaaaggaaaattatacttattctaggaaagaaatcctaatccgaataaaataggatacttagaaatccttctgaaatctggaaaaactaaaaatcctactaaaacctgggagaacaagttagaaactaattgcaggaatacaaaattgccagatttacagaccaaagtaaatgatttcctcatccatctttttcgttttataccctaacgggtttgacaaagatgtcctcatcatttctgtttactatatatgtctgctaaggcttttgagtcggtttttatttattaccaaacataaaatgcgaagtagttgtaatgactggttattgcatattagtttgttttttttttttatactgaaaatagagcattaagttttggtatgtctgtgtagtgtatacacgttagccaagtggtgaagacatctttctgagtaatcatttgtgatagtcttttcagaatcagggattttgg

SEQ ID NO: 73431 - DNA, 1027 bp, Prunus persica
  Intron number 3 from transcript ppa004728m (locus ppa00472 8m.g) derived from phytozome v7.0 (chr-ID scaffold_5; pos 13796494 to 13797520)
acaagcaaggtggggttgcctagtcagtggttctttcacacgttggccttggttctgattttggatgttaccgctgttgttttcttttatttatgtttaaatgttttggctatggaatttgatctgaacctatgcatgttgtaattgtctggtttttcttgtgttttttatactgacacccacacatgtgtatattatatgttttgtggcatctcagttattataagtgtacttaatgagttcattgtggtgatctgatatggtgagatgacattagtgaaacatttggactattgtgaaaagtttagcaaattagaattttgtatacatgttgtgcatatccgtgaatgtgcacatctagacagtagaacttccaaatcaggggatgatatgtaggattcttctgtaaagatgcttgggtatgttaggtggcattctagtttaatgccagcatttcagcccatgggaagagcaaacaaaacatcaggtccttgcctcccctgatatttatttctgagctgctgaactcacttgagccctcaatatagagaattagataataaggtagaaaaggcccttccgagcttgaagttttctttttattttactgttaaaccatggctacaggtatgtttgctatgattgtttattttaagcatgcaataactttatagacctgtgtcctctagaatttattttgtgatgaggttttgaaatcccctttaattaagtcatactgtatctacagatacttcttgcaatttgactgtcattggatacctaggaatatgtttagccacagaaaatttagaattgttggatcacaacatattcacattccaaggagtgaacgttgctgttagagagataaaggagtttaaatgagatgccattatatgatattttattttctaaattcacccatccactgattctgtaatatactaatatttgaggtctaagatgctaatgttatcttcatatcaatgcagttattagagcagtgctgcccagttatagtgagaca

SEQ ID NO: 73432 - DNA, 345 bp, Prunus persica
  Intron number 1 from transcript ppa025347m (locus ppa02534 7m.g) derived from phytozome v7.0 (chr-ID scaffold_8; pos 14473227 to 14473571)
cggtaatttgattaattataatatataagtaaatttgggttttagtcacaaattttttttttatttttgaaaaaaattaaagcattttaagaaaagacagaaaaacctttcaactttcaaatcaaaaacatgcaaatgtaaaggatttattaggaaatctaaaaataaataagggcaattttgtccattttagcttcttatagaaaatttctctcctttgggtttttccaaaatcttctaattaatattttgtttttgactttgcatgagaaatgtttttattttttttttttcaaaaaggaggttttaattataagttttctcccaccgtgcagacaatcaacg

SEQ ID NO: 73433 - DNA, 815 bp, Prunus persica
  Intron number 1 from transcript ppa011660m (locus ppa01166 0m.g) derived from phytozome v7.0 (chr-ID scaffold_3; pos 2888693 to 2889507 reverse strand)
atccctgaatagtaatttctctctctctctctctctctctctctctctcatgaacaattgcatgcatgtctacatgttatcaccttttttgtcatagcttagtttctgtgtgattgttttatggctgttgataatgttaaccctgttcaatttgattggatttggattttggtcaaacccagaaattcttatttttgtttttgtttttattgaagggttattttattttcaacttttgggtatgtgggatggcttttgatttggccatttgattagagattgtttgtttagtagtatcttaaaaaactggaagaaagttcttacgaaaatcaattttgtggatcccttttttttgggatcacatttcatttcaagaagctatctgcaattttgattgtagtgaatacaaaagctgtaaaaacaatgtatgagatccatggactctggtaaataagatgaatatgttagtcatacttttgaaatgatgattctttctgctgtggcttggtgttttcttaggcacctataatctccttgagttatttggatgatatgctgccatggaattcatatctttgctgcctgtataattttgtctcaatttgaagaaacattaaatagatatgcagggcatagttgttgacatattctgacagagtaggtgtttttgctaataagatttgatgatatgttaatgttttattttagttatttcccttagttaccgtactgaagcataaagtttgaggttctaattagttattttcctccattttgcagtgactatcttttcaaacttttgctcattggagatt

SEQ ID NO: 73434 - DNA, 590 bp, Prunus persica
  Intron number 1 from transcript ppa002665m (locus ppa00266 5m.g) derived from phytozome v7.0 (chr-ID scaffold_7; pos 3137875 to 3138464 reverse strand)
caaggagttgactattccccatcttgttgcaattggtaaacttttccttctaaatcattttctgatacatgtgttttgtctttgcatatgcgtttggataatctcatattaaactgttcatgttaatttgtttttgtatttaagatgatcaagtgtttgttcctcgctatattcttgtaattggtattagattttgctctcctgtgtttattcctttttcctctcaactttatcttcctgctctgtgcctcgctttgaagttcagatttatgttatgcttaagtttttctttatttatgcacccttcatcataaaattactcatttactaccaatctcttgcgtatgattttgttcttactaagttttaacggcataatttatattgatggcctattgtgtattatgcacatacacccactcatgcactcaaatgtcagcaccactttaaatttttgacttaaataatgaaacaagctacttccctttattggacatcatggtttatttgtctttcacaaatagcttattgttagttctcatataacttgattaggagttggctcgacgatcggagcaggagtctatatt

SEQ ID NO: 73435 - DNA, 634 bp, Prunus persica
  Intron number 3 from transcript ppa007612m (locus ppa00761 2m.g) derived from phytozome v7.0 (chr-ID scaffold_8; pos 17553054 to 17553687 reverse strand)
actggcttgctgaatgtatgtcgcacttttattgcctttttgagttttaaaaacatttaaacgactgagttgggaatgaagtaaaaggagtcctttctttgcattaaatatgaagaataaatttttgtaggatagaagtttgttttgatcaattagtagtaaacaatatatatttattaaactctccctcatcctcccccactgcacataggctttctccctgaaaaaaattgaattgtttatagaatgggggtaagctggatgctggcagacatcatgcctcgatggtaaattgggtgttggtgtgccaaccctgggtccaatggcgtgaaaaaccttaatgtctgggcaagccaaatttgatgatgaggaaaaagtattaaaattttgtccaaaattcaagaggctagttaaaatggaatttttaaattttggtccctttatataatggctcaagtactcatgtaccttacactttctttttggtgttatatttatatgttattttatttttgttctcacgagttgagagtatgagttctgaagttcagtcagtctctggtttttgctaacaactgtcctatatgtgatatgcacaggatccaagcattaaggaactagctgaacagatagc

SEQ ID NO: 73436 - DNA, 811 bp, Prunus persica
  Intron number 2 from transcript ppa007612m (locus ppa00761 2m.g) derived from phytozome v7.0 (chr-ID scaffold_8; pos 17553826 to 17554636 reverse strand)
gcttctgcgcaaaaggatttgcctgcggctggtatgctgctacgttgtgtcacactgctaattgtattggttgtgtattgatttgaattagcaattcaagtttagctggatttctgtaattctgctgagtttgattgatctggaacctatctatataggagctggattgggattggatgtagaacagtgggagtgggattgggcttaggggttaatagagagagctcttctttttcctttttttttttttttttttgttcaggttatagaaaaagcttggagagtttagtgtttaatttgttttgattttcaagttttgatcaaaggatgctttctacagtagcctagtggaggaaattttatgaattggtttttgattcagatttttagctccgagggtagagttgaatggtgatgaaatttgtatggtttcatgtttctcacttgcgtaggggaaattgagggttttgttgtactaatgcctatatttcgcttaatgaaagtgattattgtcatagaatatactgtagttatctttatcctgttgttaaaaatctggaggaatatttaaactatatgattcggggttatgcctgttcttaacacagtacaagtaaattatggtttcattttaatttactgtgttttgttatagtggatcttgataattggttggttagataattgtttcatcgcgactggatgaaaatggtgtcaaatacatggactttaagattttgagtatgcggttctcatgtttatcttatctttcccaggtgaaaagccagtttcaacagagaacaaaagctcc

SEQ ID NO: 73437 - DNA, 802 bp, Prunus persica
  Intron number 1 from transcript ppa014324m (locus ppa01432 4m.g) derived from phytozome v7.0 (chr-ID scaffold_4; pos 23923765 to 23924566)
agctgcaatcggtggagccatcggtggtgccgtcggtaattctctaaaatcccttttcaaattttattcgaaacccttgcttttgttctagcgttagggtttaggaacatgtactgtttcctaatttttgtgtttttttctttctgttttgatctgttgcatatcttggtttgtggaatcgtgctttttctcttttacaagtttcttttttgttcatctgggcacttgggattttatttttaagaatgtttttggaacgtgtaaatgcttgttcttatgtttgttttgatgtgcctggggaaattaaagcgatttagaagcattctagtttttattgtaaattggtgttttttctgacccttgtttttggggggttttcagtcactaggtaaagttgtactcttaaaatatgcgcacattcttgttgtatagatatagctcagtctattttgttatgttcccgtgtcgtcgtgatacatatgtatatggtaggtgggctcttgttaaagcactttgttgttgtaatgttttatgttgagcttgatacttaattagaagatgatattttctggccacgattatttttgcctctactaaaattcctagagcttttctggccatgattccatgaaaactaggatggaaatcacttaagataaattagttagctagctcgagaaaaaaggggttaacatatgtttgttttttcttgtatcactagttcatgatttgaaagtctaacccttgtcatttgcataatgttatacagtcatatttttatgtgtatgtacaggttcggtgt

SEQ ID NO: 73438 - DNA, 921 bp, Prunus persica
  Intron number 2 from transcript ppa014324m (locus ppa01432 4m.g) derived from phytozome v7.0 (chr-ID scaffold_4; pos 23924579 to 23925499)
aggctataaggtttaaggtacattctcggatttcatgctgaacttccactcaagagcttgtagtcattatcatcttttgtcttttttatttatatataagaagacctagatgaaggatttatgttctttttcttaaggtctcaaaattatttttgttttttagtttggttcaaacaaattggattccttggttgatcaatgtaaattatttaagctagagtccatttggcatagctgccacaagtacacctttgcaaagagtctcttttggaagaataaattttttttatgcttctccaatattctgcatctttttctttggcgaaaacataaaaatctttaagagaacagtcaaataacagaaaaaagttatctaaagtgctttctctgaaatggttttaatggtgctccagaaggtctgccgaagtgaccttagaacgattgttctctccaatataatggagtttagttagaaaaagtttattaatccttgaagtatttgttaaatgtcttcacaaggtttggaaatttcatggttttgattcttcaaaaaatattctgtcaatagtatcagaaaactttttcttaaaaaaaaaaaaaaaaaaaaatgtataagaaaactttaacccaaaggggtagcttaattggtaaagtgttgtatctctggaaacaaaggtgctctgtttgactctcttcaaccccttggggccaacttccctactgatgcagcaggaatagcttggttagaaaagaactatcctaggcctcagtttgaaagggtatgtatcttttctaactaagctgttactgctggatcaactgtagttgtagttctcatagctctataatgattgagcttattgtactatatatgcttggccaaatgagaaattagacataaaaatcttctggctgatgcag

SEQ ID NO: 73439 - DNA, 373 bp, Prunus persica; identical to SEQ ID NO: 71964
  Intron number 1 from transcript ppa019846m (locus ppa01984 6m.g) derived from phytozome v7.0 (chr-ID scaffold_6; pos 10474163 to 10474535 reverse strand)

SEQ ID NO: 73440 - DNA, 927 bp, Prunus persica
  Intron number 2 from transcript ppa003218m (locus ppa00321 8m.g) derived from phytozome v7.0 (chr-ID scaffold_1; pos 20063074 to 20064000)
aagataacgagcaacctgtctttgactttgaggttttcttttttattattttccctttcatcaagttctaatagtttctgtggacctattacaagattgatacaactctgtgatgtttttgatagtgtttgttttcgtcttttcagtgagttttataaatagaattgggatatcaaagtaattattgctatctgtattttcagattttaatttagtattgctaatactgtttacagaatattaatgatggcgacgatgatgacacccgtgatactggctttgctgcaaaaagtaaggaagatggtttaagatcttttgatttctcattaaaataaaaatgtcatttggttgtatttttttatgccatagttctttgttgacctactataagtgtagctcagtggttctttgacaattcgacttcaagttgtcaagcataaaagaaatcaagttttcttgaattgttagaatagaaacatgtccttttattatttgattctatagattgtgtgaacttttagaggcacgttacaagttcctaatattgttgtgcgttagcagtgtgttgaaattttgtgaactttgttatgtcaccacttaaacagggtgcggtgcatataatgaaattcacatgatttgctctttgctctatgttcattgtatgaatgactcagtcttcatcatttgtacaaaatcccttggttcaactccattatactacctgcacactttttgtgttttaggtgaaaaaatcattatatttctgtaattacttccaacaactcctcttacaagttatatacctggtttagagtttacataacttgtttcttatttatgtattgcctgcagttgttaggcagcaaaagtttttaacggcaaagtttggtggagttgaggatgaaatgcatgatgatgatgaagagg

SEQ ID NO: 73441 - DNA, 696 bp, Prunus persica
  Intron number 1 from transcript ppa005374m (locus ppa00537 4m.g) derived from phytozome v7.0 (chr-ID scaffold_1; pos 15903838 to 15904533)
gcaattgcagctgctacttctcttcccttcggtaaatcacgatcatatgactttctttccatttgggtttctgtttttattttaatttagtgggatcacgctttactgggagctgagagtcgatgaaacggcaatatgggaaatacccagtttgatttgcatgccttggcagaaacccatttggatttttgtcacaattttcttagaaaaagcttggcttgagtggttgtatcagctttctattgaaggatcatagttgttgaagaaatacccacatgcaaaaaaatgattgattgcaagtgctagttacggggactgagaattgatgagaatatgagttgattcttggtttggttatcatatttcacccttactgtgagcatatacaagcaaaaacaaaaagataaaagaaaagaaagataattgtaatattcagattttaatgaagaataagtttatattattgaaatttcgatttcttgctgatttcctctagttttcctttaaatttcttggcaattagttttaatcttatgttggactattgatttatttaatttttgtcttttagcctcgtgggtttttgtttccattagctcctcctgcttggaagcttcaattttgcagcgctcgtgacattttttttcttttgaaaatttttaaaatggatttttcaggttcttctcattgccattc

SEQ ID NO: 73442 - DNA, 670 bp, Prunus persica
  Intron number 2 from transcript ppa005374m (locus ppa00537 4m.g) derived from phytozome v7.0 (chr-ID scaffold_1; pos 15904608 to 15905277)
gtcgaagagcccttgatcttccaggcgtaaggtgtactttagtttaaaattgattgatcttatcaatatatatcgtggcattattatttctacaaaacatgtggaatatttgggtttagtctgtgctgagtatgatatgcctttaataggataactattagcggttgcctgagtaagggagggaaagaaaagaataccttccttcagatgaaaatagttctgcttgaatgaacgtgattaaccttttgcaccgactaaaaaacatgagtgtattttgcttagaactttgggtgcacatacaattcttattggggtgaatgtagagtttctcagctttcttttcttctcctttcctacatgtgatcactgcactcaggtatgatgtttacagattagacatgaggaatttaatgttctacataaaaattataggaatttttattttcgtcgaaaaaaatttatggaattatgagtaagatgtgtgtgcggtaacttgacttgggatattttttttcttttccaaccattaccttcacttttcccctttttttagctattaattttagattgaattcaaagtctattttacaaaatttatgttctgttaagtcaaaagtttattttttctattatagttttaattgcaggaatcctttacttggatcaaccc

SEQ ID NO: 73443 - DNA, 275 bp, Prunus persica
  Intron number 2 from transcript ppa002052m (locus ppa00205 2m.g) derived from phytozome v7.0 (chr-ID scaffold_7; pos 20771804 to 20772078)
tcagggctatcgttttgactggtaattaagctttgattcgtactctttcgttgaattgtgcggcagtgccgttttgttttggtgatttgatgctgttcgatccaattcggccaattgtttatgcattaactgttatttcttttctgtggttctgttttgttttttgttaaagaatctatgagcgtttaaatttttgtattgcttcttctttgtggatgttttgcagctcaattatatattctaattgatttttttttccttcctgaatgaaggca

SEQ ID NO: 73444 - DNA, 533 bp, Prunus persica
  Intron number 1 from transcript ppa021865m (locus ppa02186 5m.g) derived from phytozome v7.0 (chr-ID scaffold_4; pos 30097796 to 30098328)
ttttgggatcggctctgtaaagcacttcgagtcaggttaggttttgtatttttatttttatagtttggtttaatatcaataccatacatattaaggaaaccctttttgtcaaccagaggaagatgccatttccaacacatatgcatagtttgtctggatagttgtagtttttatatatatgtttttcttcaaatagctgggccagacatactctagtcttgaggctttggctatgtactctattaggagttgaacccataaccactcttgtaatgaaagcagagaaatacagcaacatacgtggactagtattcagggtgaggtgtttgattagagtataaagttccctcggtaattctatcgttacaaaaacctttatataatatggattataagtgatgtatttcttccttttaaatttgtgttgctttcaccaaaaaagtgcggtcttatttttttatacttatttttatctttacatgctctttttcatgacataaactcccatctgtcattttccaaacatgagcaga

SEQ ID NO: 73445 - DNA, 600 bp, Prunus persica
  Intron number 1 from transcript ppa008702m (locus ppa00870 2m.g) derived from phytozome v7.0 (chr-ID scaffold_3; pos 16711968 to 16712567)
gcctgcaagtaaatccctcatctgccaagttttactttttatttgttcttttttggtttgggggaggggggtgcggtgggtggatccatatgaacttctaagctttgaattatttaccattgaaatccttacttttctattacataggttaaagatgtttcgtgaaacaatgtcgactttgatctgcatgtttttttaaaattataggcttgtgttatgaggaaacttccatgaagtctaggatgattgagtttctttatagctgtcaatagtggaatacatactcaagccctttttaaatgcaaattttcttggatctgtcctctgcaaatttcttcatggaagcttcgtagtttatgttctgtatttcttgtctcagaaaaattagaccaccatatttacatgttcctgagctccctaagtactatttttgagagctgcactagctatgttttccaaattagagttaatctaattgatctccattctccctcctgctctgatggacagtttttgtgactcaaaagaaaagccagagtttttcatccatatcctacttttgcaggttctgcccggaagtatatataggcgagaaaggcc

SEQ ID NO: 73446 - DNA, 247 bp, Prunus persica
  Intron number 1 from transcript ppa015819m (locus ppa01581 9m.g) derived from phytozome v7.0 (chr-ID scaffold_1; pos 38394981 to 38395227)
ggggcttatttacatccgtgatcgtgcttcaagtggtaagtctaatcaaaactcgggaactccattccttaaatttcaaacggggaataagaatgagttcaaaataaatgagcatatatataataataataataaaaaacacagaaaagaaaatattacaaaaaatgtataatgatgaaatatatatgaagttgttcaatttacttgtccaggtaataagaaggatagtctctggttaattgtggcg

SEQ ID NO: 73447 - DNA, 962 bp, Prunus persica
  Intron number 1 from transcript ppa002429m (locus ppa00242 9m.g) derived from phytozome v7.0 (chr-ID scaffold_3; pos 10286303 to 10287264 reverse strand)
ttgcatttgcggcaatcgggtttgtgacccagcaggtattttcaacagtcttcgaagttttgattggtttttttctctcatgggttttgtagaatttactcatagtagttttgggcaatttttaggtagtgttttgagtgctcagtatccaaaaatggcttctttgtcttctggttttgttaccttaactcctatgttgattttgatgacaccaaacagaggaatagccttttatgcactgttttgcttttaatccctctttggaagaccattgcactacttccctagtgttaggatctcaatgtttcatagattcatttactttggcacatgatttttggttgcttcggtttttcaaacggacttcggggtctagctgaagaccggacaagtagatagatggctgattccgtccactgctcatcgatttcccgtagatacgttcactttgttcttagaagatagaaattgtcacaaattgtgatttgtttaatgagctataatgtaattctatcagttccttgtgcatattggagagaaagaacaacggctttctccatgtgttggcctgctttgttttcagtgacatgctatttgtatctgtagcctgacatgggtgggtttccgactaaaattaattgggtaattcaaaattttagattccatcttagttacttttgatattcatggaaattccacaagttactataaggagtttgtttttcctgtttttgtgttgagaactttatagtctacaaaatgtttttatatctgttatacaattttcaactaatgttgctttatcttttggctgtttcaggaaaaaagaaggaaatagcaataggtaatacttcacttcattaataacatattgatgacatcatggcagaaagaagaaaatttaagcaatatttgtttcatcttcaggtcttgctgtaggaggtgcaatcctttttggcatt

SEQ ID NO: 73448 - DNA, 684 bp, Prunus persica
  Intron number 1 from transcript ppa024614m (locus ppa02461 4m.g) derived from phytozome v7.0 (chr-ID scaffold_6; pos 12570522 to 12571205)
gacagcccattctcttctcatatacaaggaaacaagtactcttcttaatctcttctctttaattatcttcttctattgggttattcctaaaataaatgtatgcatcttagttttaattttaatttgaaattgagttttctagggtttaattaggaatgagatataatttgagaattttgttgaaattaattaggtctttgattttaagaattttgttgagatgtttgatttgatgttggcattgttgagatgtttgatttgttgttggtatgttaatgtttgattaaattcattgatgctattatgagaaattgtttgattttttgttgggatgtttgattaaataggttatcttttattatgtcggatcacaatcgaaaccccaagaaaacaaagaatgtgttctctttttttaagaaaaagaatgatgggtcatcgtcttctagaatatctcccatttgttaggagccaaatcttctctcttctcccattgttgagcctcaagttgaaagagttgagacccaaagagttgatagtggtcaagattttaatatcaattatcttgagcgtgatccgggattacgtcgtcaaatatgccaatattcggtgaataaacaagataatgtgcgaaaagcctatattgttttaggactttgtcaaccggagttagaagactatccaagc

SEQ ID NO: 73449 - DNA, 465 bp, Prunus persica
  Intron number 1 from transcript ppa003739m (locus ppa00373 9m.g) derived from phytozome v7.0 (chr-ID scaffold_2; pos 11622683 to 11623147)
gcctcaattctcgagtcttctaagtctgtaagtcactctaatctctcattttttaagttgttattgttagtttgtctaattatttgcttttgtttcttcaacaagtaacaaagttgtagtgttgtttggttcctgagaaaaatgaagggattaacggaaaacctcagttttcgctgacctgaacttagcgctacttatttggcgttcttttgtttcgtaaactaaattaaagcagcagaaattggagcaagggtttttgtgagttactagtatgaataaactatgtgttagtggagtttcaatagatgtgctgctgtatgcccttgtttgctttttcttatgatgtgttggctggtggatatttgtcatttgttgaatttgcggtcatattgatgtctaagaatttgaatgcctgattttagctttgattttaaatactaaattttgcagacattctttcctgca

SEQ ID NO: 73450 - DNA, 479 bp, Prunus persica
  Intron number 2 from transcript ppa003739m (locus ppa00373 9m.g) derived from phytozome v7.0 (chr-ID scaffold_2; pos 11623226 to 11623704)
tctggtattacccaccttttatgtttgattttcattattctttgtctaattatgagttgcagattctcattattgctgtctcccttcatctattatagttaagtaataaaaggataatgaacattgtaccggctatgtacctcttttctggcagtgtttttaggccccttttgcattttcttagttgtgaaagtaataaatgtgttcttctttgtttttagcaaagcctattttcattttcagaaagtttgaatttgaattttatatgctattgattttactaacttaagcatatagtttcttctgtcctcctctccatctagtttacattttctttgtgaaggtaataaatgcgagcatgcttgtttttggcaagattaaatttggatatgacatgctgttggttttactaacttcgatatataatttcttccactccccacccccctgaaaaaaatagtggcacgatttgatttttc

SEQ ID NO: 73451 - DNA, 712 bp, Prunus persica
  Intron number 1 from transcript ppa004470m (locus ppa00447 0m.g) derived from phytozome v7.0 (chr-ID scaffold_2; pos 19220883 to 19221594 reverse strand)
tgccgaaaagttcttcaacgatttctctcgctccggttagctttttcttttaatccctttcttatttgtatttaccatttatgagtgcatgtatacgcgcaaatttgagttctgggcatcgaattattgaatcccatttggtttctggaagtttgtgcgaggtttcaattggagtttcaatgggtgagactgtaaatgattttcattgagggcaaattttgaattgaaatggattgaccctggaaagtattaaaccaatttcgttatggagaacatggcttcggttttgatttagtgagttaaattgttgctcttttgaacttttattgctgctaaaacaccttaagtttgctgcttttggcgttatgtttttcttaatttcttgatcaaagtgtttaagctagaaatggatcttatagctagctgacccttgtgaatatgcaattcattaagtatgaaactcttcgtttgtggaaccattactagaatgggagctgtgttggacttttgaatccaaatgagtggattatttgaccagaatcgtatgatgcttaccaaatataagatttcttgtgttggcaattttcagtggaaatttgagtttgtaattttatgggggttaagggttttgttgatggccaagtgcagtgatgtgtggagaaaggattgttttcttaatcagtaagcggtttggtgatgaatatatgcaggc

SEQ ID NO: 73452 - DNA, 802 bp, Prunus persica
  Intron number 3 from transcript ppa009898m (locus ppa00989 8m.g) derived from phytozome v7.0 (chr-ID scaffold_5; pos 2656490 to 2657291 reverse strand)
aaactctggagaagaacacaacagagagaataatcgtgagtttattataaacctagaaatatttgtgtgtaattttggtaatatgttctttcaatatcttttgcagtttgactgatgcttttttcctttttaaaaaattataggggattcatatgtacatttcagtaatcatcattcaacaggttcgagcgccaaatcgtcgagaggtggtaatgccgaacaagggtatgtgaaaccatcacttatcgtcaactgcaatttgattacttagctaatacatagtttacagtttggttcatgtgttagcattagctagccttccttctgaggtttcagtcattagcttagataagaaaaacttctggtgctttggatattgttgttgccattgctgtcttttggatcattttgttttatatacgtcctttttactttgtggtgtatagaaatgaagtctctatatgtgaaatgtagcttcgttcaatgcactatatttcttatgttaaatgaatcaaagggagaaacaaattaaaataattagtcattacaagtatgcaaaacttttcttatagtagagaatgtgcttttagcagaaagtttttcttcttgttgcaatctcatcctcttctggactcgtgaaaaagaacgctggtctttcttcatgaaaacggaattggttttctatattcttgaaaaaaaaaaataatttctacatcaggattttcctttttcgattatatctccgttaaacctattaaaatgcttattatccttattgaaatgcttttggtttaagattgtt

SEQ ID NO: 73453 - DNA, 298 bp, Prunus persica
  Intron number 1 from transcript ppa009898m (locus ppa00989 8m.g) derived from phytozome v7.0 (chr-ID scaffold_5; pos 2657447 to 2657744 reverse strand)
ctgtcactaaacttggtggccctgacagtatgtcttcttaaattcttttaaatttttttgtttttctatcaactacttgtttatgtttcttttaattcttgatgctgtaatattttgtgggattttaatttaaacctgaaatatgaataaatattgggtgatcaatttgtcattttggcagaattttcaatggtattagtgcatgtaatttgcaaagcttaattatctgatccagctaatttaattttgaagagggtttctgttttcagaagcaactcccaagtctgtcttgaggcta

SEQ ID NO: 73454 - DNA, 502 bp, Prunus persica
  Intron number 1 from transcript ppa006009m (locus ppa00600 9m.g) derived from phytozome v7.0 (chr-ID scaffold_6; pos 17731343 to 17731844)
gtttccaggttccttctctctaaaacaattacattttataaaaaaattctttcttcttttggcgggtgaatgactgtttgcatttatttgtgaattggcagagactatgagattaagagtagatgtaaagtcttggtttttccaaagatgaaaggaaagcttctgtttttaagctaacccagatagatatatgagtatatgaagaactaactctaggtccaggttatatatctttgagtcctcaatgatggaaatcttaaaacccaattggcagtttctctcctatcctttgattttgaagaaactaaaaaggagcgtccaattatgatttctttgtgattgtggctctgaattattggttatgctttgaattggctaaaaggtacatcatatgcttctcttctgcttatgcactgacattcaaacttttggtgtttcacctgcccctatggatgccggtgtattaggacgtttgttgctcctcttgaaaggctaaagctgg

SEQ ID NO: 73455 - DNA, 926 bp, Prunus persica
  Intron number 1 from transcript ppb021740m (locus ppb02174 0m.g) derived from phytozome v7.0 (chr-ID scaffold_2; pos 23437396 to 23438321 reverse strand)
ttgaaacgacaggaccaaagtgttaaaagtggaaagtgagggtctaagcacatgctaccattcgtcttcccgagccaccaccacatcacctgcgccttcacctctctcgctctctcatggcaaccgctacttcagctaagtgagttggcactcataatggcagcttccactgcgacgaagcccttggctgcaagatatacaagttagttaagtagcatcctagttccttaggtatgagaatgtggtaagagttgcattattcatgagaaatatgtacacattttttggagaaatgtttatttatatatatatatatatatatatatatatatggggcggatctgtggcaccatattttttacataagttttgacacaatttttgggtaattagattactctacttttaatggttgagattaaacctaacatggcaaatagttttaatgttttaaataaataatcattaattttattttctctcataaaaataaaataaaattattttctttctcttcccttatttcttggaaacgtaatctctcttcttggttatatcctttttaaaaaaggcatcaatggagagagaagagagattgggagcgggagagagagagagaagcatatatatgccagctctctgactgcttgctctctctctctctctctctatatatatatatatatatatatatatatatctctctctctacatagatgatttagaagatatgctgactaaagctatactttctctcaacactatgacagaggatggcagcattgaggaggtaagcttttcaagagttggtaatatcttaatagattatacgagagacttaatatgctatgcttctggtaggaaactcaaaatttattgcttgctccgtagattgtgtgactctttcttgtcggcagcattgagga

SEQ ID NO: 73456 - DNA, 867 bp, Prunus persica
  Intron number 1 from transcript ppa005487m (locus ppa00548 7m.g) derived from phytozome v7.0 (chr-ID scaffold_2; pos 24014117 to 24014983 reverse strand)
atcgcctcgttattcgggacactctttccttcaaggtattcccccttttttcttttttcttttcgttttttagtttttcttaataaatttatttcatgctccgattggttgtctagaaaatgcaaggaaattgaaactgcaaatgtttaactcgttcgtttctcatctacctctctacatttgcacggataccaaatggtagctgaaccgattggcattggctcctgaatagttaaatttatgtagatctcaccctttgcatttcgctgttgacaaagccaatgtaacttcaacaagctgtaatctgtttgattgcggagaaattagaagaaaaacaattataaacatcgatctccattttaaggatctaatcacatttagttatgataagagtttttcaccttgggcgctatatgttcctgcaatttactgttcttaaacaagtgtttacatagaccgaagatttcaatatgctgaggtttctctttgttacttaatatgagctctcttcgtaaccattcaattagaccataagaggcataaaaggtacattagtacatagactaatgctccattgtgagatgtttgtatggtagggttcatgagcagttataaggtttaggcttttgtggaggtagaaatataccctcaaaagtttggacataagcaataatgactaaatggtcgaaacatttattttctttgcatcctatgtttggtttctgcatgcctcacactcattgctgttgtacaacaacttctgttaacaattgatgtgctaaattccattgcgtacatcttgaatgtaagtttatcttatacataattaaattctaaatttctaatgcaggttgtgcagctgttttc

SEQ ID NO: 73457 - DNA, 616 bp, Prunus persica
  Intron number 2 from transcript ppa011542m (locus ppa01154 2m.g) derived from phytozome v7.0 (chr-ID scaffold_2; pos 15085365 to 15085980)
agatatcttcaaagttccacttggaggtttttcaggtgacgttcattgcttaaattttggttaaaatgaagtgttctcgacatctcctgaatatcactataatctattaatccttacctatcagaaacatcggaattcttacttgggcatgtcttagtatcagaaaatttaagtctatacactgaaagatcgctgttatcaccgtagcctgcttagtttgtttatattccaagggccttttaaagataaagaatgacaatttatttgatcaaatgctcttaattgtataggtattaccctacactttagagtagagtgatggattggataatgttaattaaccgagatgcctaaaacttggtctgtcttgaataactactttgcatgatttgatttactttactactttgcattatttgatttactttttctgggaatacagctttcacttcagcttggcttgtagatgttttcttttccagtcacattgtctccaccttagtctatgaaagaaatacaattgcaacatgagaataatgtgttagtggatattaacgttttctttcattaactctattgattcaggaggcagaattgttggtgaatattaaagagc

SEQ ID NO: 73458 - DNA, 809 bp, Prunus persica
  Intron number 1 from transcript ppa009539m (locus ppa00953 9m.g) derived from phytozome v7.0 (chr-ID scaffold_1; pos 43796343 to 43797151)
gggtcgtttgaccccattgaccccactgtgggtccgtctctggtaggcctggccatatgtttggttcgggaaagagcccaacagatcaatcgtacagaacttacggtttggttgggttcagtacatatatttacaagttattattgtcattcagaaggaatattttataatttaagtcctcattcaattgtcataccaaaaaatcatcataaaaaactatttaatcatctaaaatgtgcaaaaagttttttaacagtttttttaacatatagactatttaagagcacctatattaacgttagagaccatgaatgatacaaaaaactttaagaatgcaatttgacagtttcacaaacgtcaggaacgttttgtaataaaaggccttgagaaaaacctaaacaaaaagggaatatagccgcccgattatacaatttattttatgaaataaaaaagaaaatagacccgaatatagttgctcttcaccattttacaatttcccttcttcatgaatgatcttttctaaataagcaattattttcagaaaatcttggttgcttgctggtaatcgtaaacttgaaccattgatgtttctgttgcaaataaataaataatgaagttttcagctattaagggtaaaactggaaaaacactcctcttgaacgtctccaactctccccacactcaaactcgggttcaccaaaatgttcctccttcaccggcagcgcgtcgccgccctccagctccaaatccgacgctacgcccaatccgccacagccgctctgctccccccggacccggaactcgaaccg

SEQ ID NO: 73459 - DNA, 422 bp, Prunus persica
  Intron number 1 from transcript ppa001313m (locus ppa00131 3m.g) derived from phytozome v7.0 (chr-ID scaffold_1; pos 40386603 to 40387024)
ctctccaccagagcaccagagactcagcaacccaggtaatcttttgtttttgaatttctggattgtttttcctcataaactggaagacgggtattgaagaaatcacatttggggtttaagtttaatttatgttctcaattacaattatccacatgggcttgtattgagtatttgtgattgagaaatagtgttactctaataattacatttttatctctaaattctggttcatatgtttttgtgtgtggttcatatgtttttgtgttgtgcagttgagcatgattgcagatattggtatttaatttgcgttcaagtatatttagagttgttatatatgtgcatgttctgatcatgttgcttggtgtaaatttttgtgtctctcactaacaatctcacggattaggcagttacttgctgtaaaa

SEQ ID NO: 73460 - DNA, 518 bp, Prunus persica
  Intron number 3 from transcript ppa012590m (locus ppa01259 0m.g) derived from phytozome v7.0 (chr-ID scaffold_5; pos 10855030 to 10855547)
accaagggaaatcggtatataaattcaagtctcaggtaattattgaatgctctaaacaccttctcttactacttaatagatagcggaaaatggaaatggctttgaatatggtaggataactcataattttttatgcataatatgatatgaacatgtctgcaataatcgtgattcgtgaattgtggtttctgcaaggaccatttcttgttcttcatataatagatatctgactatctaacatgccgctattaccatgtggcgcacatcttgcgatgactggccacaggaatactttctcatggaagttcttaactttgttttcttgttagcaaatctgctaatgcaatgcactgatagacaactatctcagtaacttttgagtctcagtatctgttgggtgctttcttagttttaggatggagaggaattaaacttttaggaaactttttctcttttacggggggagtttgcttttgcagcataacaaaacgttgattttcctattttgggcagattga

SEQ ID NO: 73461 - DNA, 770 bp, Prunus persica
  Intron number 1 from transcript ppa013477m (locus ppa01347 7m.g) derived from phytozome v7.0 (chr-ID scaffold_4; pos 15332151 to 15332920 reverse strand)
aaattcaagttcatccttcacaagtgcaaaagggaatgtgttttagtaaatctttgtcggattttgttggttggaattgtggaggagctaatggaatcagtaatcacaacattaatttgggtggttatcttcatgagaacgagaatgtgataatagattcagcctcatatggttatccttcaaattgtgagttacaaagtccagagaatatcataaagcaagcaaaactggttgattctgttgttcttccactaaaccagcaccagcagcgttcaatcaacaacattaatcagcagtattatctttcaggtaattttcaattcttatttataatatatatagtacaattaataatactttagattaggaatgaggaagctgatgatatatgcagatcaaaacatttttgctttgcttggctttgtttgttatattccagataactattcacatctctgaacaggacttgaattttaatcgtgacactcaaaagttatttttgtttaccattgacatccatggcaaattagggtttactaatgcatcatatataagaaattgggggctaaaaatataaattatatggcaatatttcttcataattaattttctatcctttttgttttattattattttttctgggtcttgttttattattcaaaattaatgttataatttatttggtgacctacataataagtttttttttggttttgttttgtttttgtttttgtaggtcaacttaatcaaatcattagcaagcccatag

SEQ ID NO: 73462 - DNA, 695 bp, Prunus persica
  Intron number 3 from transcript ppb012503m (locus ppb01250 3m.g) derived from phytozome v7.0 (chr-ID scaffold_3; pos 728392 to 729086 reverse strand)
attcttctccagagattgtcaagaaactgttcaaggtatgtgaattgcaaactgtttgtggcctgattttgttaagttcttttgcaaatataggacatctattattgcatttgctttttcttatttatgaggtctgttttcttattcatgattatacgacctataaaagcttggaataattattttgtgctcgctaatactgcctaatggtctttcattactcttaccaatctttttcttcgacgctctcattgcatagattgaagtcataggtcgttcttgcagagatgttatgcaaactatgatatactcaagaaaaagatatatcaagtagagatatacggaatgtggtctaaatttgatattggaatctacttgaaagttgtaactctcttttgtgtagttcgtaccaagtgtaggaatttattattatcttgtcaactttaagattccatatggaaactgacaagtgaaaagatgtgcagtgttaaagcaccactctagattgctgcagttcttttttttttttttttggatttattaacaaatgtgtcttggggtcatcaattcagattgctacattttctatagttatcgtactcaaatatattctgggttgactttcttgggcaggttttccatttcctttatacttatgccattatggtaggtagatataagctccttaactgttg

SEQ ID NO: 73463 - DNA, 744 bp, Prunus persica
  Intron number 2 from transcript ppa024815m (locus ppa02481 5m.g) derived from phytozome v7.0 (chr-ID scaffold_8; pos 15318025 to 15318768 reverse strand)
tgaagccaactggtcgacgtagctgcagtgctcatgtgagtgtctcactgcttcttcttttaactcatattcctttaaatagaaactatttgacttgagtaccatttaattagaatgatttttggcatttttggcctgctaattagaaatttgatgaataatttagagaaagttagtgtaaaatttactacaagtacgccagtttattctctgttaatcagcatgaactttcagcaaatgatttaaagttggtgtaaataacagtaagtgaatgaagaatttgacttaaccattgtttggacagaaccctgtcattttagatggctgcaaatgcatttcactgattgtactgctggccctaaacgatgaagtttatctcttttaaggcaggaaaccacgaattctacttgtcataatactgagcaatcattttcctacagtattataagcatatgtaattagatttatcatgctacaaatacctgttttgtctgatgatttactcccgtccactgcttcttgttatttgcttgtttcttcatggttaagttcagcgattacgaaaattttaagaacaaaatttacttaatgagtttgaacggctccagggacattttagttttctagtttgttttgcttttcaaaatcaccatgaatcaatcataacttttcctaataaaatgtttttttcctctttctgccttgacaggcttcaccagttcgttctgctaagtgtcacagttc

SEQ ID NO: 73464 - DNA, 161 bp, Prunus persica
  Intron number 1 from transcript ppa012166m (locus ppa01216 6m.g) derived from phytozome v7.0 (chr-ID scaffold_5; pos 13344814 to 13344974 reverse strand)
ctagatataactattcccctgccttcacgtaagaagatcaatcaaagacaacaccagtttttattttgttttttcccattaaaaaaaaaaagaacagattttcagtcattttgtttagttaattttcctttccttttatatatcttgcaggttctttgctt

SEQ ID NO: 73465 - DNA, 506 bp, Prunus persica
  Intron number 1 from transcript ppa010595m (locus ppa01059 5m.g) derived from phytozome v7.0 (chr-ID scaffold_4; pos 3456608 to 3457113)
tgtgagaaagaaaaacagctaagaaaacccaaaaggtagaaacctctgtttctgtccttaattatcaccatccatgatcttttctttgttttcttaccatgtcattgagcaaaatactcaaacattatctcataaatcatcttcagttgcctcacttcttttagtcccatcaatctttttggcttctcagccagatttatttaattaccacctgtttctgtttgttccccaagaatccaaaagaaaagttaacaattcaaaacttagttctgttcagttcacaatttcttgaacatggggatgctagcttaattagctacctagctagagctagctagttgttgttgttgttgtagtagtagtactgcaccaagttttcatttcatatgtttcttgcttcaacttttttgttcatgatcaagtagatagagagtaactgaagtactgggtcttttaactaattagctccttgattgatctctttgtgcttgattcagcttgcaact

SEQ ID NO: 73466 - DNA, 960 bp, Prunus persica
  Intron number 1 from transcript ppa022992m (locus ppa02299 2m.g) derived from phytozome v7.0 (chr-ID scaffold_4; pos 8946842 to 8947801)
acggtccatctcgcatcaccaaccctcactctcaggtaatatgacgccctgcctctgcttctttcatatttgaactgtttcctctataagggtatagttagattattcacttattcagcttagcattccaagtgtttgctaaaatgccgaagttgattttagtttgaacactttgtctgtctgctttattttgtatttagctttgtaaataagaattgggaaatgaagagaaatgagaaaagcttagttctttataataaaactaatttcaatgaatgaaacaactccataatgagggtgaaaatgaaattagaagtgagaacagtgaagagatttgttcgttgtgccaatttgtaagattttttagtgtgggtgaaattttgtctttttagttctttttctttgttatattgactttttgaataatagtttcatgtatgagtatgccatgcttcaagatgccaaatatggtcaagttttcatgtgtttaggcttgcacaaaactcaagtatttcttcctaggattcatgttatatggatattagcctctcaccctgtgctttgcatgcttgaggccttttcaacagaaccgaagtttgagaaaactgttggaatcagtggagtggggaataattttaaaactaaacggtgtgtgaacgtttgatttcactagtttaaccatgtaaataagaatgccatacccggaaaagataaataggttgattttgaagtatttaaatgttccaccagaagttttggcatcaaggtcagattacaaaatttgttcaatagattatctcttggttgtggaaaatttggcccggaattacagttagaacttggacttattctccaaactcttttcttcttttacaccctcttgttaacaaattctcccaccctctactcttgagtcagttttaaacccttgtaattcagtttcttttgaaggaattgcag

SEQ ID NO: 73467 - DNA, 706 bp, Prunus persica
  Intron number 2 from transcript ppa012494m (locus ppa01249 4m.g) derived from phytozome v7.0 (chr-ID scaffold_1; pos 44251414 to 44252119 reverse strand)
tttttcagtatctatcactcctgtagctgctcctggtatgttcttattcttatcttaatatagctttcagattgatctgctttttctttattttttatttttttttgtataattaattccagactaaagtattgggtttaattatattatatatctattcttccgggatttctctgatctatacacggctgtgctctgtggggaagaaaaacatgtcttaaaattgtgtgtaagaaaagaaaatgagggaaagaatctttaaattgatcaattcatttgcggagggggtttagtataaacttgatcttcaatgttactatgaacttcaagttgaatacagaaaatatattgagtttggatttcaatgttactttctctattttgttagacagaaacttgtgatgtgccaaatgagttatttccatttatttgcttctcacactcaaactggcattgtcaatgtttaaatgtctgtttttggattttcggcttgcaagatgaatcgaactaaatatgttttgtttgtcatgactgtcattgttcttattctctggtttcctcatttcgttgaatctgattctagacaccattgtacatcactccgacactattccctacaccgccggtctaacttgggattaactgataaggttttctgtctggtgttgcaggtctctcgccgggatcttctccaacatcatctgtt

SEQ ID NO: 73468 - DNA, 881 bp, Prunus persica
  Intron number 1 from transcript ppa001284m (locus ppa00128 4m.g) derived from phytozome v7.0 (chr-ID scaffold_7; pos 8960094 to 8960974)
aagccgctccttccgcgcagttccctcctctacaggttcagcttatctctctttactttctttccgtttggttctcgagaaaacgaaggaaatttgacatcttcccgagaaacttctagtgttagggtttcactgacattcgagaaagaatttgatcaacttaggcatagtctaattcaccatttaggtttttgttatctttctgtaatgactgtgtttgctttagttttccaagaaaattcgggaaaagaaaataaaagtttcatttctagtgtttgattttcgtcattttgaattctttaaaaattaaaaggcaagctcacattagctgcactctcgctaacaatgtgtgtggttgctaaaagaatgaaggataaaggaaaagttagacatctgaatgttggatgattcaatacccagattttgggacacattattctgcaccctgagggtccaccgctgaagcaattagatgccatttgattaagaagtatacaaaatcaagtcctaatattagtctttaggttcatataatattatttctgttccactgactgtaatgcacatattttggtgtgtttattcgccttccattccactgatgctctgctgggttgctgaaaagatgtttagataagattttgcatcaaaaccctagacttgtgccttttccttttgtatttggaatttttggactggtggtgtctagttgagacaaaaaggagatcaactgcggaaatttaatttttctggttatatattatgagaccaaaaagagatcaacttttctatggatccaggtatctagttttcaggactctgaattcatatttctatctgtttcagagaaatttggatcagttagaaacattatcgaagaa

SEQ ID NO: 73469 - DNA, 521 bp, Prunus persica
  Intron number 2 from transcript ppa001643m (locus ppa00164 3m.g) derived from phytozome v7.0 (chr-ID scaffold_3; pos 13101983 to 13102503)
cctggttaggattcccttttattctccgttgccagttttttggttagctgttccttgcttttgaaagttcccatatgtggattttctccattcccagttttggctctactatttgggtatatttcgatttttatggagcatgattaaggcctctaagctgtatccaatggtttatgaaaagtttactccttgtcaaatttctaatctcattcgtatatgatcttattgtgactattgggaggatgcgtatgtattagttttttctcttggacgtagattcttttacatttttgctaaataataatatggattgtgattatatttaagacgcggatgttctgtagagaacgattttatgagcctctgattattagattctattgtaacctcttttattctgatttgagtttttaataattgaccaatgcaatggtttgaagatggggtattttttggtcgcagtagacctcatatatgtttgctgaaagttgcagttttcttgacaaaatttctttttaggc

SEQ ID NO: 73470 - DNA, 537 bp, Prunus persica
  Intron number 2 from transcript ppa000473m (locus ppa00047 3m.g) derived from phytozome v7.0 (chr-ID scaffold_2; pos 26529552 to 26530088 reverse strand)
ttaaagatacctgcagctattctaagcccgtataggtacatttcttgccttacttttatccaaaaatgataactttacattttcaaaacatcaccattccacatctttatttcattcagatgcatttctaaattaagtggtaaactatgttatgatggcaatctcatttgcaaaatgaatgataactttacattttcaaaacatcaccattccacatgtttatttcattcagatgcatttctaaattaagtggtaagaagatccacgtatacatatatacagagtcatatgctgtgtgctcagcggttgattttgagattggagaatgcattggacctatttgtcgccacaccaaatttagctgtctacaatgagctacatctttatgttatcctgctgatagagagatccgcgagattataaataagctacgaatacttggtgcattccttttgagatcattcttcattgtcctgaaaataattgccttttgctctctgttgcttatgtgttcacaggcttctaatatttattcgt

SEQ ID NO: 73471 - DNA, 954 bp, Prunus persica
  Intron number 3 from transcript ppa012804m (locus ppa01280 4m.g) derived from phytozome v7.0 (chr-ID scaffold_7; pos 21271195 to 21272148)
tcaacatttgcatacgaaggcacggtgtcttccatgtacgtttcctttcatgctttcatttctcttttttttatacttttatatgtttactttggcaaattcttctgattgcattaatcttaaaaggaaacatcccattcagaatctcccatgttaagcaccccgtaatctaagaacaaaacatgttagacgaattcactccaaatcttccctaacacctggagatcccttgcctcttgtaaatttgttgtacatagttcgttgggtggttttagtaagtgattcttggatacttcttatcataggcacgcaggttaagcacacaaaaggcacttttcctactatatgtggaccttcatttggcaagcctgcataaggtggcctggagcctccttttgtataataaatgttatctaggagattaggacttggcaatctctccataaaacaaaactcatagcggttacaatgcttttagtcatcaatttgacagaagagaaacaacaatttatgtagtcaaggatttaggttactgcgtcgtctaattctaacttctgagatggtggttgccattttttacactattgtgtctagcttacctgctccatgtggtgtttttcatgcatgtgtgtctataatcatactttttgctgatatgaaagtagcttttcagtttttcattagttctatctggcatatatagcatgaatttagtcatgtgtgtaaagattttaaaaacttcagaacatgttagtagtaacctaacatgtgaatctgtatgttcacaaactgctgcatatctgtatgtagatgtctcacatgcgaatctttctcttacatatgaacttcctatagaaatgtgatgtggcaatggagtgaaattggcaattttctagttgaatgtttgaatccttttcagttacgcagagactagtgccaagctggagaacagct

SEQ ID NO: 73472 - DNA, 770 bp, Prunus persica
  Intron number 1 from transcript ppa026312m (locus ppa02631 2m.g) derived from phytozome v7.0 (chr-ID scaffold_3; pos 5114457 to 5115226)
agataaaatcgaagtggaaaatttatttcacgacggttttttgtaaataagagacgttgtagaactttagcagactaaacacgtctgtttttattgttttccgacgttgttgtatttaacaacgtctaatatttatggtcgttgtttgtttctgaaaataggacgtataaattttttaatacgactctcatatatttgtaactgacgttgtttagtttttcaacgtctactatagaaacacatacgtcgtaaataatgacactgacaactatttccacgtcatcttttatcaaaaaatcgaagtggaaaattaattgtacgacggttgtgtttatatgtgcgacgtagtaggtatcaataacgtcgtcttctaatgtatttaaagacgtcatattttttattgtcgtgaaaattatatttaacgtcggcgtatttttattgtcgtcgttgtatgtctatcttgcggccttgttctcttaatatgtgtcatattttccctttttaacgacggtctttttagagaattggtcgtctattatcatcatcgattgctttttttagatcttttgcagtacaaagacgtcgttttgtattttttgatgacgttgtattgtttaacaacgacggttatttagcgtcgtggtttatgagggaaaagatgacggtggattccacgaccattgaaaaaccaaatacacgacggtgatttaccgtcgtctttttgcttttttgtagtagtgggagttgcaaatctagtttcattacaacat

SEQ ID NO: 73473 - DNA, 848 bp, Prunus persica
  Intron number 1 from transcript ppa000073m (locus ppa00007 3m.g) derived from phytozome v7.0 (chr-ID scaffold_4; pos 8679883 to 8680730)
gatcgaaagcgacgagcctcgtattgcttacctgtgtaagttgttaaagttgagtttttgttgaattgggtttgttttacaaggtgtggattttaaaggggtgagcttgtttctgataaagttggaggtttctagtcttaactagctagtcagtcaaatggctttaattgtcaactataggatgaaggtttcatgttagataagtccattgagtgctcatattttggctgatatgcacaatggagatgttgattgcaattttccagctccatgtccagagatgaaagttttctttgaactaatcttctattttgccacttagagaaatgatacaaattaaattcgtgaaagttttgattctttgttttccaaaagggaaattttgattctaaccaccaaaatgtgaagctgggccaaaagtttttgtaacagaacgttgagtagtacttttgttcttttgggtgttaaagatttctactttggttgcagaaattcagtttatttaattaccttaccatcctgaacagtcaaagaaggtatagccattcatctcaatttacagggttaaatcaacagtttcttaggaagttggaatttccagagatgataggaaaaatggttgaaggaaatgatcttgttgatttaaatttcgagtagtaataagggtttgcactcattttgaaatgaaacttctttcccttttcttttcctttaatttccaattcaaacacatcttttcccaaagattgcagaacccaatgctatacaaatgtgattcattgtgagttcaaatgaatgcatgagccattaacattgtctaagtgaatcttattgagcaggccgctttc

SEQ ID NO: 73474 - DNA, 729 bp, Prunus persica; identical to SEQ ID NO: 72153
  Intron number 1 from transcript ppa008149m (locus ppa00815 4m.g) derived from phytozome v7.0 (chr-ID scaffold_2; pos 22035832 to 22036560 reverse strand)

SEQ ID NO: 73475 - DNA, 954 bp, Prunus persica
  Intron number 2 from transcript ppa013349m (locus ppa01334 9m.g) derived from phytozome v7.0 (chr-ID scaffold_7; pos 13633239 to 13634192)
atttgcagaaagtaatgttctttttcacctcaatctgtttgtttatgtgcaaatgatgtgattactgataactttttggattttcttgttgtaggctgttattcatttagttctaaattttgatttagaaaacttatgggacaattacttagcctccttttctgataatgtgcaattgaggttatacttgtcccaatacaaatttccattctcttaactttgtcagctgggctcaatcacttgcagctgattttcatgagtgggacattattttgtcattattatatttactttgtaaaccctgtatatcatggctatgtgaaacacttgcggcattttggtcctatagttaattgagatttgatatgggaatggggcagaggaagttggcttaaccaatttaagctaaccgttcgtgatattaattaatttctttttaggataggaatatattcgtaaatttggttccaatttcttcctccactcgtcagatttgttggctggatccattttgtgtgagttaaacttgtgggtgaggtggggtatcattctaaggttgcgtctgctcatgagcttaacttttgggacaattacttagcctcctttttctgctgaaatgaattaaggttatgcatgttacaacgtttattccactctttaactttaacaactgacataaattattttaagttgatatcatgggtgggtaaaaatgtcagtcttgttaaattttcttactagattttggctaaccaaattgtgtgaaaaactttccgcatgaagagagtagaggttcatgttgaatcaaatgctctatagtgttgcacttatgttcaatgtatggtattgtggcttccaattttatttccatatttccctgattggtctttcaacacttgatgttgtatgattgtcccacgcgcatctaattttatatattttctggttttttag

SEQ ID NO: 73476 - DNA, 353 bp, Prunus persica
  Intron number 3 from transcript ppa011012m (locus ppa01101 2m.g) derived from phytozome v7.0 (chr-ID scaffold_2; pos 25547096 to 25547448 reverse strand)
ctccccaaaggcctgtggaatcaccatcttcatccgtatgtcattttctctttcacatttgatagttctctttttttgtaaatgtagctggtgacttttacgttcttcatcaattcattgtgcaagtcttgtaaatgaatgcaaatcaaacatgaattacttatagaaatagtttttccgtgtgtcaaatctgtcattaatatacaaaaaggccactattacaaagttgtttttgaattctttatcgtttcagttgagaatgatgtttcttggctggatttgttgaaattacctttgtgcatattattgttattgcagggttctgttgcagatcccattgtcagcaaatacat

SEQ ID NO: 73477 - DNA, 444 bp, Prunus persica
  Intron number 1 from transcript ppa005155m (locus ppa00515 5m.g) derived from phytozome v7.0 (chr-ID scaffold_2; pos 12910226 to 12910669)
gcaaagacggaattctcgaggactttgccactcaggtggttcttcactcatttaagagcttgtctctatgtttggttactgagaaaattcttgtttgggaaaggaaatggaatttgaagttggggaaatggagccgagtagcgtgctaggcttagtttaagtatgttttgttctgctatgaattgatgaattaatgaattttgttctcaggtagtataataaacaattacaatttaaaaaattgggttcaattgaggaaatcaatcaggagctgtgcattatttatctgaattgtggttgtaagggtcatcaggcagtaggccatagcaatattatcaagtgctgatcaagaaatatatattgaaaatagttattcttcagtcctgctcttgacataaatgtgtaattatcttttgattgatctacagggtggtgaccggaaag

SEQ ID NO: 73478 - DNA, 634 bp, Prunus persica
  Intron number 1 from transcript ppa012366m (locus ppa01236 6m.g) derived from phytozome v7.0 (chr-ID scaffold_3; pos 6784551 to 6785184 reverse strand)
ttggggacctcatctgtaagctcgctctccctctctctctctctctctctctctcgctctttagattcattttcaagtactcagtttgcattccagaacccactttctttgttaggtatttttgttttcacttttctgctgcttgttaaaaacagaagtttaaattttttataaaaaaaaaatgagaaaaatggtatacacttgaattgcattctaaaacccactttcttttttgggtatttttgttttcacttttctgctgcttgtttacaaccaaaaaattttttaaaagaaaaagaagataaaagcgagatgtatcatattatggttactatggtacacttgaactgaacctagcacattaattttggatttctttagcttaattgtctatctgagatacctttctttcatatttttttcacagttcatagctgatcattgtggtactttgaatattgctgttggtgtgtgtacacacaaatttactatctttttgggctaatcatacaatttgatatctgtcttagcctttttctgtgcaagtttttcttatttatcctggtcttccttttcttctcaaagtatattgcttgttaacttgcagcatttaggtacccaaagaaccagtaca

SEQ ID NO: 73479 - DNA, 484 bp, Prunus persica
  Intron number 1 from transcript ppa016997m (locus ppa01699 7m.g) derived from phytozome v7.0 (chr-ID scaffold_6; pos 16648274 to 16648757)
agaagaggattaagaagacgaagattgaagaagctgtaagtggttttcgtcttttactctatttgtttctagagaaaattgattgaaggaaaattatggaaattaattcaatccgtgtaaaatttaattcgtgtttgctagaaatttagttaagtgtagttagagaagtataagtggtcagtgagccaatttctttttcaaaaaaataaatttttgtatcactttttatttgtggtcgttacacataatgggattgaattggagaatttgatctgaaaccggaccatatgatgtcaaaattgaatttcctgattagactgtttatgtagatgtctgtaggaagaaatgtcagtctgattttctggcttttctttgttgtagaagaggatgaaagagctgttaagcttgtttcttatgtatgactgttttgcatcccattattggtttaggtggttgctaacgaggaagagaaggtagagacagc

SEQ ID NO: 73480 - DNA, 881 bp, Prunus persica
  Intron number 1 from transcript ppa005004m (locus ppa00500 4m.g) derived from phytozome v7.0 (chr-ID scaffold_3; pos 663290 to 664170 reverse strand)
gtgatctgggtatgctttgtttctctgatttgggctgtgaaagctgtgtcttttatttatttattcatttttaatttgagaatgacatggttttgtttgtactttgctaaatgtggaggattgtgctgtctttcttgttttgttggatatcgatcatcaatttagttcccttttgtactctggttggttgatgagaaaatgtggaaagaagcaacttttgaatgttgggtttttcagttcttacagaaaaaaggataaaaatgagaagctcaagggacagagccatttaagatattcttgagagctttactctcctgcctatcaatttttctgagatccagaagtagccagtagtcctacaatcccttcttctttcttcagatctttcatcaatgaaaatttgttctatgaatgatagatttcagactgtaatgttagtaattaggagatgatttgttttacttgcaattctgttgtagttttaagtatttttgcctagtttcttaggttgccaaaaattgaagatcaggacttatcatcataaattaacctccgagtattagagatgcttgtgccaccacaaaacaaaagcttgctctcaagacttgatctctgagaacatgtccaatctaaatcattatcgtatcttcgaaatttccaattgttgtacttcagttgaaagttgagataatatcacgtgcttattgttacttcgctatattctagtgtggctgattggttatatcattgtacctataacaactattgcttgatagcgtcaagtattgagctagttaataagttgatgaacaatacctgattgtccctctttctctctctcagtaggactttgagtgtccgttagataaccatcttgtgct

SEQ ID NO: 73481 - DNA, 643 bp, Prunus persica
  Intron number 1 from transcript ppa011363m (locus ppa01136 3m.g) derived from phytozome v7.0 (chr-ID scaffold_2; pos 18332758 to 18333400 reverse strand)
ttgtgaagctccggctgggcgtcaaacggactcgggtaatccgaatttgctcttcccctttgaattcttattaggtttcagcttgaattgaattgggttagtttctatgttggctctgatatagtaactcgtagtttggaacctcaatttgatagttttagtgtaatcagtgaaacgagttttttgagcatgaatttggatcaaacgttcactattgaattgaaagagtattgagaagttgattggaagttgttttgatctggaattggacttgaacatatatgtgaaagaatttggtttaaattggaaattgtggattaatgtgtggaaatctactgataagtactagttttacaaattgcaggctggctaaaatgcactatcagaacactttttgtagattgggaaccatgaattgagcactagttataaacttatatctttttttttgtagttcttgttgtagtctctgttttagatgttaattatgagcttgagttgatgtattggctttataggtaatagaaatgacttttgatggttttctatgtaattgattgaggctttcaatttggcttcaaatgaatgttaaatttattgagggcttctcttcccctcgcaggatacggtggctgagattgct

SEQ ID NO: 73482 - DNA, 1043 bp, Prunus persica
  Intron number 1 from transcript ppa012175m (locus ppa01217 5m.g) derived from phytozome v7.0 (chr-ID scaffold_4; pos 1999332 to 2000374)
cccttgctgttgctgctgagcaacgaaggtccagtgtaagtctctctcttggaattatttcatatggttcaatatttagaaattataaactattcatgttttttttttaaatcttcgttgcaaattttccatattttttgttatcagatttaggggcttattgcagccacactttgactttggccttcagacatagaaaatagttgtcttattgctatattcattgtctgtcgatggatagtgaaaaatttgcgggaaacatgaaacagagatttttaaccaaaatatgaaatgtggttaggcgagttggctagggtaatatgcccgcaccttcgcaagttgcatacgagttcaaatctccctccctatagattaaagtagtgtaaaatattgctttgtgaaaatgatattaaatttgttggtgaggaggaaatgattttgctttggagatggattccggtgcagacttgcaatggctaattagtgtttgattagagggtatggtctgaatctgggtaattttcaaactggagaaatccatcaaaccgtaggctacggagggaaatgtagaaattgcttgtaagtgtatacagctgtgatttagtttattagaatgtgaattttctaataaactaaatcagcatagcatggatagatatcaaagaataagatgagagagagagggtagacttgaaagctgactatgaatcttaagttgggattcgtaaaagccaaagaaaggagataaatctcataagatgtgtgcatcctcagcgttctacaagaattgcagtgagggatagttcacttctaaagttccagtatggcgtaaacacgaactaggaggaaacacattctaatagtttaaattgttcgcatcaaactggtttctcctacaattggaacattgttagttgaagtaattgagtaacttcagtctaactggagcgcatgtgagatttcctatgcgtggtcgggtcgtaattcatctattattctcccttgcaggccaagattcaaactctagcaaattccagctattg

SEQ ID NO: 73483 - DNA, 946 bp, Prunus persica
  Intron number 1 from transcript ppa001070m (locus ppa00107 0m.g) derived from phytozome v7.0 (chr-ID scaffold_5; pos 9570052 to 9570997 reverse strand)
atacaggaggtgagttcagaattttgggttgtgatgcattttgtgatggagatactggggaacttatttcttgcttttttgttgttgattttggcggttttgataggattgtgcaaataaatgtgagttaacaaaactagatagatagatgttatgacatattagaatctccaggcctttttagctaatatggcattaatgtggttcgcatttggaagtaaaaccagggttagcatagctatgttaagcaatacaagtacttccagacagttaaacaaataaagtgtcgaatttggtgttcacttttctgaggatggataactatcccatgtttcggagcgaaaacctttttgagttatggagcatttgattgccccataactcaattgggtatacatggaaacttatgttttttaccctgttaaattgataagcagtctgtaaactaagctatgcaatcgtgttatagtatgcctatgcaaatggtattccacatgaatcaagttagcagaaataatttcattttacgcctaccttatgtgtcgatagctcaataatttttttcctatttaaaccttaaattgtaaattcatctctgattctcctcgtctttcttggagatgaaatagtgggatacatcattgatgtcaaaataatttgttcaatgctacattcgtgggaagttctagtgtaaagttttcctctccttggagaaaattaattgtccttttctactgtaagctgtaatgctaacagtaggttattccttttgcactagcataggtttcccaaaaatttattatttgttgatcaaaagaggttcctagcatgagtttatttccctatcccttaactaaagaattttaaatgctttgtggttggtcattcaacttttcttttcttgggtctagttcctggaagagttcgagttgctgtaagattgcga

SEQ ID NO: 73484 - DNA, 430 bp, Prunus persica
  Intron number 3 from transcript ppb009520m (locus ppb00952 0m.g) derived from phytozome v7.0 (chr-ID scaffold_8; pos 15149717 to 15150146)
cctgagcttggggagctgaagcacctacagtacttgtatgtttccttttctcataccacccttttctcttatgctgtatttgattcagaccccaaaaaagaaaggggctgtatttttttggctgcttagaaaagcaaggaagcaaaagattccatgtttatactgtttccaactttagaaatgaaaaagctcactcaagtaacagattgtggatttagagacccacatgactgaagaatttttttttttctttctcctagttcctttatcaagtggaaaaaagaaaatttgatcaaatcttgatttcaatttacttatacatgttctgactttgataacaatgtacttgtacaatttgttaatgaaaataattctctgaagaagtgattgagtgaaaatctctgaatgtgtttcagggagctttatagaa

SEQ ID NO: 73485 - DNA, 545 bp, Prunus persica
  Intron number 5 from transcript ppa015594m (locus ppa01559 4m.g) derived from phytozome v7.0 (chr-ID scaffold_3; pos 3966947 to 3967491)
tcactgtcagggtatgtgtctttcacttctatgaaaattttgggttaaattaagaagttcaattgtggtcttagaacatcacaagaaattgtcaaaactctactcaaattctgaagtattctaagctcaaatgtcccaaaataaaaatcattacgcaaaaacaaatatgattgttattttttgaacataggaagatcattataccttcatctcagtcatctcaattcgcactgtttactcacgcagaaaaagataaaaccatatttagcaatattgttagttttctagtttcagaagagaaagtatcaattttggtttttattttggttaatttcacgaagtggttggaactcaaaccacctgcaaccaacatgttaaggtgctgagatagagttaggcctaatctatgaaggaaaattataatggtgatttatctgagttctcttgcattcataatgtactcaagtgtcactggttatgcttatatatctttgactctgttttttttcctcaggttggattagctcttggagatttgcgatccc

SEQ ID NO: 73486 - DNA, 323 bp, Prunus persica
  Intron number 3 from transcript ppa009484m (locus ppa00948 4m.g) derived from phytozome v7.0 (chr-ID scaffold_4; pos 16570496 to 16570818 reverse strand)
ccatagcacttccctatctgggaagatttctcaaggtaattttcaaggcacttaaaaaactccaatagattaattagagtcaatggcattgtttttcaatctgaaaaaactcataaaaatgcaaagtgcagcttaaattcgtgaccccatgaaggtgaagtttgaattgtaagcctcttctgtggtgcaaaaaatataaactaccaagaacccttcactgtcaatgacattgatattagatagggtggcaggcaggtataactgtctgctcagcatttttgtaagcctgattatgtggaattatattgcagggtgctactcca

SEQ ID NO: 73487 - DNA, 1032 bp, Prunus persica
  Intron number 1 from transcript ppa025771m (locus ppa02577 1m.g) derived from phytozome v7.0 (chr-ID scaffold_6; pos 6496145 to 6497176)
ctttaccaatatgtgagttttagcattaaacactcgcttttatcggtcttcttttattctcaaattcactttttaattgggtgggagtttgtgtttatgttaatggtagtagagttgactgttgactggtgtgcattgtttgttgcattgcaaatttgaaatctttggctgtatgaactattgggtatcttctgaaacagaggaaaagaaaaagattgtgcatttgacaattttggaagtgggatagaaattttggggcttactatatgtgggtttgtttgggagaacattatcggagattgagcaggaagattgtgggcaactatgagaagtgtgaaagccaattactaaacatcaatatgagtgagttgctgtattggtttttggttcagtgtttgtgttgggttaattggttgaagtgcaatctaacaagtgtatgtcatgtcatttgtgacagtgttttggagtgtgttaatttagctttgtgcagaagctgcaaggaataatcccaaacaacttggtatttgggagaattaacagttatcttgttagacctctccttctttcagtctgtcatgttaaacatttgctgagcttgctgcatttttgtgacaaagccaattactggtattaatgtgttaagagtttcaaatttcgggttcagcaatgattcggtcatgcagttatactattttgttgctgttagaaatttgttaattattttttggtgatgtgttctgtcaaactttgttggttgtattacaggataaatatgttttttgtttttttttttcctattccgaagaattcaaactgtatccagaaaacccaaattctgttattttccatttatttttctccttattgatagtataattcatgtctttacaagtttgctgctctcatcactattcatgtttataaaatataatatgggcataacagaaaattccatttggtgccactcatgtagatgattgacatcttataaatacaggtcacaaacagagtgcgtcctggaaacagcaaggt

SEQ ID NO: 73488 - DNA, 899 bp, Prunus persica
  Intron number 3 from transcript ppa011939m (locus ppa01193 9m.g) derived from phytozome v7.0 (chr-ID scaffold_7; pos 13192561 to 13193459)
caccaccaggaatcctcaggtcaaaaagaaacagggtgagttattatttctttgttctgctgttcgaagttttgattttgttcttttttattttcgtcaactttttccttattcttttcgtaatttgtattgatgtgtttctggcacacttttgtttttgtatctgttttggtaccaactgtgcgaagttttgtgtcaatctgaaataaaggataaaaacttagttgcattgttatccccgaccaagcaataatgttatgccacgtgtaagtgttatcacgcgtgtcatagcattattagcctttcatggaagtttttctcaaaacaaaaggtgtgtcttttatacaaaaatggaagttttatcctttctttgatgctatatatttccacttgtagttaaaagttgaaatgtgaacatcttgtttttaattgagaaaggttgttgagtggttcttcatatgcttgaagcaccttgtttaggcagaatagtaacccattgtttatattttgggtggacctattcattaatgttaatctctattggaatatggactgatgggtctgcttgtccacttatatatatatatatatatatatatatatatatatgaactgagtaattttgcatgtgctgacctctagataggttgaatgtttgttttcactgcttgtaattagtaaacaaaattagaaatccattgaactgtttgaatgctgcattgttacatgaaaactacaaagccaagcctggccgcagccccattgatcaacggctgtcaattgtgcgtttcatccaatactttgatctcaatttttctgtttgcagttatggttttctttattggttatatgtttttgttgcagggttgagaaatatccagcagattaaagccatccag

SEQ ID NO: 73489 - DNA, 393 bp, Prunus persica
  Intron number 1 from transcript ppa007336m (locus ppa00733 6m.g) derived from phytozome v7.0 (chr-ID scaffold_3; pos 4691280 to 4691672)
cgtcaactttggccccaagattacaacaaattctggtactaatttaatcacattaattcaataacctcattcttaatattttattattattttttatttttaaaaaaaaattgttggggtttttggtttttgggtggtgaaagtactatggccaatggccatgtaggcagaagacccattttctttacaagacgcaagttgcaaaagattacaacgagagccatggacccactgagaagatttggtttgtggaaatatccaaaagattaaatatacttgttatgaatgtttactttgctaaccatccatcataatagcatccttgtttgttatgtattaaacagtgttttgattttgattttgcttgttttttcagtaatattattgaagaat

SEQ ID NO: 73490 - DNA, 739 bp, Prunus persica
  Intron number 2 from transcript ppa010061m (locus ppa01006 1m.g) derived from phytozome v7.0 (chr-ID scaffold_7; pos 5171247 to 5171985 reverse strand)
cacaagttcaatttgtcttaaagggcataaaagtaccatatttgcatccttttaaaggtttccaagagattctaagttttttgttgttgttgtttttgttgtttttttgttttttttttgtttctggaatatttttgaaccatctggacattaaacatttcttctctcaagtgggttataacgttcctttcatgcacattaatcaacttttattttggactaggaaccgtaacggatttttgttacatacactaatctctcaacaccaatttgaatgcttattgctttctgtctaaagcacagttgactggttcagttaccttgggatgcctaaatttgaggggggtttgaacaacttagaagaactgttactttctgtattattgtttgtgctgttatttatgtggggtgtggtgtatttgggaaatgactgcagtgcaaagggggtttgcgggcattctttgtgcccgggggagcaatgggtttttgttaaaagtaatgtctgttgttttttgctttgaagttgttggctgctaataatactagcaattgaaaggatatcttagatatttcatcttcacattagcatcaaaggatctttgatcacctaactgactgcttaagtctatgtttgatggtgttttcaacttcttcccccttttttctcagcatacatttattagttgctcacttcctgcttgcagagctctaataaggtcaacttggttgctaaactgat

SEQ ID NO: 73491 - DNA, 466 bp, Prunus persica
  Intron number 5 from transcript ppa010962m (locus ppa01096 2m.g) derived from phytozome v7.0 (chr-ID scaffold_2; pos 15883942 to 15884407)
attaacgtgtaatcctttctaccaaatcacctttttcaatgtttgaatactttttgctttgtttaaagatggctattgattatcataatgcatgttttcgtttcttgagtagcttctgtttggtttgaactgtaaaatggcgtttagaatgtgaatggaaacaaaattgaacacaacatgagctcatcatgagattaaaacaaacaaaatttatccataaattcgcatcctttgtgaatcggacttctttaactctttgtgaggcgtgaaaacctttaggtcagaaaatatgcaaaactgaagaggtattagttcatcagattaggagtcttgtgcttcatcttctttctatgcttccttctgtgaatttatttttgcacccaatgtaggatgttttgccatttcttgcctgagatcaagtttcttttcaggggcctcggcaagtctgatcggcaaagcaaagtcg

SEQ ID NO: 73492 - DNA, 749 bp, Prunus persica
  Intron number 1 from transcript ppa000584m (locus ppa00058 4m.g) derived from phytozome v7.0 (chr-ID scaffold_1; pos 37673517 to 37674265)
ctgttcctcctctgctcctcaaacctcagaaccaggtacctcttgagctatttctcttttgatcatatgtttttgtttctctaattttcttttgctttaacatgcttggatactgtgatttgattacttttttttattgttggtttcgatcaggttgtttttgtcgttcttgtagtttctagggtttttttttgttttttctttctgttaatttctttttgtttgttcctttttatttctggaaactgctgcttgaagatcattttattttcatttgcttattatgtattcgtgactagctttgagaatgcatgatggaagtcttcgcatctgaattttatcagaatgcaagctttcggttgtgttgtgacaaacaaggtacaaggacatgctttatctgagagtatcaaaaactgtatttctccaaagattccgaaaattataaaaataaatagacatgaagccattaaaacttaaaaattagttttctaatacctttaaacccaatatcccacagtagtgatatggaacgcattgggctagtatataaactgcttgtacactttgactacatcctattgcaaaaaagatcattgtaaaatgattttagagagtatagtttgtgactgtaattctagattatatatatatatatatctctctctctctctgtgcacatattcattgtaaaattttgaagaattcatgttttgcattcatgtccattgcagggttggtcggtggttaaa

SEQ ID NO: 73493 - DNA, 773 bp, Prunus persica
  Intron number 3 from transcript ppa000584m (locus ppa00058 4m.g) derived from phytozome v7.0 (chr-ID scaffold_1; pos 37675006 to 37675778)
gatctttttcgtggaagtgtatcccacgttaccaggtaaaaccaaatctgattggagtagaattatacttctttcagataaggcctttctctgtgttatttttatgttctttttgcattatggggattaccaattgatgtttgtcaattgtttaaaatgtcacacaaacattgtggtgtcttcttatttcgtttggataggtagtgactgagttcatagaatgatgtaaattatccaacctgtctttaaaaaatttaatgggatcaagataccaatcaaagtgatacacaagggagccaataacagtgtaaatgaaaattgtcaaataattattgactgattagcggttgttttcttaatgcgtgcttgccattttcttgttgatgttagccctttaaaaaacaagtaaatacttcccctccattagaaaactatttattccttttttttttggtaaaagaattgtgaatgagatttgtaatgttcatatttttctagatggacttataaagttcttgttcctcatagtgactggtgtggcattagatatacttctgaagtttgtttaatatttccgttcatttgtaacttttgaagtttttagctttgctgcttttttttttcatttgggttatttgtatcattatgtttgtgccccagcagcaaatttttgagtacatttgctttttcatataaaggtgagtctacggttattccttcagctgatctcacatggctattattttatccttgcatgtatgcaggtgctcaca

SEQ ID NO: 73494 - DNA, 510 bp, Prunus persica
  Intron number 1 from transcript ppa019935m (locus ppa01993 5m.g) derived from phytozome v7.0 (chr-ID scaffold_4; pos 10872797 to 10873306 reverse strand)
tactacaggggtaagtctctgcttttctttaactttaccacgtcacctttatatagttaaaactatatgtttgaatgtgtggtccaaatttacagttgagactataagtcatgagaacattattaaaatttaacgagtacatatttctatgtagtagctaaccatgttccattacttttgtttcttttgcatgtgaaggctgtcagctattcctatgagactgtggaacacactgattctgatgaaaatgaagatggaattgcactacggatccgcttgagaaatttcatgctcaaatttcctttccttgggcgtttggagctgggtttccgcaccagtgagagctggaccatattgaccttattgctacatagctcgcctaatctgcagcatcttatcttgagaaaggtatgtttactttacatgaatgaacaatttcaaactgcttggttttcagcactttcatcttcttaccattcaattttgtttttttttaacgacaggaactaa

SEQ ID NO: 73495 - DNA, 412 bp, Prunus persica
  Intron number 3 from transcript ppa012790m (locus ppa01279 0m.g) derived from phytozome v7.0 (chr-ID scaffold_1; pos 10970639 to 10971050 reverse strand)
ttcaccagttcaagggtagtagctccaggtacacacataaattttgttttgttttttttccctgcactgagaaaaacatggaatgaagtagaaaaagttgattacttttcttagtttgtcttttgtaggaagatcaatatttcagccttgaaaaatgagctaactaatcctgattttcatctctgatccatttataaatcctggttttacagtgagtgggacaatctttgcattttttttttcagcctgagctgaatccaatttcgacacccttagatagattaaaatttacaggaaacttaatttagtttagatccaggggataggtgctgatttttgttcatgcttagctcaatgttgtttgatgacagtttttgtggttgacacagtattggtgcacaaagagttaaaa

SEQ ID NO: 73496 - DNA, 934 bp, Prunus persica
  Intron number 1 from transcript ppa026169m (locus ppa02616 9m.g) derived from phytozome v7.0 (chr-ID scaffold_8; pos 13924250 to 13925183 reverse strand)
gcaacaaatttgccggggtggtatttcttggacgggtatatttctaagaaccacttactagcgtttcgatttatttatttgtttctaatttctttattttgttaaaaaaattcatccattttagtacttaacaaatttgctcacacattattacataacaagaaatcaagataaaaatgaatcataagtaaaaagaatcgaaatgggaacgagaatatatatgagattataaaattggaatttcagcagttaaacaagatttcttcggcagttaaacaagatttcttcggtgttgttgtaccctagcataggttgacaatcatctagtctaaggagaaatacttccatgaaacgaggatagtattttgttatttctggtcaataacgttatgacatgcgtgacaacacttccacttggcatagcattattagtcgaaaataggaaaacaatattatccttgcaacaactaagtttttctcctaatctatcctacatgtcatacctgggcaccaacacacgtactagcatcacaagaaaaaaaattatattaaatttggtcgccaaataatagaacatttgatatgagaatatcatacttataataaacaaatggaaattgtaataagttcatatataaataaacgaaatactgccacattgatctcaaatttgtgaacttagtgtgctaggattattacttttcttaaggaaagtaatatgaataaaataaaactaaagtcgcttgtttggttaaacatatatagcatcttcctcttgagaaattattgagagagtttatattcccttttcctttttagacagaattataagatcgaaatatatagctagctagcaaaattccatttcattaaatgtttcatatgcttttaactggcaggcacaattctaaatttgttcataacattgttgaag

SEQ ID NO: 73497 - DNA, 890 bp, Prunus persica
  Intron number 2 from transcript ppa005416m (locus ppa00541 6m.g) derived from phytozome v7.0 (chr-ID scaffold_4; pos 19995354 to 19996243)
aggccattaacgttattgactctgtattgctctcttcgcttttttgtctttttttcctcatttctttttcttcaaatatatgatctttttcatttccggttgccaatattctatctgggttttgcgtattgttgcttattgttgcttattgatactatagttgctaatgtcccataggtatttttcctatgttctactttcttgatactttttgtctgggtttttgtttatagttgctactttcatttcttttccgtttgcctttttcgttctggaattctggtcttacatagccataagatttgccgtggttcctagagtccttccacatgcacctatggagtaaagttcaagctgaatattggaactgacaggaccaagagggtcaatatttaagcgttgttctgtaaaagaatctgctggttcctctgttacttttttttgttattacacgaggtaccgttgaataattacttaattatgtggaccataggaaatctcttatttgcatggtgaagcttcagaaatcttctttgtctgagaactgatgttcttctttttggttcagataaaaaataaataggagttcaatttgtatatgtattgagaaaacttttccatatatataaataacaaaaactgaattatatacatatctacatcttctgttaaagaatacctttactggtacagagaaagcctattttagtttttttctttgtttggatttaacaggataattcagtttttgttatttattggtagacaaatattcaaagcgttgaatgctcttaaaattaagagatggcgttctggactgtttatttatttcttggctgttttacgtgagaaacttatatgttgggttgtttggtttgtcttgcagtttt

SEQ ID NO: 73498 - DNA, 750 bp, Prunus persica
  Intron number 1 from transcript ppa012603m (locus ppa01260 3m.g) derived from phytozome v7.0 (chr-ID scaffold_6; pos 7281837 to 7282586 reverse strand)
ataaggaggcagctattgagcttggagaagaattggtaatactacttatactaataatacctctgtttatttcaagttcggcctttttgtgtgtgtatttttattttttctatttcttctttgagtttccaagttgggtttttttaatggaactggttatttgtcatttgtttttgcatgaactgtcgtgagttgtaggtttttaagccaaaaccagttgagaattttgtgtttgattttatgtcccaatgaatttgcaaaatgagttgtgggttatctagctgaacttcaactaggttgatcttcattgttgttctatataaatatatgtatatatatgtatgtatcattggtttatattttcaaatggtgttactgatcatattagtctttagtctgaccatgctcaatttcaagcctctgcttcatatctgctctgtctccaaaacccctgcatatgattttctctgtctctaatatctatatatgcatatgtacataaagaaggttttgaatcaacgatgaaatcatttcatcctcccgcccactttcatgaagaaccaaatgtagtttaatggatgaatctctctctctctctctctctctctctctctctctctctctctctctctctctctctctctctctctctctctctctcaaatggattcctattggaaatattctcctttactgagtattctttgttgtctggtttgtaaaaggtttcaaagaacattgatttggttt

SEQ ID NO: 73499 - DNA, 485 bp, Prunus persica
  Intron number 1 from transcript ppa001705m (locus ppa00170 5m.g) derived from phytozome v7.0 (chr-ID scaffold_8; pos 11138930 to 11139414)
aggcaagtacttgattgttgtagttcatgaacaacccaaatatagaatagacaagctcaatccaaccttgaacttgcgagtggctcagtatgtttttaaccttaccgtgttcaagaagaaagcaaagacctaacatatctgcacctaattctttatcatggggcgactataacatggaaatcagcaagaaccagtggcatctccctcgttaatttcgtaataagctcaagcagatttgttcttaaaacaggattgttttgtccttttctttttaggacagtatggattgtgtctccttttaatgttctcaactcttaatctcctagatgtaaatcgaatatatttatttgtcctctgtactgtcgtatagcgtggttatataattttgttttaatttttcttgattttctttgatgactaatttatttctttatttttattctgatacagtggttagaaacagagatagtgagactcagtcatct

SEQ ID NO: 73500 - DNA, 836 bp, Prunus persica
  Intron number 3 from transcript ppa021698m (locus ppa02169 8m.g) derived from phytozome v7.0 (chr-ID scaffold_8; pos 1896502 to 1897337 reverse strand)
actagttctagtagagccttcgtttggctcaccaggtaattttgtttagctcatctggtaattgtgtttgtccttgactaacatatttaactaaaatcaacaacaaaataaatccttaataaatttattccaaatctactgttacccaacttacttttatctgtacttcatacttagtctttacctttctagtaactcataaatcaaagtcagcttgatttaattaacgacaaacacgtattagtttatgatgtatgaactgtcatgcatatgctctcttgttttggtttcgagaatttcttcttcttcttttttttgtaccgcttaattttaatttcaaagttaacattattactagtacaattcaaacgatagtttaaactataataaatgagttttttacacacatacacaattaactctgagacctgatatataaatcaatatcctttttcaatgtactaggcccattgacagtacaaccccagccttaatcctcattttcattgtttactttaatggaaactagaaatccagccaaagctaagcaagagttaaacaattgtttcaattacgtcacatcactcagctgtgtaatcgatccaataataaacagcccacttttacatttcttgagttggacgttacatacgccatcaaaattgtcattttatgcaaatgctaacaaccttagatagacataacccactgtttaggtgcatatattcttggatttatcaactgtatatgcacacgattcttcatttttcttgtaaactaattgatttgttttacatccagatcccttgattttactgtggcattgtttcaaaatt

SEQ ID NO: 73501 - DNA, 354 bp, Prunus persica
  Intron number 1 from transcript ppa001155m (locus ppa00115 5m.g) derived from phytozome v7.0 (chr-ID scaffold_6; pos 24109039 to 24109392 reverse strand)
tcaatcttcacgcctgctgcttctacgagttcaaggtcccactcaattgctccgctttcccatttttagccttttgtttatttaaatttttatagtttgagttttccgtttggttcccaagaaaatgtaccgccagcatagaaaaacaatccgaagtttcgtggtattcattgattttctaaacgcgtagttaactgggatagtaaagctagctcagttaatatcttaattgaggaagaatatgatctaggttttcttttttattttctcgctaatcaagaggagtgtaataatgcggtgatttgatttttttatgcagactgcggttgtagtggttggtggtgaagagattca

SEQ ID NO: 73502 - DNA, 579 bp, Prunus persica
  Intron number 1 from transcript ppa023910m (locus ppa02391 0m.g) derived from phytozome v7.0 (chr-ID scaffold_6; pos 14846902 to 14847480)
tgattttacaggtaacacttgagtatgtggtttcccttggttttcttgtagcatggttgccttctaagaatacagagcaaaggagggaaagcagaaaacaaatacttcagtttgattgcgtttgctgtcttataaactgcttggaaatggaaatcggttatatacacatacacactctacgttaacaccattgatcaggttaaataatatgagattgattgatcacacagccccactatcaggttaaattatgtctagaaacataaaagagaacattatatgcattcttgcgcgtgtgccgaagtgtttgttgactgatacgtgtttgagtcgatggaaatcgatcacacacacagggattatgttgtcagactcttgatttatacctttgattacgttaaatactgtctaaaaacataaaagagaagattatgcgcgtctgtgtgtgtttctcatagcaaattcaaaatgaatgctgttctgtagattataatgattgtgtgatttattgttggttcttttttctcccttgaaaatttctcaggctctggctagctgttcatactttcaaccctttct

SEQ ID NO: 73503 - DNA, 771 bp, Prunus persica
  Intron number 1 from transcript ppa006514m (locus ppa00651 4m.g) derived from phytozome v7.0 (chr-ID scaffold_1; pos 30691283 to 30692053)
aggcagctcaatatctatgtgagcttttctgggcaattttttactttttcttctatctcggctattgcattttgaggtttctttttcattttatggaggcgttctttagctgcgttacaattgtgcttatatttatattggatttttagacttttttcttcttgttattcttgcggcaatcccaaatataaataataaaagaaaattgcgcattcgtaaatgattgtaaactaaaagaaatctcttaaatcaagttttctttcttgcgtagatgattagtttgctcctatgagccttgactcgtgctcaattggtccaaatcaagtttcgtatttccttcatttggaagttttctgtggttatccatttaggtgggactcaaaagggaagggtctgtctaagatgtaagccttggccatgagttaagactttgtaaaatattttgaatggtgaagttctcttttcaaagcttgatccgtctcccttctttttgtctcagttggccctgagctaattaatgggttgtgcttcagtctcagttgcccagaaatgctatattgagaaaatagcaatgtatataactatatacattgtatatagtatatagctatatgcatatgtatgtatatatctgcactacaggtgcacttgtgtgtttctctgtggtgtacaagtcatgttatgttatttgaattgtcaaccaatagtcaagtattcaagaatcttattgtttcagggcttcagaaaaatagattcagatcgttgggtgtt

SEQ ID NO: 73504 - DNA, 671 bp, Prunus persica
  Intron number 2 from transcript ppa007841m (locus ppa00784 1m.g) derived from phytozome v7.0 (chr-ID scaffold_8; pos 11667015 to 11667685 reverse strand)
tgaaggtaattaaagcttttcgctttcccaatttcttcatattttgctctcgcagaagcagtttcaacctttaactagactaatgttttggaggcaattggaattggatttctgtttctttcttttgttttcaacactaagagttgcaaaagtttgtagttgcttttggagtacttattgaatacccaggctgcccttcaagttagtatattgtttgaattcagtaccatgggtcagttcacagaacttttataggtttctggcttaactatatataattcttattccctatgacattattttcgtctccagaaactatcggcattaacaccagcctaatgataccaagactcgtacaaagtcaaaaaagttcattcacatgctaaagcctcaaaacactgtttgtccaaaaggtttaagtacatcacagaacagacccttgggcagcattggtctgtttattagtgttgcccccatatcattatgcattgtgttttgctatatatatccttgatttccttctcgtgtttaaaaattttagaattttttgttgtatttgtgtacccacattttattttatttgtaggatagtggcttctactcaattaacctatggggtttatgtgttgtttctaggcaaggattgttcacccagataaaaatcctggaga

SEQ ID NO: 73505 - DNA, 807 bp, Prunus persica
  Intron number 1 from transcript ppa007721m (locus ppa00772 1m.g) derived from phytozome v7.0 (chr-ID scaffold_4; pos 8264431 to 8265237 reverse strand)
gtttacaggttagtgataaaattctacttatctttatcttgaaagaagaatgataagtgtgctaaaagagtctctttacaaaatgtggattgtaaactgacatatgattgttgggttgacattctatgctttgtttcattattagagatagtgaatggttagctttagtatctgctaatggcaattggatgtcaatggaagagaaagggaatttgttatctgggtttttgggatcttgtgaaagagtgtttacagtaatattgtaaaaataaataaataaataaataagtggggcttttgatattgcgatgaaccctttcatcagtaaaaccaccaacttccattgctaaagtcatcttgcacctaattctagagcacatctttaatggaaaaaaagcagcaatagagaactcttgtactacagaacgcaggtgtgataaaattccggtttacaaccatgcccagttagttgatttgagattctaattgtatcagcagttatgcttcatgtaacagaaagaatggcaagagtaagctgtgcacaacccaacttttgtctatgtattagcaaaggatttttggacaaactttgtttaggtatgggtgtcctggaacgtacgaatctgattccttggtaaaacattatgtttctactgaaaaaaatacaagcatattgatttccaattaacttgaagatgaaggttcaaaacatttggaatgtaatctctttcccctgttctttttactgctttcaaagttctccattttgctctatgctcaagctccaattttgatgtgccaatcagg

SEQ ID NO: 73506 - DNA, 486 bp, Prunus persica
  Intron number 2 from transcript ppa002046m (locus ppa00204 6m.g) derived from phytozome v7.0 (chr-ID scaffold_6; pos 7689029 to 7689514)
gttcatatgtaagttccaagtaaccatcagcattttgttcagtcttttatgtagttttcagctcatgcattcttttaatgcttccccactattacccaattaatcctgagttttgtttaagagattattttgtttgtcatgagtctgtgtccttattgttcctcttatcatctttctgcgatttcttttacattctcacacgaatggggtgatttgtataagaaaagtttattcaagtgattttgttagcctatgctctcaaattagtttcatcgcgatagaatttcaattgtttaaccttagtcactgtgactgtgcttttcttcaaaaagttgtttgtttgtttgtttttttttttcagagggggtgtgtacaaggtctttttttctctctctagggtttaaatctgtgtctatgattccagcttcatgcttgttaatccaatttgcagggttttgttgagagggaaatcactctaattggatc

SEQ ID NO: 73507 - DNA, 645 bp, Prunus persica
  Intron number 2 from transcript ppa001376m (locus ppa00137 6m.g) derived from phytozome v7.0 (chr-ID scaffold_6; pos 6990562 to 6991206)
ttcagagtgtagagcaattgcaaactgctgtgaaggtatcccctgctttacacacacaaacatatgtatatttttttaatatttgaatttggttacaaacacattgctgacttaaaatgcattagaaatataatatgcattgaacaaaaaggaattatttatgtgttattgagtattattaagtaaatttacatttactttttataattgttacaaatttctgtgatgaaggaaatgattggacttatcttaaaattttgaactaatgggattgttttatattagtcaatacatacatatatatatatatatatgttgatattattcttaatttaaaaattcgtaatttgaattgagacttggaaatatgctttagttcatttcattcaaggaccttggaagagaataattataaatatctttttgtggatgggggaatgctctattatcagctatactatcgattaagacgattggctaggtagaatagaatgtgtgattcgattcaaagtttaacaatgtagcctgttaaactttgtggtaagagaacattgccttataaaagtgtttgtatgcatgaaaatttttatgcaatgaaccaacatgttgattgtcatttcaaaatctctatgtgacaggagctgg

SEQ ID NO: 73508 - DNA, 962 bp, Prunus persica
  Intron number 1 from transcript ppa008640m (locus ppa00864 0m.g) derived from phytozome v7.0 (chr-ID scaffold_1; pos 27475663 to 27476624 reverse strand)
ctccgagtttcttcttctccaacctctcccatcaggtacagtcttatacacagaattttgagtaccagtatgttcatctacattgattaggctcatttttcattgttgttgttatgagaaatgtatgcttgtttctgaaagagagtagattgggatttgatttcatataccctgcaagtacacttgtttgtcaggagggtttctgtatgatctacttgcaaggaagtttttttttttttttttgtgtgtgtgggtataatgtgcactcgattaggaaatttacagcacagtttcggaacaaaatcccattaggattttaccaatctagttcaatcttagatagctttcaaatggtggttagtttatatttttgagtattttctggtgaatcagtcaaagttttgccacaatcagtgtaattattagagaactctactcctggcatggtagcttttccagaaccaggatatacattgcaaagcaacctgttaaggctaccaatgtagtccaacagttatttatgattttgcctgctagaaagcccaatcttggttttttctagctgtggattaaattatttaattatgatcagctgactcatttgatactttcatttgtcaggactcaggtgaggtggttttgttatttgtttgtacttgcaaatggattactttattattatgcttgagatcgaacgagaaaatcaagctactgttacaaataaaataacttgggtcttccagccaaatcctgcatatgttgtaaactcattttacgtttatccagacaaccataaatttatccatggcatacttaagaaatcataacttgttcatatgcgcagaacaatgactaggtatcaggagggttatgttgtctcatttgactggccatttttggcaggctaatctttgatattgcatattctatttcatatagatattcaaggaagaaaagggtgg

SEQ ID NO: 73509 - DNA, 662 bp, Prunus persica
  Intron number 1 from transcript ppa002131m (locus ppa00213 1m.g) derived from phytozome v7.0 (chr-ID scaffold_1; pos 37206874 to 37207535)
gttgcattatcactcgaattttgcagataatcgaggtatatgccacattgatagtgtacttcgaatttcttttgagcctgagcttttatatgatgcttatgttttgttcaccttcttaggtgttaatgtaatggttgagttgagtgtgttcattttgatgtgtagggacctttttctccaaagctttcaaaatgtcttcaaatggttcctatcaaaagaatatgtgcaaatgtgtttaaaaatattgaaatcgtatcttttaagtattcaaaactactttttggaaatctgatctcaagcttatatactttcactttctgatatttcaaagtgagaaaaagtactttatgtttgtctatatgttggctctagtgacttcaaaaactaattcatctttagttgtcagtatttacccttttatttttcaaggattgatgctttgaatctgcctgtcccaggactcaaaaaatgttaaattgccttaggaaaccacaattgaatgactcttctacaaagaaaatcttttgaatttgcttaaatttgtgctcgtgcttcattgttataggcattctctttatgagatatatcctctgaatcatttttgtatgcaatactgattcttgcaatgttatgcaggacacattgatcattctgcaagggtc

SEQ ID NO: 73510 - DNA, 672 bp, Prunus persica
  Intron number 1 from transcript ppa017455m (locus ppa01745 5m.g) derived from phytozome v7.0 (chr-ID scaffold_6; pos 16498229 to 16498900 reverse strand)
gcaaaaaatttgataaaggtttgtctgaatacttgttgccctcttatgattgccggaaaacttgacttaatcttgatatatggaaaggacttatgattctcgtaaccgaaaaaaaaagggacagaagattacagtgtactgataagaagtgaagcgaattttccttatcctaaatatagtctttttgtttttcaagcttcaccagatgcaactatctgcttttcaagcttttccaccaactcctttttagattaattatggtcatgatatgcaaacaatggagaaaacagttgtcctctcgctggtggtctgtggacattgttttctttttttcttttctttgaagtggtgtagggttgaggtttatttgatttatgctacattaaattttgctgtttaaaaatatggagaaatttcttctagactctttttaatggtttctttcgggttatgagacattactttgatgtgataaattgtgtagaggagttcattgtcaccgaccccatatagttataaaaggccttttacattctattagcttggcatgatcgataaagctttcgaatttttctggacaatactctaatgctttttgggtgcttttgtttaaaatttcacaaatgtgcttctgtagtttcccgaattgtagcacaaagtgagaagcgtggt

SEQ ID NO: 73511 - DNA, 373 bp, Prunus persica
  Intron number 4 from transcript ppa008325m (locus ppa00832 5m.g) derived from phytozome v7.0 (chr-ID scaffold_1; pos 14113041 to 14113413 reverse strand)
ttgacaataacactgttgggtaagttttttttctttttttcttttgagttaacatgctttcttagacaaacaaagcatgtcaaaagatttcaagttgtgtgtttagtaattttttattgttttccttttctttctctacgaattggttgtttctttcccaagttgtgtagctggtagctcatatgcatatccacatatttatattaatgagttccctaatatacactatgatgaatggacatcttcgagtagtgtgagtcaagatattgatccaaagtttacctatttttttcttttttcctgtgtaatatataacactccttcctaatattcttcaggtaccaatcaacattgttaggttcttttcaaaccg

SEQ ID NO: 73512 - DNA, 420 bp, Prunus persica
  Intron number 1 from transcript ppa014234m (locus ppa01423 4m.g) derived from phytozome v7.0 (chr-ID scaffold_5; pos 4092658 to 4093077 reverse strand)
ttgccttcttcgttgggagaaaagctttgctccaggtacatatttcaattttcgattttcttgatcagatttggtttattttaattttatttttgttggaattaaactagaatctctagattaggaatttaaggaattaatagtttccaaggggattaagtttatttcttaggtatctatgattaagctattcatttcaatttgtttcaaattgttggtaggatttcttattttgagggtttgatttagggattttaatcttctcatatatgaaaattttgactactacttttttttttttggtcccgattaatagggacagaatacaaggagaaaatttgatgccacaccaacttgcttcaacctcctccctctttggggttggttctagaaattgatggattacctatgcattgacat

SEQ ID NO: 73513 - DNA, 914 bp, Prunus persica
  Intron number 1 from transcript ppa008072m (locus ppa00807 2m.g) derived from phytozome v7.0 (chr-ID scaffold_8; pos 20235860 to 20236773)
aatctttgtgttcttcagccggtcccgtgtttcaggtacatccactttctctctctctctctctcatgagcaaggaaagaatgatgtacgattagagttgtttcagttgtatttcgaccataattttgccgtgaattgtctgaattttttagttaacattggaattattgaatacccacttttccttgtgttgaattggagatggtttttatgttaaaggtcaagaattgtagtataatactaggtctccagtttcaaagttctgtgcttgtacatcaattggcgaatgaatttgattgattctgtttttgggttgaaagttgaaactaaattttcatacttttgccacataagtagtaatgcatgtgaatcaaacccaatttggttgcatgaggcctgaatcatgcacaaatggtggagtctgattgcagtttatgaattacctattagctattttcttctttgggcgtggtttttgttttcatatttgaagtaatgctacggcggatctcttacctgatgggttttcgtttagtgtgtgaattccaccttcaggcaaatagttatgccatagctgagagtgatgtctgcttgagagtttgcaaacaaacaatcagcttataattgaaatgttatatgtgtttgtctgcggtgtttgactttgagtagtctgatactgggggcgatatcttaattactggttatacttcaggtggactgacggcagaaaattttcagcttgaacctaaatgatgtaacacattaaagtttgttttgaatatcatgtctataagctattatatcatgaatttcaaatttttataatatctataagcattatcatgaagtcaaatttttaacttttttgtttttttttagggatttctgcatagagaagagaattgttttgttta

SEQ ID NO: 73514 - DNA, 855 bp, Prunus persica
  Intron number 1 from transcript ppa001522m (locus ppa00142 3m.g) derived from phytozome v7.0 (chr-ID scaffold_7; pos 21501037 to 21501891)
ccgagtgcctgaagaggaagccaaacgatcccaaagtaattgtcttattttttttgaaagctaaagtaattatgttctagaactcaatttctgaaatgattctttttaattgggtttttaatttttaattaacgggttacgttgaactggttgtttattttgagttgattacagctggtgtttgggtctgtgttggatcttgtatcagaattttaactgcttttgacttataggattgcgcagcttaataagattgtagtaaagctaatgcgggttaaatcaaaatcttgactgtattatatattttatcgaaatagtttcgtcacaggctgtgcttgatatcatcttctttgaagaaaactggttgccgccccatttgagtgaaggtgatcaacaaatataccctcggtggttaaaggataaatggtttgtagtagaaatgtgttgagaaatgggaaaaataaaaaacaaacataattatgtggtttaccaaagaaatgaattctattataagggaatgaatgggttaaaatagcgtgatctagaacatcatttcattttataataaaatagcgtgatttattataaagaatatatagggttttctttttggtaattgattgaataaccctagctttgcttcaccaacagtccctatctcaagtcgtttgcaacaattgtaagattcttttacatagattgatactgaattatgttgcctcttgattctgcattataattcaaatggcttatggatatttattttgtcaactttttgcgtaccccttataatcttgtatattatggatattcttattagatatttcataatattggacttgcggaattctatcg

SEQ ID NO: 73515 - DNA, 631 bp, Prunus persica
  Intron number 1 from transcript ppa012499m (locus ppa01249 9m.g) derived from phytozome v7.0 (chr-ID scaffold_5; pos 17904638 to 17905268 reverse strand)
caaggcaagagaggggagaagacttggacttgctggtcatggattacaccccagctagaaagaagtcccccattcataactaaatatatatttaattatataatatttattatagtgagaattaaaaatgtaaaagttttatttcttaaatatttatagaaaactatgtattatagcagggttcaataagacccgggaaggaataatggtgtatgcagtcgtatttatttgccacgactatatacgttccattgcatggcagaattaaacttttcaatatatatatatatatatctatctctcattttccttaattattatctgctgctaatttgtgagccagccaattaattatacactgactgacgtgacaggcaatgatcaaggatagttcttttctgtgttttgattgaaggagttagttactcacccaattgcttgaacttaaagatccctttcctctccttcccgcccatttctctctggattcgttgttttttgtttctttgttttgtgctgtgaaagcagtcgtcgtcaaacgttgtcgttgccatgatataattgtcgtcttttggcctatgtatgcaaggatttggctccaattgtcaaccttcaatataggtttggaact

SEQ ID NO: 73516 - DNA, 797 bp, Prunus persica
  Intron number 1 from transcript ppa010444m (locus ppa01044 4m.g) derived from phytozome v7.0 (chr-ID scaffold_7; pos 17672860 to 17673656)
gaaaagaagtccactgccaagctccaggactccaggtccatctctctctctctctctctctctctctctctctctctcaaacaatgattttctgtgctttgatctaacagattgaaaatgaggttgggtttagggttagggtttttatatgacatcgatttctaattttgctttcgatttcttcaatcggttgattgatgcatctgcatttgtaaagaaattgaactaaggaaatgtaagatgttaattgggtccttgctattttaaacaaacattatgttaattttacttaggaaatcccagtgtaaaaaaaaagatagcttatttattcgtttctgatgtcttgtatcgcccttttattcagaattttggtaatcagactttgaagtcctaatcaaatgaaaactataatgaaaatggggaagaatttttcagaagactgtattattattgtgcactctgcgtcctctaagatatgaattatgataggccttatatttttgttacattggccttgagacgagcgtataataacacttttcaagtattccaagcttttatatttgacaggactcccaaccacatatcagttactcatttaggaattaggaagcaattcaagtcctaaatcaatagccttttaactttataagtttttcttctccttatatttcataatagaatctagtgcttctcagggaacagaaagagaggtcctgcttttgactgtcttctaaccattttgttgcttctgctgtgcagatcagtgaggaagatcgtgaacctggataatcaca

SEQ ID NO: 73517 - DNA, 760 bp, Prunus persica
  Intron number 1 from transcript ppa025037m (locus ppa02503 7m.g) derived from phytozome v7.0 (chr-ID scaffold_5; pos 697008 to 697767)
cctgaaactgccaggtaactaattatttttatttactatattgattatcatttgtttgacattgtgggttggattttatttatatatgtatgagttcgtcaacatctgtgcgtctcatcttggttggttgtatatgcgagctataaaattttgaacaaaaatattggtaagatgtgtggatgaggagggagaggccagcggggtttaacaatgacaaataaaaatgtaagcctagagttaaattagttgaactgattttccctccctcgactcttctattggtaattttttggtgtgatggcgacacagccgcacagtattattaatatattcatattatacgcgtgtgtactatatcctaaattcaaagttgatatgagcagacggcaaaaaaattgaaaaacataaaaatattttgctctttctcattagagttatcatagatgaggattgcttcatccgccatttcatttttgccaagcgatggaggtgtggatttgtatgttatttttattgattagggagttagagaaataggttaaatgagagtatgtatatgagaggttcaatcagtaaagcatatttggtaatttacaaatgggtatgataattgttattttattttgaaataagttgatggagatggatgttcataaataggaattgcatgtcatgcctctgtttcgtatcaaacaacaaaatattgacttgcaaataaattcctttgtttgatctagatatacagcattggtggagctaa

SEQ ID NO: 73518 - DNA, 408 bp, Prunus persica
  Intron number 3 from transcript ppa013740m (locus ppa01374 5m.g) derived from phytozome v7.0 (chr-ID scaffold_5; pos 12475265 to 12475672 reverse strand)
tcatttctaaagcctttcaggtgaagaactttgcttttctttgattaagctgttgtgcttcttttgattttctgtcattaagaaagagacctgctttgatatgctaatgagaatctgttctttaaaatgaaatgaatagacgtttacttgtcactagattttggatgaaatgaggaataaaagtttagccttcgtgtaagttgaaatgaagactcattcaaacttgattagccaagggaaggaggcaagtagttgttttctgtttggttgagggtttttatgttctgcattgtattgatttggttaatgtgtatattagatagtcttgttctggatgtgactatgatgagaggattgcaagaacattacttgattcgactatttcttttcctaaatcatagggtagaa

SEQ ID NO: 73519 - DNA, 410 bp, Prunus persica
  Intron number 1 from transcript ppa013740m (locus ppa01374 5m.g) derived from phytozome v7.0 (chr-ID scaffold_5; pos 12475966 to 12476375 reverse strand)
catgtaattctcatatcttcaacatttctggcatttacgggcctttgcagatgatcattccactacccatttcataattaaagaaaaagtttcgatttttttttaaaattttcaaatattgggtttttctcctttagccagattcattgttaattactgggttttagctatatgttgtccctgatcttgtgtgatttttgaagtgggtttctttgttagccttttacttttcttacagcaattctttctttaccaattgccatttacttctttttgggcctcattgatggctttgattgatcaccgttactgctttttatcattggtttcagctgtttgatcctttacgtaatcactgccctgttttgtcaacaggaattgcgtccaagactagttgatagccaatttta

SEQ ID NO: 73520 - DNA, 485 bp, Prunus persica
  Intron number 2 from transcript ppa007081m (locus ppa00708 1m.g) derived from phytozome v7.0 (chr-ID scaffold_5; pos 17835947 to 17836431 reverse strand)
gccttggcgctcgaattccgccgatcccaaaagtgagccttcatttcctcacactaagcttatatttttctacaaatttcagttttttctatgtgtgcacatataatttatgctttacatgcatattaggagttaatggactcacataatttaagcttttctgcggatgctgtgcttctaagattgccaacttcaaattcgtataggaactttggtttatttgtatttcaactttcagtaggttttaaaagtgacaggaatttcggattttcccccctatgttggtgttggttttagaaaatttgacatcctattttatgtatcagcacaggcaagaaaatagacacggtcactcatagtgctactttgaagaaattccttaaaattttgagcacaggtttttattctttttatttttatgttggtgtggttgtatattttgcttgatatggtgtagtgttggtttctataacaggataaagttg

SEQ ID NO: 73521 - DNA, 987 bp, Prunus persica
  Intron number 1 from transcript ppa002559m (locus ppa00255 9m.g) derived from phytozome v7.0 (chr-ID scaffold_2; pos 7280645 to 7281631)
agaactcactccattggtaatgtgtatatacatacatacatatattatatatatatatgtgtgtgtgtgtgtgtgtgtgtgtgtgtgtgtgtgtgtgtgtgtgtgtgtatgtttatatcaaatatgtctaaatacaaccttcagttgtgtttggtgcacatcaacataagttctccaatttgtagtgtccgtgtaacttatgaaataagtgccttttgtctggcatagtctttctcatatgttatcatgcatttgattcctgctttagctccaaatcaagcaattatgcgtttcatcttcttgtgggcttatagatgcctttacagaggagttgaggtgtcaatattagtctttatacttgatcaggaacttttcactatcatgtgtgtagatatacaagctatgatggaactgcaaaagtcttgtagctcaagtggttaagagcatttacccctgtattcaaggtcctttgtgttgaatttctagcttggtacaaaaccaaggaaacaaaagtggaaaatatgactttgactctgaaaggagtaagacctgtcctcgtatgaggttgggtcttctttatgcagttaagaaggctttagtttgttctcccttattcctttcattttccttcgcattctttgctgccttgctggggagtaagagactttctgtcatgatgttgggttttctgctttggtttgttgtgactgattctttttatggcccattctttggttccatgtgctctctctctctctccccctcccttgctctttttattgtttaattctctgatgaccttaatttaaggaatgcatcaattcaaccagataacataaatcaaatcactagacatgatttacagcaaccagaattgcaggaagagaaataacatcgaatgcaatgatatgataagacaaaatggagtgatgatgtgttttgatttgtgcaggcagtgtattgagtggtggtggcagtgcacccctt

SEQ ID NO: 73522 - DNA, 950 bp, Prunus persica
  Intron number 1 from transcript ppa002980m (locus ppa00298 0m.g) derived from phytozome v7.0 (chr-ID scaffold_5; pos 768483 to 769432 reverse strand)
ggaactccctgctcacacttttcaggtacattgttttttataattgtcaaaatgtggtcttttgtttgtttgtgtattttagttctcatctgcctttactctatatttttgtttttggtaaattattatttttccaagggctgactggtgaatcattgttatttattatgtgtttgagtgtgcgattcctttgttttacaatgttgtcgggggattttgtgtttatgggtctctgttctctaacaattgtttttgtaaaaagtaaagtaattcttagaaggacttcagagcttttgtttccggaaataatgtaaccttttattttgcaagaaattgcacttgttggattaccagttactttaaaatctttatttcgaatgcattaagggtgattattcgaccctacctgtccgatgataactgagccaaagaaaagaagcaattaagactttgttttacgtttttttctgttgtattaggctcaatttagtgcaggtcttctttgctaattgggttcccattctaattctaaccttgttcttgagtgaaatcattaatccaatttaacacaccatataactaggtttcataccggtgatcatgtcatttgcaagaattgaaagttaagttgttgcagtgtgaacttgaaaataaagttaaaaaatggcataagtggtgatcaaacataaaagggaactattgaagcatcacgcataagtcataagtgggtaataatttatgtcagtgctgttgttagatactcaagcagatttgaatagacaagtttgtattacccaagtcattaccggggattggtggatccatgttttggagaaacattgagagcttgtgtgatgtttcatgcctttctgatactcatttccctttttttttctttttttttttggtgctcaggttgtggctataacggtttttttcctgctaactgt

SEQ ID NO: 73523 - DNA, 523 bp, Prunus persica
  Intron number 2 from transcript ppa013843m (locus ppa01263 8m.g) derived from phytozome v7.0 (chr-ID scaffold_1; pos 36005222 to 36005744)
tgatctggcagtgcatcatccctggcaagagctctgtgagtcctcttcttctatttcctctaagaattttgcaggacaatcagagatatagctaaagttggggcctttagagattttaatttagaaattgttgtgttacattagatcagttttcaaattttatgggttttctgatacgtatgatcaaagccgtcagagattttattctacttattctagtagagtatctgaaaactatataagaggggctaataataattgaatgaatactggaggtgggaggagtgttaatttaattatagcaacttattgaacacattctaccgaagataagttcacatcttttgcttcatagagactgacattgggaaagtttattttcatgatagtggttactggttgctggtgtaacattcatatcagaaattttcttaatatctttttttgttttgttttttgttttggtattgatcttgttgctattgcagactgattgggaaggtggctactttccacttacact

SEQ ID NO: 73524 - DNA, 678 bp, Prunus persica
  Intron number 1 from transcript ppa000150m (locus ppa00015 0m.g) derived from phytozome v7.0 (chr-ID scaffold_3; pos 21565754 to 21566431 reverse strand)
cacacttctccaccaacggttcgtgttcttgggcttttctcaatccatatctcttcacattgcttcctttctcgctatttatcattctcattcttgttattcgcatatatatatatatatattttcttttctcctcgatctttctcgctattacaaattggtcctggttgcaataattcgtcagtgtacctatacaagtgtttatacatatctcatattaacatacatatctttatacttctatatctattattcgtccagctgattaattagggttggtgttgttgattcttttttcttagtagttttatattatcttcagataacatacatgtacgcctacatgtatatacacaatttatatttcatgcattaagagcttttgaatgttcatgatattgttattgcattgtgttttgttgtttatttgtacacaaaatttgggattattctgttgccaaggtgttcctgtcctttgtctttcattggtagtacagtgttacagtctttctgtccttggcttgtgattttcattagaatttcagtagtgtatcgaacactgttatttccccctattttaagtttacctacggtgggtgaactgcttggattttcatattatggacactctgctttccaaaaatttaagtaaatgtatctctctgtttgccatgttag

SEQ ID NO: 73525 - DNA, 496 bp, Prunus persica
  Intron number 1 from transcript ppa006941m (locus ppa00694 1m.g) derived from phytozome v7.0 (chr-ID scaffold_8; pos 3307612 to 3308107)
tgagtgggtgcatttcgccgcagctagaagctcaggttcaccctctctctgtgcctctctctgtgcctctctccttctctctcacacactagtttaagtgctggtttgtttatcttctgagaaaatgggatttcttgtcactgcgatttttacatgaaactttgttttggtcttgaaaagagaaaacactgatggtttcttttgctcatattctagtatttttccgcttatctgtttatctctcgtttcgttggtgaattttggtagaatatgttttcattttgtttaaacatcttgtttccgaattgatttgaatatgtggagcttgtttgttgttatgatttcttcggaaaaaaaaaagttatagttttgctagatagtgagttcggttgaagcatatatttatagatcattttgtctcctttaagatgaagtgttaaatcttggattttatgtggacttattttttattttgatttttgaatgaaggaggaaa

SEQ ID NO: 73526 - DNA, 570 bp, Prunus persica
  Intron number 1 from transcript ppa003934m (locus ppa00393 4m.g) derived from phytozome v7.0 (chr-ID scaffold_5; pos 9087769 to 9088338)
acgtaacgcattacccacaaaaaggtatttgttaatttcctttcttttccttttaaatttgtttagaagtttatggttttcttgtttgctgtgtgagtttagaattgagaacctgctgtgtttctgatttgctgattgcttggttccttatctgtttttggatattgtgggttttattgcatttggtcttgtgatagataattctggtgataatctgctattagggtgcatttgatttgttcctgttttcttactgatagaatgcctatatttttttttactaataattggggaatttggtggatgtaagatgatgaatttggtttggcacaccccaaatcgtgatcttggttctgctcttgcacattaacatcaatgattaacatttgatcttgtttactttttagcttgataacttattattttgtttccataggaattcatgttaatatggttatacatgttgtctcatcatgatgtcaatggatctctcttttataaaactatggaaatagaaaatgggaagtttagttggctctatcttgtttattattacagagataagctcaa

SEQ ID NO: 73527 - DNA, 832 bp, Prunus persica
  Intron number 1 from transcript ppa004208m (locus ppa00420 8m.g) derived from phytozome v7.0 (chr-ID scaffold_1; pos 29608144 to 29608975)
ctgggttacaagcaagaactcagtcgtaacctctcgtatgaaacctttaccctatccatccatccatgaatatttaccttctgtttaatttgtggaagcacttttgacttttctggcacttttcccacatcacaatcacatttttcagttctggatgaatgtataaaagtctcttctttttttttcacagccttggacttttagtcgttgaatatcagttctgatatttctgaagccagacagtactcataatttaatatgatatgattgttttccaagaaattaaatgacataattttgttttattattagtttgcttgtcacacggactcagtgcttggacaggaaagttgtatttaaacgttgcttgggtttcttgcaatccttttattttgcgtattttcctggccgttgtttttaaatattgttgattcaaaaacgtcacattggattggagaatgactgactttgaataagatataaacttgacataaatatctgaaaagtagatttctcatttgattttgattgatatctaaaaactaaacagtgcagaattggggcagccaatcagatttagtaattagtatttacaaacaactgataataaaataagaaacgacacggggatcaatcagaacaagccaacgcaagaaatctatttaaaatgtgtgttttagtttaattatggaatcttaaacaagtcaacaaaaatccaaattctacataatctcatgtaaatcgttttttgaggccttcgattcattctgtgcttcttgtcttcttgttgtgtgcagggcaattgcaaacttctcggtgactttctccatca

SEQ ID NO: 73528 - DNA, 545 bp, Prunus persica
  Intron number 1 from transcript ppa007525m (locus ppa00752 5m.g) derived from phytozome v7.0 (chr-ID scaffold_8; pos 16263126 to 16263670)
agcatctctggtaaattctattgaccagatgagtagacagtaatgctacaccagggttaaaacttaaaaaaagtgaggaacaaaattattcttctagatactacggtttcttgttatgggaaacaatatagaaaagataatcaaaaccaacagccaacagctcacatagctttggacaaccatacaagtggaacaaccaaagaagaagactaaataaaatcgatgaatgcaattggaccagcaagacaagatgatcaattatgactctccaccaataattcaatcaaatgggcgacccaccaagataaaggtaatacatccaaatccagtcctaatcaaactcttgtcaataattattaaaaatttatgcactgatgaacaataatcagtttttgtacgcatcaatgggtgctgccacaataaaaatctgttgtctgacgttacaatgcttcctattatgcgccacaaaaaccttttacttttctctgcatagcttgctcctatttacagccagaaaaaggcagaagaggaggaagaagaagaag

SEQ ID NO: 73529 - DNA, 979 bp, Prunus persica
  Intron number 1 from transcript ppa006535m (locus ppa00653 5m.g) derived from phytozome v7.0 (chr-ID scaffold_1; pos 28814429 to 28815407)
caacaccgaagagtccagtatcgggctcagaaacggtactgcttactcactttatttgatttattgttctcaggatttcgtttcgttcattcttgttttctatgcctaatttaatttaatcgaattgattaaattgttcatttactagtttttttgttgttggaaaagaatgtttatttactagttacagtcgtctagaaatttcttctaaaaactggccatcagtcacgtgtgtgtatgcaaagtatgtgattcaggcattaacgtgtgctttgaactgagtatgaaagtatggtttggcgaggaactaatgtgggtaaatttctgtgaaaatgtccaactctctgatggtaaatggtttgtctcttcaatatatgtgattgtaactggttaatctgatcgatttttggcaaggactatattttttgttgttaaaattgtttcattttgttttgattgaacaattcatatttggcttcctagtaattttagtttccttgataccactgctggcatcaataagatatcttgagaaagaaaaatcgtttataattttattttattacaaaaacattgtgtccacagggttatggaatttataacagccccttgtggtgcatggttatttgttcttttacttatggtttaatctctgaacagtataattgcatccattaatttatggttcattgtcataatgctgtcaaatggtagaagtggagggtatcagcatggttaacatatattaatcatgtatggaaataaaggttgcatatgttagttggtgtatggttttgatgtcacgttacctttacctgaagcatgaaatgtttatgaatagtttatgtgccatggatcataatatgcatataatatttgttaagtgcttttgttgagatatgggtagatgagctggtggtaatttgttactttctacatggcagtacgatcttttggaacagaaggaaggaaaaaggat

SEQ ID NO: 73530 - DNA, 418 bp, Prunus persica
  Intron number 2 from transcript ppa022420m (locus ppa02242 0m.g) derived from phytozome v7.0 (chr-ID scaffold_7; pos 17890108 to 17890525 reverse strand)
gatcactggcctcgtctgcatcacacctggtgcaggtaaactagtccttgctcaattcacataatgaatgaagacattctcttgcacaaaatcatgacatgttatgttatcaaactatctctcgtccattttgttttaaagtgtagtgtcaaataggttgataatgaaacatttatatattatatatggcaagaaaacatagcataaacattgctttcataaggccgtagaaaatatctttcaagaacatgttttttggtagctgcttgtcactttctatgaactgaagtaaaacaaccagacaaaaacatgacggttatgaatgtttatgaactgagttttgatttaaaaaagtaagaagaagcaattttgcagcatcccaccaaataatatctacctgcgcagggattgtggagcc

SEQ ID NO: 73531 - DNA, 492 bp, Prunus persica
  Intron number 3 from transcript ppa002318m (locus ppa00230 3m.g) derived from phytozome v7.0 (chr-ID scaffold_3; pos 20594047 to 20594538)
aggcttatagtcgtcgacacgaaatatctgttattgtgagtagagatgaatttcttatatatgcttggtatcataatgcttaagttggtcttttgttgtgatgctttatgcagtactctgttatttggtgcgatattttttcttctatcttttatccattagtaattgttggtttagtttgattcttcaaataaagaattttggtgcaaaatgcacacttttcttgcatgtgtttcactatgaaagaggcttctcatgtcgtattaggattcttcagtggagttatgttgtcacttctcttttataggctgacatgcatgcactcctatattataattgttattattatcaacttgtctatatatggtacgaatttgtgattccgtaagatagttggtttgtttagagctgctgtgattttggttacggttatcttgtatgtctgaatgatgttttgttttcttttgatttgcctcatttgttagggtgata

SEQ ID NO: 73532 - DNA, 362 bp, Prunus persica
  Intron number 1 from transcript ppa003613m (locus ppa00361 3m.g) derived from phytozome v7.0 (chr-ID scaffold_7; pos 18474925 to 18475286)
ctcaacttcgatactcttgctgccgttttcaacaggttaattttctctgtttgattttaatttattagaagaaagcctagattttcaagccaaaacctttttattgtagcatggattgtaattttgtataattgaggaacaaaaaaaggaccaatcaaccaatttaatgaagattttgtcacaactttaagatgttgatgggcatttgtttatttgttttgaattattctgttttttcttcttcttctgttgtttacccaatctgcctagtttcatgtaaaatattgataagttgtatatgtgataaatgggaggttcactgctcaggtctagtagatttgcaaagcttctaaagattcaat

SEQ ID NO: 73533 - DNA, 554 bp, Prunus persica
  Intron number 1 from transcript ppa007365m (locus ppa00736 5m.g) derived from phytozome v7.0 (chr-ID scaffold_4; pos 12073920 to 12074473 reverse strand)
gccacctcaatccaggttaaagcccaacccagaaggtaatatttgtgatgccaaactcttatgcccttttattccctggttctgatttgtagcttcttgtggtaaattgttcatctttttggtttgtttgggagttgttggatctgggtcttgtagcttttgctgataaagtgaagggagagggagagggagagaaacatcaaagtctgaactctttttctattttgtgttttcgattggtaattcattcaatatttgttgtgttcctgattagtggctgtttaattcgaacctgggattcttagttccctaactaacgtatttggtttataacagtggaaactgagagaaggtgaatataactaaattttgattttgctactttttactcttttcaatcactacataatgaaaatttcaatattgaaatcttttttgctcttccgtaaaaaacttgcagtgatattgaacgcaacaatggtgttaggttgttcttttttaattaatcagagtttcttacaatgtggccttaggtgattcacaattcttggagg

SEQ ID NO: 73534 - DNA, 711 bp, Prunus persica
  Intron number 1 from transcript ppa004285m (locus ppa00428 5m.g) derived from phytozome v7.0 (chr-ID scaffold_7; pos 20126868 to 20127578)
tttgcagtccgctagcagtttttgtccagatccaggtttgtgtcctcttctcttattcttttctttttttcttttggtgatttttccgtccgttcagatcccggtccttttggttgccgagaaatttcggcggaaagtttatttctttgtgttttatttctatttggtgtcgcgagtgggctaaattgcctggcacaattgaaattcgggtcctgaaattgccaaatcctcagattcgatttttgaatttcgtttattttagtttatggcggctttttttttttaaaatttttttttttattattattacagacgattaagcttccagttttatgaatttggagtaattttcgatttctctgtgaaatcagtattagttgcataatggggtcaagtatttgatttctgggtgatggagaagtgagaaatccacaaaatgaatcaaaaattaaaaactaaactgattttaatgatttttgtgtttagagtcgactatgttactactagatttctcaatagcttaggtgattatgtattttattttctaattgaaatatgactttccctttaggaagttccaattagactcttttgggctctgaaatttggaagttcaatatcgttacaatatttatactaaaatagttagctatagttccttttggtgggttatacttacacatatctaatttctttattggtgctgtaggg

SEQ ID NO: 73535 - DNA, 998 bp, Prunus persica
  Intron number 1 from transcript ppa017153m (locus ppa01715 3m.g) derived from phytozome v7.0 (chr-ID scaffold_4; pos 7867048 to 7868045 reverse strand)
ctctcagcctcggtaacaggtttgcctcacaccacttttatcctcatccttcaatttcaggcttgggttctgttttcatatgaattagaacgaatacaagtttcttttttttttttggggtgtggggggttgttttatctaagctcaagagtctaaacatggttcttatgtttggattatctagtagggtatagcgaaaatgggttcttttagctcaacccacttgtgctgtatgttgaaaattgattggcgtatgattgagacaacttcaggtggttggaattaagttttagttgcagtaaatgtaaggtcttattgaaggctcatgtggcctggtctgctggtcgtcaccatagtttgatatcaccttgtggagttcaattttgagattttaacttggttccatcgcaatttaaggagatatcccagtgattttgttccatgcacaccatattgtgtgacttccattcccacgatcatcgtgcattgtgctttgtccaaccaaaccctttgctccaatacagcacctgttagtggctcaagtgattaggagacccaccttgttccaatattttcacaacttaaccaccttctggagttgatggtttaacttaaaagtccttattggaacttaaggagataacctgctaagcatatccaattctggacgatcacctatcctatttaagacaattgtatttaatccactattcatagctatgattgggtgcactaacatttggcatttctggagtccttcagatagggcttgttatatccctcatcaagcactaaacaaagccactagttaatgagagtctacttagaattgaattgacgtcatatatggataattgattcagttatgacagaataggcttagttaattgaagtccagtgttgtgtaaaagatgtgtagattgattgctacagctaacggtattattcttcctatactggcttgtgtcttgcagattttgtggtgacaaggcaaaaaa

SEQ ID NO: 73536 - DNA, 891 bp, Prunus persica
  Intron number 1 from transcript ppa003922m (locus ppa00392 2m.g) derived from phytozome v7.0 (chr-ID scaffold_7; pos 7155554 to 7156444 reverse strand)
gcctcagagttacaggtatgcatcttcctttcaccccttttgataactcattgggttattcttaattggttccattttgatatcaagagatgtacactctagaaatctcctgctatttgatttgtttttgtcataacagattatgtggattaaaatttaagttaattttgtaccaattgtgtgataagaattccgtctctgtttcaattatgcataatttttaatcagcaagaagatgttctgtatgctgcgccgaaaactaatgcagaagatgggagaaaagaaaaatatggtccaccaagaaacaaatgttttagttcaagtgtttgagaaggagattgtaccaaagaatggcagaaaccaattcaaaagacttcacgtattccaattcattatttagagcttatttttccacatgagattgtatcaaagaagacatttatcttattgcacgtaccttctctttatacggtccttcgtaggcgcctaccaaaggtactaaagaatagcagaaaccagttcagttgatgtgcctctttatacggtcctttgtaggcaccccattaagttctcaatgaggtacatcaactgaactaatttgtagtagcgtgacttgtgagtggatgttggctcaacaagaactaaatcacttcattgtaagataaactaaatcactcaactatgggagctgaaataggttgatcatgtatggatcgtctcgcctcagttggataaattaaatatctagtacattatgcatcactgtaattttgatttattttccagagtagtagttatataatgatttcttagactcatttttcatcacattgtattttatgttattttttgacagggaaacaatcgattcttactcaatcgcagcatcac

SEQ ID NO: 73537 - DNA, 906 bp, Prunus persica
  Intron number 2 from transcript ppa005846m (locus ppa00584 6m.g) derived from phytozome v7.0 (chr-ID scaffold_3; pos 9665641 to 9666546 reverse strand)
attttgaggctctttgtggtttcatcagtcttgaggtaagacactgctggttttcatgttttgttcttatattggaaatttcaattgatttactgttcaatttgtgttatttaatcttgtaaatgataagaatcataagatagtgtgtgactgagaactgggtttgcttttgaattgtttggttgctgagtctttttaaaacagtcattagttttgactgtttacatgctccctttcttgttttaatttggtcattaaataattgggttgtaaccaagtttggggcccaactgaatcatttgccattatttgcagaaaaattggtatgaaataggaataacactattttgctatttctattcaattacatattgtcacatgtaaaaatgattacgcgtgacataacgtgattgactgcggatagaaaaatagtactatctccgtctgagaactatggcagaagttgatataagaccaaaaaagtaaaaaaattacttttaatagtcatcattggtggaagttgttttttatttgaacttcaaactacatttaaaaattgaggtcaaggcaggtgtagtgttactttctgttattcagagactctacctaagacaccttttttctttcctaaagctataatataaacaaatattgccttctctgcagagatctccatggcaataacagcttacctactatgccttgccaaatatctggattgaccaacagtggaacattgtgccttcattagtactatttaaatcataatgacaagtttaattataagtttttcggtactaatggcaagtaagatctttctgtatgtcaaatcttattagtcctcactgtcatttacttggatctatttgctattttctatccaggagcttaaagttgtgcttgata

SEQ ID NO: 73538 - DNA, 606 bp, Prunus persica
  Intron number 1 from transcript ppa004851m (locus ppa00485 1m.g) derived from phytozome v7.0 (chr-ID scaffold_7; pos 5283343 to 5283948)
gaatttgagtacaaattgagggtttattgtggttaaaattcatattttattaaaaaaaatcaaaatggaagtgtctgtttgccactcgcctacctacctatgtggtttgggttttctacatagctgtttggaaattaatttttttggcaaaaaataaattagagacgctgatgtgatgactactatgacaatgtgtttcagctgattctttgaatgtcattgaccaatttacccatacgtttccaaatgacatttatgcccttctcttgtacttcaatcgactattgttctttggccgggggcgccaacaaacttcatttgactagttaaggaccgtcctgtcttttccatcaagagcatatttgtccccaaaatttccactcaaatttaaaaaatgaaaactcaccctgagaataataactgccagaaaagcccatcgtgaccgttcaagcctagaatcctacggcatccaaaggctctaggatgaatatggagggaagcaacagagaccgccagatctaactcttcgctctcactcttcgccctcacttgcgtatataaacctctgtagtgttcatcttctccgctcaaatctctcatttcaac

SEQ ID NO: 73539 - DNA, 960 bp, Prunus persica
  Intron number 2 from transcript ppa006368m (locus ppa00636 8m.g) derived from phytozome v7.0 (chr-ID scaffold_4; pos 10309135 to 10310094 reverse strand)
ctcctactgttggccttcctcaaaccagaaggtaatttcagttttcttcttcttcttttttcttttatcttctgggaagatttgctttaatttaatggcatcaattgctttttttactttttgttaatgggttttcttgttttgatcgaattcttgtcttggatccaagtgctgccaatttgggtttgtgggttcttggcttttatgtagttttgtttcaatctgcttttgaattctttttgaagtacttttgtagatttgttcaattaaataatttgaacatgcttcatccacttgaaaatctgtctttctactttcactttcttaaagtttccgggctcaggcttttaagtttttacaggttagtgaattctaacagggaaagtagaaatcagtccagaataaataaataaaagtaataataactggagcaggagcaatgtgtgtaccttattaggtaaggaactactttatccgagtcttgccaataagtaatactttgcccacaattaggcagtcactcatcggtctacatcagtacattaacctcaaatacctatcattctgctttgacaaattgcagtatattttcttccgtcatatgggttaggctagtttgccaaggcaatgagttcgctcccttgtacccaagttcgagtccctctccctgtagattagattaatttagagttctttgtataaaataaatttgataaggccatgtttaatagtgacagtccatttgatgcatgtgttggattatacactgcaagcttgtaaggcaagaaaacataatgcccttgagggggtatttcaatctaatcatgttcatgatgcttactcagtgcactgtgaccttcctgttttaaatatgtcagacagcaaataaatcattgattttgctataaaattcactttatgacagagcaattgctgaatatctgtcccgtgatcttccat

SEQ ID NO: 73540 - DNA, 506 bp, Prunus persica
  Intron number 3 from transcript ppa009974m (locus ppa00997 4m.g) derived from phytozome v7.0 (chr-ID scaffold_1; pos 8884459 to 8884964)
gttgcccctgaaaaaccaacccaacattactgcaggtaattaactaccatcttcttttaattaaactcgaaattacttgctcagcatttagcactcagtcattaattagtaatgtgtgttatgtcggtccaactatgccgcccctttacactcaagttcgaatacccctctctctaaattaatctaatttaaggtagtttagattatcgtttgtattcaaaaactatgttgggtttaggccatggtgagtatttatatgtaccaagtagtcctccttccttggtccattatggcatgcaagattttctcaattttgttttctccaattttattttctataagtttgttcaccaaatgatgtgacatgtgacaggggaatgaagtttagagtgggctaggacggaacaaacaaatgatacatggttgggattgaaaattttggatattttttatgtcagtattagtactaattggagtggtgtttttacagatttctagaggaatta

SEQ ID NO: 73541 - DNA, 475 bp, Prunus persica
  Intron number 2 from transcript ppa006856m (locus ppa00685 6m.g) derived from phytozome v7.0 (chr-ID scaffold_1; pos 29733495 to 29733969 reverse strand)
ggtgaccaagtcaccaaacaagctaccattggtatttctttatcttttttcgccatcttaccctatcaatcttcaattttgcttttttactgatattaattttctgtggccattacgtattatcttagtatgttaatttggaatcttgagcttggaatggctaaatctaggaaaattattgaaggaattttgatttgagctttttgacttatctggttgtagtgataaacacaatcagtggcaggtttctggactttggaaatacgtttcttcaactgaacaatttttccatattaataaaagaaaatgataaaagtggagcaatgcaactatctagtgccttgttggagatctgatttttatggtttttgtctatctatgcttcaatttgcgatttagttgcatagttccttctcccgtgtggcatggtgcctcatgctcaagtgactaactgcgacttcataatgcagctgga

SEQ ID NO: 73542 - DNA, 818 bp, Prunus persica
  Intron number 1 from transcript ppa000400m (locus ppa00040 0m.g) derived from phytozome v7.0 (chr-ID scaffold_2; pos 25725802 to 25726619)
tctccgtacgaaaatagagtctcagagtttcaaaggcatgaagcttatacacacttgaatgtatatgtatataatatatgatatatctatactctgtgtgtgtgtgtgtgtgtgcgaatgttgattatacagtgattgaatgcttgtttcacacaacggctattatttattgattttttaatcaaaggcacatttacttcaacacgtaccgagctagaagtgaccagtgtgaaagaattttgttgatgcctctagtcatttatgtcatctacatctggatattgatttatctgtgggttgaatgcctcttaacatgttcttcaaccatctgtttgaaagctatgttttggcttttgtaatcttctgtcgaaatcggtcctgatactcctgttctctctttatctctgcattttgcttgtttattaactcctggtggcccataaaatgttgtacgaaataacgtatgactaatgatggtttgggggcgacttcaaatcttctatatatatatatatatatatatcacctaaagtgagattttcttggcgttgaaacacttttaactccttttcctttcgtttgaattttctgtcaataataacagttttctctgtgtttcctacttcattaccttctttgggctagtaaaatgtcagataatgcatcatattgcacttatttacatgcacaagagacattagtatgtagagttatgtgggttgagatgatttttcttggctcccgagcaattacaaatctcttcattctgttattgtcttttctaaagagatttcgtgttgctgaaaatggatgcagca

SEQ ID NO: 73543 - DNA, 828 bp, Prunus persica
  Intron number 1 from transcript ppa016837m (locus ppa01683 7m.g) derived from phytozome v7.0 (chr-ID scaffold_5; pos 1121274 to 1122101)
gtagtgtttcgtctatgtgacgctgccattgacctgcctttgtattccactacttgtttattatatttttatcttaattcgtcaacctgcgctttcagtccacttttgttgtttctcctttcttataatttagcacaaatgttgggcaagaaagagtacattgattaagaagtgggaataagagagtaagcgacacagacacaaaaaatactataagtgtgtatgtctgtgagtacaagtccaaagcaaaaaaagtctcatagtcatatccatacatgtagcaagttttctcttcctgggctatttctttgttgcttctccctccctttccaggaacctgacacacccagaagaccacagaaatatctggatatctaaatagcaagctaaccaacttcaagttatcaacctcacatcagacacagggagagtgatcatcgatcgatccgtcgatcgccatgggaaattgttatgcagctcctgtgactaaccatagcccgtctacctcaggtatatatatttacatagccctcttgattgatgcctttaattgatcaattaattaattgtgtgtatacatatatatgcagcaacatctagaaacaatagcaagcaaaatggattggcaggaatcaaagaggctgccgggaatagtagtggcaaaacaagtagtggaataaccgaaaaaaatgctagcaaggcattaggcaaaggcaacagcaataataatattgaagaagaaagtgcagctccaagtgaaagtctggaaactaaactaccaaagttgaaagagtttagtttagcagagctgaagaagtgcactcgaga

SEQ ID NO: 73544 - DNA, 930 bp, Prunus persica
  Intron number 2 from transcript ppa014036m (locus ppa01403 6m.g) derived from phytozome v7.0 (chr-ID scaffold_5; pos 15141096 to 15142025 reverse strand)
ttgttccgccatatcacaatcaacccggaagtcaggtatctctctctctctctctctctagacatacatgtgtacatgtggactacaaagcttattgctttgagttagatttttgctaagctgtattttattttttgattgtttcactgtatgttgattggattggtttttgtgtggaaacttatcaaagtagaggaatagtttcaggactgaaaaggaaaaacctttcatttatataaccaactacttgggaaatatctgggtttattttgatgtcaagtcagttacttttgtgggaagaacaaaaaaatactgagttagcttgaatttaaccaaagtgggtggtccaaatttaatcagtagagagcccaagtaaatatttcaaaccaaaatgaaccgacttttgaattatgggaactgatgccctctctaatctgtatacgtatttagaaagtatttataaacataatttgattgttgtcaaaatcacttaaaatcttcagccttggtcacattcaaatatggttcgattggcttatgtacatgtgtggtgttataagtgtccgtattagatgtccatgttagtgagacttattcttcttgctctgttggttccctcctacaaaatgaaagaaagtttagtctgttagattataatggtctaaggagcacacggggtaaataccatgactttttatcatacaaataggttttactgattcattctctctctctctctctctctctctctcgctctctctctctctctctctgtgtctgtgattatggatgtgtaaaaacaagtgaatgttgcttaatcatcttctctttgttactatcatggatgttgtggcttaaaataatactgcctatctctctgctctttctaaatcagagtgagcaaggagaacagggctgctggaatattgg

SEQ ID NO: 73545 - DNA, 685 bp, Prunus persica
  Intron number 1 from transcript ppa012441m (locus ppa01244 1m.g) derived from phytozome v7.0 (chr-ID scaffold_4; pos 12063359 to 12064043)
ctttgaagatccacctgactgtaaaccctcatcaggtaattcattttaattgattatgtatcagattagcttaattaattttttttttcttcatttgattttattttgatttgcagtttttgacatgtgttgcaagtttctatggacatagatttctgggtttctgttttttttttttggtgtgctgagcagtttttggtttttaatgtatgtcatgtctgacgattgatgtattggtattgcagagacaaacatgttagtgtttcagaaactgatccgagagagagagagagagagagagactttgttttcttacttgtttgtttgtttgttttattcataaacagatattttcctttgtctctatttcctgttgatacacatgatgtataaaaatttctcttataaacaattaattttaggaaaaagaaaagaaaaagaaacgcagagtatccaagaactttcctatatagaaacaaaagaacttcggttgcaccgatttccctcgatcctaggctaggtagcttgcttacttagtgcttgcgctaactctgaattttgataaccaaaatttctattcttttatgctgttttttggtttggggtactaaaagtttgcatgcaagatggggcttgattgtggagcctaatatttcatgtgactttgcaggtgtgttgaagaatc

SEQ ID NO: 73546 - DNA, 786 bp, Prunus persica
  Intron number 2 from transcript ppa011677m (locus ppa01167 7m.g) derived from phytozome v7.0 (chr-ID scaffold_1; pos 37706806 to 37707591 reverse strand)
cgttcgttttaggagtgattgccgaaaacaagaaggtgatttgcaatatacactccaagtttctgtatgtatgcgatcatgtggttgcaaaattttagcatgttcaagagtttgttgggtgaaattggtgtgaattttgtatcagaagaagattgattggtttcatttgagttttgggtcttttttcggacttttccctgtaaattttactcaacttgcagtcttggaactcatgcaccatagccatgatattctcttttggtcttttgacaggagaatcatgtgcacaaataaaaacaccctgattgaaattgaaggttaaatagtaacattgagtgtcccctgcgaattttttttgctgtaggctgtaggaattatttgtgtcttcatggttgaaattcaagagtgcaaggaaagagtagttgttttcagctttctaattcatatgtcccaaatatttcttcctctgtgtctgtgttctaggcaacagttactgctgcctttaagcttgaaaagaattttggtgggtaaatgaattctgattaacagtcaacgaccgagtgattctgattaatcccaaaaaacaaaaaagaacaaaagaacagttctttagattatttaccatagggtggtggaaattatagcagaaaatgtatccagtcttattcatatatttctttgatttgattcgaactagttacatgtattcttggctactaattagattctttgttttctgacctcttgacagcctgcatctggaactccaattccggggaaaggtgt

SEQ ID NO: 73547 - DNA, 773 bp, Prunus persica
  Intron number 1 from transcript ppa002099m (locus ppa00209 9m.g) derived from phytozome v7.0 (chr-ID scaffold_6; pos 21777095 to 21777867 reverse strand)
aagcaaggggctgcccttcagaaggagctcattaggtaacctctagctcctcctcatcataacatgttttatgacaccgaatatcaatttacagtatctgctacattgtcgatatttatttgtacactgttgatgttcgatcgtgagcgtatcatatactgtagattggtagtcagtagctcagccaactaattcccatcgttttatttgcaccgcttgcctcacgtctagaactttgactcgactgagttgacccagtgtatggcggacgagttgaatgatttgttgttgtggagggtatgggggtcataggcattgcttagttaattacttgcaagtggaatatatagggaccgagttgaaacgggcgagttgactgagtcaggacgggttgactgcccatcctctctctttctctctctctctctctctctgtttttttttttggggggaagaacatgttttgtggacttgggggttgagaattttgctataggaaacctttagaatgacaaggtgaaagttgggttttgtcactagaggtgacaattataattaggtgaaagatctgctatagtggatcttgaatgttaaactaataattttggacccaagtggatttgaattttataatttatgccatcagcttttctcctccttagttacatttgtttttcaataactttcttaattcaccaaaccatggctgataattgtggtttgattttcttggttcagattcttgaacgctggagtgtttgggagcacgaaag

SEQ ID NO: 73548 - DNA, 425 bp, Prunus persica
  Intron number 1 from transcript ppa017697m (locus ppa01769 7m.g) derived from phytozome v7.0 (chr-ID scaffold_1; pos 16764910 to 16765334)
catcgctctctcaacaagaatcagttgccaaacaggtgttcttttttcgtttcatgatgcattttgtgttaaaaaatcaaactttaacctgtgctttgtgttaaaatttgcatggtgtataaaattctcatatttatttagttttggactttgcttcccgtccactggaagtaggactagtttcttgccaaccacagtttgatatgtttgcaaaagttttcatctttgtgtttttttaataattattcttgcaaatgtgttaaaaagtgatttgcaaggatgagtgtcttcttgggtaggaggaaaacattgtcctttagtgttttttttaaacctcaattttccttaattaagtcttcatttctctaaatttcttttaactatttgctttgcttgtgaaattggtttcccttacccttaggttc

SEQ ID NO: 73549 - DNA, 733 bp, Prunus persica
  Intron number 1 from transcript ppa026527m (locus ppa02652 7m.g) derived from phytozome v7.0 (chr-ID scaffold_3; pos 2143700 to 2144432 reverse strand)
cccctatactgaagcaagccaaatttaaggtctgccctttttcgttacagtagtgtttttgaatgttaaaaactgttttccactcgatcatggtttatgatgaaggttctgtgtctcaagaacaatgtttggaattctctaggttggttttgggtcttgtttttggtttgatgatttatatgagtttctacattttggttcttcaaacaagattatacttttggtttctgctcttaatggccttttgctcttcaattgctttattacaaatccttagttcgttctttgaacttgaagtgacgcatatgttagaatttccaaccaactcgtaggtctgcatccatactccatagccatggggcatttggctgtgagataaaagaaaaaaaagttatagcctcattgggtgggtacaatgactagaaaggaataatttttgtgaattgtagtgaatgaaatttcatagtataatgaaaagaatattgaacgatgctttatgatgggagttgaagctttttcttatgtcttgaataatttctacaatgaattttaagaaataatagatatcatgatgggacatcttgattcagtaagctgcttttatttttcgcgaaattatattgtgccacttgaaactttctttctctatgattagtttttctatgggaatattaaagttaattctcctcgaaggacagattcttggaactgacaagtttgcgaaagtgattga

SEQ ID NO: 73550 - DNA, 682 bp, Prunus persica
  Intron number 2 from transcript ppa012776m (locus ppa01277 6m.g) derived from phytozome v7.0 (chr-ID scaffold_1; pos 40731291 to 40731972 reverse strand)
ctctcctttttatcttgagcagaccacttcaaagggttagcatgatctactttagaactcgttgcttatgttttttttttgtctatcagtacatgtagtcaaggaattaagcaatttgtgaagcatgtttgatttgtttttcccttcctcttctagttaagatattaatcatggtctattgtggagagaattcattattttggtatgtttgaaatcatgtttgtttgtttttttttataagaagactatcaaccttgtagtgatgcttctatgctgtgtaaaagtacagttctgttgtgaaattcagtatgattcatatatgttgatccctttaatatttttatggttgaagataaaagtacatatttactgtgaatctgaaatcgatgtcaccaagattttatagttagatgtaaggagaagttcaaacatcccttccaaaaccaacacccaatcttatgtttgtgaacattatgcaaagtggcaaactatcttaaaaagttcaatatgagtttctaaggtgattttgttctatagttgcattttatttaataccatattgcttttattctcattgaaaatcattcatttggcttcttttgaatttataccagatagtaatacacttattgaatttgtggtttcagagaggcaaaacacagaagtagaaagatattctgac

SEQ ID NO: 73551 - DNA, 249 bp, Prunus persica
  Intron number 1 from transcript ppa012776m (locus ppa01277 6m.g) derived from phytozome v7.0 (chr-ID scaffold_1; pos 40732091 to 40732339 reverse strand)
ccactcaagttccctttgagctttttcctgtgagtttctgtttgctgcagtttttgcccaggactaatttaccaagctacaatttcagtcttgatcttgaattttgttgattttgaactagtaatggccaaattttaagtaatatgtttctgcaattggttctatttttgttgcagttattgacaagttttgctatgatattggcagtttgctacttttcatatttaatatcaaacttttctttgcagg

SEQ ID NO: 73552 - DNA, 266 bp, Prunus persica
  Intron number 2 from transcript ppa016247m (locus ppa01624 7m.g) derived from phytozome v7.0 (chr-ID scaffold_4; pos 4673950 to 4674215 reverse strand)
cccatacttcaaagatagttgccaaggtataatatgtttttattttaatttcttaattatctagtagaattgaaaattgtttaaccatacaattattatatatcatggacaaacacacacacacacacacatatatatatatatatatatgcttgtttgtttgtgtgtgtgataattattattgcagctaactaaagctcaaaattaatgatattcttcttgatggatctatgatatttgagttttactatttctttcagatatta

SEQ ID NO: 73553 - DNA, 546 bp, Prunus persica
  Intron number 1 from transcript ppa009076m (locus ppa00907 6m.g) derived from phytozome v7.0 (chr-ID scaffold_2; pos 16585852 to 16586397 reverse strand)
ttgctcttgttgtattgatcttgttccattgcttggtaaaccatcgaaaactattaaattttcagttttttcttaacatttttcttggggtgttgatgggttttctgtttagagtttttgggttttagaatctgtgtctttcggttgtataaattggcatttttcctcttgaagtatattacaaaaatctgccaactttgctttttcaataatttcttcagtcaggtccttctttttatgttggtggaggttgaacttattcaatgaagtttgaaattacttggagtctctttggcagtggtttctagaaatataattattagaattttatttttgttgtttttgatcattttcttaaagctaactgcttgtttctaccccccttttgatcctgttagttcagacagaaatagcgtttggtgtggtaaataggataatttgttagtttattgttagcttaaaggaatcaaaatttggtgtctgattaagggtattagagaaaataaagctaaaagtggaagacttgttataattgtgcagttggtg

SEQ ID NO: 73554 - DNA, 366 bp, Prunus persica
  Intron number 1 from transcript ppa001043m (locus ppa00104 3m.g) derived from phytozome v7.0 (chr-ID scaffold_7; pos 19468687 to 19469052 reverse strand)
tacctcaagagcttaatcaaggtagattaaatttccacaactcagtttttagttttgtttggttactgagaaactctttttatttttattttttttatcattagggttgttcagttggcgatggaagtgaattaatagctttcgaaagtaaaagtttgataatttttttcttttttggtttactaagattattttgctgccaaatttttaaagcacgcagtagctagtcacttgcacttggaagaggtgctattggaatgtttagttttagtttttaagttttggtttttctttttgagttgacaaatttagttataattgtgttgtttttcctgattttgatcttctttatcctgtattaagata

SEQ ID NO: 73555 - DNA, 980 bp, Prunus persica
  Intron number 2 from transcript ppa012439m (locus ppa01164 8m.g) derived from phytozome v7.0 (chr-ID scaffold_4; pos 235043 to 236022 reverse strand)
ttgttgtcaaattgggaaatcaggtgaacttggtgtcctttttttataactgtttttataaaaatttcatggatatgcttttgataccacacgcatgtgtgcacagacacttatcttgttctgcacgcacacacacagctatctggcacttcactcttagctgaagtggattgcttcttcaggggattttgtagctgtcctcgtaagcttcctttctaagtccatgtgtttatattctaggaaggatgagtgataattccctcttatcccacattgaatcggatttcgtacaaaagatgttaaatgaaaggaaagttatgcaatctctcttcaacgcttattgaagctaaatcaaaagattctattgggacgataacgaaacgggcaccctagcttttttagtgtttattccttttaactggaaaggagttattctttgttagagaatcctcctaatacaccttatgtacagctgtagtcaactatgaccgcattggaaagttagaaaaccttcacattctcacattcttaatgagaacctttcatatctaactcactctttactttgccagaataatctatgacttgatgtgtgattccttcagctagtttatcacgagaccaaattactcaattgatggtactaaggagtttatacttcagagataagcacattttttacatacatacatgcaggttggatgtctatatatctgctaagaatgtagttgttctcaattgcacacacttcagggtatgcacaattggaatatcctttgtctgtacttcaaatttcatgtatcaggcataggtatatattaatatcattgagcgtttcttttaggcagctctaaaactgtttggagtatcacacattgtatgtgaatgaaattgtttttactacaatggtagtttgaagtgactcattagtataatctgtaccaggtggcgaaaaccaaggttatcaacagttgccttaa

SEQ ID NO: 73556 - DNA, 907 bp, Prunus persica
  Intron number 1 from transcript ppa012439m (locus ppa01164 8m.g) derived from phytozome v7.0 (chr-ID scaffold_4; pos 236121 to 237027 reverse strand)
tcataagacaggcctagcaaatccttaaaaatctggtaagttgtcttcgctcctgtgtctctgtctttggtttttgtttttcttgcttccaaattcccacataaattgaatttttgggtttgtttagtaaaaaaaaagcaatgagaagaggaagtgagtgtagactagggattaactccgttgatttgtaagctagctctagtctctagctggtgggtatttgttatgttcttggggtttgctttcagtttattcgtaatatcagtatagaatgtgagataatcgggttgctaaaactgctgcttctttttttgtttctttttcaacttttacgcaaagcctctgccttttcctttcacacagagagaatcatatgttatacgttcgttgttgattcataatattttaccttttaagctgagtattaagtctagtgtttcgtatatttggcttggatcaattttttttgcttttttgctcctttgcatattccgttttcccaacttttgcactgtcttcaattaaaggaaacgtcttttttcagacctgcggaattgttagtgtgaactatattatattactgggtctttcatttattgagcttttgatcttcttctttcacaagagacctctattctgttaaacgccatggaatattttctgcctttttgtaaatgtatggttcaacgccctctgggtgaatgctggatctgttttaaggttgagtagtagtacgaaagtgcataatgttatagtattttggtggaattttcgctctttggccatcaattttattgaaaagttgagaatacactctcatgcattttccctttttaaacttctcttggttatatatgtcgagttatgcgcagtggtttggcctggtttataagttggcacatctctg

SEQ ID NO: 73557 - DNA, 349 bp, Prunus persica
  Intron number 2 from transcript ppa001238m (locus ppa00123 8m.g) derived from phytozome v7.0 (chr-ID scaffold_5; pos 13784425 to 13784773 reverse strand)
tttccagagtatgtgtctactattgtttatactcctgaaagaatgcatcttggtgataattagatgtaatttttcaagtatgagtttcttttcttagaaggtttcttctgtccgcattttgactgttataggtttagtttattctaggagaattgacaaattgtgtaataccagcgtaaatgtactctatgcatttggaactgctaaaaaggaatttcttacatgaaaaatggatccttaattgtatttgcttctctgaatctatgctgaaagtgatccttatttgccttctcttttcttccgcttatgcattgaccctagatcatatgttatatgtattgcagctttg

SEQ ID NO: 73558 - DNA, 962 bp, Prunus persica
  Intron number 2 from transcript ppa018537m (locus ppa01853 7m.g) derived from phytozome v7.0 (chr-ID scaffold_4; pos 7450369 to 7451330)
caagtctcagcattagtgattgcaaggctgcttgttggaaaatttgtgactgccttggattcaactttctgtttgataattaatcagaccaggtgtcgattttggactggaaactgggagtttgttcaagatcggtcaggttctagttcaaccagtacttattttctaacaacaagggcattgctcagtcacagtaagtctttgaatatgttgtgctaagagtctgtccacaaatttccaatttcatagacttgacatccttccaaagagacaatatgtacaaacaaccaaaaagaattttgggaatacatagaataagtactaggattcactatgagttttctttcatgttttgacacataagtaggcttaaagcatttcgttcactatagacaatatctgaaaccagggttctgaatacctaatcgtgtgtgtatgcagaacataagaggataatatggatttgcactgctactgctgctgctgctgctctattgatagtggtgctttgcatcatgggctgtctattaagaaaaagaaatcttttacttccaggtaggttcgttagtcacaaggaagtaatagaaaaacttttgcagatttgaaagaactttaagcatttaccaaaatagggaacagggaaaggttgatcagaaggaacttcttgacgtagagcaatcgttcacatgtaatgacgtcaatgagcttcaagaagatggagagatggaaaatgatttaagaatatttacttatgcatctgttatggctgccacaggagacttctccggggaaaacaaggttttataataatagaaaagtatattattattgctacgaaataactgatgatgtgaaatatttatggatcatcaatatttcagggaaaactaatgacaggacgagaagtagctgtaaagaggctttcaagatcttcggtgtgcaaggaacattggactttaaga

SEQ ID NO: 73559 - DNA, 866 bp, Prunus persica
  Intron number 1 from transcript ppa012758m (locus ppa01275 8m.g) derived from phytozome v7.0 (chr-ID scaffold_6; pos 23291258 to 23292123 reverse strand)
accactgacggcttcgctaccttcactgctttctggtattttgtttttctgtttttcgttatttcagttacctgcatttttagtttacccagaaattatttggatatgataaggacgccacatgtctgataatcatctgttggttttttctttttttttaaaaaaatgcttgtaattggactttgatgggttttgtttttgcctgtgtaatatgttttggtttgattccagtgatgaagtgttttttattggtttaagcggctgttttgttgggtttattgctttgacattgcattgaagacacaactgtttgatagttgaatgggagatcagaccaagcaattttgttgacgttatgttttcgtgtacgaaactgtatagatcagtcggggaggtttcgtcggatttctttgtttcgccttagaaaaatattatcgcataatccactgccttgttggtacatacataaatgcagaaattgtccacacataagtattgacaaatacattgcttggaatttttctaatttttcatattcttccaaaataatcctacgtctccccctgtttttagcatgttgttttttgtagcgattctattgtttttatgtatggaattatgttaaattggtatcaatttgtcacttttgttagttcctcatatttgcttcttgaaccctaatgttattgattatagtgaactgctatttttagattctttcctgatggttctaagataggtctaggtcatgtatcactttccttttcttgcatatgttttaactactagggttcactgctagttaattattctgcacaaactttatgttgatctctgtcctatggttcagctatttgatcgcatca

SEQ ID NO: 73560 - DNA, 623 bp, Prunus persica
  Intron number 2 from transcript ppa011015m (locus ppa01101 5m.g) derived from phytozome v7.0 (chr-ID scaffold_3; pos 17377093 to 17377715)
ccactttctttgtcccacctgggtgagtacacctacccttttcctaatttccagtttttgacctttttctttcatcttcatgtatgtattttgttgattggtgattgattttgtgtttataattgggtagttcattaaaattggattactatataatatatcatgtaaatattgaactcattaacccaatgtagcttagggaaaaatattcacttgaaaaattcaatcaatttttaccttgatttactttgcataagctgttagtctctttgcttggcccattgatgtaaagttagctctgcataacctcaatcagaacaatcaagaaatcggattgttttgattgttctgaaagtgtaatgaaaatgaaatatttaaatagaaaaaagttaatttaaggtagtgaatggtctatctcaaatatttactactaaagactagagtccaacaaggtctcttgataccatgatagaaaagtttattactttactgctatttctactagcaaaatccttttttcttggcttgaaattgtgtatcgtttgctcattgacatggttattttgattgattggagaacaattatagctccgggagtggcgctggtggtcaagttgccaagg

SEQ ID NO: 73561 - DNA, 991 bp, Prunus persica
  Intron number 1 from transcript ppa025704m (locus ppa02570 4m.g) derived from phytozome v7.0 (chr-ID scaffold_2; pos 12692132 to 12693122 reverse strand)
tcttgaacaggtcatacccacaaccaacttattataaagagtgtttattcaccagtgttttgtttccaggttgattgattcaacatttccctcctactgatagttgattgatgtaaaaattttgtgcacttgttaataaatttcaagcaagcatagacctagagtgcaaatgaggttgggtaacctatggggtttatttctcaatgatgctaacccttacagttagagtttagtgcctcttaaaatgatggacatggaagtttgtttctgtgtgacattgcttgtgcaaaaaggtttttgtaactatacttagcggaaatcttttgagatttaccaactaccaagttaccttaaaatttcaaaaattgagcttgagtcgtgttttgtatgggtcatgttttgggaggaggtatggcttctggatttggctattggttgatgtgattaataaattttttagacaatgaagatattaataaagaaaaagaagaaaagattaagaagaatgatactttctttttgtcagttgaaaaggttgagagtaagaaaccttggagtcacaataaagcctttcaaaactagaagtcttatctggaagatgtttaatgaatctcattataaaacttttttttatttggtgtggaaaagctaaagagaatgagaagaaaactagcggagtactatttcaaggaaacttcaaaatagaactcatttataacttaattggtgcaccgtgcacaaaagctcataattttccttcttataaaatttagatattcaaccaaaaaatgaaatttagataaatttatattgaagttttcgttttggtattaatcgtttccttcattgatttacttgtactactgatcctcatctatatggaaatatacaagttaagtggtctgttttatcttcatgttcttaagtatctttgttttcccccatccattttgtaggcgtagctctgaagcacagcttgctccaaagaatt

SEQ ID NO: 73562 - DNA, 1059 bp, Prunus persica
  Intron number 1 from transcript ppa006116m (locus ppa00611 6m.g) derived from phytozome v7.0 (chr-ID scaffold_2; pos 9718364 to 9719422)
agatcaacgatctgaaattgaatctgttcattctggttagtttacagttggttactccattattgattccgtttcgttttggctttttcggattgattcgtggtggttttctgtgtttggtactgctgtggcgaattggggtttgaagtttgcttttttgcattagatggagaggcagaatgattttaatttgaaatttgattttggttttagggtttgtgttttgctatatcagtttggctagattcgtatgtatgcaaggtgcataataggattgtgttgattattgagcctaattgaattcgacaatgctatgatgattaatttggttgttttcttgaaatatagattttttatttagattaaaggaaaattaatagtagactagacaaacaaaattgaatacggaagtggtggaaggtgccgctgagtaagttgtattcctattatggtcgcgaaacctgggattatgtattaatatttctaagaggacattttttgttaccttcgaatcatgaagattgttagcttaagtttcattgaacacgggtgtgtaaaagattattctcttgtaccatccattcaatcacttaaacttttgggagatcaagtatcatctacatcagtttcttttacttttgtgatgtttatataagtgattgaacaaatatcacctgaggtctgggaattggcatcatttttctgactcagtagatccagttatttattttaaatttcactcggtatatctactgcttttgaatttcccactcataaagctgtgtggatataagcagtgtcgttgtttctgaaaccaaggcccattcacagcattttgccaaaatgtgggattatctctctttttttcttttttccttttttcatcgttcgagttataatttgcttttgaagacgtaaaaattatctcatacaatgctgtatattaatagacaaaaaattgaaaagatcagataaaagaatcacttcaatgtctaaattcttcgaaagcttacttgtcaaacagtgaattcctgttaacagcctaagcaaacttggatc

SEQ ID NO: 73563 - DNA, 856 bp, Prunus persica
  Intron number 3 from transcript ppa010085m (locus ppa01008 5m.g) derived from phytozome v7.0 (chr-ID scaffold_4; pos 27282947 to 27283802 reverse strand)
aggaagctgctcttgttgaagcaagacagaaagaagtaagcaacttggcttctgaccattatcttatccctttcatctgggttgatatacgaacacgaaatgaagtcaagtgaatgtgtttattgcaatatttgtttgaggtttgatcactgattgaatttttttttttgagttagtcgcattagtagtccttttgttttgttctgttttttttttttttttcaattgaggaaatggagcaaaggaagatgtgaaagagtagatgggtgaaggagttgagaggggtggagaaatgtgaaacaaaattaaaacaaaaaccaatttaaaactggtctttgtttttaatgaaggaacaaatgtgcttcactagaacatgaaaaaagaagattatgaagaccaaattgcacatgttaccaaagatggttgacaaatatgaatttattaatcaagatggctgttcaggtcaataatcacctgcctatgatgagccccatgctacaagtacaagtggcattccatcttagctttggtaatttttgccctagaatagtgactgtttaatgagtaaactggattaaatatcatcggcgttgtcgtcaatgcggtcgcattctctcagttaggttgcgtctagttcaatcactgtttctctaccttttgttgtcatagctgatggtttcttgtgctgtgcatatgattaaaccacgtgcatttactaatacatatgcactcatatatatatatatatatatattttacatgttatgttatcatttttgtgatctatatgatcctttgatatggttccctacatcactcaggaacaagctcggaaagagagagaagagcttgataa

SEQ ID NO: 73564 - DNA, 578 bp, Prunus persica
  Intron number 2 from transcript ppa026381m (locus ppa02638 1m.g) derived from phytozome v7.0 (chr-ID scaffold_3; pos 14024805 to 14025382 reverse strand)
gcttatcagaggcaagttcttctatgttctgttatattatcatgctcttccataatctagattcacaaagagagaggtattttttttcttcatggttttgaaaaaagactaactacagtgtatattaaaaaaaacattgtttatgctataaagtttgtttatcaggatcagatgccccactcttacttccaaagatggtgaagggaaattaaagcaaaatgatttctgattggcaaattgtttaagtagcacaaccaatcaaaattttctttttcttttaaagaggattatcatgaatgcttagagggcaagagaagagtatgatcatagatttctggtccatgggagattcatagctttctgattattttatttgagacttggcacatgtgtgtgcgtggaacataattatagtgttaggtgctgcatatacctaatctcaaatcacatcatacacacaacacaaactaaatatatgtactggcttttgattcaattaattaccacgagtttcatgtctgattagtttattatgttcaacagctgttctctgtacttcttgcaacagcaggagcagt

SEQ ID NO: 73565 - DNA, 972 bp, Prunus persica
  Intron number 1 from transcript ppa008427m (locus ppa00842 7m.g) derived from phytozome v7.0 (chr-ID scaffold_2; pos 15941635 to 15942606)
cagattggctgaaggaaaggactatcctcaatcaggtaaacgtaattttgaccccaaattttcaattctctgtttcttccttcatgtttgttttgtgttctgtttgcttgctgggaaagtgtggggaatgaaaataaaatgtaataaatcacatttttttaagagaaaacatgagtacttgaatggcaatagatttatatggaaagggtttctttctaattgaatggttctgtgaaagactgcatctttgaataaaaattgggttttgttgctcatagggtcctattgttggcaatttaaatctgaagcacaccttcttgtgggagtgttaagtttctgagttgtatgagaatttgttattctctaatgaaccagaccagagggtcttcactaatagtttgatcttaaatttaaccccccaaaaaaagagtggtgcttggtgattgttggtaacttagtatgaacaagttgggtctagatggggttacaaaatatccagtttagtcactttggttgggtgttccatgttagaaggggcatttcgataccccggaatagtgaaaaccagttcactgttgtaaatcttgcatccctaaattggggagatttggtgaggcgaattttgcaagttgtggtacaactacccgtttgagctgtttgaggaaccttcatgtcaaaaggcaatagtaaagatgatttcaggatctgcttgcaaattatatatcgatccataagggattcttatgcttagcctaatgcacatgacgtttgaaagttcatatgtttattggtctgcttttaaggttatgatatggacttttcttgcgttataggaataatctatatgattcatgaacccagaggccattatcttttttctaagtcttgtgctttctactatttctctttcatttaattttatgttcatatgtttcagagtgcaaagcataggccctaatcaaagttatactc

SEQ ID NO: 73566 - DNA, 273 bp, Prunus persica
  Intron number 2 from transcript ppa020435m (locus ppa02043 5m.g) derived from phytozome v7.0 (chr-ID scaffold_1; pos 44334920 to 44335192 reverse strand)
ggtaattactaatttcttgttccttggattatcgtctccttaaaaatgttctgtcgcttttgtttttatttttccaactatgttttaactgtacattctttctttttgactttcaactatccattatttcttcttccttaagatccatttaacatttgatgttagaaaataatttgctcattctaaattataaagttagggattcaatttaaccttgtagtttgttccacatcgaatgattcgtagttctgcttctttgtttaattgtcagga

SEQ ID NO: 73567 - DNA, 491 bp, Prunus persica
  Intron number 1 from transcript ppa022206m (locus ppa02220 6m.g) derived from phytozome v7.0 (chr-ID scaffold_8; pos 20747880 to 20748370 reverse strand)
cattgttgatgttttcttgaacttacctgacggcatccaggtataactgttagcatctgtagtgataaatttcctttaccagagaatcaagctaactagtaatggtgatattgaagatattgacacaaggcacggagttctgttctataaattcatgtaaatctgttagatggtctgatttctttgtttgaacttttgtttatcaatctgaaggctgacgcaaattgtgagttggaagtatggaaattctttccttttgatccgctaaagtctgtttctttagataactagtggatattccaccaactgggaaaagatgtattgagtattagtattacaagaatatagttagagagcatcttttggcattttcaagggaaaacacatttgagcaactctgatattaattctaatataaaacgtaaggaaaattgctccattttcccttgctattccctcgtttcattgttagaggcaacgaactgctctgg

SEQ ID NO: 73568 - DNA, 366 bp, Prunus persica
  Intron number 2 from transcript ppa000440m (locus ppa00044 0m.g) derived from phytozome v7.0 (chr-ID scaffold_5; pos 976101 to 976466)
catcgtaagttgtttccttatttatttttatttttgaactagcttttggaacctgcttccttttcattgagtcagcctttggagagacaacatgaaagatgttagaaacttataaatattctacatctcagcatatggcgtactaaactagatgcttcaggacttttttttacatgtaaagttacatggattgacaccctttgatttatttagtattttacaagtccaagtccaacagtagaattgaataaacacgagctttgaagcgctattgagtgtcaaattcattaaactaacataactctcttctcttttctactgtctattttaggaggacgcattcacaaatttctcaagtcatacgtg

SEQ ID NO: 73569 - DNA, 995 bp, Prunus persica
  Intron number 1 from transcript ppa011061m (locus ppa01106 1m.g) derived from phytozome v7.0 (chr-ID scaffold_1; pos 1378096 to 1379090)
tccacttttgcagatccaccggccaaagccaatcagtatgtttttcctctttcgtttaatttaagggtttgtgacgaagattgtgtgcaatttaattatatgccttagattttgtgtatgataaattccctatgagaatactctcgctttcgttctagtagaatttcgtacaatatcctgcttctatttgtttacttttagagaacaattatttgtgaggtaagtttttcgcaacaaaatatttgcgttgcacgtttttcttttatttttgggaaataattgaagatggtggcatggctttgctacttgatcaaattaaaatataattgatttatcatggttgtgttaggtggaagcatgttgcatatgacattttctccgtgtatcattgtacactttggtaaaatcaaagtgttgtttaaatattatttttgttggcataattataaaggatatatattatgccaaaattttgaatcggtttttgaagataattttttccatttaagttatttcggtatgtagatgatatttaataatattgttatttgttgatgggtgtcattccttctaacttctttggcatcttcacctttcttcttttgtatttaacaatgtaattgcataaaaacaggtagcaagcctctggaagaacttattggtaaattttttattttagagataaagaaaaaaagaaaaaaatgcgcctacatcttctctatttacatgtatttgttttttttaatctcttatgacataacatctatgttatgccaaattttgaatcagtctttgaagatttttttttttcagccaatttattttggtgtgtgcatgatgcatagccgatatttaatactattgttatttgttaatgggatcataaatgtcattccttctaacttctttgacatcaccttttttctttttgtatttaacaatgtaattgcatggaaatagggagccagggtattgaatcaaatattgttgaatca

SEQ ID NO: 73570 - DNA, 772 bp, Prunus persica
  Intron number 3 from transcript ppa017992m (locus ppa01799 2m.g) derived from phytozome v7.0 (chr-ID scaffold_6; pos 5978132 to 5978903)
ctaaggtgaggatttgtaaagttaattggatattaatcagaagggtcccaaatagctgaagcagtaggcaatggtggtttttaatttctttcccaaagatattatgacatgggttaaaattaaattttacaagaacattgtgatatagtgaattttactttccaatacacaatgttgtagggtcagaacatggcattacatgcgcctccctgttcagccactactttacaaatttactactggacttgtatgttggttgcttatcttgtagaagtatgccaatgcgcaaccagaataataataataagctacaattctctatgaagtctgttattatcttttagcgtccttcaagagcattcataactctagctgcgtgacaacgtttcagttattttcataatttaaactgatccttgtaatgaagttttgcattttttttaatcagtgctaaggaatgcatggataatgtccttgtttgtttgaattctgaaaggtattttttcttggaaatgaatgaggattgagtatgctttgattctaagacatgagaaatggtttgaatatagtgcaaggtgtagttcctaggtctgtgatacatatatacacaagcgcacgtgtgtgtgtgtacagcccgggaagactcttcattgtaacatagttgtagtttaattgtttgtgttttaattagcttctaatagatacagtgactcatcatctcccgcattgttcttcagttactggtagattggactcgaggaaggaatataat

SEQ ID NO: 73571 - DNA, 927 bp, Prunus persica
  Intron number 2 from transcript ppa001570m (locus ppa00157 0m.g) derived from phytozome v7.0 (chr-ID scaffold_5; pos 15578284 to 15579210)
agtggcgagggttgagtcggttcgaacatacgcaggtgctttcttgggcaataataaaagtgaatgaataaattcaaggaactagttttagctgaaagctataattttttagattttctttgtttttcgattagctcattttgtttggaaagacaccacaaaagaataattgaaggattgttcctcattccccggataataataacatcgactatgaaatactacattgatgcttcaattatttgtgcaagtagagaacgagatgaataagaaattcaatctacttagcccaaccaatttgtcctctatcttgaaaattactgatcttgaattcttggtaagttgtccattttgctctgtattcttgtgttaatgcagttgtatgtattgtgaatgcttccactgttctaaaagcggtttaggcagtaagagatggctaatgttggaccatgaagatgaaaatgtttttttgcgatactacaagatgggagaatcccagttctttatggttcccaatcaaatattttgaagatgaaatatggacagcatgcgattgagctccaaccagtacaatcttatcttcttaattagttgaaatattaaggctgtattaataatgcttaaattaactattttgaatttttttaaatcatccaggcagatttgcttttcacatttttgagagatttttcgttgatgtgaagttgtccttttacttctgagttgctgcaattttcatactgtgtatttgggtgcactcgcttggcctctttcttccctgtttaataggcctgtgctacatttttctttgttacagttattagctgctgcaaagcatactactatctgttattttgaaatcaaactgtctcacatttctgggtcttttattttcatctttcagagacagcattgaagcttcaaact

SEQ ID NO: 73572 - DNA, 720 bp, Prunus persica
  Intron number 1 from transcript ppa026376m (locus ppa02637 6m.g) derived from phytozome v7.0 (chr-ID scaffold_8; pos 228891 to 229610)
gaaccttgggagttgcaaggtatgtaaacttgtcaattaattttcttgtttgcagtagtgttatatcttgagcttaattataatctagttttgccaagagcttcatatgtagtgtgctaggaacaggcttggaatgattgatctttccttctaggattgtctttactcgatcttaattggttttggttagatcaattatatatagacacacacataccaagaatttaacatataattgataaattatatttgcaaatttgttattttttttttcacgttattctagaatagatcgagtaaaattgataaaatataatgatttgtacaagtttctcaattccataaaaataaagttgctcaatttgccatatcaaaatgaattggtcgaactacctatgtaagattcaagattttctatgtaaatctttccctgtccttatttagctgctctttcttcaagatacggctatggctttctcatgtagtgagtcaagtcaaccaattgaccagggtatacacattctctctctgtgccacataaaaagtttgtgataaaattagctaagaacaattaatgaagcgacttcaacacatctatctgcaatatgctcctatcgtatgctttaactaattgtttagtttctcctaatacaatctgatatatctctctaattaattcattaattttgtgtgtttatgtatgtatgtacgtacagagag

SEQ ID NO: 73573 - DNA, 888 bp, Prunus persica
  Intron number 1 from transcript ppa004727m (locus ppa00384 7m.g) derived from phytozome v7.0 (chr-ID scaffold_3; pos 2388813 to 2389700 reverse strand)
cttacgcatctcatatcatccaccactcgaaaaaggtgagcttcaatttcaccatttatctcatgaaaattttatttattttttcactttttgccttttggtgataattttcagagttttagcgattggtttttattcaggcattgagattctcaatttaaagcttattgtgttaatgggtttgtcgccaggcactacttttttactgttttagtttcacaaatcttgaatctcagcctcgttttagattgattatagtgattttaattcactcgaagacttaaattctctaacttggtagtaattggaggatactgtttatacttcagcataccttttcattctttttgagtaactcgaaatttggtagcaggtagggactgtcttctgtatatatttcctttatatggccttagtttcttcgtttgttgaggctgggcgtgtgtttatatagatggaggtaggtagtgttactttcagactgaattctctcaaatgggtaatttagctatactatgtccagggtgtcattaatttgaatttcactagttttggaattgtaggcagagtatcatgctttttgaagtctagtttttcagtgttggttgttgatacaagtttttctatttttgtttgtagttaccatgaccaaatagtgtttacgagctaacattgcccaattaaccaaatagtgtttactagctaacattgccgaattaagataggcaattatataaaatgtattgctattgttttttgttttttttgtttttctgtttgtaggtgctttatataattgatttgggtatgtttcaagtattaatctatgtaacttatggtttttaagacgtaattttgtacaatatttgtgtgcactgcagttaagga

SEQ ID NO: 73574 - DNA, 437 bp, Prunus persica
  Intron number 1 from transcript ppa004529m (locus ppa00452 9m.g) derived from phytozome v7.0 (chr-ID scaffold_3; pos 17401708 to 17402144)
gtcataggctctcatctcctcggctcaataggtatttggtcttctttcgttgccttctcacccaattcgaactttttgctcttttccaagtttacccaatggatttgtattgttggtttatcttttgcttcaccagacactgtatttcttttcatgctgagacttgaagattcaaaatttgaacattttctttcctgtttcttttcctgtggatgtattctcggcatccaaacagaatttatttaaatgatgtctttgccctttggcctttggatatcttgcatagactgaattttgagtatgttcatcagtatcctgcaaagttactatttttatttctaaatcactattatcattggttgaagaaatggctatcttcaggctttttattacaaaatattgctaattatgatttaaataatacagttggaggaaaa

SEQ ID NO: 73575 - DNA, 681 bp, Prunus persica
  Intron number 1 from transcript ppa009622m (locus ppa00962 2m.g) derived from phytozome v7.0 (chr-ID scaffold_7; pos 20001658 to 20002338 reverse strand)
gtgggacgaagttgaccaggtttttctcattcatttctgttcttttgttttttggcggactggtttcgttaatcctgtgtttgtttgcctagaaaacgttggaaaacggaaattgttttggtgtgttattgaattaaatttttttatttttttattttataaacaaaacctatttcacttgtcatgattacgggagttagggctatcaagttatgctctgtttggttgctgggaaagctgatttcgaaacaagaaacaagtttttgaaattgatttacttttgcaagaaagtttgtttgtgagtggaggaccgaatatatgtagcttaatatatggacaatttattttcttgtcagaatgatattttttcttgtttttttaattgtttcaatcagttttctcactattatttagaatgattttgaaattttgatgatttcattttatcaggaccttagaaaaattggattcttgcatattgctaaaacatatttgaaaacttctggcctttgctggtgattggatgcaagtaggtcttggagttgtcttaggagatatccttgtttcagtgttctaatgctagtctgtgttgtacttgtgttgtctcagtttttgtgtttaatggataagtggtgttgtttttcagtttgttctgctcggtgcggttccattccccaaaga

SEQ ID NO: 73576 - DNA, 891 bp, Prunus persica
  Intron number 1 from transcript ppa007175m (locus ppa00717 5m.g) derived from phytozome v7.0 (chr-ID scaffold_1; pos 46402043 to 46402933)
ttaagtctagcaaggttagtcgatccctttctatcatagaaatctgacacacgcacacaaaatcattacaggtaaggagagggaatgatggcttgcaatgactttgaaggaagatggtgggaaaacaaaaaactacataacatgaccattgctccaatatttgagttgaaagtgaagtagatgaattcgtggtgtcaatattcgagttggagaatcaaaatgtaaatttactaaaagttcaaggactattgctcctaaaaactactggtatgtcttaaaattatcatttgtttctaaatttaacataaaatgtaacaaatatgaaggagtgactaacaatgcgatagacaatgcagttgatattgatttactacagtaattttccttttcgataattttggtagagtaaaaaaagaggtatgtgagatttgacacaaaaaaataaggaaaatactagggagaccaactttagataccaacttgtgtaccaactctctaatagagtgtgtgacccattgtattggtgggttccacctctattaaagagttggtacacaaattagtatttaaagttgacctccctagcataacccaaaaaagaaacgtatacgagaggatttttcaaaaaatttcccaatgaaatctcttggcacgcttgggcacttggttttgcgccattaccatttccaaatttccgattccgattcgaaaaccgtgcgaagggtcaaggccatgatcagggggatgttcattaaaatgaccaaaacaaccccgaccaaaaataagatcacctctgaagcactctgcaattaaaagcaaaatcaagccccaataaatatcttcgaagaaaaaaaagagactgagtgaaagaggaactttgcgatttcaatt

SEQ ID NO: 73577 - DNA, 826 bp, Prunus persica
  Intron number 1 from transcript ppa019316m (locus ppa01931 6m.g) derived from phytozome v7.0 (chr-ID scaffold_7; pos 19697450 to 19698275)
agcacgttcatagaccgatataggtattcaagtcacggagccatagccaaaaaatactaatattaagtagagaatatatataaaagtagaaaaggagagaatcaaattgtggtatgtgatattctgatggtgtatcaaatgtaaaggaggagtgactttttataggcatccaaaaaaatataacattcaacacattaaactagaaaattaagacattcaatatataaataatacctgaaaatatgtataacccccacaataaataaaataaaacaactaaaataattaaataaataaaaacggttaaaattttaaatcatttttaaaattccaacacaaggaactctaaaaaacaccaatcatgatgacaaagtttcaacaatgtgattttgacacttatcacatttcaataacattgacaaagtttcaaaaaaaacaaaataaagaatattaaaataatttgacacgtgtcaaaactaaaggaactcctcctcaatcttgtggagccaaactttttccttagtgatttaggttctgttagttttttttttttttttttttcgttttaaagttacaagtacaaagaatcaggggtttattgtacatagaatgtcctttgggtcgccagttagtcgtcgtggtattcacgatttcattataacaagtcacaaatattgtaaagccctaagattagttagtcattttttgtcttctgatttaaaggctagttcctttctctaattctcagaacattttccatttttcttctaaagaaaaacttgtatctaaatgcttgtttgtttgtgtgtcttgtttagtgttgatc

SEQ ID NO: 73578 - DNA, 638 bp, Prunus persica
  Intron number 3 from transcript ppa012234m (locus ppa01223 4m.g) derived from phytozome v7.0 (chr-ID scaffold_1; pos 11549317 to 11549954 reverse strand)
attttgtgtataagattataagtaagaatgttgttcctctgatctgttgcaatacatacgcttgtttcttttccttttgtttccgactacatgtctttaaggtttttaaaataccctccactttttgggacaatttacttcaatttattttctcttgagttgattgtttcttacacagtcttcaacttgcatccaatcatttgctttgtgtagccgattcaaagtttagtttttttttcttcataattttggatcataagtgatttgcaaatgattttagcattcatataaaataaataagcaattctgcacatctttggtgtgctcattattccagtatcttccagcacacaagcaacgcttattcagcattctgaagcacttttactccaactttgttatgtttggttctcaccagcctttatttatacagtgtgccttcatgactgtatacctcacaaccccaccttatgaagttgttaatgccttgaatctatgaccgtttaaacatcagcttgttcataattgttgtttcaaaccaaggtgggtttataaaactgaaattcgtatttatcttctggtgctgtttcaaaattgaggtagttgcggacagagtatcaacagatttaaagcagcac

SEQ ID NO: 73579 - DNA, 668 bp, Prunus persica
  Intron number 1 from transcript ppa012234m (locus ppa01223 4m.g) derived from phytozome v7.0 (chr-ID scaffold_1; pos 11550346 to 11551013 reverse strand)
caaaaacagagaaaaaatatatcgcagcttgttgagtgagtgccttcttcgattttgttgtaaatttatttttattttttagttcactccgcacctgatctagatgtttgtttctccaatttgatgtgaattttacacttcttgggttgttcaacaaatcaataattgggaaacttgctctcttgaaagctaaattcatatcggtataattatttatggtaatttgatttcctcttatgggtttgtttgattggttatgtatctctagaggttcacatctgggtttacagtccaatgaaaaacttgattgatggaagtgtttatgtcgatcttctaaagaaaatgcgagcttttttattattattctgtttgcacttgatttgctctttgttatggtggtatttcagaaataagtcaaagtccatgttttgagcttgttcgcgatgtagtttctgtgggtgcttttggatgattaaatcatgtttcaagcaaaagagaattgcatgaatgacctcgtattaaccttatcttttttatgtatttgaacttcaatatagaaatgttaattggggagtctataatttgttcaaaattatatttgctttccttattatttggatgattgccttgcaggggagtcagttaacgagtgaaaattttcctgtgac

SEQ ID NO: 73580 - DNA, 171 bp, Prunus persica
  Intron number 1 from transcript ppa003155m (locus ppa00315 5m.g) derived from phytozome v7.0 (chr-ID scaffold_5; pos 15385990 to 15386160 reverse strand)
ccctttgttataggtaagaaatagggaactttttttttttttttttttttttggccaagaaacagggaactaatttagttcactattattttctttttcaaggattttgatttctacttctccagtatgatcagacctgaataatatatgtgttaaaaccaactgcaggga

SEQ ID NO: 73581 - DNA, 654 bp, Prunus persica
  Intron number 2 from transcript ppa012763m (locus ppa01276 3m.g) derived from phytozome v7.0 (chr-ID scaffold_6; pos 20719145 to 20719798 reverse strand)
gggaagtggaaaatcaactttgtgtccacacaaaagtatggcttttttcattgtcatagttcctaatgaaagagatttgtgttcgtggttatagactttggatttgcttttgattatagtagttttctgtgttgtatcttctgctgtggttcttagtgggtagataggttttatattatgtagtttctactaagtgtaatattgtgcacctggatttttcgctgaacaatgtgaattttgcgttggaagtgatacttatgataatgatttcatgttgaattgtgcactgtgacaagacttatactaatcttgttaaatttgatatcagatgaagttacttattttttatacagaataaattacaataataaccagctaatgatttcagattatcagtgaatctctgtttgttgataacacttctttcaaaatttgaaccttttttgagcattcctactgtaaaacctgaaaattgtgttgctttagctaggtggtgtctttcttggactctgatatttcaagtcttctctcagtcaagccttgaaataaacttatttttgttctcacttaattattcaatgattattttgttaccacaattagatgattaatagctcctcttcatgatatgtttgtaggtgggagaatccattg

SEQ ID NO: 73582 - DNA, 927 bp, Prunus persica
  Intron number 1 from transcript ppa008196m (locus ppa00819 6m.g) derived from phytozome v7.0 (chr-ID scaffold_7; pos 718041 to 718967 reverse strand)
agaaagctttgacacaggaagagcagctgctcaaggtaatataataataataataatactttaatttatgtgtgctttaattcaatcctattttttgcttttgtatcatttacatgtcaatgactttgaattcccagatcccacaataccaggtacataaaaaataaaataaaaatatcatattgtacatgtcctgctttccctaaaataataatctaaagttgttccttgatcttgcatacaaactagtattgtatagaattaaataatcaatgatcatttctttcaatctgaagtgaacacttgctcgttttcgagtggagttaaaatcagtttttcaaaattctccataaaattaaagcatttgcacgttcttaagaaataaggaaatgattttgtttattcttctatggacaagttattctgatagactgctagtagtttattttaatgggacccttttttttatatatatatttggtttcaaatgttggacggttcttccctggaaagttgcatttgcatctggtttccaatttcagctatcctcaattttgttttgattttgacctcttttagaataaggtctatcgtgtttagatgatagcgcattgttgtttagccaaagagagacaaattaaaattctgattgttgacctgacttggtattgatgtctgcagacaaattgaaaactagactcttcagattatgcctccttgaatttgaaatatatagaaacgttttttcatgcctaattttgtcacatatgttgtacaaatgagagtgaagtcctagataaagatgcaagacttcgtttcatggtagcggagcgctgattgagaaatttgatgaagtggtaaagttatatatgttttattgatgaatctcttcataggaaataattttcccttcttctcttcagattt

SEQ ID NO: 73583 - DNA, 790 bp, Prunus persica
  Intron number 1 from transcript ppa025618m (locus ppa02561 8m.g) derived from phytozome v7.0 (chr-ID scaffold_8; pos 16797914 to 16798703 reverse strand)
ctgtaattattaaggttagtatatatatgtattatatgtatatagttgaaagaaatcaagaaaaatcaaccattaagagccgccttaaaatagctagcagcaacccgtttatatttggaagattcaatattatacccaatataggtgctaaaattataaaaagactcatatatgaactttagaaacacacttaaagcccatttacaacataacaaagagtcctttaatttcttataaattacaaagctgtcatcgatttcttaaaacaagcctaaccctaaaacctcatatataaacaactcaaaatactcaataggacatcaaagtaatttaataattaaaattaaattaaatagggtcaattgtcatttttttggttttttttttttttttggtttgtttatcgtaattaaatggtgtatgtttctttttacacaataataaaacttacagcttaatgatttaagtattgaggtgaacaaagagaagtgtggggtttaaatagaaaatctctatctatgtcattagtgctaagaattgatatatgactaaatatctctttatatttttcattcatcctgtgagctattagtttcatcatttgatttgtctgttaatgtctacttattacatcatttgtctgtgctaatgggataagaaaaaatgtggttcctctgccatcactccctgattatcttgctataaggtttcttgctcgacaaggtgttataacaatggatactctaattctgttttcgtgaattgcagggggttcttcacgactggggcg

SEQ ID NO: 73584 - DNA, 950 bp, Prunus persica
  Intron number 1 from transcript ppa005313m (locus ppa00531 3m.g) derived from phytozome v7.0 (chr-ID scaffold_8; pos 18067359 to 18068308 reverse strand)
tcgcgttgccaaggcccttcgggaaggaacaaggggtaactattttctcagccttgttcagttatagtttgttactatttgaaatttgggaagcttgctacttcagttcctagagtttgttttctttcctgttgtgttaataacatggtgggggcattgttctaaatcattctttcattgcatatttgatttggacagccttttcgttcgttattctaatagctaccaattattgaggcttgagtagttcgttagctgttaggatttgattcaagtttgtcagcactttaatacactgtgtaatattataaaatttccgtgttaatcccaaactaatggcattctgtttgcgtgtgtgcgtatgaaaaaatgtttgttgtcttagatggtgacagtagtgtatactttcaaaatttgcttggcaagtctacaggatcatggtacgaaaatgtttgttttgcaatcctcgtgggcctatattggtaaaaattcctttcatgttctctctttcaagctgctgacattgcacccatggatgacgttgctggattaaccattcgtggacatttttagcagtgatacaaaataccttcctgtcacgaacctgcctccttattgtcctcaaagactcttgacctttcagatgtacatgattctttcctttttttttttctttttttttttgtaatttcttttatccttgttttccttcccaaactaacgggtcagaaccatctcatagagatcaaagcatggagcgtgtttatgttggtggtgctgatttatttatgcagcatagatcatgtttcctgattcaatcaagtatttttatgtgggtggtgctgattcctcttaaagtattcacctgaaaataaagatatgcatactgattttaaaccctcaattcttttccaggttacagacaaaaggctaaggacattgtgcaaggt

SEQ ID NO: 73585 - DNA, 730 bp, Prunus persica
  Intron number 1 from transcript ppa012442m (locus ppa01164 8m.g) derived from phytozome v7.0 (chr-ID scaffold_4; pos 236121 to 236850 reverse strand)
ccgttgatttgtaagctagctctagtctctagctggtgggtatttgttatgttcttggggtttgctttcagtttattcgtaatatcagtatagaatgtgagataatcgggttgctaaaactgctgcttctttttttgtttctttttcaacttttacgcaaagcctctgccttttcctttcacacagagagaatcatatgttatacgttcgttgttgattcataatattttaccttttaagctgagtattaagtctagtgtttcgtatatttggcttggatcaattttttttgcttttttgctcctttgcatattccgttttcccaacttttgcactgtcttcaattaaaggaaacgtcttttttcagacctgcggaattgttagtgtgaactatattatattactgggtctttcatttattgagcttttgatcttcttctttcacaagagacctctattctgttaaacgccatggaatattttctgcctttttgtaaatgtatggttcaacgccctctgggtgaatgctggatctgttttaaggttgagtagtagtacgaaagtgcataatgttatagtattttggtggaattttcgctctttggccatcaattttattgaaaagttgagaatacactctcatgcattttccctttttaaacttctcttggttatatatgtcgagttatgcgcagtggtttggcctggtttataagttggcacatctctg

SEQ ID NO: 73586 - DNA, 667 bp, Prunus persica
  Intron number 1 from transcript ppa002848m (locus ppa00284 8m.g) derived from phytozome v7.0 (chr-ID scaffold_8; pos 2597072 to 2597738)
aagtttccaggttaattactatactagctcagctaattaagactaattttgtttttttgtttttgtttttgtttttgtggtgattaattggagtgagaattttgagctcttattaaatttgtgttcatgggggtttgagatctggggactgatgaattttcatttctctgctgtcttttgtttgcttatgatctatttcgagctcttcacctagtttactctttcgggtaatttatctttctttttatttatttataaaattttgagtgtctttcctctgagggaaattacagcatgaacaatgggaattcattgccatggagttgagattaaatgatttttactttttcatatattacagagaatattattgtgctgaaatgaataaattccacaaacatggtttaatttcactcttaccaagttaattaatacagaataaattaattcttccaacttccaggagagaggctatacaatttccatatgtatatatatatatgctatatatctgagtttctggcttgtattttatgtgtgccaatgctttgttttgttgctgaattcaagatggcaagtgtacaaacagatatggagctaatttattttgtgcggactgttgttttcatcaggaagctagctgcgcttggctatcatcgaagcgcca

SEQ ID NO: 73587 - DNA, 645 bp, Prunus persica
  Intron number 2 from transcript ppa014238m (locus ppa01423 8m.g) derived from phytozome v7.0 (chr-ID scaffold_3; pos 3868297 to 3868941 reverse strand)
tccaacgtcctccgcaagatgtgatgagatttttctctttgcccttgctgtgtgtttgatatgttttcatatgggcttttgcatttttgtgttatagtcaatttatgagattgattgtgttatagtcaatttatttggttgcttttttctttgccctttatttcataagtggtggaggactggattgaagtattttttgtatatgttaagacaaatgtgtgaaaaaggagttaaaccagcttgagttaaagaacctcatgttccaatttggatggcgtaaatgcgcaagaatatcaaactcaatgttacaaattagttttggtaccattgcaatcaatatcaaaatttgtttgtaatagagtgtggtttttggtgtcaactctgtttttgttgccatgtttgtaacatttgagttagtttgctcgtccggcgaatggaaatctgtttctgattcttttttcagctatttgattggactaacatattgtatgatgagagtagcttgtttttagggagctcaacctttcattttcacattgtctttggtggtttgattatgttacaggatttatatgttgtttgtgttgattgtggaattgttcatgtgcaggtctggtggtgttactgagaagaagaagtgagaac

SEQ ID NO: 73588 - DNA, 878 bp, Prunus persica
  Intron number 1 from transcript ppb021687m (locus ppb02168 7m.g) derived from phytozome v7.0 (chr-ID scaffold_3; pos 10715983 to 10716860 reverse strand)
aaagtctctacgctttactcggtgggtttaggtattcgaatagatttgataatgggtcgggttttgacccgaactcaattcaatcttccaaatccgtctcctcgttttttgggccttttttccctcgacaaaaactacattcaattgaataaataatcaaacatgtgggggaaattacaattaagagaataattctttattttctcttccaagaagcacgtagccaattagtttgacacgacgatatctcaatctcctcaagtaaattcaagtccaatcactactacaaaaagtgaaaaagacgaccagaaaacaacgacggtctaagtgaaaatcgtcgtggtttataaaaagacgacggttctaaaaacaccgtcgtgtaatacaaccttagacaactaaaaaatggagattcaaatggctgttcaaaaacaacgacgtacataattaaacaaccgacgtctatttgaaacagatttccgcagtgtaaaatcaatgccaacaaagaacggcagaagttatgaatcgaccgacgtagaaagtaaagacgacgatttcaataaaaactgctgtttttactcataaaataacacgacgaggttttcgtataagacgtcgtataattacaaacaaatccacggctttaaaatacaaaatatcgccgtattaaattaatttacaacgacggaaaatataaatatatcgacgtcattatcgtatagttctacgacgttatctttaaatcgtacaataaaatttaacgtcgtatttattcattttatacgtcgtacctttaattttaacggtcgtcttaataagaatttttgttaacaatttttttctttgattttcttatcctacgtcggtagatctactta

SEQ ID NO: 73589 - DNA, 371 bp, Prunus persica
  Intron number 1 from transcript ppa000014m (locus ppa00001 4m.g) derived from phytozome v7.0 (chr-ID scaffold_1; pos 37467461 to 37467831 reverse strand)
gagctggtgcgaaatccaggtacgctttcttcgtttgaattttcgaacgaatcgatttcgttttcgtgttctgtgattcgtgccccttttcgttgttttgttttcgtctgattaggtttgtttttggggattgttagtgagtgaattaggttctggatcttccgaatcagatttcgttttgatatcctgtttggttgcccggaaaggaaattgaatgaaaatgtaccaagtgtattgggctcagtgccggcatgtttctctttttctgaaatcagcataaaattcgagtttcagttttgatttttctgtaccaaacgtgtatttattctatgtaatggtgattgtgtttaatggtttataggcaggattca

SEQ ID NO: 73590 - DNA, 480 bp, Prunus persica
  Intron number 1 from transcript ppa009612m (locus ppa00961 2m.g) derived from phytozome v7.0 (chr-ID scaffold_2; pos 26191399 to 26191878 reverse strand)
cagtcaagttgatcgtacagggaaggaatttggaggtatataaatttttagcttaccttacctcttgttggttttacgcggcgggttatagtgcttgtttctacttgtagtttaaagtttgggctttacaagcattttgttttctgtaatgtatatgttttggactaagccttacagagaagacttgaattaaatcacatctactatgatccgttcatgttgtttgtcgaaaagtacattatgtgtggaaaattagaaatctaggttatattttgtaaatcccattctgatatattgattaggtgtggtgacttccaaagcatttttcatgtgatcaatgatgtgatgatgactattggttgatgaccctgattctggtgctgtttctatccacaatgctctcctctaattatacaaggagtggactttgaatgttaaatttttatccgtgaatttagttatctgaagcggtcaagaagc

SEQ ID NO: 73591 - DNA, 175 bp, Prunus persica
  Intron number 2 from transcript ppa019168m (locus ppa01916 8m.g) derived from phytozome v7.0 (chr-ID scaffold_8; pos 19254630 to 19254804 reverse strand)
gaaaggtaattaattttctcagttttactttattttatttttgctttttgagctaaattaggaactggattttgggttttcttcagttggttttactcaaatgcacttgggttataaagccatatacttgtttattttcatgatgtgccctgtgactttctgtgagctcaggccc

SEQ ID NO: 73592 - DNA, 613 bp, Prunus persica
  Intron number 1 from transcript ppa015233m (locus ppa01523 3m.g) derived from phytozome v7.0 (chr-ID scaffold_6; pos 15105610 to 15106222 reverse strand)
acaaacttgctaaggtaattacttaccaagtactctttaattatgcgcaatgacattatccaatgtcttacatttgtcttagtgtttggtatatgcatgctgagcacccttgtcatccttgctccctggatggatagacatgaataagtttaaatgagttttcattgttctgacttccgacacattttatgtttaattgctgctttattgtggacttgtaattttgatacattcaaagcctgtactttgagtttgcggggcgctctttgaattcctaaaccttttacttgaaggttctttgtatcctggagtgtatgaatggaaggaacttgacatgctagaataacttcctttatttgtcatttctgtcatcttccttcctctacccttgttttgctcaattttttaacattttctatcatcatcctttctctatcgggttttgcccaaagattcaaactgcggcttcaggtgttagatgacagagggggttgggtgggtaaataagtcgtgccataaggttgtttgcctttcttggaggacaagggtatcacaatacctgaattgggtttcgatatttggtttttgcagattggccagggaacctacagca

SEQ ID NO: 73593 - DNA, 872 bp, Prunus persica
  Intron number 1 from transcript ppa000202m (locus ppa00020 2m.g) derived from phytozome v7.0 (chr-ID scaffold_2; pos 8984850 to 8985721)
ctgctgacgggaagcgacagaagaagtacaagcaggtattaatatgtgttttctagaagttttgtgatgcttgattcttattgtaggattttaatgtatggtggaattgaggaattagggtttgttattgctgtttttatatattgggattctgattaattagggttcattttttatatgcattttcgtttttgtaacttgtgatttattcggggttcttcatggtttttgttaaaatggtggatcctgactacgtaggttttcgattgattcggatctgggctttcaattcttgtggagtagtatcagatgcttttaggtttttttcattttcagtttgaagcctactgtgcttggattagacctggtataggatcttgaatttagtatccaattgtgattctggttttattctttatcttttgaaaattatgtgagtgtgtattgtttatgggttgcatgtaattcttgatttgactgtattttagtattagtgtgctagtgtagtagttttgtgttagtcgtttaggggtttgtttgataacattgatgtggacatgaagggagaactttacttttgacatacaaaagaccatcgtatggtgttagcctaattttgtttctaggaggaccctccaggaaaataatctccttcttttcatcatgggatccttttgattgatgagattatatgaatagtaaagaaaaacaaaatgttcaaatgttaggattttactttttatgggtttgaaatggtgaacaccaacttccaaagtatatttatgagttttattcaattggcagagatatcatgctcatttatatcacttgaataatctggttcttgctgatttcaggtgttcactaacaac

SEQ ID NO: 73594 - DNA, 318 bp, Prunus persica
  Intron number 4 from transcript ppa003803m (locus ppa00380 3m.g) derived from phytozome v7.0 (chr-ID scaffold_7; pos 12629507 to 12629824)
tgacaagcataaggtctgaaattctccttccttcataaatttaatgattttctaccctctttgttttcttttaatccgtgttacttgttatgcttttgaatgtttaaaatttcacttttctcttgggattgtgaacccaataatgtagtgaatatatttctcacatgaactttgtgattgaaaacaatacgtgaagaaacacacatctgatcttgtgtattttgctttctaatttcactggtgttggacaattaaatttacattaaaagtactaactgcttttgcttttatatgtaaatcaggttcccattgtaccat

SEQ ID NO: 73595 - DNA, 519 bp, Prunus persica
  Intron number 1 from transcript ppa015648m (locus ppa01564 8m.g) derived from phytozome v7.0 (chr-ID scaffold_5; pos 14749105 to 14749623 reverse strand)
gattcatctgactggttacaggtacgttctgcttgtggtttaatttatactgcatttattctaggtgttcgtaccctaaatgcaacaagaagatataattgagcataattaatatacatttttcctagggttatcttagataatgctctagttaatgccatagaaaatgccattgttgatggatgagagagaaccacattcataaacaaaacttgcccatgagaaatttgatcaaattcattttgatgataataatagagcacttcaaaaagttcccattttttattttctcaattttgttgaaaaactagactaatttcactgaatatatatgtggaagataatgcaacaaatcccgggatttttgtggcaccaaaatgtataaattggggacaatccaaaatgcctttacatttgattgattgagatgtggtgaaaggacaaagaatgtgtcgtcctgtaaaattatattatagttctgacaaaatatctcctaattcctttccctgtcagggaacg

SEQ ID NO: 73596 - DNA, 806 bp, Prunus persica
  Intron number 1 from transcript ppa009254m (locus ppa00925 4m.g) derived from phytozome v7.0 (chr-ID scaffold_6; pos 27717950 to 27718755)
ctgtgagcctagggttagtttgattcgattataaaccaaattaattatgaggatgattatagtgaccaagtagtattattagttgtccaaggatcgaaagacagttgcactttttcacactcgaggagggaggagggaggagggaggagggagggctaaagcatataaaagcatctccagggagaattgtctcctaaaagaaaaaggggctaaacattttgtaaaagtttgtaaagtttggcacaacttctaaaaaaaaccgaaaaataatgaataataaaagtagaccgactgtataaaataaaagagtgagggagattttagaaatacaaaaaagaagctaaataataatgttttattttggtgggtttataaagtttaataactgttaatgtttataaaagtgtggaaatgaatgattaattattggtggaggtggagcccagggcgccaaggaaacaaataaaaggggaacagagccaagttgtcctgtgtccacttgcctttaccacaatcattccaaacctgacatcacccgtgacatcagttttccgacaaggcccgagcgatccagcaaactgcaccctccacttggcaacatctccaccgtctaaagcgcccaaaagattctagaccaataccatatatcttctcagacaggagctgatttggccttcttccaaagttacacgttttctatctagcgttcctcttaaatttgcaccctcttcaccagcatattataactaagaaggatcgagaaagctacagcccattctaaaccagcaaacaaagaaaaagagaga

SEQ ID NO: 73597 - DNA, 966 bp, Prunus persica
  Intron number 1 from transcript ppa022090m (locus ppa02209 0m.g) derived from phytozome v7.0 (chr-ID scaffold_8; pos 9194829 to 9195794)
caaggtcatctctctctctctctctctctctctctctctctctctctctctctcagagtaaaatgaataaaaaatgtgctatatatatatatggaaagatccaaaacattgatactataaaatcattattagcaaatgctgtggttatttctggatctgttttctgttgattttttacttttgtaattcctatgtgaatcactttcataagatttagtatgatcactatggtttgatttaaccttttcttatttttatttttattttttttccccatcgaatttggatctttttctataacagaaaccatatcacatgctaagttcatgtaggatggacaatgtcaaagggatgtttggatgacaagatttaaaatgtgagatttagatttgaccttttttagtgtatataacctttatgaacaatttttttaaacaaggaaacataataggggaggagagggaatcaaacttaggacctagaaatataataggagaggagggaatcgaacttagaacctaaaaaacttaaagatcttttaaaattatagatttgaaagaacatttatgtctccgttatttgacatgtcgtaattgttttacaataataaaatttataaatagatttcatcaacataagcttattaagaaaatttacaaattgctggaaatgaaaatccttaatttttactttttccatccaaactgtttaatctttactcgaatttcaatttcaagtatccgtatttttaccatttggtctttttctttgtatggtgtaaatatatgcgcatggttttgttccacagcctcatggtttaagctggtaccttaaataattaaaccaggcagatgtggattatatgccagtttttcaggacgttgtttacaaaatgatatatgcatgaaaagaaaatatttacaaatttaaagttgatacaatgttgaattgcagggtggggaacag

SEQ ID NO: 73598 - DNA, 356 bp, Prunus persica
  Intron number 2 from transcript ppa006738m (locus ppa00673 8m.g) derived from phytozome v7.0 (chr-ID scaffold_6; pos 27779001 to 27779356 reverse strand)
cagagtctcctaagagttcacaggtaaaatttataggcagatgttttttggttctctgttttgtttggctttctccggtagtttccaactcaatctctacggatgagacgcaaatctaatgatttgccctcaattcaaacccattgctatttggttagggcaaaaagaattccaacagaaaattaaacaaaaccctttatgttttgggatgaagtgaatgaaactgagaagaatcatggacttttgcttgtaaagactattgcaatgttattgtagatgtgggatggctctgatttccaaaaattgtccatttcgtttcagccaacttcacctcagtcatcatcacgaaaaggctc

SEQ ID NO: 73599 - DNA, 970 bp, Prunus persica
  Intron number 2 from transcript ppa025374m (locus ppa02537 4m.g) derived from phytozome v7.0 (chr-ID scaffold_7; pos 7785222 to 7786191)
acactcttgaaaggttttttctgccggctatttgggtaactaattttccatcttcttattacaataaatatcatagaaaacttaggttttccccctcaaatttagttttccttacgtgcaagtgcaaccaatcatagatataatgcacatatgtatgacttaattagcatatataaagaacttaaactggcagttcaattttcatgtgatatggtatgcgagtttttgctagcatatatatgacggcttattcagtataacattaattcaaagaagaaagaaaaaattgagatatataataggctagggctgaatctggctcttttattggtaatatatagcgtctttcgtaggaatttggatgagtctaatgaaaaatcatcattttcacctacaaaaaaataaatttgtagttcaaatggtaatggacataaatttagggatatgtaagtttttttttttccccattaaaatagaaaaaagtcttgtttgtaactttttatactcacctatgcttcttatgtgtttccgataaaaaatgcttcttatgtgtttatctcctaatagtttaacacaactaatctttattttaacatttgatttattggttacttgtttaaatttttttttataataataatgtacctatttcgtgataatatacctatttattttataatgtatctattatttttaatatacatattatcttttatgaataattatttatctatttattacggataataatgcataggtaaataattttcaagttttcgtgctatagttaaataattatttataaaatctaggtaaattaggtaaaaatatggtaggtttatgtctagaatataggagttacatggacttttcttcatgtgagccaaatttacaacatctccaataattaagagcctgtctattatttatttcaggggttcgttgtcaacaaacttatacattgagagcc

SEQ ID NO: 73600 - DNA, 847 bp, Prunus persica
  Intron number 1 from transcript ppa004866m (locus ppa00486 6m.g) derived from phytozome v7.0 (chr-ID scaffold_2; pos 13734241 to 13735087 reverse strand)
gaggtgaggctcaacaggggtactgtggaaaaaaggtaatctcaatcacaatccacttgcccattttcctctttttgtgttcttatgaaagttttgatgtggaatgattgactagtaccaggtactgatcaatttacagtacctggtacatgtcagctaatgcatcaggtgctgtagattggtatccggtttgagacggtttatttcctatttgtttgatatgtagttagtgccctagaatgtatcaggttcgcaaacttgcatactaaatcgaagcccctttggttgagttcaaagaggttttcgttgtgaaatcgaagcctctttggtttagattgaaagggttttcaattgtagaatcaaggaatatggatcaaaaccaaaactcatttgagctaaattgaacaccttcaaattaaactggaggggatttggtttgatttggaaatgtatgctcttgatcatcatttaaagcaattgagcagttaagaacaaattaactaattattttatttttagggtaaacactgatctatctttcttgaagacattttttctgtgttaatttttcatggagattagaccttatgatagattggtgtatacttgaaaaagatacaattctgtttacgtcaaaagagagatacaactacaacacagattgttagacataagtttcaaaatttaacaggaccagaggacctcagtgagtatcccattaatgaatctttatgttgttttggaatccaatgattttgtaatgtttcaatttcaaattaagtggtctaactattttcatttcccccccacagcacaaggtacctctgttatcagttgaggcattcca

SEQ ID NO: 73601 - DNA, 599 bp, Prunus persica
  Intron number 1 from transcript ppa025391m (locus ppa02539 1m.g) derived from phytozome v7.0 (chr-ID scaffold_3; pos 4160758 to 4161356 reverse strand)
gcattgctgctcccttggcctctgtcactttccaggtttcttcttctttctttttttaactcaaagttaaagttacagaaaattttagtaaatatgtttttttaatgtttctttttgaggtccgcctgcatccaagtcctaggttcgattcctccctcccctacccaatattacttgtaaaaataaataaataaaagttcgtttttttggtgattttatgtaaagacaaagttgggattaaaagttcttattgaaaaagagtggctgttttagatttgtcactatctagctagggatagatttattgaacttattcaatcatattctttaatgttcttcgtgctctttgcaatgccggaagattcaagttcgaactttttttcctataaataaatatacagaaaaaaactatatacgcgacatttacaataacgacccaattttatgacagtcaaactgtttgttgtcagaaagtaaaactcaaatgcttttcttgcattataagcaacactataagcattgcgacccaagcataaatgaatcatctgacttcaaacttcgtttgcaaatttggtaacaaaccttttgtgcattgcaga

SEQ ID NO: 73602 - DNA, 611 bp, Prunus persica
  Intron number 3 from transcript ppa006403m (locus ppa00640 3m.g) derived from phytozome v7.0 (chr-ID scaffold_8; pos 240252 to 240862)
tgaattcctacaagttgagtccttttatcacaaaagtgggtctttctttttccattttaatcgtgtttaattagtgcttcttatatatatataagatacatttgaaagactactgtcgtgctattgtaatatttgatgtcttagttgcataaggggattattttaattatgtcagtatgtaaaaaaaatcctaatgtttctcttgttataaggtattaaaatattgcactatcaataatcttgcattacactgattattctctataatcttactattgagtggaatcattttaattgcattctattgaatttcgagattgttcttggcctttgttttacttaatacttcactttcacgcaattgcacttagaccttgccttgtaaatacaatgatgccctttattaaaaagttttatgatcccctccacatgaacttactatcccattttgaatattgcaatttgatttgcatgagttttgttattattttctggaaacctactcttcttctggtagtctccaaacatgctcttgtgtttgtttactttggctttagacaagactgtcatgttttatacatgtcaatcaactcaattttaggtctgcaagt

SEQ ID NO: 73603 - DNA, 773 bp, Prunus persica
  Intron number 1 from transcript ppa005257m (locus ppa00525 7m.g) derived from phytozome v7.0 (chr-ID scaffold_4; pos 12932796 to 12933568 reverse strand)
acgaggactttcaggtactgttaaaatcgattcttccattctgtttttgaccttttccctcattgttctgttttgagaatcaaatgtgaaaattttgatgtggtgagaattgtatatgaatgaattggacattggtgcatgttgatttggtttttcgtagttggaattgttgtcaatatcaaaatttgtgaggaaaatgaatgaaaagctatttgagcagagtggccacaaggtcctttaaattgaatcaagctgggaaagtattatataccagaaaacttgtcaatacccgtttcaaagctgcattttgttaccgaaaaaatgttgcatgcaattagtttatgttgtattttgtcatagagctcagcgaagctttagggaattcgggaattcgtaggatttgttgtttgtttcattcaaataaaatttgtgattttagttgcggtgttgtgtctttagttacaatttttggttaccattcaattttgagatattgtaggatgcatacgccaaacatagtttttggaaatttgcactaaaaagtatccaaaatgaggaagaagatttctttatttttttaaaaagattattcggtttttcacttacaaagaatatgtttggtgtgttgctgacaatagaaccccttttacttcttggttattggctgaatctgagtttcctgaacctgaaagaggagagaaatttaattttcttttggtggtatacaactgagtaactgattaataaatatatgatattgcagaaagaattga

SEQ ID NO: 73604 - DNA, 1030 bp, Prunus persica
  Intron number 3 from transcript ppa010267m (locus ppa01026 7m.g) derived from phytozome v7.0 (chr-ID scaffold_3; pos 2874107 to 2875136 reverse strand)
ccaagaggtgttttcaaataaaagtaactccagtggtaggtatctccgtctttaggcgtatccgtttccttttcaattctaatggcataataataaattaaccccacgagtagcaaatgcaatatttttatacttgttggacacacactcaaaataatttatcgtggttcatactttcttgtattttagttgggtaaaagtagactagagtagttaatcagccacgtttgttgagctcctttgtccattttaaaagcaaaaggcgtaattcctgttagtggcattagcttcctccttgtacaagaatgatgtgatgtatctgtgtaaaaatggatacaagttcgtttctcatctcttggaagtggatacaagtttcttttttcttctggttgacttctatccacttccaaaagctcagaatggtaacgaagtgtccagctttatagtgatacatcatattttggggcatataagtttttcactggatcacttttcataattttggggcatgaaagaaattccttggaacttgcatctttatgctctttccctcatccaagtgtattggggtgtgatctctaatgccagatgagatttttttagattctccaacagatcatggcatttcgcattattgtgcggtaaacaacttgcttctcacccggtatctggtgcccatttcgtaggatcgagattagtgatatttgagtagttaatgtcctaccagcaccctgacacatcttttacttgattgtattgggagcagggttcacatagcttgtcagggatgggtgtaactaggaaggaagcatttatgtcattagaagtaaccggataaatctacggaaatatatttttatgcattgaggtggtcgctcgtgtagagcttgcttcttctctagaaatctgcatcttcctgtataaatctttttatgcatgtcaagctgaaaattaataccatctcccaagacatatgtcacttgacatataactttcctcttatgcatttcctcgctttcttttcaacagg

SEQ ID NO: 73605 - DNA, 758 bp, Prunus persica
  Intron number 1 from transcript ppa005382m (locus ppa00428 5m.g) derived from phytozome v7.0 (chr-ID scaffold_7; pos 20126868 to 20127625)
tttgcagtccgctagcagtttttgtccagatccaggtttgtgtcctcttctcttattcttttctttttttcttttggtgatttttccgtccgttcagatcccggtccttttggttgccgagaaatttcggcggaaagtttatttctttgtgttttatttctatttggtgtcgcgagtgggctaaattgcctggcacaattgaaattcgggtcctgaaattgccaaatcctcagattcgatttttgaatttcgtttattttagtttatggcggctttttttttttaaaatttttttttttattattattacagacgattaagcttccagttttatgaatttggagtaattttcgatttctctgtgaaatcagtattagttgcataatggggtcaagtatttgatttctgggtgatggagaagtgagaaatccacaaaatgaatcaaaaattaaaaactaaactgattttaatgatttttgtgtttagagtcgactatgttactactagatttctcaatagcttaggtgattatgtattttattttctaattgaaatatgactttccctttaggaagttccaattagactcttttgggctctgaaatttggaagttcaatatcgttacaatatttatactaaaatagttagctatagttccttttggtgggttatacttacacatatctaatttctttattggtgctgtagggatgtctaatctgtttgatacttgctttcggatgggtttgtgcagctt

SEQ ID NO: 73606 - DNA, 938 bp, Prunus persica
  Intron number 1 from transcript ppa004786m (locus ppa00478 6m.g) derived from phytozome v7.0 (chr-ID scaffold_7; pos 15063433 to 15064370 reverse strand)
ttcattttcaaggtgcagaatgaagcagctagggtgcatgtttagagctctgcattgacctctttagtatgtagggttatcgaatatcgatgtctatacttgtaagtgacttatgccaatttctcagctgttgtaaatcatgtcaattgtagccttgtcagttgtcaatccataatttgtgcctagggtcatctgtgtatttgtttgttgtagatttatgtcacatgcataatttagacttgtcttgtaacattatgccgatttacccagaaacaagtgagtgtgtaaaatatttgtaaattccaatgtttaaacatactatcggtcatatgtgaaccatttgtcacttcatttgcatatgaatttttgtcacgtgctctacttcatccagttgattttgagtttgaatgctctaaaatcacatgaatttgaagattttcatcgaattatgaatgttgcaatggaagctctctctttcttatgtatatatagaatgtgtgtaatttttgttttaaggtaagaataatgttgcgcacactgaagctgctgcctccgcattcacaatttttacagtccatgaaagcctgcagcttcctctgtttacttctgtcaacttctattctataaatatccgtaggaaatgcagccaagtgaaaagtcctgcatgaaggggaaagagaggagatgcaaagagaatgaaagttaggtggaagtgggaaaacagtccacggaattctgatccatgaattcttctttctttggataacaaacaaatgcatatgtatgctcttacgtcaccagaaaactcaccattgtctgctagcaacaattttgttatttaacccaagcaagagggtctacttcatagagcaacaattttattttccatggcttcccgtgatgaagagcgccagcttcactttgtcttgtttcctttc

SEQ ID NO: 73607 - DNA, 723 bp, Prunus persica
  Intron number 2 from transcript ppa001207m (locus ppa00120 7m.g) derived from phytozome v7.0 (chr-ID scaffold_1; pos 884268 to 884990)
attacaagtataatcgaatatttttccccaacaaggtaatttcagtttgatttacataaattccataagataacatgtatctgggagagattgtcctttttattttattttattttaaatttaattttttttataaaatgttgaagttcatgcagcatgctttgtcagtctttgattaaaaaaaaaacaaggctttgatctctttcataacatgatgaattggttttagcatcatatcttatccgacccatgtggtgagatgtgctatgattgtttctttcgagcgtacttattggaagctaaaacttactttatctggaaaaatcgaaagatcagtatatgattaactttttaatgtggaaaagtcattctctaatttacttttccagctagatttgcacttgcattagaaagtctattcattattggattggcttcatatttctttaattgtagagttttcttctgtgtatataaaaacatggtaacttatgatgtgcgtgtggttatattcaatggctttttctatggggccataattccacaatttcaaaaagttacagcaaatttggtctctccctcttcttcattgaaatgcagaaacgagacttacgctaacgttttgctataattgggttaaggaacttatgtgaatgcactaacagaaaacttcatgtttttgtgttaggcctacctgccatcaaaaacacctgggctattact

SEQ ID NO: 73608 - DNA, 831 bp, Prunus persica
  Intron number 1 from transcript ppa010434m (locus ppa01043 4m.g) derived from phytozome v7.0 (chr-ID scaffold_2; pos 4466031 to 4466861 reverse strand)
acactacaaaatcttcaggttaatttgtttccatagttactgtaagtgccagggttagggtttagggtttaggcatttctgaaagccattgcttatctgaaatgctagcttatgctaaatgcaactccttttctctatcttctaagagttgcttttgattattcggtcccaaaattgtgaacaagttggagaaaagctttaacgctttttttagttttctggattggttgtatataagattaagcttcctgaacttactggttactagtgaagcttcctgaacttatttggctgtgtatttctaggggtattgattgatccgattaggaaggatttctaggcctatggattgagctcagctaatttctgggggcccctagaaatttttatttacttttatactttttatttatgttatttatttatttatattcatggatgttatatacttacatatacaactcacttgaagatgtcccaaagccaacaaagttcttatttatattcatggaggttttgttttgtattgtttgacgatagtgttgtacagtggatatcttgtccactgcatcttttattttcatttagctgtagtaaaagtttgtttctcacgattaaaattcataattttttcttaatattttccttaaatggaagccatgttcatgatagactataaactgggtatttatttaaccatatatggtttactctaggtgaactattggttggtaatctagctggagtgattgcagtatattaatatcttcatagtaatgatttatctttgagacaggcaagaagacggagaagaaagtcaacaactctgat

SEQ ID NO: 73609 - DNA, 378 bp, Prunus persica
  Intron number 1 from transcript ppa005807m (locus ppa00580 7m.g) derived from phytozome v7.0 (chr-ID scaffold_1; pos 32316035 to 32316412 reverse strand)
ggcaccctcaacgttcagctcgccgacatccggtatttccaaaattgatcctttcttcttttcttatttattatctttcatcccacttcccagtccccactgtagatatgtttcattgccttgccgtaattcgaactgattttgccctatttttgcttcaaaagaagaaaaacaaattattaacctaagcaaagctgctggtagttgcattgtaaaatggaggagtacccatgagtgagaaatggtggggtatttattcagattagataaatggaaaataaagcaatgagctatgtgatgacgctttacaaattacaacacttacacgatatgaaattttcagattgaaatattgaagcggctgcaacgagaagcatt

SEQ ID NO: 73610 - DNA, 448 bp, Prunus persica
  Intron number 1 from transcript ppa009624m (locus ppa00962 4m.g) derived from phytozome v7.0 (chr-ID scaffold_3; pos 21665044 to 21665491 reverse strand)
cttggacaattcgcctctgcttctctttttgcctggtatttatattatatcccttctttaaaaataaaaaataattaaaaaataaaaaagtctaacttttacctttctttctctgcaaatgatttcccgggaaatgcttttcttttcatcatcatgattacaaacttattagatatcaaatgcaaaacagagcttttgctcaacactttattggtttgttttatttttgggattcattagcgaaacaatcattttgatctatgatcgctgccaaataaagttcaatcatcggcttacacgtgtctaattaatgctcaagcttcctttcctactgcgttatcatatctttttttgtttttggattaaaaaaatcagcttaaataagtgaagtttaattttcttttaaattatcttctttgctttcttcttctgaatgatgcaggaattg

SEQ ID NO: 73611 - DNA, 537 bp, Prunus persica
  Intron number 2 from transcript ppa008527m (locus ppa00852 7m.g) derived from phytozome v7.0 (chr-ID scaffold_2; pos 16596416 to 16596952)
cggctctgttcaaaccattttgtctcttgcatttggtatgtatagcttgtcattactaagaaacttgtttgatttggttgcatttgcaagaaatagcatatgtttgctctacttgaattctatttatgcagacaatacatgttgcctcttgttaaatttgagggcttcaaaggctttatttacagtcatcaaatggcatgccttgaaagttcctcatgcacatgcatcttagaagaagtttgtttaacgagggatctctatagttttaggtcttagagtaagcaactctataatgtaactttggaaatttgttttcctttttgttctcaaacaatcaactaataaacgagtttcggaaataaaatcctacgaagtttctaacattccaaacatgtgaaaaaaacgatttaaatttgacatatttgaagtttgaagaatgtgttttgaatccaaagtccaaacatattgtaaagcatcttctatgaatcatgttttaatgcaggtgactttgatcaacttagctttatcatcaataca

SEQ ID NO: 73612 - DNA, 473 bp, Prunus persica
  Intron number 4 from transcript ppa009508m (locus ppa00950 8m.g) derived from phytozome v7.0 (chr-ID scaffold_1; pos 22028261 to 22028733)
gagcccaccaacatcttgcgcgtatgttttcttcaaccttatctttcttcataataagatgaagagcatacaatcttgttaggcaacaataccccaatttctaaactatctaaagcaacaaaaacaaagttacttcaaccatctaaagcaccttattttcttctcaactggactgaataatatctcaacaaacttatgcccctctttagacgagttatgcggctaccaattgagttatatcttcttcttcttcttctttttattttcttttgtgtcagttgtgacattgtgaaagggtgtttagacttggtacatcctctttagcagagaggtctgactactgagctatgtctaatgatatctaaataattactttgttcttgttttgaaatgtagatgaaataaaactgttgtggaaacattggttatggagtacttatacagaagcagtttgacttgtttttgtcaaacag

SEQ ID NO: 73613 - DNA, 573 bp, Prunus persica
  Intron number 1 from transcript ppa025157m (locus ppa02515 7m.g) derived from phytozome v7.0 (chr-ID scaffold_4; pos 25811041 to 25811613 reverse strand)
tctgacagtgctctgacaaggaaaaaagacaaaaagttttctctggagattgaaatttttaatcgggtttggaaacagtgcatgtgtaagtcaggtagacgaaaagttgcttacatataaaaccatttcaaaaaaataatacggcggttacatataactacgacgtataaattacaaaatacgacggtacatttaacttcggacgtggtaaataaatacgacagtagtgttgtaggtaccgtcgtagtaaactcaaaaattaaagtacataagtaataactcgcgtcatggtagattatttaacacgtcgtttttattaatgtaccgacgtggatttctgtaatatacgtcgttaataccgacgttgattttacaatttaaacggcggtttttttgtaaggaccgccgttggttttaaaaatttattctataaatttgtcgctttcattcattttcggtttacatttagggttccaagttcttcctctctcagagacactgtctctcacatctcaaagacaataatttggatgtctttctcaaagagaaattgagcttactcgcatcaaatct

SEQ ID NO: 73614 - DNA, 803 bp, Prunus persica
  Intron number 1 from transcript ppa011978m (locus ppa01196 9m.g) derived from phytozome v7.0 (chr-ID scaffold_2; pos 13655721 to 13656523 reverse strand)
tggtgaattacacagaaaacaaaaaatagcatcaagttggtgagcaatacccatctttctccatttcttttagcttctttttctatagtaataattctagtctatgcttttgaaatcgtggtaatctttaattgttccaagaattttcttctgggtttgtggatctgtgaatttgggttacttattttttgctttctttgttgttgaatgaagtgggtgggagttgcaacttcctaacctaaccccttttcttctgggttttctcaaaactatgctgttgatgaagatgggtttctttttttaatgttaacgatcggttgggcatgtaatatgtgagaaataaacttgtctgtgtgtaaaaactgcctcttgataattttactctatttgggtatctgtagctttttgccaagatgatgatgatctctttggatttgaagttttgccaaacagttcatgctattaactatataatatgcgaagtagaaaccattatgataacaggatttctgtttaaaaagttaaagatcatggttgcccaaatttaagaatctttaggtcatatcttgggctaattttgtgaatcttctctgcaacatagtctctgtgtttttctcggttggactctgttaaagtagtgaactttgcatatattgggcaccattcagactatgatatgatgtggggttgcttagtggctgttagtgtgcttgtttctatttgattacttttggttcttagtttcccaactgattttttgaattatgatttttatgtgtgcattagttacaagttgaagtaag

SEQ ID NO: 73615 - DNA, 657 bp, Prunus persica
  Intron number 3 from transcript ppa010603m (locus ppa01060 3m.g) derived from phytozome v7.0 (chr-ID scaffold_1; pos 36932009 to 36932665)
tcaatccaaataccacaacctcagttattattcaggtgaggtggttttacttatttgaaaaactttatgtctcagtttagacattgtgtaggccgcttaaaatgactgtaatgcattacatgtagccttgatgccttatgtagcataggatcactttaaggatatgttcgtttttgaagtttatgagtttttgagggctaacggtgataagtaaattgtgaatatgttatataggtaggtcaaagttgccaagaagtgttaactttattttggctttttgagcctgtgcatggaaatgcctttgctacataggtaggtaaaatttcatgaatattacgcactatgatttggaaagtgatgaaggatggaaattaggtaattgaatgtatgttacctggtaggtaggatcagtataatttgtgttgaatccgttttctaaatgctgattttgtttaaagttttgtccatctagtaatataagctcccatgtcttgtatatcttaatgcatgtaaatttacttttttatatacttggtaactaagtcgccaaatgctttcttcagtttccttcctttataaataaataaactagcttacaactttggccaagtaatcatccttacctaaagaaccttatgtttctgctgcaggttgtca

SEQ ID NO: 73616 - DNA, 989 bp, Prunus persica
  Intron number 1 from transcript ppa012007m (locus ppa01200 7m.g) derived from phytozome v7.0 (chr-ID scaffold_3; pos 6179921 to 6180909)
ccttccctctcactgcctctggctttacataaaaggtatgaaattttttgagtttctctttattttttgtttttggctgtttcaataattggttgtttcagatttggtgttttggactgttttaatatgctggtaaatgatatttacactgattttggttttgtcattgctgtgtcaaagcatagtgtagtagaataaagaagagttgaaaggaaaaagggacaaatgcataggtttttgggtttttcccttgaaatcaaggcatactttttttcatctgggtttggtttgttctgtatttttgtcgttctattttgatgttaattatgctgtgcatgaaggaaactgttgtggaaatgaacaaacccttcgatacacatgcagtgatttggactgtgttcttctgatgtcttcagcttggtagagaacaaaatcaaacgaattcaaaaattggaactaattctgctactcaaagatagttgagcaagttggtggctaaaaaacttgagactatgtagtatgtatgtacaaggatagtatggctaggagtagctcacttttgttacaattatgtgttctaagataatgcattccatgaatttacattaatgtctattgataaagtcatatccaaaggcttgtctctgaataaaggaggtgtgagaggagaaatggtccattttaaaattcattcaaaatcaaaggtatgggtgttgaaggggccagagcctcctaactggatggtgctctggtgctcgtcctccatctccatgtctgaggttgtcctgtctgagttagaggatataaataaggctgtttctggacagctttaagtatgatatgctttgtgggatgtttattttttaagttatgctttgttggatgtttttatgttatgctttgttatgctatcctctgtatctgtttctccctcatccttgtgtatgtgtatagctaagcaggcctcagaaacctccgtcctaaagcct

SEQ ID NO: 73617 - DNA, 503 bp, Prunus persica
  Intron number 1 from transcript ppa024444m (locus ppa02444 4m.g) derived from phytozome v7.0 (chr-ID scaffold_7; pos 20275571 to 20276073)
ctcttggaatcgattgctgcaaaggtacaagcacctaacgaattttccttttatgatttgttaacagtctattcacaaaaagaaatgcattgctggtgctccccccgtagacaaagtacagatgtttatgttctgtagtggcctgaactgttgtattgcagcagtaataaagtgatggaaggtgcaatggttggggaaaatgtgagagtttattaggatttggaaatgttcaaataggactttaggcgaataaatctcgattgccatcgagttgctggaaagggaaattcagataacaggatttttgggaagtttctggaaaataaaagtttactgttagttgctactcttgggttatagagttacgttttaattactggatgagcataaatactaggacataaatttgcattttgataaagtattgcacagcagagtccattgaacttcttgaaataatagtttgtgtatcatatttaacaatgaaaagaaaacaatcaaag

SEQ ID NO: 73618 - DNA, 720 bp, Prunus persica
  Intron number 2 from transcript ppa000293m (locus ppa00029 3m.g) derived from phytozome v7.0 (chr-ID scaffold_1; pos 22622920 to 22623639)
gtttttgtttgaagatcaaataaaggaatttgcatgtgctacagtccccgggttcggccccagttttcgttttatttgttttcaaatattcaacagttgattctttccatggcacggttcatttatactaactctttcggtgactcaatgaacggagaggacctatatttttctgatgaacaatagtacaaccatggatgccgagttcctgagatttattcttgtgtgaaaattttggtctgcagtaaaaactatgttaggaaattaattatcgaagttttcagttcttttctcttttggaaagtctatttaaaattctagtgtatcaaattttatttgctgttgacaaatatgtacagttccttcaagtagtgttgaaggggttagtaacatcattactggattagtgtgtgacattgactgggctttgtagtgaaatcataggcatagatttgtcttttaattaatgttcatgttatggcagttgaagcctctgggggaaatgatgaagaaaaggtgcttatcgggtcatctgatgactcgaaaggtgagctttgtcattctgttttgtagcattaatttgatgaagtgttgaatcaaagtaatatctattttgcttcctccatttgttgtttatttcgtttgatctgattttatattgctattttactcttttttttggcagatccagcagcctcagaaagcagcatacctttgtcc

SEQ ID NO: 73619 - DNA, 864 bp, Prunus persica
  Intron number 2 from transcript ppa007594m (locus ppa00759 4m.g) derived from phytozome v7.0 (chr-ID scaffold_1; pos 9430727 to 9431590)
accattgttaagttacacactgctttgggtaataggtattcattttttaattatataaaaatctttttatatagttctctttggccagcttttctttctgtataatatatctatgctcagaaaatatgaatgtaaccatcctcaattcgttcttaattagtttgtgagttctgattttattaagatccctctttgaacaggagagatccggcagcctgatactttatagaaccatttttcaacttggttatgctaagctagattcaagctctctagagactctaatatttgtgttaattggaacaactcttatcactgtccatcgatctacaattctgctaacattgctaattaatttgattaattactggattatggctgcattgtgatactgccgatgtcgaaaaggatttatatttgagggatgttaatcaagttcttaatttctttttgggatccctcctctagagaactgctaattttagtaaggatggttaggaacacaaccaactgaaaggagctcaaagaagcattatgttttttttttctttttttgggcagtccggcaacataacatgtttgtgttgttaaactatgaactggagaccatattgctacatttataggatcttgtgattgccaaaatcacaggcactggtacttctggccattggatattattgaataaattgctgagtcaaatttttaatgctcacttcctcctttttaactattcaagaaaagaaaccaatggtcaagtagttgttacatattgagatataattcaattgaatcattatattactaaaatttgagcaaactgttgcaggtggtcattcatagccgctcatttaccaggaagaa

SEQ ID NO: 73620 - DNA, 350 bp, Prunus persica
  Intron number 1 from transcript ppa002889m (locus ppa00288 9m.g) derived from phytozome v7.0 (chr-ID scaffold_2; pos 26318767 to 26319116)
agaagaacatcaattaccttcgctcttttctttcggtaagtttttcatttgatatgcatgttttttatattatattattctactacgtttccaatatcatcctgggttttctttttcaagatctctgatttttcatgtcgtctgattgatactgctatgattgttgctaatttcttgatgttcttggatcatccgaagacccatatgcttgatccgttactttccggtgctcatgggtgattgaatgctttatatgttcaattttttattttcgtttatatgggtcatttgattttgctcaatctctttatacagagtagctgcctggttgcttcttgcatcatcatcaa

SEQ ID NO: 73621 - DNA, 488 bp, Prunus persica
  Intron number 1 from transcript ppa011299m (locus ppa01129 9m.g) derived from phytozome v7.0 (chr-ID scaffold_7; pos 19113064 to 19113551 reverse strand)
agtctctttggcctgggaagcaggtttgttttgcttaggatctcaattttaaatcccatatgttgaaaattaattctttctttttttccttttcattcagtcgatcataatatgttttcaggatcatgaattctatagaattcaacccttttttttttgccttttttttcattcttggttgcatcattaaatcagagagcttttcccaccatagctctgttatatttggccttgctagaggtgtctgctacatgggcatcaattaaaattgcaaattagatatgtggttttgtttacttaatatttacaaattatgtgggatcagacaaaagggttatttgttcttgttgtttcttgcctttgagacatatcaaaattcttactttgttctttgtttgaatttggaagacgttacctttttttttcccctgaattccatctttgattgtgcagaaaccaaaagacatttcggcctaaaaagagtgctc

SEQ ID NO: 73622 - DNA, 860 bp, Prunus persica
  Intron number 3 from transcript ppa004053m (locus ppa00405 3m.g) derived from phytozome v7.0 (chr-ID scaffold_4; pos 20513375 to 20514234 reverse strand)
tcagtttgtattggtgaagcagcaagcagtcagtcgtaagtggttgatcagttaatttttcgttttgttgttctttcttctttaacccctatccctgtgttattttgttgattaaatggaaaactggaatagtttaacatggagctcatgtggagagagagagagagagagagagagagagagagagagagagagagagagagagagccatgacaaaggactacatttctttctgaataccattaaagttcatgatttaggatacctaaaggaaccgtgatatatttattcatgtcgtgccttaactggatttgtgcagtgcctgtgattgttttttttcttcttgcttagttacaatttattatgaagttagtcttaattactaagatttagctagtaacattaccatgacttgttttttctcttccgaaaagaattaaggatgaaagtaaaatacataagaacatctttaatagataatcattttttcatgaagacatttgaaataaagaaagtgaaaacaaagactttagtaataataagccaatggttttaaatggctcatgcctggcattggtccttttcgtgctcgtgctagatatgtcgacctggaccgacatgaatgtgaatgtccatgcatgcttggcatggcactgcattggatatttcccctttcatgacccctttaatcgtgccattctcatgccagcctgctttgcaccattatctgtgcactacattctttatctttgtatcacgataagtgttttttttatcctttgtctcagtttctgttacagatgacaatggttgaattgtgcattttgatctgtctttctacaggtacttagttgttccaa

SEQ ID NO: 73623 - DNA, 497 bp, Prunus persica
  Intron number 1 from transcript ppa000088m (locus ppa00008 8m.g) derived from phytozome v7.0 (chr-ID scaffold_2; pos 2089355 to 2089851)
gaatcaaatttggtttggcaactcatcaagaaatcgtaagtagaaatttgacatttaattcattatttattcagtagatgccatctactgtttgagaggtgttaactgcattggtttgtttcagagaagataaaattgcattcatttgataggagttggcggtttctgtttcattttttggagagattgacatctagagtccatattaaacatctataatctgagctgagctcatttcgtttcaaaaaagaaaaccaactagtgcctgattatggctttccgttatcaaattatatctcttcacaactagtgcctgattattgaatatggggaagtaaattagaaaaccaacagagtgtgtgtaatgattttaattttgcagctcttaatctttaattactccaaaacccaacaacgttggactaatttcgttttatatttgtatgtttacttttttggcagtgtacagcatctatcagcaattgcgctatcagcca

SEQ ID NO: 73624 - DNA, 660 bp, Prunus persica
  Intron number 3 from transcript ppa000088m (locus ppa00008 8m.g) derived from phytozome v7.0 (chr-ID scaffold_2; pos 2090191 to 2090850)
aaaaagaacaaggtaccactagatttagttcttcatcattaatgattgtttctatggtcattattttgcacacaaagcagagacttttatttcatttatttggacttttcttgttggttaactgaagaactgcagatggtttttgttctaattttcagctgaggaacaaaaaggtttacatgaagaagcagttgaattttgaagctatttttactgtgtcatccatctttcatacatatcaccttttctatttataatcattttgtattaagtgcccctctttgcaactgtatttgtaatctatgcagtagtctcaatttttgtttttaacttttgaaagttgctaaaatatcccaaatttcgcaaagaaagtctttgaagtttgaacttagtactgcacaatcaacgtttgtattcagtgaaatttttcttgtttgccaaccactagtctcacaatttttattgtttttgtgaacatcttattgatgcaaagagtcttagtcgactattgcttgatctttagtttttttaaattctgtaaactagttgttgcacgctttcaatttgactagctactttttcttatcatgaagatttatgttcttatattctgtatcctttggtgtttctgggttgataccattcagttcccaaccaaga

SEQ ID NO: 73625 - DNA, 1018 bp, Prunus persica
  Intron number 1 from transcript ppa002136m (locus ppa00213 6m.g) derived from phytozome v7.0 (chr-ID scaffold_3; pos 3484766 to 3485783 reverse strand)
aagacgaaggaagcacaactccgcttcctgagaaggttttatttttattattgtttacattactttttatatttgtaacgaaaggatttggtctttaccgaatcctatcgaagatgaatgccgtttggtggtcatcctgcataatttgggtgcatttatagtatattgcgggaagtgggattgtgggggcattggggtttgatactgtggttgagtgaacatgtttgtttttgtttgatttagctttgaggtttcgtaagcagtgtgtatacttggatcagaatcctctctccattttatgaaatggagaggtctggttggtagatcatggccatttatttagtatggttctgggaacaagtgttttggtagataggctatgtggtgttctatatgttgacattattgatcataatgtttgacgacttatccctaatttgtactgcattttggtgttttgcctgattgctcgcttcctttaaatgggcaagaattgaaacctgaactttacctcctgtaaccccttttggaaactttggttgactctgagaaggtgtctgggcacctttttctagatcacgttagcacaattaaggagtgaaaacaaattaagttactggttgaagttggagtgcagttatggaggtattttgtgaactagaagtgtactgcatgatctatttcttagaatcacataatgtattgatggatactgtataagcagcatagtgtttctgtgtattgactcacattttttatgatcaccatgctgtagtccttgtgtcctgttagttataggtatatcccattatatattcttgaataataataattgttttaattattactaataataacgagcagtagttataactaaaactctgagaattgcaccactatgcttagtctaacaagtgctgcctctagagacaacgtccatagttgtttttttttttttgaatcgcttgacataaattgttgtctttatgctaattcctaggtttgttgctgcaggttc

SEQ ID NO: 73626 - DNA, 905 bp, Prunus persica
  Intron number 1 from transcript ppa013304m (locus ppa01330 4m.g) derived from phytozome v7.0 (chr-ID scaffold_8; pos 15777707 to 15778611)
ggctctccgtctcgctgtcttctctcaatcccccagtacacttctcacctcacttcattcttttgtttcaacttttacgcaattttgaatcaacttcttcgtttggatcctgtttggttgctaagaaaaaaatttgggtttgttatttcaaacttgaaggatggagaaaaacccatttctatttttgtggtttgcttcactaagatttacttataagagagcacatagtgatcaatgtgggaatttgataggatatacagttggaattcttgtattcttaatcttgtaagaaagtcaatgtgattctatggattgtgtccagatatagatccaaaagagctgaacttgtttttctatttcatccatcagtaaattctctttctttgcaaatgcataatataataggctaatttctccttcaatatgtgcttgtgggatgaaggctttgtatggatgttcagattatatgagatttcagataatattaagtgttactgtatttgatgtcaatgtcacacagaagtatatatctcatattgagaaattaccctaaaacttgctttttgtaatcaatgggcatgctatcctcctaggcccgtacttatatacaactgtacactttgcatttaaaatatagaacttgcttctctgatatcatgagttgcttgtatgagtatggcatacttaacctaatgctgctgattgctggatcaacattttaaactttctttgtggtttgtctttgcctttaagtccataacagtgtgcttctaacatagaatgaagaatgtagaaaatggaattagtctattagatttttctttttctttttaacttatactgtttttctgattttcatgttttgcatttgtgattcgtatttttatttccagtgactgaagttc

SEQ ID NO: 73627 - DNA, 436 bp, Prunus persica
  Intron number 1 from transcript ppa008538m (locus ppa00853 8m.g) derived from phytozome v7.0 (chr-ID scaffold_1; pos 40119774 to 40120209)
gcttcaggtatctaattcacctcttaaagcttcaattttgtgatcttctattggactcgtcaacggtcaaattttcgcgccgttttttgcaaatgatatactttttgtataattgtgcggaaaattacgattcgatattgaattttgggacttattgcataaattatgaggtttcaagttctgggtagtgtttattagtcgaatatgcattgtggcatgcgttcttagaaatgtttaaaacgaatttgagttggaattcattcaccactaatttggttgttgtgaatttggaaaacaaatggaattgcgagtttttggagttcaattttggttagtttttcagaaaattgaattcgacagataagttaaaaaaatttctttgaccaagtaatgtcttgcagattttgctttcaaagttccagctgaacttgaatcg

SEQ ID NO: 73628 - DNA, 573 bp, Prunus persica
  Intron number 1 from transcript ppa001267m (locus ppa00126 7m.g) derived from phytozome v7.0 (chr-ID scaffold_2; pos 18230339 to 18230911)
ttcaccagccttcacagaagattccctgcagtaagtctgcaacatttgtgtgtgtgtgtgtaggaaatttgcacagttcatgtttgttttatgatgttgtaatatgacttatgtaactgaattattgagtgttttgtattgaaaattaatcagaattaccctgtggacaaaatttgttcacttccagttactaactggatcatgcttgcctctataggaccatggttttaggatctgatagacagtatgagccattcaataaatttgaattcagactcaagactcatgaaccagataatatgtggacaaacattgaagaaaagtagagaagtttgtaaatacttacaaaactcaggaaaattagtcaatgaaatattttatgaatttggctaggatatcaaagtcattgtattgtgtatctggaaaagtttacgatcttacatttaagaagatgttcatataccaaagttgccattctgccttaccatctccaagcttccgaatggatttaatattccactgtttccacgatttgcagtgggggggtggttcccagctagctcactgaaggac

SEQ ID NO: 73629 - DNA, 994 bp, Prunus persica
  Intron number 2 from transcript ppa000346m (locus ppa00034 6m.g) derived from phytozome v7.0 (chr-ID scaffold_8; pos 17247026 to 17248019 reverse strand)
gcacggagcttcagtttgaaacattgcgggcacaggttcaacaagtaagactgcttctaccaccttactaaattcagttattaaggtcgcttctatcacattttatatggacttagttattatacaatactcagctaatgtatcttcataatctttacaccactttatacgtctataattgatgccattttcttacttgattttattatggggagtggaacttgtttgttaagcaatcacttttctttgttctttttaaaattacacttatctcaagataaaagaggatgttatttattgaagttaaaattcattgactttgcgtcaaatattgtataactttgcccctttccataaactttgtcaaaaaatccgttaagtttgctgatattgcatgagtgggaccatttcttgtgttgttaatatgtggaacttactaattgtcaatggtttgttagtatctagaaccatcattgcactcatgtagtttactccttttgattttcaaattaccacagcacttactatatagtcttgggtttataaagatcgtcaggttgttcctctatgtatttcttgtggacactgagtttcctgaatacatgatggctttgattaatgctatgccgtggtttatagtgtttgatttgtttaattttacctaatactaacactttgcttagttatcaggatatgaaccttgttcagatcagagcatagaacctgttctgtttgtgttgtttatgtgtttttttttccatttgttgtggatatttgtgtgactaaattgcttcaatggttccgtttgtgtatacaatctaatgcaatagttagcgtgagccttttcagtaagtagcacattttttgtttttgtttcatattggcttttttgtatacatcagtctaagaattcctagctatgcctgttgttatacctcaactttgttgtatgtaatcttttgcaggcaattccatttctggtagggtgtccagc

SEQ ID NO: 73630 - DNA, 845 bp, Prunus persica
  Intron number 2 from transcript ppa008293m (locus ppa00829 3m.g) derived from phytozome v7.0 (chr-ID scaffold_4; pos 13837863 to 13838707)
cttcatcttccttccgtatttttctggttttccaggtttcgatctctactcattcttcattcatacatttttgtgttattttgtgttcggctggcaagaaatttatttaagcaaacaaaagaaaaaagaaatttttgtgaaaaatcgacaatttggatcttagtttttcttgcttacacgttctgtgtttactgtctaggggacaaaatttgtgatttggaagttgggttcatattctattccgatgtttctccaattttcttgtttataaattactatgttatgtttggcggctgtgaaaatttgaggaaaaggaagaaataagaatgccttccttttccttattcgtttttgttcattttagtttagtttggtgaaacccatatacgagattcgcaatgtggggctcattttttgctgtatttggacgttttcacttttctgcgttgtgcccctttctggttgcacagaaagttttggaaagtgggaaccaatttctttatcaagcttacttgagtgccggttctccatctgtggaagtggaaacaactctgattgccaatttctttttttttggttctcatttttctcagaaaccaagaggaaatagaaccgatgagaatatgcttgagtttcttttctagtcgtgtttatgtattgtttctttcataatataccttgcaccatgctttctccttttgatctccgtatttctgttcatcaatgaacatctagcttactcctgcaatttctgcctctcgtttgtagcaagaggaagaattgaatgatttaatttgattttctaacattggcatttaacttgtacacaatcagcattcacaaat

SEQ ID NO: 73631 - DNA, 522 bp, Prunus persica
  Intron number 2 from transcript ppa025769m (locus ppa02576 9m.g) derived from phytozome v7.0 (chr-ID scaffold_3; pos 19832695 to 19833216)
tccggaacctattacaaggggtcagtcaaacttaaaatctaccttctttttcattttttttcttagctcccatgaattctctctcctcttttgaagtttccctcatagacattatgatatgaattaaattgtgagtcagtcaatggagttgcttgaaaacaagttcaagttagggacaagataagctacaccatgtggttcttggctatttatgactgctctggtaaacaagaggacttttttatgctccacctaataatttattcattttgtagtttctgtatgtgttaaaaaatatagagatatgctagacttttagcaacttgacatccgggtctttgattaattttatgaaagtgtttcaatccttccaaaacacccttttgttttgtgtgtgaaaactgaaaagtcacgttgcctctaaccacttgcttaaagtaatactgcatctgttgtaattttatggcaccccatttcaattttcataatcttattagtatgtgcttgtttgaagggattact

SEQ ID NO: 73632 - DNA, 331 bp, Prunus persica
  Intron number 1 from transcript ppa011891m (locus ppa01189 1m.g) derived from phytozome v7.0 (chr-ID scaffold_2; pos 15426793 to 15427123)
ctcaggtcctcttctcgcatttaacgcacttagcttatgtacttgtgttgtgctacagttctggaatgttcgtattttggtctcccaatttggcaatacaggctttctaactttaaattcttgtttctttattagttagtttttacatgccaatttaggaagaagaaatgaatgaatttggtttatttgtaaagaaaataaagaaaataagatttggtttgctggagaaatgatttttagtataaactgaggaaacttgtgaaaattgttttgatttattttctttaatattacagtctgcagcatcattgaagagtgaagagtatcgcca

SEQ ID NO: 73633 - DNA, 483 bp, Prunus persica
  Intron number 2 from transcript ppa000952m (locus ppa00095 2m.g) derived from phytozome v7.0 (chr-ID scaffold_6; pos 2262386 to 2262868)
ttcaagaattgtatgattcaatctttctgattcttgtctataccttgtagcatcagcgactgaatggagatatcctctttcttttggttttcttgtttctttctttcccccatttgtggagagatttttttgtccatctctcaggttccaagtgcgtttttgcagtttactatttaagagatggggtcatggtccttttagccttttactatggaagaagtcatgggacatgggttatccaattatgaacttcgtagacatatcttaatgaaattaaaaaaaaggctgtcaattttatctttctttcgttttgaaaatcaatcactagccatctaaggtttacagaattaagtagtgctgaatgtcttgaattacatgaatagtatgtattgttatcactcaaaacatgttaaacttttaaacttcaagtaaactggtctataatgacatgatttccttctttactgcaggcaactactaaac

SEQ ID NO: 73634 - DNA, 714 bp, Prunus persica
  Intron number 1 from transcript ppa010003m (locus ppa01000 3m.g) derived from phytozome v7.0 (chr-ID scaffold_6; pos 23965495 to 23966208)
agtgaatccggagtggaaattaaggtagttgagctcaacaattaatgtgttacttattcatgcatcaatcaaatatatatgtgtactttatttatgttgaaaacagggaaccagaagagcaagctatgaaagacaatggtccatcaagtggcctgcagatacattcgacgaggtcgcaacattcgacaacttgagcatctttcatgttccaaacaaacttcgaaaagtcgacgacaatgcctacagccctcgcattatctcaatcggaccttaccatcgtaaaaaaggcaaccatgagcttgtcacaatgatagagcacaagtgccgttacatgcgatacttctttgaccaaatcaaagatcctcaagagagcctccaagtcccacttgagttccattttccggtctacaatctagacacaacggttcgccggagctacgctgggggtgctcgggaccatgatgccgaaagccttgaacacatggtgtcgtttgatggcattttcatattggagctcttcctcaggtatgaccaatattgcaaaaaagttcccctaatagaccaatctgatgcaattttcaacaatgcttggatgatccccgcccttaggcgtgatctcacattgctcgaaaaccagattcccttctttgttctacaagaactgtacgacgttgtcaagcctcgaatcgttaactacaagccgccacactccat

SEQ ID NO: 73635 - DNA, 923 bp, Prunus persica
  Intron number 1 from transcript ppa010349m (locus ppa01034 9m.g) derived from phytozome v7.0 (chr-ID scaffold_3; pos 19787436 to 19788358)
ttggagcttctaacgttctcaaaattcgacaacaggtatgcaaactgtaatatttctcaagttcacaaacttttctatctgggtttttcagttcacttagttcccattatcaaattagcttcaaattcgtttattttttttccaaattatcaatgactgaatcatcaagtggctttgacttggttaatcgcgccaattcatcaaaagacattagcactgtgtctaaagtttgtcactttcccactatctttggctttctttgatgcttataatacaagttgacattggttcttaggaatttgtaggagactgtgtttctatgatggttctgaggtgaaaaatcctctctttctttgtttcagaattataatccgaaattgtgcatattaatgctgcgttaattgatgcgcagaacatgctgttttatagccacttaatgcagggcctcttataagagtggctgagaatcatgcagggaaactgcataattgccttggaatgtatctgactttagatgggtttcgagtttttaacttttattttaagggtgatgtattcaagttatcattggattggaattaaacttcatggtttcactagatgctagaagaagcatccaattgtcttttcttctgttttttccttttaatttagtgtagggaccactgagggttatgggcctatggcgtatggatgatccttacatgtgcaatgcaagcaaagcttgttcgaacatgataatgccttctatctatttctgatattttccttatccctttcgtttagtcctcaaaccttactatgaaatgctattatgattccaaccaaaacgaaccaaatgattcttagatgaccatttatgtttataagccggtttttagtatcctctcaatccagttttttattcccagggtttcaggaaa

SEQ ID NO: 73636 - DNA, 584 bp, Prunus persica
  Intron number 1 from transcript ppa012160m (locus ppa01216 0m.g) derived from phytozome v7.0 (chr-ID scaffold_1; pos 25325780 to 25326363)
tttaactaagatccctctgcgaaagctcatcgaaggtaaaatccaagtctcagatctcgacctctcttctcttgcgcttcaacaattctctgaattttctcgcatttgattcattctcggttcgatttcacgactttttcgtgcgatttttgttttgaatttcgcactacttttttcgattctggtccaatttaatgttcatttcgtgcctaaattccgtttagtttttttttactctgatccgaagatcatgtgttttaatcatttggatctctatgattatgctcgaatttgttaatgctacttttggtagttcaattacaatgcatgaggagctctcatggattttctgcatctctatggtgttagcttagactttgtctccagatccgctcgatctgttgctgcatgcgcataattgctagtttgagtgctcctgttgcctagttttaagttagatttgattagatgatatcaactgcaatcgtttggctccagagcgttatacctttgtctttgtcagtgtttgatctgttgatgcaaatgaattggtgcctctcaatgtgtagggatccacagccgga

SEQ ID NO: 73637 - DNA, 223 bp, Prunus persica
  Intron number 2 from transcript ppa010398m (locus ppa01039 8m.g) derived from phytozome v7.0 (chr-ID scaffold_6; pos 26987252 to 26987474)
ggtatgctattttcacaagttccctactcttgaaagttttttataacttgtttgcttcattattgtttaaatttacatcttcgaagcttttttatatttacgtgaagcaaactaacaatacagaacgtgctgacaaataattttgttttcggatgctttccagtgattcttattagttttagtatttattatgtttttcttcttgttattggttgatgcagat

SEQ ID NO: 73638 - DNA, 619 bp, Prunus persica
  Intron number 3 from transcript ppa011430m (locus ppa01143 0m.g) derived from phytozome v7.0 (chr-ID scaffold_1; pos 30409514 to 30410132)
gccatcggtacatactactatactcaattcttcttcttcttctaatctaatcaatcccacaattaattatggttaaactctatatttaatactaatctgataaattgaatacgaatctgagggagggaacatcacaccaaacaacatggacaatcatgtgcttaattactagactattagtcatctatctgtttcatgtttgcataaactttgttttttttctctttctattctaatatatattttaaaaggaaagaagtacaaaagaagaaagtttttttcgaagcaagtgtccttttaacacctctagaagcaaatttcctcctcctttttttccatttttttttcctggtacaaggataaatcctccccaaactctgcaccctcgagcaaccccgaagatggtgtacaccagagcgggagaaggcaaaccttaggcaaatttcctttttgttttagccagaagttcaaatgacctttttccaattgaatatatatatatatatatatatatatgtgtgtgtgtgtgtgtgtgtgtgtgtgtggctttgttttggtctttaaaatgcattgacttaatgttgacgatgtgtgtgattaattaattaaatagggtggc

SEQ ID NO: 73639 - DNA, 456 bp, Prunus persica
  Intron number 1 from transcript ppa013745m (locus ppa01374 5m.g) derived from phytozome v7.0 (chr-ID scaffold_5; pos 12475966 to 12476421 reverse strand)
gcacactggccaggtacaaatattaaacccttaattttaatctatgcatgtaattctcatatcttcaacatttctggcatttacgggcctttgcagatgatcattccactacccatttcataattaaagaaaaagtttcgatttttttttaaaattttcaaatattgggtttttctcctttagccagattcattgttaattactgggttttagctatatgttgtccctgatcttgtgtgatttttgaagtgggtttctttgttagccttttacttttcttacagcaattctttctttaccaattgccatttacttctttttgggcctcattgatggctttgattgatcaccgttactgctttttatcattggtttcagctgtttgatcctttacgtaatcactgccctgttttgtcaacaggaattgcgtccaagactagttgatagccaatttta

SEQ ID NO: 73640 - DNA, 615 bp, Prunus persica
  Intron number 3 from transcript ppa016454m (locus ppa01645 4m.g) derived from phytozome v7.0 (chr-ID scaffold_2; pos 19081133 to 19081747 reverse strand)
ctttattggcaattcaagaggtgaataaatattttaattttatttgaatggcaagtgaatgtggttgcatgtaacagaataaccatgcaaaggctacttgtcttactcccttcctcttttcaatctgtttaataaactagtaaatgtctgcattccaatttcagtaagtcctagcataattttgtttatccatcatcttgtttatccaatttcagactcgatgagtgatgctatgcagtaggtaccataagcatcatggacgtgcattggatacttccttccaattttctgtttattgtatgctttgattacacaatggcattgctgccaacccaagattcttaaggccttactcattctgttgaaactagaacactcttcttgataacaatctatagtttcttgtttactaccactattgttctactcaacaaatcaagcctatccaacaaactgcttggatttggttgcaggaatttcttttcattatcccaagcataccatgtttgtgtacttgctataaattatgagaagacaaattaatcatgttcatgcttgttggtattttcttcttttgtaggcagcagaggatcatttagttcatctgtttgaaga

SEQ ID NO: 73641 - DNA, 755 bp, Prunus persica
  Intron number 2 from transcript ppa003090m (locus ppa00309 0m.g) derived from phytozome v7.0 (chr-ID scaffold_6; pos 2206180 to 2206934 reverse strand)
gcttccagagaatcttgagggtgagcaacaaacacctcttttggtcttatttgtaagtgtctttattataaatagaaaagaagaagaaaaaaaaagttgcatgcgacaaaggcttaggaaatggtccagtgaggactttcttcctggatcatctttgtatatatctagttgctgcttctcatagaaaaggaaaaatatcttgcctagatttcgtagcagtaatccatttataaaattttattcagtttgacctagctacattcaagcgttatttggttcttttgacttatttacaaaaaattcttgttttactatttttgccaaattttgtttctttctcatttttcaacttcttgtccggtatgcaaaagtatgagttaaaaattaattgttgagaagaaacatctttttgttatgttcttcaacaatatctggtgccttaaacctgagatgtgggataaaatttaagcagcaaaggtttctcgttccacattctaaatgaaggcaaacttaaaatgggtaaagtggacagcggttatataattttagatgcttcccctgatctaacggcacagggattattcaaccccaactgccaacttgtggaggaagttggttttccaaaattatgcatgtttaaatatctaaaaagttgatttttattttggtcaaagttctaaagtgttgaatgctgtagtaaatttttcaccaaaatgcctatcaagaaaatgacaaaacgatccttcaccacagag

SEQ ID NO: 73642 - DNA, 390 bp, Prunus persica
  Intron number 2 from transcript ppa023704m (locus ppa02370 4m.g) derived from phytozome v7.0 (chr-ID scaffold_5; pos 15407683 to 15408072)
tcctctttgccactccctcctccccagctgctagggtatgttctgcttctcttcaatctcttgctctctgtgcgcctcatattttacatgactctaggccatcccaaaagtgctttttgttattttataagccataagttgcttttgttccttctttgagccatatctgacagacagacagacacgtgtacatatagacaactgttaatatggacctaaaatgatgagaaattaatgagacctagtaaagtccagcgttcatgaaatgtcttattgggcctaatgtttaacctaactttcaattgggtttacaattcaatcacatttaatttcttagactttttttgttttttttgtttttcttcaactgtggttgtacagaaatacaat

SEQ ID NO: 73643 - DNA, 502 bp, Prunus persica
  Intron number 1 from transcript ppa008807m (locus ppa00880 7m.g) derived from phytozome v7.0 (chr-ID scaffold_1; pos 24391612 to 24392113)
ctgcttccaaagcgtgagttaatttcttgattaagcctttcattttctttcataatttgcagtaattctgtggttgaatcttgaatgtcttaagtgcattctatgtcttgtagccgtgtgggattgaaggttttacatttttacttccatacgcaacaagtttttcaaaacaaaaagtcttcttcttttgttttgttttgttttttaatgaagaaattcttcttttgttttttgtgaacacggaaaaagtcttttataaaaaatttgttagtgaacattcacgtcgcgtcacatcatagaggtacattttcaaagttatgaaatatttagacataagttatagttaatcagagcaatgtgctttttacgttttaagtttgaaattttatttctatatgtattaaaaaatccatacaaaggattcaaatcccataacaaaagccgaaataatcttgacactttgaaattcgaagtttgaatggtattatataggtacctttca

SEQ ID NO: 73644 - DNA, 683 bp, Prunus persica
  Intron number 3 from transcript ppa007246m (locus ppa00724 6m.g) derived from phytozome v7.0 (chr-ID scaffold_1; pos 45214776 to 45215458 reverse strand)
ttgagcaggcatttgatcttgttcaaggagcacttgtaagtctttgtattctgtaatctcctcataatatgatatgtagtgagtttatgattgagaacttgatgccactgttgtttgagattataaaaattggagttcggcattttgaggaatagttatcagtgaagaattgcattttcagaaaagattggatgctaataaaaaagggaagttttttaaaataataaataaaaattcaaacatgagccatgaaagattggctagtaagcacaggagtaattgctggggtctgaaccccagctcctttggaaagtttcttatccgattaaatttatttttctgtttcacagcaatgggcaatctagtttacagaggaaatgacatcccctcattcttcttggcaattcaaattttaaaattacacatcacagtaatctattctatcatgctgcaccttaagttttcaaattgatttaaaattacatagtaaccaataagggtctacctatttcaattttaaaaaaacaactaaaagttaaggagcaatctcatatgcactagggcttgtcagggaatttaagaagtcatgaggaggacatgggaaatagcttatttttctcagtattacttcattgggcaatgggcataatcacatatctgaatagttccagtgtgcaggtaaa

SEQ ID NO: 73645 - DNA, 620 bp, Prunus persica
  Intron number 1 from transcript ppa011724m (locus ppa01172 4m.g) derived from phytozome v7.0 (chr-ID scaffold_7; pos 22033459 to 22034078 reverse strand)
aaggtccgttatttctttcggttcgggtcccctatttttcgcggatcccccttgcagtcacttttgttttcaactctttaggtgttctatgcgctatatacgatattaataatttttcccaatttgatgaaagctctgatcattctaacttgcgttttaaatccttagctgattaatctggtttgatttgggatctcggttttccggagttttcaactctcttgtctttgtgtgatattgtttgtttgtatattttttccctggatttagggttacagaattttgttgcaattgcaaatttcgggttttctgtagacttttgtggtgattatagaatttgaggcttgaatttgcattgccccaatttcattcggcatcagatgcaattgtttattggagcttgttggcacgtttttactagaaatttctgtaaataaggtcactaaaacatagggcacagattgtcttgctctcagggttattactgttataattttgaatgtgtttcttagacgctcatttaagttcttgttcttcttgtttatcttttgtcggagtttcagtatgcttttataaactctgaatttctttgtgttgtttcttcatagagtataaggtgc

SEQ ID NO: 73646 - DNA, 618 bp, Prunus persica
  Intron number 2 from transcript ppa007102m (locus ppa00710 2m.g) derived from phytozome v7.0 (chr-ID scaffold_1; pos 34726560 to 34727177 reverse strand)
ctgctgcaaagggtgcccagcttgttctcctccctgtgagttttttactattcaccctcttactaaatccttatccttgtgtgtttttctgttgtgtgctcattgaccttactggtttaagttgattatggattataattagcctgcctcttgcttctttaagaaggagaatatgtttggatacggattttttcagataaatcaagttttagatgcccataggacattatagcttgaggtctgtatttcttatcatgcttccacatgaaattagcatatgccatggcatagactgggaactctatcctctcataacttaacttattatcggttatgaaactgggtgtcgtttttattcactgtacccactaaacagagatgttaacatcaaaaggaggcgtggaggtatataagaacattaatatgttgaagaaaccgtgctaatcagatcaaatggtgcttataaactcaccttttaagttaaaaaaaaaataaaaaacctttaagaagccgacctaatcagaccaaatggtgtttatcaactcatctttcaagttgaaagcgctaaccctttggtctccatttgtgtttgcttctttgtttgccaggaaatttgga

SEQ ID NO: 73647 - DNA, 764 bp, Prunus persica
  Intron number 1 from transcript ppb024912m (locus ppb02491 2m.g) derived from phytozome v7.0 (chr-ID scaffold_2; pos 10380467 to 10381230 reverse strand)
gatttttctggtcaaaagctgggtaacaattatgtttattaaatcgcggggaaatctgataaagctcgatcgggcacgtgtagctagctagctgcgtgcgaccaaatcttctggttatcttccacatatcctgcaaacaggtatagtaatactaagctcaataccaattttgtgcgtctctctctctttttttctctctctctctccacacgtacgtaccagagacacaaagaggaaagaaaacagcaccaaatagggagaagcaaaaactgggtaatctttttgaccaaaaaaaaacaaaaaactggtacctaccgatgattctttttcgtttccgcgagaaagtgtagctttaattttccagataaattgtttttatatatatagttgtgtagcaacatgcatgctaggcctgcatattaaaattgaaatttgaatattaatattactatagggatcgaacaagtacatgaaagcaaacttgttgtctttttcgtctttttgtagcgcaggccggccgagagacaaagatctccttggggtttcctgagacaactatagctagtaatagctttattaattttttttatttttttattttttgaaaagaagagaagtgtcttgttctatttcttcacttgttgatgtgtatatatatgtatgtatatgtatgtactatgtatgtatgtttgttggcatattaataattaatgttgttgcttttggcagcacaaatagtagtagaagaaaagaaaacaagagtg

SEQ ID NO: 73648 - DNA, 953 bp, Prunus persica
  Intron number 3 from transcript ppa015507m (locus ppa01550 7m.g) derived from phytozome v7.0 (chr-ID scaffold_1; pos 12567674 to 12568626 reverse strand)
attcgcaattctgtaagtttgtatttttttacttttctcttgctcactaatcaagaataaattagttatgccagacagcatagttagacatgacttgatgatttcgaagtctgccaattgtataaaattctacctctcatagacatacaaaaaaaataaaataaaattctgtagatataaaaatatgttcaccggcgccattttggtgtgctgcgtaggttttaggacctgattggggaatcatgatgtctgatatgtggaagaaaaaagtagtttattgagaaaattaatgagttggaagtggaagaagtgtgtatgaaggcgggctgcgaagaagaaaaatgatgtaactgtctcagagaggatgtaagtttgaagaaaaaaaacagggagaagaagaagaaagagtatagctaagaccagaacttttcagtgttaactaaatgctccctccagagggcatttctggaccaactattcacggggagctgatgcagaagttaaaggtgttaatggaattaaattaacttgattgtagtaatggggtagtttttatttaagtgatgcagccgtggcttggttagacaagacttgttagttacagaagcctcttattctgaggaagatctttttgtcccttggatcatgacctcggtagatctataagtcttctctatttctttttaacttgagtaaataattagagttcttctagctgtaacttcaaacagctgtagctgggtttctgttcttgtggcatggcttgcacccacggtttacaacacaatagcattttattactaagttttttttgggtcttttgctgagtttatcagggttttagtagatgtccatgattagtttaagagaatgtttggcgtgtatatgctaatcaaattttttttttttttttcaataaaaggttgaagcaaagaaacccgcagagaaactgc

SEQ ID NO: 73649 - DNA, 620 bp, Prunus persica
  Intron number 1 from transcript ppa026562m (locus ppa02656 2m.g) derived from phytozome v7.0 (chr-ID scaffold_2; pos 17891025 to 17891644)
ctgtaagttccatgaactccaatcgtgctagctatatataaagttctaacataggcgttctatcttcagtcacagtgtttttgtgtgtgtgtgttttgttttgtttttttttagagtaaaactaataggaccaagatttcaaaaactggaaatatttgaatcgggtttaccagtcaccttgttttgttagagtaaaactaataggaccaagatctctctaactaaggtgaaacttaggtctcttagttccacctctattagatcggtggtcagattgttttcttttagctcgaaggagagcatgcctgccttagatacgagggagagcaagagtcaaattttcgtgacaagtatgtgagcaagtaattaagtgagaattgccaaagaatgtgtatactaaactgatattactaagaaacgaaatattagttatcagaaaaggaatacaaagaaaatttattgaagtcatatatagctttgcattgcatagaaaagttctttgtatcaaaatctctcctttgataataaagtatacaattcatgttttttctctcttagtttatattttcaggcgcttattctaagaaatcaatcacaaccaccacaaacacaagcacacc

SEQ ID NO: 73650 - DNA, 838 bp, Prunus persica
  Intron number 1 from transcript ppa010610m (locus ppa01061 0m.g) derived from phytozome v7.0 (chr-ID scaffold_3; pos 498072 to 498909)
gccagcgtcctccaaaccacagaggcataaactcggtgagtagcttccggatcccagtcttcattttcgtttacatttggatttcatgccattcgatctgcaaatttagggcatcaaacgagtgatttggcgatttattttcgtaattttgaatactatttttgttgcttctgtatactgttacttaattttgatttggttgctgagaaaatggagcatagaatagcattttgctagcgtggtttgcgtagctgtgtttgacagctggggaagggatcactttgaatgaagagcatttggtttttatggttatttgttttttaatctagaacataaagtgtttgctggtatattcaggaaaacaatgatgtttatgtgcatattttcgttgctttgtgtttcagctggaattcttttttctcactttgttgctggtacagttaggaaaatgttcacaatagtgttttgagccttgtatgtttgggtattttttttccagagtgtactcattgttgttaatgttagtttttgagaaaattagggttgcaatgacgttggtagaggcctggaatcggctattttaatttcttctcatttgtatttttcatatggctattttttaaaattgtaattatgatttttaactatgtgcctctatcaatttttcgatatttatgactcgtttgagttttgttgaatttatctctgtttcctttgttttattttgtgggtgatacaaatgtgtttctcaggcaatatttttatacctactgttaaattaggtttttattgaatgtgcttgttctctaactgttcttcacttttcaattttatagag

SEQ ID NO: 73651 - DNA, 441 bp, Prunus persica
  Intron number 1 from transcript ppb021600m (locus ppb02160 0m.g) derived from phytozome v7.0 (chr-ID scaffold_5; pos 4481397 to 4481837)
gtttatactttaaacgacgtcattttaatatgtaagtcgtctattataatttacaacgtcttcaatttgttaaccccgacgtggtttttcagtcgtctttatatcaaaatattcaaaataaatttaaaattaatccgaaaaatgaagcgtcaaaataaacggcgttacgttcagtgtttccgtcgtggaatattacatttacatcggttcttgtagaactttcgccatggtttttctttcgacgttttaaagagcgcgctctctaaaaattttcgcacgccctaaatttttttatatttggctcttattcttatacttctaaccctgaaccctaaaattttcagatttcgcgcaacataacattcgctctctcacttctgctctaattaaaagttgcactctccaggctccgtcgaatctgtgagctcatccaacctgtaa

SEQ ID NO: 73652 - DNA, 499 bp, Prunus persica
  Intron number 2 from transcript ppa003831m (locus ppa00383 1m.g) derived from phytozome v7.0 (chr-ID scaffold_3; pos 8327802 to 8328300 reverse strand)
agcatccaggtctgttgaatcaaacaatcaattagttaacaaatcttctattttctatttttttaggtgactaaattgatgatcagttacttcatttcaaaagctataaacaatgtataaacaagccaatgcttcttggaaattaattattcttcacttacaaagtgctcagtgggaactgcgcagaaactatgaccttacccagcaaagatctgacaactctcatagatcaaagaagatagttagaaagttgtaaaaatttgaataagggtaatcatggaaaataaaactcaaattttttaatgtattaatgtatcattcaaaaatgtaattaagaggaataatacatcgcacatgagaagaagtgagaagttccaaccaagatggttagggtgaaggttgctagtattcccctatttaaatatctagatagctaaattactttgtatctttatttataactaaaattacatttgattaattgcagaaaagataactg

SEQ ID NO: 73653 - DNA, 874 bp, Prunus persica
  Intron number 1 from transcript ppa005186m (locus ppa00518 6m.g) derived from phytozome v7.0 (chr-ID scaffold_5; pos 17304967 to 17305840)
tatactttcggatcgctaataatatcctcaaacaggtttcacttcactctcttcatgatttagtagcaattttaaattcctattaattttgaattaatttaggttgcgaattttgaatttagtgtgttcatcaaattattttggaagtggaaccctaattgttgatgctctgtttgtgcgcgcccgctcgcgctttttatgttcttatttattttggattattttagatatgtgaatttcaggtagctcaaatatattgtatagatcaaaatggtttattgaggtgccaaaaattgtaattggtagcttgctgttgataggacccgaaggatcactggaattagtagaatatagtagaagaagatacaaacacaacaaatttgatcactcgaggagttcttccttctaagtaggacataagtgaagaaggaaactgatagcaatattcttcggccaaaacaaaagcaatattctggacacttaccatattcaacacactaaaattgtggaaatgtatcagttgtatagtgagttgtagctaaattgaagtgattatttcagttcaattatctagagcttcctatataggtgccaatgcctcctctcctgtgcattcatatatgttgctaaaatgtacaccagaaatgcttttttctcttaatattgcagcctgtgctttttcttatttaatttgttatattgatgttttgtcattcctgtaatcttcttgccctttattttcctagaaaaatattcacacatgaatttttttcccctggtttagtttcttgctttcgtcttaaaatgtccttgctcctaaagaagttgttacattgtaggcggacatatttcgacaagagaggaatattataga

SEQ ID NO: 73654 - DNA, 490 bp, Prunus persica
  Intron number 1 from transcript ppa000478m (locus ppa00047 8m.g) derived from phytozome v7.0 (chr-ID scaffold_3; pos 6109638 to 6110127 reverse strand)
tgtggttgtttgttctgatttggttctcaaggtgagagcttctcgctctgttttggaatctctaacttttaatttcttttaaagtcctttttttggtgggtatttttgggttgatattttctttggggtttgctcatttatacctttttcttttgcatcttcgattctacatgggccttaaagctgctttctttgcctctttgatcctaaaaaaagttaatatttttatgacttttttaaaataaaaaacctgaattttatgtcgatgtgtagtcaaatttctggaataattggtaaaaatggtgttttagtcgtatgatctagttctgggtatgcaccttttgaatttttgctggctgtttgttttaattttttaattttattttgagttttgggctatttaagttgacccttttcatattgatttgatttataatattattttatttttgcagatctagttataagcttagtgatatttctggttctg

SEQ ID NO: 73655 - DNA, 612 bp, Prunus persica
  Intron number 3 from transcript ppa005126m (locus ppa00409 8m.g) derived from phytozome v7.0 (chr-ID scaffold_3; pos 6083393 to 6084004)
gcctgggacacatcagtggtagtccatcttaatccttattttgtttctttgataggtttcctttctagcactaaatcgattttcgtttatttgattctttttggggaagtgcaattcccaaagccattttgggtaagatgaagcatataatttggttagccatggtggccagccaacgtagctgttggattagcacatcccttttatttatcacctaaaattatttaagctttctattaagaaaaaaaattgagaagcaagtgactaatgaggagatgattggggagggatgacaggtcatcatatattcttttgtatgtgctaaattataaaattttgtgtatatcatgtgtgcaattatatctacaagactgaattattatgcacccttaaaaacattcatcattggtccaacacccttatacttattcttcccttttttgtttcttttttctgttaatcatttcttctttatgttcaatattgttgtatcttcgcttgaatatggaagaatatttatgagagttggcttgcgatccttttggttctgcatttgacttttgttagattctttcaggtctgtctagcttgacaaatttgagttttagaaga

SEQ ID NO: 73656 - DNA, 717 bp, Prunus persica
  Intron number 1 from transcript ppa010562m (locus ppa01056 2m.g) derived from phytozome v7.0 (chr-ID scaffold_1; pos 17680754 to 17681470 reverse strand)
cacctcgacgatcacataggattgcattctgcgaggtatgttggtcttcgttttggtatgtaaatgtgcttataatagaattttaatcttatgttgcaagattcttttgaggagttagcatgagactggagttatatgaattggaactaagaactaggtttgaataattaatccttgaattggtttaaaaaaacaaaatgagcatccagtttggctgtatgaacttatattattctgatatgtaagagatgctgagcagaatgtgacttgtaattggggatttattttcttattggtctgacagttttaaaaaaatataaaaatttaaattcatagcgatgatagtacaacacttcaactgtgttctatttttatttaagaaaatgaaaattctgaagaattgaaaatttccatctttgatgtcaactggtacctggtcatacatatgctattccataggtatgcaagtccttttggccaaaagcaattctggttgggcaagaggtttggtggctatgattctgaggtcaaatcaagtagacatttgctagataggtcttagtaccaataaatttatgagctaatgcctcaataatcatatttttgtgcagctgcttgttgaaatcatgtgtcatcctgcctaataagtgtatatttacaagttcctatatgagcttaaattacaacagtgtctgatattagttctctgttttcagg

SEQ ID NO: 73657 - DNA, 371 bp, Prunus persica
  Intron number 1 from transcript ppa018693m (locus ppa01869 3m.g) derived from phytozome v7.0 (chr-ID scaffold_3; pos 13418892 to 13419262)
caagttacctaggtacgtaattttttttaggtgaaagggaaattagagtttcgaactcggagtttgagtgtgggggataaatgctcactaatatacgggagctacaagtcctgcctaaagtatgctcttttgttatattttctccctaactaatctttgttttatagtacaaagaagggggcttgattacaattttaatcctcttaaaatatttaccaaaaaaagaagaaagaaagaaactctagtgcctcaatttctcatattcttataaatttaggctcaaattcttggtattgccttcatatatcttattccaagttctcttgtcatgaatgacataattcattaaactattttattgaataggtttg

SEQ ID NO: 73658 - DNA, 900 bp, Prunus persica
  Intron number 1 from transcript ppa006300m (locus ppa00630 0m.g) derived from phytozome v7.0 (chr-ID scaffold_5; pos 17520097 to 17520996 reverse strand)
cctacggagtcgtctacaaagccattgatactcaggtaagccccaacacttcgctttcgtcggagggtttttaaataaaaaaaattatggataagtgttttttgttaaattcttttgctgtatttgactttttcgagtttaaaagatttgagaatttgttatgtttgtgtatgtgtgcgtggaatttggtttagcactagcttcgctgctcagaaatttgagtcgtgacagggaaaacaatttcactttttcttctatattggtggtctttgggtttggatgctgaagaagcaggggggaagtgaaatattaaatgggattgtataattgtatttatgtgtacatgcaaagctattcttttcttcttgctgtttgggttaaattatgaaattgagactctggagacgtaaagctaaacagctttgtgttgagggtcttgttttcctgggtctcaaagtcctggaaaattataggttcgaattaattttttcttttcatacctagcaacttgatctcaattgggttttaatgcagacatttaatatttagtcgccctcgaaatgaaatttgttaacctaattttgtctttttttttgctgttatgctgacccaggattggagaatggtaaattgcatatgctcctccttggtctttttggtttttcacctttcttggctacaaaatgccactaatgaattgttattctttttgaagtggtggctggctgtttaaagtttccttttcgttttcttatacaccttcattgtttgttttttatttaatttgcaaactgaatgcagcattatgactttgataagtaatctcgtctgtttatgatttggtttcaatacatttcttttgcagacaggacagacagttgctattaaaaaaattcggct

SEQ ID NO: 73659 - DNA, 1002 bp, Prunus persica
  Intron number 3 from transcript ppa003745m (locus ppa00374 5m.g) derived from phytozome v7.0 (chr-ID scaffold_1; pos 10776571 to 10777572)
tggcactctcatatcctttgccatcatatccttaggtaaatcgcaacctgaggattatagcttttatagcttaggtttgtgctgtaaaggtttaaagatgtgaggcactttaggtgtgctagtatataaaaaattgttggaaacagtaaatcatttaaagtttgacttggttgtgaacaagcttcggtatttccagtttctaagttctttatgtgtcagcacttttagttgggtgaaatctctattgatgcaactgtagtgtgaacatgatatggtacaagtgttcactaattatcagattctcttttttgtcaagtgttccaatcattcagaatcattgggaacttcatttttagtattttttttataaaaatctttgtcaaacacttgaatgataactgattttatggaatctattaaattcaccagaaatacacaaaacttgctgcatgtgcaaatttattcttttgtgagggtcataaagtaactaaagacattttatgattcaactgaaaatctggaaaaaggaaaataatctgaatcaatcatctatttttttacagaacgaagttattaaaattcacaactttggttacttaaaacaggtatgtggatgtctagtgcttgttcttttctgcaccacatctatttggaaacactaactgtgtgtgcaacaatgcatgtgactccattagcagacatctttatcaaacagctatttgtgtgggtgtatgaagaggtttacatagtgtgaattatattcttagaagctatagcttaaaaagaaatgagtttccttgtgtttccaatgttctaaaggtgaagatgtacaattttacatttactttagcttcttttgcgataagagttattttgggtcagtttgtttctgtttgtgacatattctgttgttgatactctttgacttcgattgaccagtggagaattttaatcacgggctttccgtgttaatgaattcttttttattttgatccaggtgct

SEQ ID NO: 73660 - DNA, 716 bp, Prunus persica
  Intron number 1 from transcript ppa018541m (locus ppa01854 1m.g) derived from phytozome v7.0 (chr-ID scaffold_4; pos 26731754 to 26732469)
attgcttcattcaggtataccaagattcttcttttctttatctttgaggttttttttctcaaatagcttttgtgctgattactctgggtcctctgcttttgatcttgattgtacttttctgcatctgtgtgggtttcctgcttctagtcttgatggttcttttcttcatctatgaatggcttttgtttggattgctctggggttttctgcttttaatctttgtggtcatttccttcattcgtgtggggttttctcaaataggatttgattgctttaggttttctgcttttaatcttggtcgtccttttcttcgcctgtgtgggtttctcaaatgggttttgattgctcagggtattggaatctgattctgattattcggattcttaccttcaatttgatgttgttattgggttctatgaatcttgaaactctgggttgttcttttatggttggtttttaacacttgagaatctgaaaactcttatctgggaatgttaagctacaatgctataagatgatttcggcatgatatttttgagttcttctgaaatgggttttcgtttctttgagtcttttgtctctaaccttagtttctgtctttttaatcaagcatgtattggctctaaccttagttgggctatgattaccttacgtgggtttctgtctaattctatctgtctttcttaatgttgtggggtttttgaatcagggttgtg

SEQ ID NO: 73661 - DNA, 254 bp, Prunus persica
  Intron number 1 from transcript ppa002129m (locus ppa00212 9m.g) derived from phytozome v7.0 (chr-ID scaffold_2; pos 25154405 to 25154658)
ttcacaagccttcccgcgtgctttcactttgtgagtttttgactttgaatgttgattttcaatcaatgtcttttggtttatgttctgtgagagcttgagcttgtgtttggctgctgatataatacaacaaaagctaggggagttgaattctgagtcaattgtggagtagtttccatcttcaatttctagttgtaatttatttgtctcagagcttttaattattgtgattttgctactctttgcagcagaaggaa

SEQ ID NO: 73662 - DNA, 687 bp, Prunus persica
  Intron number 3 from transcript ppa009706m (locus ppa00970 6m.g) derived from phytozome v7.0 (chr-ID scaffold_4; pos 23039964 to 23040650 reverse strand)
ttctttctggagcatcaattccagttttgtctcaggtaatccggtttcagtgcacgctttcaaatacagctgcttgttgttatatgtgaaattctattctggtgctctagttatactgtgtttcctgaaacgagtgtatctttgaatttcttaagctagcatattgtggtttgaacaaatgaggtgattatccaactagatgatgccatgctttatagaaaatttgaaagaaaaaataaataaataaatgcagctgtagatgtttaaataccgcatgtttttaagatcaattaattggagttgatgcattccatacaatcagaatatatcattatatctatatacaatacaacctattaataatagagtgagcttcaatggagggatcacaattagatgtcttaacggcttcaaaattgtatacttttttctaaggatgatctatgaatgaggacttgataaatagatagtttggattgttgaaatacaatgcggagtgggcccatcctaaacttatttgggagctctgtcgatagaaagggactctttgtaccaaatctctatagatatttccactaaatgacgtggcttgatgctagtagaagaatactgaaagtcggatgtttaaaatattcctgtacttattctgcagacgtttcttgtttggcaaattctcctgtcaattat

SEQ ID NO: 73663 - DNA, 493 bp, Prunus persica
  Intron number 2 from transcript ppa003229m (locus ppa00322 9m.g) derived from phytozome v7.0 (chr-ID scaffold_1; pos 30954573 to 30955065 reverse strand)
gtatcggtattttgatctccccttctgctcagcaggttttatatctcaaacattttgccttttacattctacattccatatgcaatggcttgaccaaacaacccccccccccccccccccacaagaaaaagaaagtttaaatgcgtaaattttagctgcgatatctaatttcttagtggggagcatatgcataacttctaaaatagtaaattctcctgaggataagtccaacaacaacggccttctttataatttttgcacttgaaatgtagattctttggatcaatataagcgctgtcctatgccctagttttcgaaggacggtatgttatagattttcttatgttttcggttttaaaataggacaaaacttgcaatggtgcagctaataattgtagctgcgttaatagaatttcttttctgtttttttaaaatttccagaacaatttgatttttttgtaagttaagatgggtcctttatcaatggtaggtg

SEQ ID NO: 73664 - DNA, 703 bp, Prunus persica
  Intron number 1 from transcript ppa015634m (locus ppa01563 4m.g) derived from phytozome v7.0 (chr-ID scaffold_5; pos 12626429 to 12627131)
agacaacaacaagaaggtctcgcaggagggcagctgtgagggcaatgcacttgttcatctgctagaaaatggcatgttttcaggagctcaaaaggagatgaccagacaaggtaagcacaaaactttattaattacagttttttaaaaaaaattatatttgattagtagttaagtggttatcgatcgatactctttcaaataattgagcaaatgcggacaatgacatggtaaattagtggcagacaatcttttcactgctattattttattgtaacgggcgacattctttaattattctgggttttttattaatattgtttttcatgtttgctatatatgtgtgggttgagaaagagagtaagaaatgtagcttttgggtcttgttctagtcgtgctgttattgcaacttgcaagtgatgatttcaccagttgtttgatatgagtatatttttgtttgtttgtggaaaacaagcgagaatttaaaacatagaaaagaggggtttcttacacacattgtcaaaatgctattagttctaaacgtcgttattttattctggaacatgtcatcccaaattttaaattagcttatcttaacattgatactttgttgagagttatgcatcttcataccctaaatttttcattaacattattgttgaatattaaaggttgtacaaaagaagctgcacatatcaatatctgc

SEQ ID NO: 73665 - DNA, 665 bp, Prunus persica
  Intron number 1 from transcript ppa014428m (locus ppa01442 8m.g) derived from phytozome v7.0 (chr-ID scaffold_2; pos 17028424 to 17029088 reverse strand)
aatttgcaagttcgaggtatttatttagaagcttccccacatatatatatatatatatatatatttatatcaatgttcttttttatgaatgagaattaatagatccagtattaatatatataatcactgtcaagcatacataaataatggtctgtacgatcgaggtttgtttgtaggtttatatatgaagtccttttttccttttccttctaagttgcatatttgtttttcgttagtacttgcatttctatttatagtaacctttgaacaagtggcacagtaatctagtttccttccactgagtttgccttgctattgtcaattactaatgggtttcttcatccgcagaaactgaaggaagaataatgtacgaaaagatttacattaaacaaacctggcttaatcacaattaatgctttgattaagtttttttattgtttgtaattttaattaacaagagaggacaaatatgtgggaagagcgagagaatagagaatagacattacctaccacatcagttttttcgtccaaactttgagatatgatcattttcattctagatgtccattttcctacaattataatcgatcccagtgcacagtaattatttattttattttatttaaattgggagataatattatttagtctagcatatcaggaaa

SEQ ID NO: 73666 - DNA, 275 bp, Prunus persica
  Intron number 1 from transcript ppa010363m (locus ppa01036 3m.g) derived from phytozome v7.0 (chr-ID scaffold_5; pos 17525452 to 17525726 reverse strand)
cacctctacttgtccaggaaccacagcccaacagagtatgcttttcctttattttatcttcagatgcatagttagtaaccctgactcatgctaaagaaactgagatttccaattacaagcaggacacaacatcagtagcacaatcttatttaagtttctcaagaataattgacttgaatttaagtgtgttgttctagtttgagaccattttttgattaagttgtgctgttattgttgggttaaggaagttgaggagagtgtgaaagtgctcaaga

SEQ ID NO: 73667 - DNA, 1018 bp, Prunus persica
  Intron number 1 from transcript ppa001287m (locus ppa00128 7m.g) derived from phytozome v7.0 (chr-ID scaffold_6; pos 26733725 to 26734742 reverse strand)
gagactctggtgagtttttttttctctctctttaattttcattaaaaatgtatagtttttatggcttcattgattgaatatgcatgacatgaaaccaatttgagttttgctcttgtttcatttccttgtaattctttttctttgaagcaattatgacaagattaagaagatgaaccaacaactctatctctttccttggtggattagttgggttacagattatgtcattaatctgttttcttatttaatgcacacctgccttttaggtcgaataaatcagattttgaatgcaagtctgatataggcaggcaatggaaacagctttttgacaattcaaggggcaccttggtcaattaatcttttatttttattttataaatttttgggtccagtcttgaggcatttagaatgcattggtcttaagcttaccccttccaactctctctcattgtgattgaaggtgccccaacattgtttttgccagtgattctggtaaaaaaaaattgattaaaaaaccagtttagtcttaaaaaaagtgacataattaagcttttgaaagatatggaaatgattcttaaatcatggccccaacatttgttatttttttcatagtggtcatgtcatgaagtgattagacaggaaagccaactaccagtctagctaccagttaacgtgaaaatgaagctccatgcagttggaggtgggctgttggcatagcttttaagcctttatctgattatggttttttactcagatccaattatttttggttttcctttgaatattttgaagaaacagctgcaggctctattcctaataaaattacaaaaacttgcataaaatggctccaactaagacctgatttgaggtgtttagaacaaaatttcggatgaactttattctattggaaatattaaatgatttgtttatgggctactagatatggaattattttctgaacttggagaaatgtgtttttgtagaaaacaggtttaaggggaaacttggagagccagca

SEQ ID NO: 73668 - DNA, 707 bp, Prunus persica
  Intron number 2 from transcript ppa010607m (locus ppa01060 7m.g) derived from phytozome v7.0 (chr-ID scaffold_1; pos 30634595 to 30635301)
gcattttccttctaaggatcatctccaattcaagagtaactcgctatttctataacctcattattttctttagtttgtgcgcctgtcagtgtataataagtttcttccgttttagtcttttaattattttcttcttgattcgatgccttctgatctaaaactgtccctttgtgtaccgtctttaaactgcattaaaagataagttcaaacataaaagctttactgagttggaaaatatgacttttgaatgttggctggggtcttttgttttctcatcggctgtaagtatatactgtcaaaaggcaataatatagctcgccagaactttggtgaaagtgggttttgctccaggcaacactgtttgttggtcacagttttcgaagttacaacaggaagggcagatcttcaactttttatttttatttttctcttaacatatatccactaagactttgtcaactggatggtggggactgataggtttaatccccacaaccgctgcaattatttgatttagaatacactacagtaataaatattgtggaccagtagagaaagtcaagcatgaataatagaaagaaaatattggatgcaaatcgaaatttaaacttttcttttcatgacaagtcattggtgagttattgtttcacttttgttcttctcttgttgcagaatttgtggttcatctgcttgacaaaacaattgca

SEQ ID NO: 73669 - DNA, 912 bp, Prunus persica
  Intron number 3 from transcript ppa006452m (locus ppa00645 2m.g) derived from phytozome v7.0 (chr-ID scaffold_4; pos 1674059 to 1674970 reverse strand)
tggtatgtcttactaacttcaacaatgttgcattgagtttctttcttttgcccccctctccctgatatttggtcatgacagtgagttttgaatcttatggcacctgtaattaactttgctatagagtacaacagatatttgcctgtaaatttgttcatcggtcatcaagttgtagttatctaattgcgtctaatgtcgtatcgatattacaggatgcattttactgtatctaaactaatcaaatgctgctagaagtttacactattgaaattatactattcaagagtttctgcttccaacccaaccttcctgatagtattactacggatgtttttattcaaacttaggatgcaggaaataaatacaaaatggagtaacttatgttgtgaatataaacaatggaagtatccaagtaagaggcaaatagaaagagaaagaggggaagcttaactcaagtaggaattgtgaaaataatcatagaaacagaaagaacacgcaatctattctacacaatggaagtatccaagcaagagacaaagagaaaaagagagaggggaagcttaactcaagtaggaatttcagacaaattttaccaagttattaaaatagaaatctatatacccagaggtaaatggatgtcttagttattggtcagattgaaaataaatcttcaagcagattacagctttgaagtgattatggttgctatgttgctttcttatttaagaaggccaatggtgtcaaatcatacatagtaatagcacttatatgttgcgaaaataaatgattgaagctgtattctgtatagaaattcgtacctgtttcactacattgcttattactatatgagttgcccataaacaacctcaattttcaggtaggtttggctcttgtagttgacggacagattgt

SEQ ID NO: 73670 - DNA, 1036 bp, Prunus persica
  Intron number 2 from transcript ppa014152m (locus ppa01415 2m.g) derived from phytozome v7.0 (chr-ID scaffold_2; pos 8912458 to 8913493 reverse strand)
aagaacccgctctacacttctggaactccaatcaggtaactggttcagtttcgattatcgtaatgtagtaaattaatgatcaatcgtcatagtaacaagtttcatctcataggtcataaatagatagtcatgcctactacatggattaatattatcagttttataattttcagctcacactgcgtcccattgggatgcttaagtaaagaaacttaatattgcaattagtgataaacaaactgtctcattgcatgtcttttttgcactataacaagactaatatttgaactaggttatctcttggtttagaaggcatgtttgatgtgtgtcgtcttattgctattgttagtattttgtgaactctgtttgttagaacctgcctacttttcttttccttgtatatatagttctattgaattagtttactggtggcttatccatctttgattagagttaaatatatagtgagtggagatatagaagagtgtaggatgtggaagggtttgagaaccaggggtagtattcaagaggctacctgctctgtccctcaagatctcaaccaattacaacttaatacctcagttcgcttctcttagctttctgggattcttcttttattttattttttttgtttttgtttttgttttttgttttgttttgttttcatgttttgctttgcgtttgtgggttgtagtctgtgttatagatctgggttattgtcaatttcctgaaatctgtatgtaacataaaactcatgataaacctttgaggaaaaactttgatttcccttcaaagtgaggtatattaccagggattgacatggatgtgcctttcttaattgttcattatttgcaggggtagcttctgaagttagatgtagttggtatatcttatgaatgagcgcaagtttaatattcgtgttatacatctgttagtggtggtgttttattgaaatatatattaaggaaaaggtaaacgtaaaactcatgtatttggcttaatgtttcttctttttccttcattgttacagagttcc

SEQ ID NO: 73671 - DNA, 1030 bp, Prunus persica
  Intron number 1 from transcript ppa007242m (locus ppa00724 2m.g) derived from phytozome v7.0 (chr-ID scaffold_4; pos 29075358 to 29076387)
cttcatcggcgtcttcgattgtcttcgtcttcaaggtaatctgagtggatctctgcaatttctgtatgttcgtagtttgaaattctctgcgtgttgttttttgttttggtgaaaattgagcttgatttgtaattgacgagtagattggagttcatttgtgtctgatctggaagatttgctgccgattcttgtgtgtttgtgattgttggagttaaatcttggatgagcttagtgatctgtagtctctttgaccgatcgctttggcagattgtgattttgaatatttctttgtattgaggtggttttgaagtttgatctggtgctctcttctttggatctaatgctagtgatctgctttgttttgcatatctctgtttttcttttcttttagatctgtatatcttaattagttggaatttgatatgttttgatttgttcatatattcagtgaaagcattgaatttgaactctgatggttgagatttaagtctcatgcaagcctttttcattgcctgtggaaattaaaaacccaggataaacagtgtgtttgaagtaggtattagagtgagctgttctgaaaaaaaaaaatttatttttattttgctgattgagcattgtagtagcaatctatctaagccatcgggataatatggaaaaaaagtcttttttatttatagtggtgatggtttgattttgtcttgtttgcttttggctggttatgatgaatgggatctaaaactttaggcagtattcatcagtgtgtgttgtgtattgaattgaataacatattgtaggagtagtgtgcatgaggttttttaaggtgattctttatgaatgaaaatgtaagggaattataatgcacaaaggaataatgagaatgattacctttttgttgtacacgaactaaattaactgacaagatatttgatagtgaacatggcatggcattttgatcactgatatggtttcacttatgtagtatgtttttgttgtattaattctgtgtgtcgtggtttcaggtttgtaaaag

SEQ ID NO: 73672 - DNA, 630 bp, Prunus persica
  Intron number 1 from transcript ppa011992m (locus ppa01199 2m.g) derived from phytozome v7.0 (chr-ID scaffold_8; pos 21250750 to 21251379 reverse strand)
aggtaagctcttcttcttctgctttcgccctctcatgtcgtcctcgatacatttcatgccattgttttccttctttcatattcaatatttatataatatttctgatatcgtttcctctctgtagacttgtgcgtttagctctttaaatttgatgttttgaaatcatgtttggctgtttaaaataaagaaaaaagagagagcatagacttggttcaagaaatgaagatattctatgggactctgtttactttattgggttttttttcttattgtttttaatggaaaaatataggacattgtattgtttttggattgaagcctgtgatttatctatgttatgatcataaattcgtcaccgttttgagtatagttatttgtccctttgagtttgccttgtcactctgttgatatttggtttcaaatttataaaaagcgaacaatttggtcgtcaattcgaaatgtacttaccctgagcctttgagctattgattgtgaagataggagagaattctattctagtttttctttaggtgatgttggcttgatgatgcatatttcaaactaattttgcgctgacatgcttcaattgtggcagtcgtcatcctgaggtgaagtgggcccaaagggtgg

SEQ ID NO: 73673 - DNA, 775 bp, Prunus persica
  Intron number 2 from transcript ppa008483m (locus ppa00848 3m.g) derived from phytozome v7.0 (chr-ID scaffold_1; pos 32502385 to 32503159 reverse strand)
tacaccatcactttctgcccctcgcctagcaccaggtatttttattcatatttactcatttctccttcacgttcccttccccgcctctttcgttttttaacgttgtgaggggtaaataagttcgtacgaagcctgtcaatatgaacgttgggggttggggttgtttatattttactttttactttaataacttttgttcgtcaacttatgggccaactgagcacaacggaatatgggtcattagtcagtgtcaggctgtcagtgatgggggattgatgaacgggcgtctggtttgatagaacaaccaccactcagcacggctctaagccggcatcctaccacccgaccccctttttttggtagtcaaaagtcaaaactagccttgttaaattttattgaaaaactaaaggtcaaaagagtcttttagaattccatatgcggtcagtcgaattccatatgcggtcagtctccaattcgaatgcagaaggaacgcacctctctgaatctggagaaataacaaagatgcatttctacgccaaaaagcgtagattccgatgctcttcaaaacctagagattcgattcgattcgattccctttgtttaattaataaacactcgcacacactccaaacttgtctccttttttacttttgcaacggtccataatttgggaatttgcattttaatttttgtttagtgggtaaattaaatttactgacggtaagtattattaattgcagcaagaaagcgtctcagggacagaacacacagccac

SEQ ID NO: 73674 - DNA, 489 bp, Prunus persica
  Intron number 2 from transcript ppa003464m (locus ppa00346 4m.g) derived from phytozome v7.0 (chr-ID scaffold_2; pos 663958 to 664446 reverse strand)
cgcattctcagcctcgttctacaccaaacccacaagtaagtttttttgtttttttttcttcccacaaaattaaacatatggggtagcttagctttcatcagtttgtgattttcaagtcaattaagtgatgtttacggaagattaaacaaggatatccctttttttttttttttctttcttggaatgcctttttaatttaattttttcctaaagttctttcatcagtttgaaatgatacagatgctttatctgggagttacttgtacaaaattttgtttttaactttttaagttcctcttttcccccttttattccaatgtgaaatggagtcttttttgggtctctttctatggcattaattcattgatagaaactgtatatgcaaagttcgtgtaagaatttgtaaatcatcaatctgatatgttgttgggttttctctcaaaattttcaccagccatctattacaacactgaattcaagaaaatacac

SEQ ID NO: 73675 - DNA, 1017 bp, Prunus persica
  Intron number 2 from transcript ppa011297m (locus ppa01129 7m.g) derived from phytozome v7.0 (chr-ID scaffold_6; pos 4669165 to 4670181)
ctatcggcgtcgagttcgctaccagaactctccaggcaagtcgccttctcatttgatcttgtttctaagtcttgcttagtctgtttgtgtgtaaatctgtgtgaaagttgataaatgtttcacttgcttaattttattggcgttgaatgtgatatttgtttgtgatgtttcctaggtggtttaaggtttggggttttaggagtttgaattcatttggttgaagttgtttggatgcttaagagcatgtgatgattatttggattttgtttatggatttactttgtttgattgaagatcatcaaatttgttattaatagcttggtggatggagcttgggtttgtttcttttagtactttggtttttagaagatcagaattggttgttctggatggggtactcaatggccaaataagcttgatgaactgttggggaaaacatccagcagttgcctgttgatgatatttaagtttgataatcaaaccaaacttgcatagtttcatggaggtatatgcaagaacatgtgtatcagttttcttcatccttcctatttggaacataataagagagtacaaactgatcacaattggaaactaaataacagcccaatgaggttggggtttgtttaaatctagtcttgagtttgtttggtgggtcaggatactatgggtcagttagttttgtgttgtgcataggcctgttgattgaacgctttgtatacagaccgatgaggacacttttttctagaacatatacagctaatacggttgaatgtaaagtttctcttgtaatatgaatggcgtaatacgggttccagagaatattcatgagtttgaaacatacaattgtctttgtagtgtaccattcagtatgtgttgattactagaaaagaaccataaatacaatgtatagatgacacaagtgggtttgtgaattatggcttgcaatttgatctgagctaaaactccttgtctgggattacaggttgaaggaaagactgtgaaggcacagatctggga

SEQ ID NO: 73676 - DNA, 767 bp, Prunus persica
  Intron number 1 from transcript ppa010790m (locus ppa01079 0m.g) derived from phytozome v7.0 (chr-ID scaffold_6; pos 17721420 to 17722186 reverse strand)
atactagctcattgactctcagttcactaacagttcaattcaaggctgattgtctccgaaatgaagtgggtttcgttgaaactgcattacaactctgattttctgatgggcttcgttgtaggcatcggtatcgaatgggtttagagatgtccccttaacccttcttctttcttcatgcggattggtggagatttttatgttgagctttctttcttggtcaagacttagctagctggttgatagagacttttattatactgttggtggactgatggataatgctattatattttcttcacttcatttagtaagtcgttttattttcaatgaaggagaaaagaaatgttagtagaactagagtagtctttacaagtcatggcgttgatacccctttctaatcaaaggttgcttacagctttcctaaatttttttgttgagcttgaaattcggctgttcaacttttgaattgcaagtcaatgtcgtctttctttagtattaagattgtcttatattatttttaggtacctaacctatcaataattcaggaaaaagtctcctagctatattattttgaagttaaatgcttgcattcatcatatagaagcggtcttgttccagtttgcagttccaatcaataccatatgttaaatgtcaaattttattttgaggtacagttttatgcatgcatgaatctaacacatacattactggccgggaaaaccttacatccagggaagtgtggatcaaagttgcagcatacctgttag

SEQ ID NO: 73677 - DNA, 579 bp, Prunus persica
  Intron number 2 from transcript ppa015054m (locus ppa01505 4m.g) derived from phytozome v7.0 (chr-ID scaffold_1; pos 45253888 to 45254466 reverse strand)
gtttggtaatcattttctgttttcttcctcactctaagaggattgtagtcttattgtacacacacacacacgagcgctcaagcgctaactggttcgtaatttaatacgacgttaatcacttgtttgggctcactccacaatgtcttctcataattcaaatcgttcatcatttcaagatcacccttgcaaaagttatgccgaatcggaaatcatttagccatttgattattatcttgaatcttgtcattaattatagaaagtattatattcatctatttattttattacagttagatgactatatggtgtctaattgagctaattgttttttgcaatggtgatctttgaatgataacctaaaattcagaacatgatatgacgttatgtagtgggctcaaacaaatggttatcgttgtatttttattaaccggttagcgcttgaaggctcctctatatatataatgaaatgttctgttcccatattgtgaatatcgtttgttgattagattgattctatcattaatgtctaatctgtatgtgtttttctttatttgacctgctacacatttgtagccttga

SEQ ID NO: 73678 - DNA, 742 bp, Prunus persica
  Intron number 1 from transcript ppa011532m (locus ppa01153 2m.g) derived from phytozome v7.0 (chr-ID scaffold_7; pos 5851541 to 5852282)
ataagcttcgaggccttcttccttgcaattccaaggtactctcagttaattataatcacatatatctgttttttgcaaggttaattttgaagtttgtttttgggctgtgtttgaaagtttgaactttgctcttaataatttgttttgctttgtcttagatcgtttctcacttcatccacattcatttttctctttgttgactgatgtttggttggtgagaaaagaaaaagttggcaagtactgctggaattggaatcctagactaaatctcacttttgaccaaggaatcaaagattttatgttcattgacttgtgctaaattacaagttttactaattagaatcagtacttaaattatttttttggtactagtgtaaggatcaagagttttcactaattcattctgaattaattaaattcagaaaaaaagtttcttctagtgaactgcttttacaagtgaaattcaaagatcttggatccatacaaagcttaggttcttttgaagcttttgaatgctcaaactctaagtactgtctgaaaaagaaaaagggatgaatggaattgtagtactcagactggtctttagtgtacatatactgtatttgggaaagttgctgagctttttacaattagggtttcttattattattatttttcttctacttctaattttttattttttattttattttaaacaaaattatcagacagacaaagcctcgctgttagcaaaggtggttca

SEQ ID NO: 73679 - DNA, 290 bp, Prunus persica
  Intron number 1 from transcript ppa003406m (locus ppa00340 6m.g) derived from phytozome v7.0 (chr-ID scaffold_8; pos 20416442 to 20416731)
cttccatccccaactcttcccctcaaaatttcgaggtcagtttttcgtttggtttccgggaaaacgcaggaaaataacagaatgatgaaaacttcggaatattattaggtttcgtgttttggtaactcaatctagtaacttcttctagctatgtatcgaaagggttttcttgttcatttttgattgggtgattgttctagcttcagatgaagtttctgcgtcttctgatagggcttcatgttcaattacttgcaggtgcaatttcaggttgcgatattcaaatttgttgt

SEQ ID NO: 73680 - DNA, 665 bp, Prunus persica
  Intron number 2 from transcript ppa011603m (locus ppa01160 3m.g) derived from phytozome v7.0 (chr-ID scaffold_5; pos 8081551 to 8082215 reverse strand)
acaaggctcgtcgtttgggttacaaggccaagcaggtagtgataatttcttaaactgcatgccatacacaaatcattgttgaaattatgggtttcaacttttatgaccaagtttaataggcttccggccatttgatatacatgtattcccatgtttatcttttgactctatgaaatgataattatggttgcgtgttgcgaaggattactgtattatctggcgcttatcttgtggtatattaggttcatttcatgccctttcgtaatgatggatatcattcattcagtgagcatgcatgcttcctgttgtgaattgtttccttttgttgtgcgcctgtgggcctaatccagtatgtgtgctggttaagcagcattctgatgcttaagcattttacctaaaaatgctgctgtccttcagtgattgtatgtttcctgagaccagctatactaaaccaaacaattgatcttctgccgagccagttctatctatggtttttgctcttgtcttcatccgatacagtgcactattttctgtatcttatatatttctttgaacatgtgtttttgttgtctcttctcatgcacctcttggtctttgtgccccagccaggtttaattgaattcgttcagttggctgatagttctagtaaaatttggtgcagggtt

SEQ ID NO: 73681 - DNA, 612 bp, Prunus persica
  Intron number 1 from transcript ppa011603m (locus ppa01160 3m.g) derived from phytozome v7.0 (chr-ID scaffold_5; pos 8082336 to 8082947 reverse strand)
ggtacccctctatctctccccccctctctctctctctctctctctctctctctctctctcagattttgttccatgcatctgtttctatttgtataaacaatgaaacttcagctgaatctgtttgatatgcatttgatttgtctgattcttagcttaccgagcttctcgttgttggtttccaagcttatagaagatgaaaattttatgaacttaaaatcttgttatttctcttgttccttatatgtactagcccgtccaccacattccaaggtttaaatggtttggctgatagtctttagtttaaagtagttatatgactaaagttagttttcataatttgaatgaaattaatgactctgttattgacacatttgttatgatttggttttcgattgcttaaaatgggtttaatctgaaactgatttccttgaaatgcttgagttgggtgattacaacaattggaaacaatctttagaaactgatggacatgggtattgcttgagattgggatgtgtagctttagatgtttatagatattaattgagtaatgatctgtttatctaatatgtggttttgtttgtgttattttgggggcattaggagcctacaagt

SEQ ID NO: 73682 - DNA, 811 bp, Prunus persica
  Intron number 1 from transcript ppa003321m (locus ppa00332 1m.g) derived from phytozome v7.0 (chr-ID scaffold_4; pos 28616834 to 28617644 reverse strand)
tcagcaccaatctcttccaaaaggctgaacccctggtctgaatcatctctctttcttactcttcctctttttctcattaattttctcaaatttgtatgctttactgaggttttggttgtttttgagatctgggtacgctgtatctctctttatttttgccgattattttaagttcctgtttttgtgtcttcaacatacgtaaaaataaatcttttggctaccaaataacatggcttaggggaagtatataattataaatattaagggcttaagctgagtatgtacttcctccaccatactcgaaagttataatttattacaactgaatataaataaaaaggacagttgtttgacctacatgtttatgacagttggaagtttattgaaactcatatggatgttgaagtgctaccgtagcaactgtgtgtatagataggatgggaatattgccgcctgctatgtatggtttcaaaacacaattatttgtacagagtgaactttttttcttctcataaataaaaagctatgatggaaataaacgcacacatggttacatgtgcactaagattgttagataaatggagtatacagagaaagatatatgtggaaaaaaataaacttggcggtgaatggtgttatggggaaaaatcgcatttctggtttaaatctttatgtgttacaggtttaagcaaactgctaactgttattgtttcagagtaggcctgatttggcattttataccactattttcctttagagcttttccattctcattgtcaaactcaaatttttgatgatttctattcaggat

SEQ ID NO: 73683 - DNA, 922 bp, Prunus persica
  Intron number 5 from transcript ppa016051m (locus ppa01605 1m.g) derived from phytozome v7.0 (chr-ID scaffold_4; pos 9598802 to 9599723)
gattaatcaagcagccagaattgcttaattcagcagtaagaatcattaatacccttgcattatcagctgtcagattttctgtggtattaaaaatcattctttgaatcattatgcttaaatgaaatcaacgtacataggattgagcatgcttcttctcgtgtatttgatgtcaataactgcagcatttggatttccatatccctgtataggaaacaacatcatttagtgtccaaaacgaggagaaatactacaaagatgcacacaacatcatttagtgtccaaaacgaggagaaatactacaaagatgcacattcagggcagatagtggagagagagagagagagagagagagagagagagagagagagagagagagagagagagagagagagattttatttttttgggggggcacgggaggggggtgggggggtggggtggtggttaagggtctctttcatagctacattcgatggacattgcaccaatgccactccttaggacttcatcatttgtgtttgaacatacttcatctagcttttatattatctgagaagaggcatatgtcgtgaaggtatctgaaggtttgagatggccaattgtattgggatggcttttgaaagctatgatttaattgagcgtggaattggcggtggtgacagtgtaggattagaattcctaagtaatttggacttgtaggatggaaagaagcgtcttccctgacacatgcttgagttttacatgcctcttccctcagtgcttcagggccatcacatatattaattttggtcttcttctttatacttattgaaagtggttttagttctttacactacttcttccgtttatatctaggttgctcattgttcataatttttcctcctctttccaggcagatagagaaggatatattgccattatc

SEQ ID NO: 73684 - DNA, 530 bp, Prunus persica
  Intron number 1 from transcript ppa017905m (locus ppa01790 5m.g) derived from phytozome v7.0 (chr-ID scaffold_8; pos 14332543 to 14333072 reverse strand)
gcagaaggttttgtagaagacgaacaatcaatgatcaatttatttttagtgtgagagatgacatgctcatgataatctatatccacaacttgattgagttgattgtgtcatggattttactctcatcaaattaagggctgagatctttgagtgttttatgtttaggaagtagactatttccttgatttataaagcattggtggtcaaattcctttcgtattagggttttgtagaggtccctggtcccctggacttgagggttgtaatgattctccctatcttagttcctcatttatgcacgttctagtttaggaatttggtttcatgttgaagtgtaacaacaataaatctgtagctttttactgagaccattatatctaatattctttttctctcaataatctggaatatataattcccgaatgcaggttttagtcttataccttctaagagacctgtctttttttatatatgtttagactttgacatcgatgatgttccattgcagggtgcatccacagagtggacaa

SEQ ID NO: 73685 - DNA, 396 bp, Prunus persica
  Intron number 2 from transcript ppa008491m (locus ppa00849 1m.g) derived from phytozome v7.0 (chr-ID scaffold_8; pos 18042821 to 18043216)
gccattgttgcctcgcagatttccacacatacctggtaatttggttttgctatcttcttgagacactctgctgtctagggggtgcttttcatgtaaacacctctttaattatgctgctttccaaatattatattgagcttcgtcttgaaaacgtagggtgagtgttccgtaaacgcttaacatgctaataatttgcatttgaatgttctgttttcttattcatttggtccaaatagcttctggggtagcctttttgtgtttttgggagggaatgagtatgcattttctttgatgagatttaaaacctaatgtattgaacttttactggaccatctttttctgagtattgttatgttgactgaagatattccttgttgaaatttggaacaggtactg

SEQ ID NO: 73686 - DNA, 654 bp, Prunus persica
  Intron number 1 from transcript ppa006484m (locus ppa00648 4m.g) derived from phytozome v7.0 (chr-ID scaffold_5; pos 3081927 to 3082580)
agtaagtatggagctgatttgctctctcgcgtcttccctttttgtatagttcctcaatttgtcaccggtcgaggacaggcttaaactcgttatggtatttctgttttagggttaagattaatgggttatttaccgatcaatttcactggctcctaaattcatgttagggtttttcttgtgtatttctgtcttgcaattttcggattcagggtttccgtaaattattgttagaatttgctagacaatttttttttttctcatttcatatttatgttttgttatttgtttttgcctcgaacgtaacccatcaatggtgaagattcaagcgaattttttaattttaattttttttttacaatcaaagagtttaagagctatgtcagtgatatgaaagtagatagtcttcttactaagtgcatattacatctatgatcttgttacatagcacgcatttgtgggttcttaaaacatgtaagttcttatttatgtgatttttgtataatgctcatgttttggtttcatgcttggattcaaaactgccttaatacgaaaaaattggtagtagatctacctgctataactttggtatgcccactatagatatttggtttctctgcagtacgagcctcatacagagccacgcccctttaatat

SEQ ID NO: 73687 - DNA, 404 bp, Prunus persica
  Intron number 1 from transcript ppa017750m (locus ppa01775 0m.g) derived from phytozome v7.0 (chr-ID scaffold_3; pos 8916826 to 8917229 reverse strand)
aggaagaaagaatatagcattgcatactaaaaccagtaaaacatatcaaaaatattttaatagtcaacatattaaattagttcaaaatatcaaacaagacataactcaacttaagcctctaccattagataataattataaaatggttgagacagacgcatcatcaataggatgagcaagaattttttatcagaagaaacataaagaagaacctaaatcataagaaaaagtttgtagatatgcatcagataaatttagtgatatacatgcttagacttttagcaattaacttagaaattttatgagtaataaactcccttgaagcattttcattgttattacataatgagatatttactattagaatagattgtcaaaatattatttttcattataataaaatt

SEQ ID NO: 73688 - DNA, 618 bp, Prunus persica
  Intron number 1 from transcript ppa014604m (locus ppa01460 4m.g) derived from phytozome v7.0 (chr-ID scaffold_4; pos 12835564 to 12836181)
agctccaacatgtagagaagtaagttctttgcaaaaatctagatattcaaacggcgtatgtatatacatgcacttcttgtctttctcttggtgatctcttttctatctagggtttttttttttgttacaattttttggggttttactttgatgtcatcatcatcatgaatctaatggctttagggtttttgttttcttcagattcgtgggagtctccgcagcttcaggtagtgcgattaacaagatacaactttactgtgaatcaggggtagagctctgggttgatttaaaggtaattaagtaaaattaccagttataaaaaaagtaaaattaccaacaaaataatggggcttttgtgacttgaactaaattttatggttttatatatttgtggggaatttattttttaatttatttttttgctttgtttttgtacttaggattatcggataagaagaatttgagtcttataacctatatatatatatctatcatcatcttgatctgctttgatttcgtgtcatgttgacctagctcaatcttatttctgatggatttttgagttttatttgactttttcattaaactcaatctttcttcgttttggctaattttcag

SEQ ID NO: 73689 - DNA, 466 bp, Prunus persica
  Intron number 1 from transcript ppa002785m (locus ppa00278 5m.g) derived from phytozome v7.0 (chr-ID scaffold_3; pos 3141533 to 3141998 reverse strand)
ttcagtgccttcgagaaacgctcccttaaataattgtaagttctcgtttcattttgagtcaccataaattcaaaagggtcttacttatttttgctattttatgtttgttttttttctttgtcaatctgacatgatgatctatatgaaattttctcttttctgggtatgtagagacgcttttgaattgagatgggtttggcttagtttttaattcctgtgattttttttggcttaatctgtaatgggttatgtgattcttttctgtttctggtataaactttgatcaaaatcaggcttttaattttgtttgaattttttgttgttgtcatttttggtttaattcacatgatatggttcatgtttattcttttgggttaaggtttagtaagggtttagttctttgataatttctctcgtgtggtttaatctgacatgagttcatgggtcatgttcatgtagacggagg

SEQ ID NO: 73690 - DNA, 299 bp, Prunus persica
  Intron number 2 from transcript ppa024101m (locus ppa02410 1m.g) derived from phytozome v7.0 (chr-ID scaffold_3; pos 15020638 to 15020936 reverse strand)
tcaggtgtggttgatcttgaaataaagggatcaatgccatgagtttaattcaattcaagatcaaaactaatgagacatagaaaaacagaagaagaaaaaaaaattgtgggttcttgatttttgagctattaatttgtataatcaagtcttgattacagtttcggctgagtttcacaggatttagaaaagaaaaaagaaaacaatgagagatgatccttttaggctttctgatccaatgctaaaagaaattttttatattaataggaccgttgaggagttcaacaagagccacgttgaaa

SEQ ID NO: 73691 - DNA, 971 bp, Prunus persica
  Intron number 1 from transcript ppa010004m (locus ppa01000 4m.g) derived from phytozome v7.0 (chr-ID scaffold_1; pos 1450011 to 1450981)
tcgcttctcacggcttcattgtcgttgcccctcaggctaggctctctttctctctttcacttggatgcacactttataaattgtaattatacatatatgactcagaatttttcatatccctctttgataatcaactaaacagtatggtgatggtggtcttattataggttttatgttcaaatcaatgactttcaattttggtttctctcttgttaggcatatatactaactttccatggtttccaattaccttattgggtttggatatgaattattgtgacttatcatttgaagagatagtccacatattgatattcatgatcaaacatcatgtgagttcatgttgcttgtgcattccttgaggctatcatctgcaagtttcctttaagttattttcagtgattgccttagtctgcaaggtaaatggtgtatatgtccacatctaacggaggcttgtgctgtcttgttgggcaccaaccaagtttttaagtaacaaaagcaaaatatgtgagtcactgagctttcattttcaatgcttgacaaaatggcatgttttgattggcattgtatgaacggaaaatacccaagtggctcagtccttatcagatatgcttggggtctaaatactgacccttcttgttttttgccagtgagtctatttcaagtctgagattccttgtccttaacaatatactagaagtggctgagttgagagaacaactctcattcacattgagatgctgtagatataacatgaaagactaaaatttccagtttggcttgtatttttgtgctgacattgtgcttcttaaagttaaactacagagattggagcagacattaatattactgtacctttataaaaagctagatgtataaataaaattgcctctaactctgccttattgataagcaaatgttctttgtgttcaacagttatatacaatagctggaccagatacaacaggtga

SEQ ID NO: 73692 - DNA, 584 bp, Prunus persica
  Intron number 1 from transcript ppa001389m (locus ppa00138 9m.g) derived from phytozome v7.0 (chr-ID scaffold_6; pos 28769856 to 28770439)
aggacgagtccgagtcgtgtctttggtgttgggaggtgatgattctttttactattgaatttttatgaatgttcaatttgtgcccatttgtattggttttggatttttgataactgagtatgttcaatttatgtggtttcctgaattgttgatagatttgtgaaccttgcttgttactttatgttttggttaattttgtttagattattgtgcttcttttgtatgtataggtcttcctctaattgcagttctattgtgggcgtatttaatttggcgctgggacggaataccgaatgcccctgtcagtttgtctttgtttcttattttcttttctttgtttttgaatacatgaatatttcttgttcttaatttgattgcctttgatgtgtgtataaaaggcttttgttttttgacccacatttctttttctttttctgatatgttgagtgtttaccgttttcttgcttgcatattttgttgggcatactaatcgttgctgtttggcaactttctgtacttcactatttactttatctttggtctattaagtttttatcttttcttacctattgcatagacaaggg

SEQ ID NO: 73693 - DNA, 838 bp, Prunus persica
  Intron number 1 from transcript ppa009948m (locus ppa00994 8m.g) derived from phytozome v7.0 (chr-ID scaffold_6; pos 2389135 to 2389972 reverse strand)
catctgcctctattggcatcattctctgcaatattgtaagtaccaatctctaagttagtgtttactgctggcatgaaacttttctttcttcaaaccctttggttaacagtcgctggaacatgcccccaaattcaaaagtgaactgatatctggctttaatttgtctatgatgacccttcaaatccatttgcatttagttttctgaccatattcctagatttggcttattttaaaatatagcaaaagttcaatgagcatttcagggagaatttcgtagtgtcattgttttcgatgttcaaagtaaagtttggtcttttgtctttaaggattaaagaagaaatcatgattcaagagcatgcatttagatacatgtaatgtagtagacccggctgcccactgtggtttcaatatgtggaatgggaaataaaaataaaaacaagttttcgatgattcttttggataagttttaatgtgagtgttgtatgagaggatagattagatctggttgttatgttttgatggctccaaccactaggttcttttcctaagatttttttattaagtaggtgtagttattttgatcttatatgtgcaatgtattcttcttcttctcttgtctccggatttggattttgtttatcttgaacgaaaataagaatgcatcttatgactcttgacattttaatatcattttttttaatttcactaaaatcaaacttcaatttcaaaaataattatccaaaataatatttcctttttttttccttcttaattttccatttgatgaaatttctctcttgaaggtttacagattaacacgtcttatcagccttcttag

SEQ ID NO: 73694 - DNA, 997 bp, Prunus persica
  Intron number 1 from transcript ppa012009m (locus ppa01200 7m.g) derived from phytozome v7.0 (chr-ID scaffold_3; pos 6179921 to 6180917)
ccttccctctcactgcctctggctttacataaaaggtatgaaattttttgagtttctctttattttttgtttttggctgtttcaataattggttgtttcagatttggtgttttggactgttttaatatgctggtaaatgatatttacactgattttggttttgtcattgctgtgtcaaagcatagtgtagtagaataaagaagagttgaaaggaaaaagggacaaatgcataggtttttgggtttttcccttgaaatcaaggcatactttttttcatctgggtttggtttgttctgtatttttgtcgttctattttgatgttaattatgctgtgcatgaaggaaactgttgtggaaatgaacaaacccttcgatacacatgcagtgatttggactgtgttcttctgatgtcttcagcttggtagagaacaaaatcaaacgaattcaaaaattggaactaattctgctactcaaagatagttgagcaagttggtggctaaaaaacttgagactatgtagtatgtatgtacaaggatagtatggctaggagtagctcacttttgttacaattatgtgttctaagataatgcattccatgaatttacattaatgtctattgataaagtcatatccaaaggcttgtctctgaataaaggaggtgtgagaggagaaatggtccattttaaaattcattcaaaatcaaaggtatgggtgttgaaggggccagagcctcctaactggatggtgctctggtgctcgtcctccatctccatgtctgaggttgtcctgtctgagttagaggatataaataaggctgtttctggacagctttaagtatgatatgctttgtgggatgtttattttttaagttatgctttgttggatgtttttatgttatgctttgttatgctatcctctgtatctgtttctccctcatccttgtgtatgtgtatagctaagcaggcctcagaaacctccgtcctaaagccttcctcaag

SEQ ID NO: 73695 - DNA, 943 bp, Prunus persica
  Intron number 1 from transcript ppa002296m (locus ppa00229 6m.g) derived from phytozome v7.0 (chr-ID scaffold_5; pos 16505342 to 16506284 reverse strand)
cataggagaagagacaagcgaagtcgttctcgcaggtacttccgattgtgttgcatgtgtattgttctgtttggttggaaggttaatttaatgttgaccgaaatttgaagtttaggcagctgaatttgcctggaaatttaactgtctttttattccgattccatggagtacgttatctgtggagaatcatgatattcttcttgactgtttgttttccagttggtcttcgaggaaccaaagaagcaggagcaggtctcccacatttaggcgcgcaggtgagttcagagatggcaacaaaagacaggacaagcgcctcattccagaatgctttgacttccttcgaggcagatgctaccgtggagcttcttgtcggtatatgcatcatgagtatgataagaatgacagttcaaggcaccataggagcaaacaaaagcatctggacacgcagcctggtttgaaaagatctaggatcaaggaagagactaagcatacatctgccatgaatctgcatgatgaaattaaagaccaggagttgcaagatgtgcctattgctagaaaagatagtcagttgattgatcctgataaaattaattgtgagagttctagagtggcaattgctacagtgcaggtgaaacaaattcttccagaaacaccagtggaaaccaccactcatatccctgacaaaaaagaatttcaggaagtgctcaagtctcatcaaccatcccctcaactgataagcagtgctgacaatatgaagtcgtgtgatgatacttatcaggatgtgttccctcttatgaaaaagtctgtagtcgagcaaactcaaagcaataattctgttgcacagcttcaaaaggttgattgtccctctaagcagatggaagaatttctcgtatctgatttgtcaccagatcgagcatccaagacttctccaaataaggtctat

SEQ ID NO: 73696 - DNA, 587 bp, Prunus persica
  Intron number 1 from transcript ppa019539m (locus ppa01953 9m.g) derived from phytozome v7.0 (chr-ID scaffold_7; pos 13489126 to 13489712)
cagcaggtaatgtatatccttttaattattttcttttttttttaaaaaaaaaaccccatctcttactatttatttatcttcgaaaaattattttgcaaaaaatttgtattttttgttggtttatacaggcacgtgaaaatgtgaaaacaccctcctatcactcgggaagaacggcttttcaactggattaaaaaagaactaaagaaatacgttcacactcttaatttgttattctatattcgctttcatttctggagtataaaacgaaaaatttggagtgtgaatagcaattatctgacattatattcttctatttataaattcttttgttgttgtgtcagtcgagatggtaaattagacttttttttttaaatccaccataaaaatgtgataatttgcaagatcgctcttttgtcaaaattagtgacccaaataaataaatacaattttgtttgtactgttgatttgattggtagctcaagttcaaaggaattttgttttgtctgtggtggtaagtcctgattggaggcattaattacatgcatgtatttgtatatattattattgcagggtctggtgtccagaac

SEQ ID NO: 73697 - DNA, 721 bp, Prunus persica
  Intron number 2 from transcript ppa008671m (locus ppa00867 1m.g) derived from phytozome v7.0 (chr-ID scaffold_2; pos 350758 to 351478 reverse strand)
catcccctgtacaattttcggctactgacccacaggtttgtcccttcacttcatacttcaaatgttctaccattctcataatagtctgttgcttacaggacttcttttaccaagtgtatgtaacatggcattcatgcataatttgtaaattcgactggagggaaccgtactttgtgcatcttgagtctttaacaataaggaaaaagaaaacttggttgcattagtagtttgctgagacatgtccgaacaaaacaagaaatttcattggcaacttatgcaggcaatgctcactagccatttcagaatcattagcatatcaggatgaaaagtgtaaaccaactcatattatttgtttcgtgcatcttcttaagagattcttttaagatcttttccctcactccgaatagacagcactgatctttatcgtttgctttcatagtttagtaattggctgcttctttcccatatttttcatcagagacaggggagtgggactagattcctggatagattcatttggtgtttccaaaaaaacctatttgaatttgggttttgatgtctagctttaacagataggttccatttccctgtgtgcaggatcatgcgtttgcgggtttctatatgtatttagagaatcaacatacttctaatactttttatgtgaaaccataatgattctttgtctccacaattcaggcagaaatagttgaccctgcagtga

SEQ ID NO: 73698 - DNA, 563 bp, Prunus persica
  Intron number 2 from transcript ppa025414m (locus ppa02541 4m.g) derived from phytozome v7.0 (chr-ID scaffold_5; pos 18338595 to 18339157 reverse strand)
catcctgaggtactgtgatgtctctttctctgattttttttctttttgtttttttcttccttcttcgaagtgagagactgttgcaagctccttggttgggcctaataaatatttttgtagatttctaggttgatggtcttattttggcgcatgataagttgactatataaaacaggaaatgtggatctgaactgttccgttgcttgtggtgccacataggacatgaaacaatacctagaaaatgtcacttttggttcagtaagtggcatatgatagccccatggtgtataaattgtcaagcaatcagattgtgctggcttcaacttagtgattctgttaggtgggcttgggattagctattgggtgccatttaggagatgaaacagtgcctgtcagaaagtttggttgagtaatttgtagatgatactcccattctgtatgaaatgtgtggtgatcaggttaaattgattgtgtttccttcacttgggcttagctttttgcaccagtcatttgattagttaagccaaggtgatgaattattttggtgttaaaagataaaagca

SEQ ID NO: 73699 - DNA, 708 bp, Prunus persica
  Intron number 1 from transcript ppa025414m (locus ppa02541 4m.g) derived from phytozome v7.0 (chr-ID scaffold_5; pos 18339347 to 18340054 reverse strand)
aatatttctactcaggtggaagtcctagcgaagcggtaatgtttgatttagttcaaaatatttctccttaatgtgctgtttcttttccatggtggcgggtaggattgtttcgttttcgtattgttttccttttcttgttttttaaactttttaatcaattggaggaataattcacaagtgattggtgcttctaatagacttaatagggttttgactaatatgcgtcaatgaaatatggtgcgattctcaaaaagttcaaacctgttaatggattgagggaaaataggacaatggctgcagtttagctgtcaatcatctagattcgcacctgctccatcaatatcaacgtaatgagtgaatggagagagccaaatccatcaaggaccaggatccgttttgtattgttaaggactttagtttcttgtttgtaattctcaagatgttgagaataacttcataactagcagccagataaattctaactcacccttagctgcacttccacatgttattttcctaagcaactattacttccagatgctattttttaaaacaactagtacgaggatctggtctaaagttaccgttgtttaattcatattttgttttctcttatgaacttacgagttatgactatatagtatatactttttactgaactgttctttttatttttccagaaagttcttgtacaagcatcttgctcaa

SEQ ID NO: 73700 - DNA, 439 bp, Prunus persica
  Intron number 2 from transcript ppa001958m (locus ppa00195 8m.g) derived from phytozome v7.0 (chr-ID scaffold_4; pos 13569762 to 13570200)
aaccgccaagtaacgagggcgagtcaaaggtagtaagctttgtttatttatttgtttattgtcttttttaaaaaaaaaattcaatggggtttgattgaatggtttgtttgttttcttctgggtggaaatgcaggatcaatcgttttaagttttgcacgattttgatttttgttgcttggtttaggaagtgatcattttatttggttcccaagcagggaaaaaaatgaatcctagtagttttaagatgaaattagcatgacttcaattaatctagattgttaagtcaggcttagttgactaaacgttttgggttggtcttttacccaacagatcgtagacgttgggtaacagaatgcatgcaatttcagattctggttattcccaatttgctgaattgtttcatttcaatttctcggaaatcaaataatacagggttcca

SEQ ID NO: 73701 - DNA, 454 bp, Prunus persica
  Intron number 2 from transcript ppa023236m (locus ppa02323 6m.g) derived from phytozome v7.0 (chr-ID scaffold_7; pos 17790506 to 17790959)
actcgagtagattagaggtattgaatttcaattaaatttgttttttagtttctgttcagatcttaaatcagtttcttctttcttatttgcttgaaagctcaattatctttatgatggtcattggttagaatatatgttgggaaatgttatgttttatgttactttttgcttaaaaatcccactggaaaaattttcattttaatcaaggaatgtatttgagttttggtccgttgccgaatttcgatttttttgattcagaagtataattttgctatgaactgcctgctttggtcccaattgacccttaaagttgataaagaatcttcattttctttgctacttcagttacttagttcagacttgttatttcttctccaagcaacgtctctgttttaaatggctataattagcgatttatggcattgttgttttgcatctgcaggtgctggacaac

SEQ ID NO: 73702 - DNA, 597 bp, Prunus persica
  Intron number 1 from transcript ppa021086m (locus ppa02108 6m.g) derived from phytozome v7.0 (chr-ID scaffold_8; pos 7289506 to 7290102)
ttctggctagttggctccttatcatcactacccaggtatattatttttaattaactttttttgaaatttttgttttttttttttttctgttttctttgtttttcggaagcacaagttcatagaaagtgggtttctttggagctgcccaacatggccaataaaaaattagatggtgggttagtaatctgtatcattagctgctagttggctggtgagagaacttttcctcttccttataacgaaaagaagatttgaaaacacttttttcttttcttttttattacttttttgtttgattgatgagataagattattatgaatttttttccacatgtgatggtggcgggtctctataatggtgggctggaatcatttgcaatccctgtcaatacggtgttttggagtctctcgcctttaaaattcattacaaaaacagaatactaaataattggataacaaatagttttattttctaaccgcaatatactaaatgattagttgagatggtacaaatagttttattttttagcgtgagattcttttaccctttgatatgttttgtggtaatttgagaaaatgacatgtaggtgttaggat

SEQ ID NO: 73703 - DNA, 946 bp, Prunus persica
  Intron number 1 from transcript ppa011503m (locus ppa01150 3m.g) derived from phytozome v7.0 (chr-ID scaffold_4; pos 13259175 to 13260120 reverse strand)
accgttaccttattgaccaaaaaggaagaaacagagtgagttctttttcttatctgttttcctcttctcttccaaattgtatcatgtctatttgaatatgctgctcttggtacaaatactattactggatctggaaatttcattgccacattatttatttgtcatcttttttaaatttatgcttttgggtggtttcaaatccagctctgggtttgttttatagctttggtattgggtttctgagtctgaaggttggtttcctttgtggaattatttgaaggatttatttcgataatatgttttgtttatgggtgcacataactgggtggttttctgggtaggcttttgacatattaggttcatttattggcaccttaaagaactgataaagagtatggattctttaaagttcgtttttttcattcatttcagattcattcctaatacaaatttgtaaaatttcatttctgtacactatatttgttccttttcttttaatgttttcaatcatgccctgctgctaccagtaattgaatctggtaatggttggtacttggttgtctgctgctgagtatgtgatactgggttttgttcgactcctcagccttcttttttttatcgtctcatacttctgtaactttaggattcagtcttaaggaagtttttatgtgtaattcttttctttttctgtagctgtttacttttgattggactcctatctttttttgtatcttaataatctttgttctcctttcctttgtaattacaaatggttccttcttcacacaaaccacttctatggagttcaatgctttttgggtcctttaattgtattaaatattcatgtgtttccttatgtcagctctttggcttgtgcttgtctattataaaaccatcatcgtttgaaatattgttaaaatgtttcaggtatataaatatttaaaat

SEQ ID NO: 73704 - DNA, 334 bp, Prunus persica
  Intron number 3 from transcript ppa008258m (locus ppa00825 8m.g) derived from phytozome v7.0 (chr-ID scaffold_5; pos 17782604 to 17782937 reverse strand)
tttgcctgtcaacagacctccaaacagtctccgtatggatttgtccagtttttcattttcaaggcctttgttgctaccaaatttttctgtttattttcgatttgctgctaaatttatgttgtttgaatcatatcatagacaatacaactactttccttcattcactttcttgaggaatgcaggggatatggtgtttagaagacgagtctgattggcatttgattgtgattaatgatcgattctattgttgcccttgctgatatttgcacaactgacttcacgtggtatacatcctgctgattttttgtcctttcattaggtggtcacaaggggt

SEQ ID NO: 73705 - DNA, 398 bp, Prunus persica
  Intron number 2 from transcript ppa008258m (locus ppa00825 8m.g) derived from phytozome v7.0 (chr-ID scaffold_5; pos 17782998 to 17783395 reverse strand)
ttgttcttggattcgactcagttgacccgtatgtaaattctattcccttttttatgccaactcgtttgatttttcttcctgttgtttgtgatatcgtgcaaaaattgattctttgtgtgttgatcagctgttttcatagcaaagcaagagaactatttgttaaagttgtcaatttggtgaaccaaaaaggaaggaatttggagatttaatgtgaatgctatccaatgtcttttttctctgttgagggatcagttgttgggattgaactgttagaattttacatttggaatgggaatgatgagcttttgtacttgtgttttaatatgtattttcctcttgaaatgccatcgcttgtgtgatcagcaagggcttgctccttattttggctgcattgtggg

SEQ ID NO: 73706 - DNA, 432 bp, Prunus persica
  Intron number 1 from transcript ppa004026m (locus ppa00402 6m.g) derived from phytozome v7.0 (chr-ID scaffold_6; pos 14945939 to 14946370 reverse strand)
gattctactcaaaacattttggtaagcaactcttcttaacaattactaaaaacctaccttttggaaaatttgattgaaactttctgaatcccagtattttctctcagcacaaaaggaagatagaaaacttgaaagaaagcagaataattgtgataatctagtttgtgttacaatttcttatgttagtctctatctgattggctgccaagaaaattagtacgaaatgataagcttctaaattgtcagattgttacgtattttcctgcattgttgtgttaaccaaccaaatagatatacttgaactttgttacatcagattcagagcaattgtacctgccctagtgtgaatgttgtctcatttctacatttgttttttttttttttttgggaatttcagcttgcttcttctggtggccttcaagtgggaagtaa

SEQ ID NO: 73707 - DNA, 612 bp, Prunus persica
  Intron number 2 from transcript ppa026222m (locus ppa02622 2m.g) derived from phytozome v7.0 (chr-ID scaffold_8; pos 7352821 to 7353432 reverse strand)
aaaaattggaacaggtaattttcctcttccatgctacaacagctctggagtatcttcattcaaaccggctgtttgaacctttgctcttaataactactgttcatacgctaacttgaattagatgtatgtgtgtatacttgaagatttatatatgaaaaaaaaacactttcatgtgtattgacttgtctataaacactgaatgtattagctggcatgcgtatgctgatgtgtttacttgttttgaattttggcccacgtttgttcttcttcatggaagtatgcctcgtactcttgcctatgatctctctttatatgtgcccatgtagtctgaaaacatatatatatatatatatatatatatgtttcattgcccaatggtgtatgtccatctgtttaaattcattgatatctagttggaactttcaagttgatcaaatctgtataagttcacctccatgtattacacaatcttaaacaagccgttctttttcctttagaaaaaaggccattcttttgttgttcctgtgtcatttggctacctgtttaattatcattcactttgttgtggcacatacaggaaagagaagaaaacgaggcttgtgttgctgaagg

SEQ ID NO: 73708 - DNA, 856 bp, Prunus persica
  Intron number 1 from transcript ppa007696m (locus ppa00769 6m.g) derived from phytozome v7.0 (chr-ID scaffold_7; pos 14562464 to 14563319 reverse strand)
tctgctttcaggggcaaatacgctggtaatttacttcttctgtttgctttgttaacgttcgtatcactctgtttgtgtctctctttttatttttattgcttagatctgattgttctgtgtagttcttgttccgttttgaagatttgatgcttggaatcatctttattcagtatattgtagtttttgagtggcttttaacttctgacttcgagatctgaacgcccagatttattttcttcactctaatgatctcttgcagtttttctagattgggttctcaggaaagcaatcgtttgttcttcccgaagtgtttttagtgactaaagttttgatctaatctctcaggcatacttcatattgcttttgggtttcctttgcgcagttagaataaactcatggttcattcatagacagtttagttacaaataactcaagttactgggtatttcaattgtttggtataaatctagatactttgcattgtaagattgttatgcggtctgtttttagtggatcaaccttttgtttctatgtttgtgatgatccacttatccataggactttacccttttgagttcctgtttgtttttagttctttatgttgagatctaaagttgtaatagtttttgaaagcatatagcatataatggttgtctttttcattgtatttggtgcgttctcgtccgcatatctggtggtctttgctggttttacctacaagactatatgtgcaatttggacttgtcttagtgtttgttatcgttctgtcatttttttctccggtaatttatggactttaggtagatgtaggttgtgatttttggtcgatgtttcctgaattttgtattccttgcag

SEQ ID NO: 73709 - DNA, 485 bp, Prunus persica
  Intron number 1 from transcript ppa012769m (locus ppa01276 9m.g) derived from phytozome v7.0 (chr-ID scaffold_3; pos 2555789 to 2556273 reverse strand)
gcagatattatcaggttggtttttggttttttctgcaaccttgtagtaaatttgaattgtttgattgacgtcgttgttagtgtaacttagatttcaggcctctttttgttgtttgaattgtttcattttgcaatatgagagcaagcaagcctattgttttgtttgttgtattgcatttgcggctgttttcaaaatgaacttgttgctataactttagatgccactgatgcttcctgctgatagataattaacatgtatttcatacccagaaattagaaagtacaatgtatggcaaaatcatggatgatactttcatagggttttgtcctctcatggatgatactttcatagggttttgtcctcttttctatctccgtatgttgtctagttagtatttctttctgaatacaaaccaattcttatctcattttaaccagatggaattttattttaaatgaatttggtatatggtatagggtcaacta

SEQ ID NO: 73710 - DNA, 584 bp, Prunus persica
  Intron number 1 from transcript ppa017620m (locus ppa01762 0m.g) derived from phytozome v7.0 (chr-ID scaffold_9; pos 1539314 to 1539897 reverse strand)
ctgatccaaaggttgcagagaaggcaagattaatcgtaagtctcacagactttgttctaaacttgtaaaacagaggtttaatttttcattcaaacgtcaatctttttattaaccgtcgttataaatgaaaccccacgacggtttttatttaccgccttttaaaaaagatataacgtcaatatttttataaaaccaacgtctgtattaaattacaacgacggttttgtgttaggttttttaaattaaattttgaactttcttcatattcacacgcacacacactctctctccctctctttttctctgcaattggtttgtacactatttttggatcaatgaatattttggttgggtttttatctccgatgtcaaataaacgacggttatttcattgaccgacgttttaatgtacacaaaacgatggtagttttgggccgacgtattaaatatttttctgcttctgtttgttaaataaaccgtcgtcgtaacctatttaccatgtcagttaatatttttattaatttattaatttaatcagttttacaatctgttcactcactaaccttctctctctcacttttagg

SEQ ID NO: 73711 - DNA, 829 bp, Prunus persica
  Intron number 2 from transcript ppa011627m (locus ppa01162 7m.g) derived from phytozome v7.0 (chr-ID scaffold_4; pos 4497548 to 4498376 reverse strand)
atcgttctggtaattttctttctttccaaaatactttaaatattcagttggtttcagagttgctgtaaatggataagacttatgtttctggcatataactgagcagggatagttaatgtgacaagaaactgaattgctttttgtttggtgcttttgcgtctttgatataataatggtgtagattttatattaaactagtttaagtaagggttctttccgtttctgttggtggattgttctacaaaccaataacttttgcggggagattaacctatgttacctttgtaatacctaagaccgagcatgggcttaggttgaagtcttgatttggttttagcaagatccgtgtcagatccaacccttgacttccttggtcgttcctgattttgatttatggtttacataatttaccatctcactaattgcccattttccttttcatttgacgtggatcctcaggaagcctctaccttgtgaaaaaaaataatttccttggttgttttagtcggctttaaggctgtctggtagtgctgttttattatgttctggttaaatccttctgatattgctcctatgctacatatgatcaattgcggtgatgtaggatttactacacttttccctcatatttatggttttatagcactgaacttcaaagctttaattctttgttattttattcatttattcattttggcttttgttttccttttgtgaagtggcatcatggtttttgttttttcctttcttcacttgagtagtacaaccatttcttgagcgcattcttatctactttgaaattttgcttttgcagataatagtgaatctg

SEQ ID NO: 73712 - DNA, 777 bp, Prunus persica
  Intron number 3 from transcript ppa005596m (locus ppa00559 6m.g) derived from phytozome v7.0 (chr-ID scaffold_1; pos 11244848 to 11245624 reverse strand)
gggctcctgagttgtgtggttcatttttctcaaaggtgcaagaatcattatcccttacactttcttggatgcaatatgatcttttcatctggtgtgcaatgatcctttgaattgttttccaacttctttttttttttttttttttgtaatattgcatcattatgtgtaaattgtaatgtttcctcatctcttctgttttccaattttcttaaaaatgaaatgttgtggtgaactttagtgatttgaatatctaagcacctgtcctttctccttaacttattatgagtagatttagaacactgttatcatattttttcttttgtctgattattagatctatcttagcaagcctatcctagcttatttttcttttgttggaaaattttatttattctaaaattttggcattgcctgggacatgagacagcatctgtaacccttaaaattattggtttctatttgaaagactgttcatttatacaatagaatagtcaaatgagccataccttatctatcttctatgacaagcctatactcgtttgccttgcattatctgtggggttgacattagcaactatttactaatgggattacctctacttcctgtaatggcattgaacagtaaccattgcaagttatgtcactcagtcatccaataatagccatcttagtctgctgtaagaaatttgtttgctttactttttattctccttttccaggtgggactatcagtctattgatcccttgttttctgttttcagtatacacccgcaatag

SEQ ID NO: 73713 - DNA, 239 bp, Prunus persica
  Intron number 1 from transcript ppa005401m (locus ppa00540 1m.g) derived from phytozome v7.0 (chr-ID scaffold_6; pos 21042072 to 21042310)
gaggaacttccttcttatctattctcttgcctcaggtctgtacgacgtcgtcccttgttccttgcggatagatcttcttttctttttgttctttttgctcttttaagttttagttcagcttccgtttaagtttttgtacttacattttgtcataaatcaagcagaatcgcattttaatcttaatttagctatttggttttgatcactgatggggttcttatgactttttgctgtcagtg

SEQ ID NO: 73714 - DNA, 361 bp, Prunus persica
  Intron number 1 from transcript ppa021336m (locus ppa02133 6m.g) derived from phytozome v7.0 (chr-ID scaffold_2; pos 1887502 to 1887862)
ctctaagattgtcaaacgggtcaaaccttttcaaggtaaaatcattcaaccccagttcaaaaagcaccccagtttatcagatttccttcaaattttgtcttacacggattctgatctcccttcactcatgaaattgtcttcttttattttctctattttggtgcatggaaaaagtaatattccaaacgaatttgattcagattatgctctgtttctattttagtctttatgggttgaatctcatacacaatcagattcctttttttttttttttttttttcatttctgggatggtttttaagttgtgtattatatatgcaacacaggcgctgagtcggtgaaatctgagggccaagcgaac

SEQ ID NO: 73715 - DNA, 623 bp, Prunus persica
  Intron number 1 from transcript ppa1027131m (locus ppa1027 131m.g) derived from phytozome v7.0 (chr-ID scaffold_5; po s 18239371 to 18239993)
tcggcgactgtcttggtacgtatctaatttaatttaattatccttttgctctgtttttctaccttcatccatccatctctgtctttctttattagcttcatctttaattcactgtatatgtttggttcgtcagaaaatgacgagggaaagaaagattatgattttcttgattttagtaatttggtaatttgaagattatatgagtttttcactttattttctttgattttcttgataaccaaacaaacgctccctaaattgtactgtgtagtaaaatgatatataggaaactgtgtgatggtaggctcctgtgagtgaggaattgaggcggtgaagagaaacaaaacagggcatagggtataggctatataggatataggcattcgatagagagaaggggagtaggtggatatgggcataggatctgctgttggttgaatttgttagaagaagggaaccaactttgtgtttaatttgggtgacacagacactgcatattagaattagagaaaaaggttgaaacttattaattgcttaatcattttgaaatgaatccttgtatgcatatgattgatggtggtggatgggtgagtgggcagtgttcaggtacacaccggtgcacg

SEQ ID NO: 73716 - DNA, 605 bp, Prunus persica
  Intron number 1 from transcript ppa001834m (locus ppa00183 4m.g) derived from phytozome v7.0 (chr-ID scaffold_4; pos 3349344 to 3349948)
aaagtaagagctaataccttactttattgcttagaacttcaattgggttgctgaaagtttgaatcttgggatgttgttgcactctgtatcagcacaaatgtttgcatactacacacaggaacacacttagtttttgttctttagtaatcagaatcaaccatttttgtttattttcttcttagattttctcagtgaacaaatgggtaattggccctctcctctcttaactaactgcttttgagttcttgacttgcgcattaagttctggtattttgggactggttctaataagtctcctttagaggtatctgcaatgttaattggagcgtagccaccgaattttgacaaggtcattggtttttcaagggatttctcttaccttgagcattcagtttttcagttttttgcatggtcagtttaatttccttttatgtgatggtcggtttaatttccctcttctggtttccaaatacaaccaaacattactttttgaaagaggagccacttgataattaaattatttgccaatctctgtatataacaagttgattatttccttgaatccatgtgctgattatgtgacgttttttcatgatggatagttg

SEQ ID NO: 73717 - DNA, 847 bp, Prunus persica
  Intron number 2 from transcript ppa017765m (locus ppa01776 5m.g) derived from phytozome v7.0 (chr-ID scaffold_4; pos 6964895 to 6965741)
catcatcatctctaaaggtatatacatataagcttgtaatacttgtagttgatcatcaattttaccatgcatctaattccctcctcttccctttttcttcctttccttaaaaattggtaaataaatatgaagctatggagttaaaatcttatgaaaacctactaatatatgggctagctgcttgaattcaccgacattggatatcgatctaagagagagagagagagagagagagagagagagagagtgtctttagggtttgatgaaatttccaagagaaaaaaaatagggtttgggaagaaagataactattcaattaatgacatatatctatacttcaattaattaagatgtatatgcatatgatgtaggaaacttcccaagatgcattttaattagtcaatagttgtaagctagcaacacatatgactgtatatgagttacagtttacaccatcttttgtacaaaatatatatgtctatggactcaaataaagcaaatctcatcagtctttgttctttttcttcctttaacattttttttgtccttttaaaggaaatagcttatcaacatgatgattaaagactcttcggcctacactttaggcgtacttgctagtatctttttctagtctttagcatcatcatatatatatatatatatatatatatatttctgttcttttccccctcttctttctcgtggacttgcttttcaattacagtctttgtaatttgtgtgtttcttacatatacatgcatatgtaattttaacatgccatgttaacaaaaactgaattttctaaatcacaggactcttacgcattgtgccgcgttttcaagaaaac

SEQ ID NO: 73718 - DNA, 779 bp, Prunus persica
  Intron number 1 from transcript ppa012654m (locus ppa01265 4m.g) derived from phytozome v7.0 (chr-ID scaffold_1; pos 27461552 to 27462330 reverse strand)
acggttacattgtcatcaagggcaggccctgcaaggttcgatctcttcgttttctcgccgattctcttccgatctgaatgccgtttaggactttgcttatagatcttctcctacttttatttgatcactgtttcgttctgtagagttttctttctattggtagttatgatctggtataattgggcacgatcaagctagttgttcttctagtcaatctgtggaaaagattcatcgagatcggatttgatttttgttagatttttttttaggattttttttttgttttcgattttctttttcccgacagattagttagtgtttagctgatcgatcgcgtatgaaattctgtaattttgatgtagttaatgtgaggtccttccacactttatgattcagatttaccgttctaataataaccatctgcatgtgactgaaattaattgtgagttttgtaagctgaaaaaaattaattatgggttcgtgatgtgtatgcttcgatctgaagaccttaaacctctttatgtatacatgtacatatcaattcactgctctatctgaataatatgttaactttctggtaattttttcgtagctgtctgtggccttgctgagaatttatttgtgaattgcttattatatgcagttcctcctcctcgtcatacttgcgaatttgtaaacatagatgcgcacctaactagtggagtgtttgttggtttggtttcttttttctcttttttgtaacaggttgtggaggtttccacttccaagactggaaagca

SEQ ID NO: 73719 - DNA, 763 bp, Prunus persica
  Intron number 1 from transcript ppa020189m (locus ppa02018 9m.g) derived from phytozome v7.0 (chr-ID scaffold_2; pos 16681290 to 16682052 reverse strand)
tcatcactgccgaacctggtgaggtaaaatgtagcgtcatttactgattgtagagttttcttatttgtacttctggtttgatcactgtctgtccttgacatgaatttgaccctggttgatccataaaaattcaccgaatgtagaaaagtatcacaaggattagcaagaactgtgacggtaaagttttctgcgttatttagaaacattctatgtgtctgtgggtcaccaccatgtgtgcgttcccatgccttttgagtatcggtttccgcaatttactattacatttagtataatcgatgaaatcagtaatatttcaatgtatagacatcaatctaaaataatttgttggcccacagcctaatgactttaactttggggaacaattgttccacttgttgggctctctggagagatgtccacacctaaaacttttaagaacattaataataaatcaccaagttcatctaggtctcagaggttctatttggaagaaagggtctttttaaattctttgcaagtattttttgtttcaaatccttactctaaattgatgacaagaagttgcttctgaaaatttaaaaaactgtgtgtttggtcaatatgcaactctattcatatacttgatatgtttatttgctttcctaggttgtttttctctatctcaaaccaaattaatgttgtttaaccccctcttatttctttgttctcttttgtttcttgggtttaaggatcttacattcaagattatatcagtagctgaaca

SEQ ID NO: 73720 - DNA, 937 bp, Prunus persica
  Intron number 1 from transcript ppa018167m (locus ppa01816 7m.g) derived from phytozome v7.0 (chr-ID scaffold_8; pos 6477255 to 6478191 reverse strand)
tcaatcaagttagcctctctgaccctgttattgctgtaagtccatcctctttcccaccccaccatgtgttcactgaaatgtttcactgagttttttccttttccttggttatgaaatgagtactagctatacctcactccaatagactgcgtttagttttaattttatatatttgactcccataagctgaatatgctctctctctctctctctctctctctctccctccctcctaataagcggaactcaaaggttccatcagtatttttatggcaccaattactctgcagattacttttgtggtaggaaatctgaattggctaaaactctacagatgcttcagtagtacatgggccacttttcgtgatgctttacagggaaagtttttaatgtcctattgaagtattcacaacaagcaatttgtcgtcaaattttagatagttgtgtaagtatattcgcgttataagccacttatgcagaagaagcagaacatactgccctattgtttataagataataggtggccgtgccattgttttactctacagagcttaagaatgataaacaccaacaaaagcatattcttttctatgcacgaattcacctatttgcatgaaggaaatagtgataagcattggacccaaggctcccaacaaagataatcttttatttcatccaaatcctggccctaatcactgaaacatttaagtcctgattataaaccgcatagccttaggcattgcttcattaacttaggtctcttgcatcttaattgccttggtattcatgattttcagttgttgatatctgagattccaggcagttgatcatcttaactgtcatttaatcacaatttatgctgtacatgatggttgaactcagtaatggtaatatatttgcttctcttatttctataatgtgcatttgcaggtcgttg

SEQ ID NO: 73721 - DNA, 702 bp, Prunus persica
  Intron number 1 from transcript ppa007531m (locus ppa00753 1m.g) derived from phytozome v7.0 (chr-ID scaffold_7; pos 14166352 to 14167053 reverse strand)
tgagaggtgggtttttgatatgggttttgaggaagttgaggaggtgggtgtggttagaagttggggagagagtgagggttgggtgaggggttgaaagggttttgggtgcgcttggaagtgttgggtttgggattggagagagcgctggttttgggtttttaggggtttgctccagtagtggtatggttattggtcttctcatcttattcatcaccaaacgtttgaaactcaagctcccaacaatggctgttactcttaggccacgcttatgtctctgcaaaacggtgcgtttcattcacccgacaaatgagaaagaaagaaaggtgctttgacataaatgccccgcctttatatggtacaaagcaaaccccgttctgggtcgaaaactcgaaaggaagctgaactgaagggaaaaagccaacttgggtgccgaagcagaatgagagctgagagcttcaatgccgctttctcctctggtgtccgtacaattcaaaggcctctgagctcttcaattttcggcgtaacgaagcctaaacttatcgctgctacgccttctaaaagctccagtaatttttgcttccacttcatcttctactttggtcttatcctttgtatacgttaatataacacacaatttatcttcttcttttttttttttttggtgtaggatttactcggatttcaatacgctgcgcggttcat

SEQ ID NO: 73722 - DNA, 500 bp, Prunus persica
  Intron number 1 from transcript ppa005310m (locus ppa00531 0m.g) derived from phytozome v7.0 (chr-ID scaffold_10; pos 172646 to 173145 reverse strand)
aggagatcttctactgtgagttacttttacagatcatttgatttctcccttcttctggttatataaaatttccctttcctttttttctttctcaaaatggttgctacttttgtttagagtttgaaacaaacatgatgttcttggattaattagtagcatgtatcagagagagacttgattcatctggtttctggctcaattaaatatgaacaaatgccaagatctaatttagcatagatggtctctctgtaatctaaaaacttgaaatttacaacttggtgtcctaaaatgcaaaaaatcaggctctttccatctcaaattgttgtacatctgccttactttttttttccttggccttttgcgctgctagatcaacataccctgactaaaaccaataactgcatatcaaaaggcctatcaaggctgaacactcagattctatagttgaccagctttggcactaatctatgtccaaaataaatacatgtttcagctggtgg

SEQ ID NO: 73723 - DNA, 312 bp, Prunus persica
  Intron number 4 from transcript ppa007169m (locus ppa00716 9m.g) derived from phytozome v7.0 (chr-ID scaffold_7; pos 9115726 to 9116037)
tacctggtgttactcaagacattgctggattcaaggttagtcatttttgttattgattttctttttcctattcattatatgctgaattgaaaatacagactagccggtgaatacttaaaaaagaacgctttttgacccttctaatcttgaaaacgaaaaaataatctagctagttcatagtgtttgtttcttttgtagttctttattcctctgtttccttcatctcgctgatttgatgatggaaaatcgtcttcctttttccctaacttttttgaattgtttatgtgcagattgctcatcagcctagcatat

SEQ ID NO: 73724 - DNA, 612 bp, Prunus persica
  Intron number 1 from transcript ppa005935m (locus ppa00593 5m.g) derived from phytozome v7.0 (chr-ID scaffold_2; pos 18412801 to 18413412)
cttcgctgattctgcagagttcagagctccctctggtattccatttctgtaattctgtattttgacgagttttagctgagtttgggaaaaagtagagactttttgaagattctgagtcacgatctggtactaaaacttgcttttcttttctgggttgtgtttgattgctgagaaacattgtggaaaaaggaaagaaaaatgaaattttagaaatttcatgtctcttcgtgaagataattatcattagactgagtttaaaatggacgtttcattgttccccaagatttttcaactttcatgtctcttcgttaagataattatcattagactgagttcaaaatggacgtttcatttggtcctcaagatttttcaaactttatatatgttaaattcttgaatagcggttttcctttcattcacaacattttctcagcaaccaaacagcgcaaacggcgattatggattatttttcgaaaatgcttcacagacggcaggggtcgaagttgttaatggaattacagtgaccagttaaccacttttttttatttgcctttattatttttgtattatgtcgtagactgaacaacttagttaatttcttagtattttcgg

SEQ ID NO: 73725 - DNA, 661 bp, Prunus persica
  Intron number 4 from transcript ppa013316m (locus ppa01331 6m.g) derived from phytozome v7.0 (chr-ID scaffold_2; pos 23532265 to 23532925)
accgtgagccaccacagcgattcatcagacgcagggtaagtttcgcattgattcattgcttgttcagttttgttattctcaaatcacattggctcaatttgcaatagagcccaacaaaaatctgggtccttccaacctttttgtcagagataccgatatttgttgattacaatgggatgaatgatagaaaattatgtcttcatgttcttgtactagaacaaatgtaatcatgtaatctcaaaattatcttgacaagcttttctgaaaactttacatttcgttggttgatccggaactatgtttggtttccttactgtcaagttctcttcagtatacttttttacaaccgtttttatggttctttatcacatgggtttatcatatgtttgatttatgtggccatctattttatgtttgctagtcattaaaaggtttggtcatatcttttctccttttagtcatgtcgagttgtattctttatttgttagtttccattgtttacttaaaggaaaatagtaaaacataacttgattttgcctgcttacatattcccgttttgcacttgcacatgcatattagcccaattcaaaagggacatgcctatagaaggccgatggtatatccttagcttacctgatatgctgaaattttgattgtcagg

SEQ ID NO: 73726 - DNA, 511 bp, Prunus persica
  Intron number 2 from transcript ppa007493m (locus ppa00749 3m.g) derived from phytozome v7.0 (chr-ID scaffold_1; pos 34106942 to 34107452 reverse strand)
ccgtgagtaaaaaaaaccttgctcttcctattagaagttattttgagaaaataagtacctctctgtacatttttagaactctactcttttatgttttccatttttgtttagcatgctgtcgttaggattgaactgaatatgatattacctgacatgttcaaattgactgtgtaatcttaattccacttgggttattcttatttattcttttaattaggacagaggtcgattgtcttttggcatgtgttggtgcaactttagtcttgggtgctactccttgctagtagcctaggagtctcccctggtctgtttattgggctagtcctattggtggtctcgggttgtttcagtagagaaacaatcaggactatgggaagtagtacagtacaaaatgttgtacactttgtagtgtagcagagagaagctgctatgattatttactttgtttttcagaaaattttgcgacatcattaatgtgctatttgttactttgttgatttgttttgttagc

SEQ ID NO: 73727 - DNA, 731 bp, Prunus persica
  Intron number 1 from transcript ppa007493m (locus ppa00749 3m.g) derived from phytozome v7.0 (chr-ID scaffold_1; pos 34107568 to 34108298 reverse strand)
aggagcctcaactctctcaagtgattttctttcatgtataagttttttcttggttcattttattcactcttgctacttagcatctgggtctctcttgcttttggttaatattgaattcttgatgattcattcccttttgaatgtaaatttggttttgttgaaatatgggtccttcatataaatttggttttctcgtcttctctaggatgatcttgattttttcataaataccgagttgatcttgatgattgttagcactatattatgcattaatcctttctttcaagtctaactcttgcttaattttgtgattttagtaccctaatctggctttattttttataattcgtgcttcacctggagaaagccctcttaaatcgttcctgagtgaagtgtaatacagtgggcatgagtgtgatcaaatcgatccaatcttgtatactgtggaatatgagatgatagcagaggtgaaggagttgagacttgtgtgatttacagaaactgacaaatagccttatctttgtttgactggtgatttctatctatcttcataaccaaacagtaaaaactttgagtttctagaagtcccaatgcgctttcttacctgcattttcttaactttcatacaagttatcaccgaaactctgttggttgttggatacattagtttttcaacgtggaattgtgggatcaatgtttctgattgaacttttttttcatttcagattgga

SEQ ID NO: 73728 - DNA, 869 bp, Prunus persica
  Intron number 1 from transcript ppa007781m (locus ppa00778 1m.g) derived from phytozome v7.0 (chr-ID scaffold_1; pos 45184559 to 45185427 reverse strand)
ttataattacaggagcttcttctggcattggggaggtaagtctctctctctcagccctccaactttcctatttttgtgcttttttttttcttccattaatctggataattttctaacatttttcaacctgatatttatttatatatatttaattttataattttattgcttgtgatcattgtaaattgataacaagagttgggcactatttttcaaagccggaacctaattcttagcccaaagttacatgggccactaggtgaggcctagaaaaagtcggcctagcttggctccatttcatttagagattttttaaaattaagtacttgaattatttcagtctaaaaaaaggaacttgaattgtttagattgaagttataattagttaccccaacagggtgcagtcgagtggaaaagaatttgacttgtataccagtgatctagtcgagtggaaaaggatttgacttgcataccagtgatctaaggttggaaccccatctcacctttgtagtgtaagaaacccctagtttagaccatcacatttacaaaaaataaagagagttataaatagttattcaattggacaatgtcctatggatcggccccatcctggtccgtggtaaaaagttgatataacccatcctttagccaatttagttgtcctaggtctttttgataatagctcaagtggtaaaaaaaacagttacactcacacacatgaggttctacattcgattcgctctcccctcccccaacgttacttgttttgttttaagaattatacgcactagatcacagattttggtagtttgataatagtggttataacttctgaagtgcatgatgcctatgattgcagcaaattgcat

SEQ ID NO: 73729 - DNA, 519 bp, Prunus persica
  Intron number 1 from transcript ppa005539m (locus ppa00553 9m.g) derived from phytozome v7.0 (chr-ID scaffold_4; pos 9105466 to 9105984 reverse strand)
acttctgctggaaaagggttacctccccatacaaggtgtggttttttattaagcttctttctttacatgtttcatcatggatccagatcctctgcttatctttgttcaaagtacataaatctcataccaaaaatacgtaagatgttaggcatatccgctcagtatcgataggttttgagttacatgctttaattttatcaatcattgttttaaatctaattcgcttattagaattctaataattatattgtatttttatttagatggaaaaagtcctttgatttttaataaacaattcagttaaaaacaaaaatatccagacaaagagaaagtccaaattccctgggtgtttgctacaaaatctacatgcattgttatatgctgttacacttgacaattacttaaatttttgggtgacaacaattacctatactttcaattacttcatattttcattactataattttttcttggcatcgttagattctcgactagaagaaccagttatagagcttcca

SEQ ID NO: 73730 - DNA, 912 bp, Prunus persica
  Intron number 1 from transcript ppa002989m (locus ppa00298 9m.g) derived from phytozome v7.0 (chr-ID scaffold_6; pos 26107475 to 26108386)
tttttggggtatgttctaattttcttccatgaaaatcaagttttgttcatcttttccttttttttgataattttgaactgtttgtctgtttttatattatgaattaattttacaaatttgccagtctgattataatgcagaaatggtttgctctgagcagttgttctgctcttaatttttctttttgtgttgattttgttgatgcatgttgtacggctaccttacttcgttctttggtcaaaaggaaagtactgtttttatttcttgttactgcaattggctgatgacaaacttgcttttttttactggctgttggtgtttccttatttctcctcttttaatccttttgagaatgcttttccctgtttcctgtgtttctcttattagtagggcaggacagttatgtcgtaggtgatggtagccttcttgcttttcttgatgtagtaattaccatatttctcttttcttttttcttttaggttctccttgtcataattaacttgaaaattatccatgttctttaactattttcttagttgtgggagtaaaatttgtgttttcctgtattaaattttcattttattgggtttttttagagcaaattaaagcaataaagttggagctcatgcatcaactgtttcaaaatctgaattctttgatgcatacttcttggatcttctacataatcgaccaaaatcggtgtcattagattaccataactagtttgtcctgttgaatctttgtgttgtgtaacaaagatggcaaaacttccttgaacttgtactcagattgctgtttatggttttcatttctgtatgatatggtacaaggcaaagctacaaaatgtacttttttggtaatgtgatgctatgctacatcgtgatctcatccttttgtttttccaatttaggg

SEQ ID NO: 73731 - DNA, 614 bp, Prunus persica
  Intron number 2 from transcript ppa013114m (locus ppa01311 4m.g) derived from phytozome v7.0 (chr-ID scaffold_4; pos 3539558 to 3540171)
ctcagttttgtatccgcgccgcttccttcaccgtatctctatcttccctcttccctcttatctctcacagacacaggtgtaatcgggtgctcttaatgtttgattaggatctgtttgttttaagtggtgtatgtgagaaaatcaaacataaatttggattttgtttgtggtttttcttttcattgtgtgtttttgtttcgtttagcttaaacttcagtgttctgtgttgtttttatgggttgaagttggtattgacgatagcttagggttatatagtgcaacttgacatctgaaaatgaactgatcttattgggatgtgcaactgttaaacttgctaagttcttgtcacacaaaacaattattttgttattcacaaagatttgttattgatttggttcttacgctgctcactgtgaatagggttcttatcagatggcataatctcattctgtttgtaattagttttttattctgcttgctataactgggttttctctaaattgcttagtccatattttatttggattttctgtttgaagtatttgaacatggatcataactcatggtgtaatgttgcaggtgaacgttccaaagacaaagaagacttactgcaa

SEQ ID NO: 73732 - DNA, 838 bp, Prunus persica
  Intron number 1 from transcript ppa008760m (locus ppa00876 0m.g) derived from phytozome v7.0 (chr-ID scaffold_6; pos 26828864 to 26829701)
atcaggccagatacaagtaaggacactcctgcctcttcattcttacatcctcaattattattatcatttttttttaatctgggtttgtatattttctttggatcatcgacctgtgatgggtcgtcctggaaaattctgtattttcttttgttggttttttgctagaatttctgagtgaattttaattgggtagctggaaattaactccaatatgttgttaatgttcaagaacatgataggtgaataccaagtaataatttggatcatcatataattgagatgaatttgggagttatatggaataaaccaaattgggttgcgagtctcatcgaatgctacagagctttgtagcaatccaacttcgaggtgtcatctgtaaatgcaatttcaccatgttttggatttcttaattttcaactggtgttcatattgtcaagttttgatcacagaaaaaataataataataataaaaaacctacatactagaaaatttgcaagttggaaaaagataatgatcacggaaatagttaaacaaatgtttcaccacatgactgccatgagaaggggggatttgagattatatagttagtgccagtgagttgcaatttaactgttacaattagtagcaactcccctgtttttgatgcgcttaaagcctacacatgatgaattctttaactatgtgctgtaggaaccacgctacaattgaggctttaaatatacttacatacatttaagtttttcatggtcatagattgtgtaagtcagcagtcagctaactatgtgatatataattcaccaaatttcattggttctgtcttatataggaacctttcag

SEQ ID NO: 73733 - DNA, 799 bp, Prunus persica
  Intron number 1 from transcript ppa011969m (locus ppa01196 9m.g) derived from phytozome v7.0 (chr-ID scaffold_2; pos 13655721 to 13656519 reverse strand)
gaattacacagaaaacaaaaaatagcatcaagttggtgagcaatacccatctttctccatttcttttagcttctttttctatagtaataattctagtctatgcttttgaaatcgtggtaatctttaattgttccaagaattttcttctgggtttgtggatctgtgaatttgggttacttattttttgctttctttgttgttgaatgaagtgggtgggagttgcaacttcctaacctaaccccttttcttctgggttttctcaaaactatgctgttgatgaagatgggtttctttttttaatgttaacgatcggttgggcatgtaatatgtgagaaataaacttgtctgtgtgtaaaaactgcctcttgataattttactctatttgggtatctgtagctttttgccaagatgatgatgatctctttggatttgaagttttgccaaacagttcatgctattaactatataatatgcgaagtagaaaccattatgataacaggatttctgtttaaaaagttaaagatcatggttgcccaaatttaagaatctttaggtcatatcttgggctaattttgtgaatcttctctgcaacatagtctctgtgtttttctcggttggactctgttaaagtagtgaactttgcatatattgggcaccattcagactatgatatgatgtggggttgcttagtggctgttagtgtgcttgtttctatttgattacttttggttcttagtttcccaactgattttttgaattatgatttttatgtgtgcattagttacaagttgaagtaag

SEQ ID NO: 73734 - DNA, 525 bp, Prunus persica
  Intron number 1 from transcript ppa010849m (locus ppa01084 9m.g) derived from phytozome v7.0 (chr-ID scaffold_8; pos 19203810 to 19204334 reverse strand)
tggtttctcttaaggaacagattgataaagacaaggttctctttgttcttctctcacccccacaattctatttcagtcttttcatctatgttgatttgagtctattttactttttcttagttaatgatagttttgtttgattgaatatatttaggctttttcttgaacccaaaagatggtgtctttggtagctcagaaaatgcaggaaaagaaagaaaaagccttttttctggtctcattttattagctgtctgaatgtgtggtgtggcccctgccattgcccgaacattcgagattttaatctcagttatgttcagttgggtgatggtaatgtgttatgcatctgaaatcattcgactacaaccttttagttttgatatcacaatcagatcaatcttattatattgatctaattccggccaaattgaagttgcatctatttagattggtcagtttgtgtgaaattggaaatcaaactgtttggagcctaccaatttgattttgaagctacctgtgcttaacagg

SEQ ID NO: 73735 - DNA, 928 bp, Prunus persica
  Intron number 1 from transcript ppa009886m (locus ppa00988 6m.g) derived from phytozome v7.0 (chr-ID scaffold_3; pos 16016302 to 16017229)
ttctcaagactcagggaatctctcgtgttctaaacgtaagacttttcaccttagttttttttttttatgcctggtaataaaattgtaaatacaagaacgagttttgggtttggttcttgctgttttggaagagtcagtttaatttaaaggttcgatttttttcattggcattcgttttcgtatgttgattttgctaattggacgggtatgcagagtattattgagtactttcaaatggagaacagtattgagtgtttgatacgtgctttgtctctacttaatccattttttatggataagagatactaaagctgtgaatgttatctgcgctagtggtttgatctcaacctgcagggaacttgcagaatgaggaagtgtacagagaattcaatgagatagctacggaagcatctatgctttgttaaatgtagtggttgagatcaaaagttagggtgtctataagcttaaagtagttgagttgatgttgagattcatgagtacaacatgaagaagtaaatagcagcatcaatacataaagttcatcctagattgtggaagattcgttttgttctcaaggagctataaggacaataggaaggctaagaaaggtgtataaaggttgtgtttggggttatgagtatatatggacctggataaagaatgagtggtttacttcttgacctgaatttattggaatctggtcattgagttgtttttgatgatttgcattttaagaattaacatgtgattttagtgtaaaaacattcatatacatacatacatgcatatatatgtacacatctcagcttttttgtgtgtgcttaaaatagttagtctccagcaattaaatgcttgacattcttgtgtaatgttttttctcactctatatgcagacggttccagcttgtcaaaatctttacaagaactc

SEQ ID NO: 73736 - DNA, 919 bp, Prunus persica
  Intron number 1 from transcript ppa013682m (locus ppa01368 2m.g) derived from phytozome v7.0 (chr-ID scaffold_1; pos 8419283 to 8420201 reverse strand)
aagtccttccactggtacccactacccaaccctttccctcttccatttgtcctcctcacactaatctctgttttatattgagttcaattctcagatcttcttggtaattcatatttaaaatccttaaattgaatttaaagacttgatgcatttaggtacctgtcttttaccgcaatttgttaacttgggaagttatgttctagccaaatacacatatcttgtcgtgtattcacctaatttgtgtccagtatcatctttcatgtaaaacagagtttttagcttatattttttgtgtcactttgcgtttcctgattcagtgtgggagtcagatgggtcctcaaaaggctagatttttggaaaacttagcacccatttttcaaaaattgcaacttttgttgaaaatctgatgttgaaaaggggttcaatcatcaaatattggttaaagttgcagtttttgtcttgaaaaaaagggctatttgtattagatgggcaaattttggttatttttcccggaactcaaaatgctagaccatcttcttatcactcaggttcactattttcatgtttggcatatcactctgtggttccttgtatcatcccaagaacatataggattaatttatgacccaagacctgagcatctaactgaaatgccaatcttttaacctgaacaacttctttagcatttcatagattattagacacgactttgtagtttttgttcatgtgtggccatggaattttcccagatagtgcccccgcaccaaaagctatcaccaagttttctctacagttagttaagttgcagttaatttttgtgactcaagcattaggatatgtggtctgcataactttttaagtgttcgttaatgttttgtaatcaggggaaaggacgtgagtatcgagaacctgcatcaag

SEQ ID NO: 73737 - DNA, 590 bp, Prunus persica
  Intron number 2 from transcript ppa004654m (locus ppa00465 4m.g) derived from phytozome v7.0 (chr-ID scaffold_6; pos 4451057 to 4451646 reverse strand)
attgcctttgtaattgtggcggtttatttatacaggtgatttggttggatttttctaaattcaatttgactcagtaaatctttattgggattaaaattatttggtagcttcaaatatgtttttttcccctacaataattagctttacttgcaccattttacaaatgaaagtaaatacctttccttctatgagagccttattcttttattgataattgaaaagaaagaaagaagagatatattagaatccagagtggagaaatataatctttaaccgcgaccaggtgtggccatgaattaggaggttcataggggtgtacttgcatatgatatgctatgtggtgccgcaccattctaagttttactttgtgtaggacagcactgtccctaacttaaccctttttacttaccacccacttggtgcgaaggagattttcctttgactacaagtatctacaactgcttagccactgcttcattgttctgcgcttaataatttatattgacattttttttttttggttttaaacttttgattgctgttcttttgctgtcactttaacaggctttcagttgtgattttgaaggatc

SEQ ID NO: 73738 - DNA, 394 bp, Prunus persica
  Intron number 1 from transcript ppa024366m (locus ppa02436 6m.g) derived from phytozome v7.0 (chr-ID scaffold_5; pos 14634571 to 14634964)
ccaagcttcttcaagcttacatcgattgccaaaaggtggagtagcagttgctcttaatatatatacatatatatatcagtttggttgctcagaaaataaagaaattaattgggtaaccaaagaaagaaaggcagaagaatctaaatcaaattgaaagcaaaacgaaaagagaagaccaagaaattaatgatatgtgttaaatcagtctctctagtctagagagtcgagggttttgtggtgaaaatttttccacgagggagatgaagatgagaactactaattaagttgacttgttaattaaattgtaaactgaaactgtgattaatttgtttttgatttggctcaataaacatgtgtaggtgggagcgccaccagaagtggcaagtgtgttgga

SEQ ID NO: 73739 - DNA, 441 bp, Prunus persica
  Intron number 2 from transcript ppa005968m (locus ppa00596 8m.g) derived from phytozome v7.0 (chr-ID scaffold_7; pos 14418057 to 14418497 reverse strand)
agccaggcgaactagcagtcatttccaaagaggcggtatgttttctaatgctttttcatgttgactttcatgtgtttgtatccagttgactgaagattgtgagatgctttatgcgattaattgtcaatttttggaaagtagatcaaaattgtgggttctggaaaatgtcttgacatctagtatgcatgagtgttgctgactttctgcttactctattttgacatcttactgcattaaacttggattaagataatttgcttgcgttattcatttcaatgctcgttgctcgctagctaactgtatattttctgttcttcatattattgctactccttgaagttgtttccctttaatggctgttagacgtcaattaaattttatcatgtaattagttttttactcccaggtagctccatacgaacgtcctgcactcagcaaggc

SEQ ID NO: 73740 - DNA, 835 bp, Prunus persica
  Intron number 3 from transcript ppa004463m (locus ppa00446 3m.g) derived from phytozome v7.0 (chr-ID scaffold_1; pos 28085458 to 28086292)
aaaaattctttcaaagtcagatttcccggcatcaggtatcttgctgttaactgaattaatctcaaattggggaataatcatatgaaccatcaattgaccaaaaaaaaatcatatgaaccacatcatctttatctatgttcattccaacttgaaagaaggttctgaataatagatctttcttaattagttgttgaatcgctatttgattgatcaaagtatgaaattgtgaaccctcattactgatggaatacaacttatctgtagaccaatcagatgactatttccattggctagagtccagtacttgattacttaggagtagtgtgagatgcaagtctcatgcccggttttgaatgagagaaagaagtaaggaatcctcttttcgactctgaatctaccactccagttgtactagatattttcaaatcatgtaatatctagctatacattccgtaccttgctaaagaagtaaagaaacaatccatgttagcaactacacattgcctaaccaattccctctcaatatgttcctaaaaaaatcctatttattcctgcatgtgtttccttccactaacaatcaaattgatctcagtatagctaccacatatgaaattgatcacatgttcaatttaattttttttagttgaactcagctacttctgaggcattaggctagttgtgcagagaactaatcttcttttttttctttttccccatcttccaatctgctgtacaacagataaaactattctcaattctttggaaataattcgtctgctgtcacttcttatgcataatctcattccatattgcagtaagatttttaaatccagtg

SEQ ID NO: 73741 - DNA, 764 bp, Prunus persica
  Intron number 1 from transcript ppa004602m (locus ppa00460 2m.g) derived from phytozome v7.0 (chr-ID scaffold_2; pos 26477941 to 26478704)
attctgagcagccccggctttcttctctccaaaaggtttcattttctactctcaattcaatacaattttgcttttttttttttttttcttctcgtgcttacgttgtgtctgtttgctcactgagaaaggtcaattcaaattgaaaaaccttgaattgaaccaaaacaacatgaagttttgcactttatattgtttcattttgcggcaagtacaatactttagagtgatcaaattcaaaaaatttaaaattttgtttttgttctctcgtcttttctcgaacaccaaacagggttaagttgggtgtttcgtatcaggttagttcaatttacgtttgatgcctgcaacgtgtaggaaaatgaactgagagataaaaagaaaaaccacatgtaagtgacaaggatttcgaattttttattgtcatttgtattcgatactacctattgattcttttcatttttgacatttatgttctgtgtggttgcgttgagaatcagaagtaataatttttgtcgcatgagaacgaaagggcgtctatggagtaccaatgaaattatttggtttggctcgtttgagagctgacccagaataccataacaatacgcgcacacacacacatatatatatatatattctatcctattgttcctgctccactgttttctctgtaaacgcctcgagtgtgattgtttgttttagatgtctacgttcgaagttgttgaagtgcattgccatttttcaggggggttcttcagttgaacttggcg

SEQ ID NO: 73742 - DNA, 633 bp, Prunus persica
  Intron number 1 from transcript ppa012974m (locus ppa01297 4m.g) derived from phytozome v7.0 (chr-ID scaffold_3; pos 5360485 to 5361117 reverse strand)
ttcgccaactcggaaggcaacatcctagttgaacggtaagtgcggatctacatcttccgttctttattcaaaatgttttgaaatttctccaacgtcatgaacttgtaactttggattctgtttgtggtgtttttgactgaaagttattaattttggtatacccttttgtgggtttagttaatctagcttcgaaatcttacgacttggatctgaattgtgttttgggtatttcatttctgtatagtttgtcttttactttgtgtttatggtttgaatcgggtggactttgtttttcttcgatggttttttatttttcttgaaatggtgtaatggggaatcgctgacgtttaaatggatggctttctgttgtacaatatcctatcagattaagaagtgaaaaggatagttaacaatatacaacgattcatgtatagcatggtgtgaaaattatacagcatttgctataaaagacctcatctttctgcttcgttgtataatgtatatgcaattgctgtatggaatatatcgagtacgaaagagcactcttgaattaattgttttgacatttttgtgcatttatgtttcctatatttgaagcattgactccagggttctatgctcattgcagtttca

SEQ ID NO: 73743 - DNA, 870 bp, Prunus persica
  Intron number 4 from transcript ppa011158m (locus ppa01115 8m.g) derived from phytozome v7.0 (chr-ID scaffold_7; pos 19167316 to 19168185)
gaggtacctctaagcttgaaatttgttggagatttgaatacttttttatgggattttccttttctatatttggcaaattttttactattggagaagtaaatatgcattttgtaatatctgagattgataaggcttttattttattttttgggcagtttgccattgagaaagtgcctttcggtttcatttgagtgtgttggtgtctaactttgactctatttaccacaaaagcatgggattaatatgcctaaaggagagagctatatcacagtaaaattaacctatgaaaagtgtgcatcccccaaatgtgttttggagcactttatagtaatgcatgatggaagtagtttacctgtttagctaccttgataagagttttctcacaagattggaatacaggctggattactatttgccgaacaatgtgaattccaagctctcgttaatatatgatgttggtttcatgatgattatgttcggcatgcaatttatatattggcttagattgatttctgaatctccctgttgactttgattaatttctaagaaaaggcaaatttttttaactacaaatgtatttggtttcagatcagtgctttagcataggattgtgattgtgctctatgaaatatttagcagtgtatgaatttgctagtcttcagattgttggtccttatatggtcttttttccccttgtttccccaagtacccttgactatttgtgtgctaaaatgactgatattttatccaacatctatttcatatttgctagatgttaatatgggaaatattttcatgctgtcatcgtcttggatccttttaattgaagttgcttgtgttgtacaggtggagtaccttcccatttcttcg

SEQ ID NO: 73744 - DNA, 468 bp, Prunus persica
  Intron number 4 from transcript ppa004426m (locus ppa00442 6m.g) derived from phytozome v7.0 (chr-ID scaffold_3; pos 20754264 to 20754731 reverse strand)
ctgtgtttgacgtctgttggattaaggtattaaccacatcttttccctctcttgtttaatgtggaattattagtccagtattcttcaagtgtaaacattttcaattatgctatacacaaaagtaatttgagtggtcagatggggaaggaaaaattactgtggagtagaatttatatgtattcctccgaacagggcactttcaatgcacaattaaaaattgggaacttatcttgctgctaatctggaactaatcaaaagggcaactgtttttgaagtactttcggttttgatcaagtaaaaagggttaaacgatggggtcctgtgtttatgccattgacattgttatgaaagcatagcagataagtgggagaatcaaattgaagattgttgtgtgtttttgcatcaaatttaagtttttcatatttttttagtgctaatgtgtttttgcaatacatgtggttttgcagg

SEQ ID NO: 73745 - DNA, 631 bp, Prunus persica
  Intron number 3 from transcript ppa002926m (locus ppa00292 6m.g) derived from phytozome v7.0 (chr-ID scaffold_7; pos 12391241 to 12391871 reverse strand)
gaggagcaccaataaaccaacaggttcgtacaacttgacataggttgtggtttactgatactttggatccttgttcactttcatatatatgttccctgttttcaactacccaacattaaagcttataccacttttttccatttctgcttttggcgattgtgatacagagtgcatgtacatcttctatttgaaactagaaaatatttattccctacggaaatgtatcgggttatagtttatttgctacagcatgcctttcttcttcctcttccactttctattttatttattttgtttatattttgtaaaatttatttcagcaaataatttttttaattacaaaatgaaggctcagtttgtaaaggattggtgggttttaggtttatatgtttaagagagagggagagagagagtttgcaaactgatcaatgatcataattttggttatagttgaatatggtgggagatgtttttggctgacctgtatttaatcacatttctttttgtacctgttctttctgccccttttgcatttttgttttgttttgtttttgaaggttcacctcctactgtattgttttctaatattctgtcagttgagagagcttgagaggggggtggatattcttgt

SEQ ID NO: 73746 - DNA, 705 bp, Prunus persica
  Intron number 1 from transcript ppa002926m (locus ppa00292 6m.g) derived from phytozome v7.0 (chr-ID scaffold_7; pos 12392790 to 12393494 reverse strand)
tccaacgctgttctcacttatcgttttctcccgaggttcgacgctctctcagtgtctgcaattttgcatctcttagctatgtcgtcgtgcttgttaatcgttttgtatgtcttaatctgctgttttgaatgcctgctataattttcgtttcgatactcgaacctgtgtttttttcttcccagttttcgtacaacgacattgcccagttttataaattttgatctagtgttacttttgtttgcttagttttaatttgatcttcttgctcagattttcattttgaactttctgcatgatgtttattgcgataactaatcactctttccaaaaaatttaatttttattggtttaatcacgttatttttcagaaaaattgttattctagcgtactgttagtgttatataattgtaactgatatttccattgaccagtttattttgatcatttttgtaggctagtcctcgtccatcaattttgtaggcatatttttgttgtttaataacatagttcccaacaagaaagattatagtttttgcccttattattcgtctgattgtttagattgaacggtatagtggtaagattgatcaaggcttatatggagacaaattttgatttggagtccaattttaattttttaaaattaattttgtgtgtttggtgtattaggttactaattgctgttattggaaaagaagaggtcg

SEQ ID NO: 73747 - DNA, 952 bp, Prunus persica
  Intron number 1 from transcript ppa005266m (locus ppa00526 6m.g) derived from phytozome v7.0 (chr-ID scaffold_5; pos 9961093 to 9962044 reverse strand)
ccgatatctacttccctcctacctgtattcagcaggtgacgatccctcgcacactctatattttcgtttttcttttcaatttttattttttcaaaattttcaatttatatatatatattttttatttgtggaatttctgttttcgttgcttggagaagtgagaaaatgaggaaatggaaataaaaaatcgtttcggatttgtttttcgcttgtttttgttgatcaggaaaaaagaaagagagagaaaagagctcagctggttaagtagttgttttattttttttgaaaaaatgacaaaacgattctgaactactagaaaatttgatgatcttcttagagttaatttcaaagtattctggacgtgtgaagtattatcattagacattttgatctggaattggaggacaaaaattacactgtgtttaaattcttcttttcatttaagaacttaactgtatgttgatgatctgcataatgtttcttagctttgtttgttgttcaaagtttgacttataggcagtgtgactatacatttgtgtgctctgattggaaacagaggctactttgtagactatctaattctactaatttctgaaccgaaggaaaaaatatatactaatgaattttctcatgcactaaccaacaaagaaaaggaaaagggctagatatgtccatgctttttctggaaaaaaaagatataaacttcaagtgagagatttttctttctgggtatgaatttccagaaattatttgaacatgtatctcagttgccaacatacgcaaacacaaggagcagtagggtgttagaagcttatcttgctccaagctacaattccctgcagtgttcaatatatgtgcatcatgaagtcttgtaaaccaaactaattagatttccatcaactaatcaactttttcattctttatgaaaaataggaagccttggaggctcacg

SEQ ID NO: 73748 - DNA, 455 bp, Prunus persica
  Intron number 1 from transcript ppa015205m (locus ppa01520 5m.g) derived from phytozome v7.0 (chr-ID scaffold_8; pos 20685499 to 20685953 reverse strand)
cccctgcttctccacttgacaaggacctcaaaaaggttggttttttttcttttgattctactggggtaccctgaattacaatttattagaattatttcatgaatgccagctccaagaaactgcccttttttcttcttctatgtgtgcgactgcatttttgtacaattttagttggattgtgaaataggtcatggtagaaatagatttggaaaggcataattttttagcttcagtactagctagaacatgatagaaataggtcccagctagtttatatattttacttacagttttagagtcttagtacctgggttcctttttgttttgcatatcccctatgtaatgatagactggttttcagattgaaagttattgtgttatcaataatatctcaaggttatgcttccatttgcctaacaggttgttcagaagactgctgcaacctttgcaccaag

SEQ ID NO: 73749 - DNA, 285 bp, Prunus persica
  Intron number 1 from transcript ppa007494m (locus ppa00749 4m.g) derived from phytozome v7.0 (chr-ID scaffold_3; pos 20536545 to 20536829)
tggctactctgtccgcatcctcgttgataacccaggtaattaacaaactgcacaatttggtcaaaacttggatttttacaatttagcatcatttcggatttcgatcaagtttccgttgtcttcttcatttttgtttgattgcagtcgtattaatttaggttttaactattcttgtaattatgtttttacatgtatctatccgcttttggtatgattgcaagcaaacaagtttttattattattattattatatattatatatataccatgtggtctctgcagaag

SEQ ID NO: 73750 - DNA, 634 bp, Prunus persica
  Intron number 2 from transcript ppa009423m (locus ppa00942 3m.g) derived from phytozome v7.0 (chr-ID scaffold_4; pos 5206895 to 5207528 reverse strand)
gagctgtacgtataatttttaacttcacattcacttgggccttttcatactctaatttcactgaagatcatgttcggattaaaaatcgtagttcaaaaagataacttcactgttagattttctctcagctttacattgttattatctttaaaacgggatgcacaggaaatgcttcacattttagtttctttagcttgatttgtgattatgtttctgttcgttcagcttttagctagctagtcccattagatcaagaaaggaagttaattagagggttctaccaaataatttgaaaacccttttctttttttattaaggaaaaagtaaactgaaacaaactctaaggtccctaacgtgtgaactatagaaaccaattgcatttgcatgcttgtaaattctagatggcttatgcaatatacgccttgccttctgttggatagtgccttccagacctagaaaattaatctttgatgtaatttatactgaggctattgataagctgtgcctttacttgttaatgcattaccatgtagtcacctgttatttaagtgttgaagcgggaagcagaaatatcaatactgatgattttgctattctctgaagcctgatacatgctgcttatgctttttcagga

SEQ ID NO: 73751 - DNA, 734 bp, Prunus persica
  Intron number 1 from transcript ppa005613m (locus ppa00561 3m.g) derived from phytozome v7.0 (chr-ID scaffold_6; pos 20235607 to 20236340)
gaatccatgtacgtatctcttctttttctctcatttgttgtgcgatttatttgggattctgctagatcttggaccttatctttcttcaatttgcctcattctggctagatttgcttcatttttcttcaatttacgctggatccagggtttctaggcttctctatggctctttggtgtggatttacgaaatgaatggctaattttacttgatcctgttcgattatttgtaatttgtggaccggatctgcaatttctcttggtttatatgatagacaatgataagcattgcttgttcccttttattttgactagatctgttaggttctgtttaaatatgttgcatgtctaggcagtgtattagatctagtaatttatattgaattagaacatgctgttggtgcttttctttttgtttaaattaggtttgttattttattttagacgtggatttgcattaatttttatttttataaagctttatgagacatgagaatttgtttgaactgtttggattctgaaatgcttgtttacatctggtaaaattgttcaatgttagtagttttgaatcagctataatcttttactgtgtatgtagttttttgctctaagtattagaattgttgtgcattttataatcactattaagaacatggtctggtgatccagttttgatgggtgtcatttggtttgtaatcctgatatgatgttctaaatttaatgtcttccacagcctg

SEQ ID NO: 73752 - DNA, 851 bp, Prunus persica
  Intron number 1 from transcript ppa015436m (locus ppa01543 6m.g) derived from phytozome v7.0 (chr-ID scaffold_7; pos 14462325 to 14463175)
gttctgctggtatgagtttcaatattaagaattttgatttgcttgatttgtttgattcatggatttttgttgttgttgatgggatctctgtgttttgattttgtttgattctgtgtttgttggttttgagtggttatgaattgtttttttgggagattcactataatacccaatataggagcccaaattataaaaaaaatcatatataaaatggactttagaaacacatccaaagcccatttacaacataacaaaaaggcttttaatttctttcaaattacaaaactgctattgatttcttaaaataaacccaacccaaaaacctcataaaaaaagtccaaaacactcaatggggcattaaagtaatttaataattaaaattaaatttaatatgaccagctgttattttttgggttttttcggggtttgttatggtgtatggttttttatagttttagtgctaagaatgagtatataactaaatatctcttgtttttaattggttcaatttgcaatgaaatggttgtgcttgatccatgttcttttagctatttgaaggcagctgatgggtctcttaatttttcaagtattttgtattcaaatcatgtgatttccagttctcttcaatagcaattgacaaatgccaagttgggtttgctaaactatgagcttacaattgtgttattaacttaatggtattcaataattttatgtggtcagctagctgtctatacttggagttggactggattgtgtgctttattagttaattcagtgctaggattttgttttgttactttctaaattggaagaacaattgttgtggacagatttggttaaggcagttcctg

SEQ ID NO: 73753 - DNA, 742 bp, Carica papaya
  Intron number 2 from transcript evm.model.supercontig_12.3 2 (locus evm.TU.supercontig_12.32) derived from phytozome v7.0 (chr-ID supercontig_12; pos 216319 to 217060 reverse strand)
ggtactggtggccctgctgttgctcctgcttcaaagtaacttgattagactctcctgtcactctgcttaactttattttttttaaaaacttttctttctacgtaaatttcagcttgttattgactgttttagtttattcttcttctaaatactggaggaaattttggaaacaatttaccaagtgtattgtttttgtgacttcctaacaagtggaaatggatagagaagaactcaattaacaatttgggtatttggatgagttggaaaagaatgcatatagaaatcttagtgaataatttcttgagcaccatttccccgctcatcagttacagtttgacttctttttcatgtttgttttctgacttaccatatatacatgtatatatattccattttgaggaacttttcctctcatgattggttttccagattaaacttgtaagcatatatttaataatcatgtgatttcaagatcttttttcagaaaaaggactatttaacgatcttgtgtggatcttctgctgaaatccaaatgcataatagccttgatgtgtaaaaagtctttagtctttgatcaattttataggagggtttttttttttgctcctttgcagcatctaactgaagtgttgaactagttactgcgtaactgttaattaatgtttcttgcaaatgttagtctcagccctctgcaaactctaattgcttgcgtgttgtggtttgacagagcacaagtcgtagg

SEQ ID NO: 73754 - DNA, 640 bp, Carica papaya
  Intron number 1 from transcript evm.model.supercontig_119. 40 (locus evm.TU.supercontig_119.40) derived from phytozom e v7.0 (chr-ID supercontig_119; pos 230127 to 230766)
gtgaggggacaactttttggtagttggttgggcagttttgaggggggtagtacttgtaataacatttaagggcaaaaacggaaagtgttattcaacccatccttgaattacaatcctagggtggatatcacgaattgcaattaattgttttgaaggaatagtttttcattagaatgcctatttcttgataagtttctcagattaaagttctgttcaaaaaagtttgtcagattaaagtgctggctgatgggttggttatatccttttatcaaaaaacaaaatctgcctcattatgcttgtgttcatgtggagagtcaatataaatatattttgaaataaaagtgtgagagtcaatattttttatatttaatgaaaccatttttcatattcttttttgtgttaataatatatccttcaatttttcttcaatggaatgaatatttatgggccttaggctcagtggtttttcctgtctgcagatcttccaactgcatattaatatttaatattttgctgcttatcatgcttgttttcttactatcctattcagctgttagtagttgctttatataatagttacgtggccatttcttatttttgctgttgtctcttgttccatcagttggatctttgcaagaaa

SEQ ID NO: 73755 - DNA, 474 bp, Carica papaya
  Intron number 1 from transcript evm.model.supercontig_124. 36 (locus evm.TU.supercontig_124.36) derived from phytozom e v7.0 (chr-ID supercontig_124; pos 642198 to 642671)
ttcttccgtctctctttccctgcttcgttctctaggtaacacaactcctctctttgcttctttctcctttctccttttcgtttttttttcttgtattgtatggtaatggtttttctgaaaccaatgaaccttatcggtttctgctgatagaggatcttctgtttctttcaagcttcttctaaaactctaatcattttctttatcgatgtttcacactctgattttatctgtttcgttagtagcatatacatgattatgctttgtactgatcctttaattctcacttcaatttccgattaatccttttttgttttgtagaaacctcaggaaagtatccagtatgaacaattcctaaattgactaattgaacaaacaggaagctatatgtggtttgattctccttaaataatcttaattatgttggcaacatgatctgcagggaataactctagcaggggatcaggctgcatccaa

SEQ ID NO: 73756 - DNA, 991 bp, Carica papaya
  Intron number 1 from transcript evm.model.supercontig_10.5 5 (locus evm.TU.supercontig_10.55) derived from phytozome v7.0 (chr-ID supercontig_10; pos 922565 to 923555)
ctgtgagtgcattgtctgtttatattatttaaccaaccaagtattcgcgtgcatgtaaggaattgaatttcaactgcatgaccggcagatttaccacttattaaggatgcttattgattgtatgtttatgtttgatttacttgagaactgcaacttcctgacaagtaattcatgagatctttcaaaaagaaatttgagttgcatgggaatttaagatgtaagaaacaaagcttattcaagtcagtatagcccttgtaaattcttatggaaaaaaagtttactctcagtacttattcaagatgctgcatgcttatgctcttcacctaaattagaagaagtggcataaatagcatatttttcagaaattaagagtaatatatgagtttcccaatgctatcagcatatgcaaatgtcttggagatagtaacatggtacagtaacatttgctctggtttatgtacagtactactgatagcatttttgaatgagaatggagagtattactgcactttagaagtaacgtatataattattttgttcattcgttgatgtctgaaatagataaacagtaaagcatacatgaaaaactcttgtctgttggcagaaatatgtaccatggtattttctgaactacaatattgaaataggcagttgtttgaaaatttgaagtagaaacatgtaaaaataggagcaattttataaactattacatgattaagacagatatgtgaagtttaatgtgacaaactggacttaatttaattaaagtattcaaacgtgtaaaattatattagtgtttcactgatgtgattgataaggctttgtttctttgcaacatgtagaattactttgttacgattttttttttcgttgtgaatgattaaatgtcgaaacttcagaatttgtgtttttcttgaatgaccatatagtgatttcatatatttgttacttactataattatattacttatacatgctagtcttccacagc

SEQ ID NO: 73757 - DNA, 803 bp, Carica papaya
  Intron number 1 from transcript evm.model.supercontig_1.15 6 (locus evm.TU.supercontig_1.156) derived from phytozome v7.0 (chr-ID supercontig_1; pos 2249153 to 2249955)
acgactgtttcgtaagtcgcttgtcttcacttgatctgtttctttacctttcgttctttttatttaaacggtattttgtggatacctttttgatgcgttttgtttcgttgctgagaaacggcgtttgaagggaagtaattttgaatttttggtaattggaaaaagatcacctaaatttggttcttagggctgattattaaggttctgttcctgatatttgaataatggaacaacccggtgcgtgttttatctttggcagattcggatctttccttgtttgattgtaactctgtgggtttgtacagccggggagttatctgataatttttggtgggatttggacatgattttactatatgtttgtgtgaaagtttgactttttgactatgttccaaacatagactgaatgagaatttctcctgtgaatttgagttttaggtagaatcgttttatagatctttatcatatgtagattttatttacattgtttatcatagattggtggagtttggttcttgttttgctctactagtcattcctggttagaattctgtttttaacttatgatagcattgaattatcctgctagatctgtgttcttcttctctctctgttcttagtttctagcaagaaaaaatgaaattgaggcatctttgagttagacagtcacttggttgatttatacctttcagctgtctccgctccctgtttgcatatgcatccaaacagttaacacattcatatgaattcatcttcattttataatttataggtggctaaagacccttctggaaaagatatca

SEQ ID NO: 73758 - DNA, 447 bp, Carica papaya
  Intron number 2 from transcript evm.model.supercontig_1.41 9 (locus evm.TU.supercontig_1.419) derived from phytozome v7.0 (chr-ID supercontig_1; pos 5171549 to 5171995 reverse strand)
taccgcgctggaatcgtccctgtttcttaccgaaggttagttaaactgtttaaaaaattttcaaatgttaagttggattaaacaaaagaaaaaaactaaatgagggttaaaatctaataagtctaaattacggggacgaaattgtaatttaatgattcttatcttttttatagccacaaatactgaaaattttcgtaaaatctcaaccgttcgttttcattcgataaagtgggcccctaatttcacagatctgatcaaatgggtatctgatcaaggaataatattccctagacgactcccaagacaaagggaatcaaatagaagatagaaccttgtcacaggataacacaactcttttcctgaaaatcactaaaacgtttttttgatttagtttatattttttaatgtatagagtgccgtgccgcaagaagggagggatcaggttcc

SEQ ID NO: 73759 - DNA, 639 bp, Carica papaya
  Intron number 1 from transcript evm.model.supercontig_116. 8 (locus evm.TU.supercontig_116.8) derived from phytozome v7.0 (chr-ID supercontig_116; pos 37307 to 37945 reverse s trand)
ccttgttcttgctgtggtagcttgaaggtcagcttgctttaattcttgttaggaacttccttgagattgttagaaagataatggttttgttgcttttggtgtgctaatcatttgagaaaaatgctccacttatgatttagagctcacaatatgaatagaatggcatagtttctgctaaatcacattggttatcttccaaatcctttcatccaacatagtactgttttatttctgataatttttcctgaaatttcaagtgttgaactaaatacaaaatgtgataatgactattattctttcaatttatcgcttcatttttttgatataaacgtatctgatgcaagtcaagcttgaagaattgagctattgcatgtcttagaagtgattcactctctgagtagcatagggtgcttcattatcagcaaagttctggacagtagaatgacattaattgtaaggaatttagtgatatgtaatgctatattatctacactgctatgttgctttgttaacctgttaaacctcaaatgccattgatattaggcattggtaacaactgaacttttgtcctcccatccattttctcaattgatttttgtttctccaagagttccttgatggtttgttgtttgttgcagt

SEQ ID NO: 73760 - DNA, 485 bp, Carica papaya
  Intron number 2 from transcript evm.model.supercontig_1369 .3 (locus evm.TU.supercontig_1369.3) derived from phytozom e v7.0 (chr-ID supercontig_1369; pos 17996 to 18480)
aagataaaacaataatcgtcacggtaattttgttagtacctcatagatggtttgagaacatatgtttcaataagcttttatttcatctgccagtctcagaaaatgagttatatgcatattcatgtttgtcttatagacacaattattctctattttcttgtacaacacgtgcttgcatacgtgtctggaagaaattgcttccttgagttctttttgatgagtttgtggaagtattttgagaattatttagcattttctttttgacttgcaacaagttgattcgtgatgatgcatttcttaagctttgctgttcttttttcgccaatttgatgtctattccactgagtattgctagacttggggaaagaaggtttagatgagtacttgttcaatcgcagcattattatctaaccttttgtaatgcatcaattgatgaaactccgttttcaggttaacggggagatatataaccataagcagttgag

SEQ ID NO: 73761 - DNA, 699 bp, Carica papaya
  Intron number 1 from transcript evm.model.supercontig_104. 98 (locus evm.TU.supercontig_104.98) derived from phytozom e v7.0 (chr-ID supercontig_104; pos 668134 to 668832 rever se strand)
cttacaaaccttcggagcttccacgtaaatatcttccttctgctcttcattttattctttttggctttttttagactttaagcccaactgagtatcagcgattatagctttgaatttaactcattatatacagaaacatatacacacatatgtatatatatatatatgtatgtatagatgtttttgattgagttcgtttagtactcacgtcgcttttggtgtagttatccgttatatatcatctttatttactgatcgtgtcagacgatggaggatattaatgtagggtttttatacacttacagctggtcattcttttttttggaagattcaaactgttacgcattagttttttacagttaaaaatcatcatatgatcaaaactgtgacgatcgtgatcaagtatatacgtactatatatatatatatatatatatagatagatacgaagagaatacgaacagaaaaattaaagtgaaaaaattcagtcttatcaaacaaccttttttttatcttaggaaaatttcaatctgattgtacgtataaaccaggaaagatcactgcaaatgaattatatatgtttgtgagtatctatataaatagattctagaacaatatatatatgggtaaattaattttgatttgtactttctttatattgcaggattttcaggaaatctgtgtcgcaaagattcagag

SEQ ID NO: 73762 - DNA, 758 bp, Carica papaya
  Intron number 1 from transcript evm.model.supercontig_1.17 3 (locus evm.TU.supercontig_1.173) derived from phytozome v7.0 (chr-ID supercontig_1; pos 2608701 to 2609458 reverse strand)
caactggataacgaagaatagtggtaagcactttcatcttgctttaaagcttttgcttttcttgttttatgcatttacacatacttggtatataaatagcacgcgcagatatatgtacacatacgggaacatgtcacggtaaaacatatctaccttaagtttatatcaattttgacattgaattagttcaaattttatttaaaagtcactgattatgataattcagattatacctagaaagtaatggaaacccaaaaaagaaaatcacagacgggtaaatggtaaataagaagtgagattaatgggttctccaaattttactgttaggagaattcttaattagtaattttggaagaaacatcagttaagcaaacttgtcttttttttttttttttttttaattgtagattcgaacaaaaaaattaccaaatttgacatcataatctagaagctaaattttgaacatgaattgaaagtgacaagtgtcctacttttgattccaaattttggccatcactttaataatatgaagattttatattgtagttgttgggactgcttctattgcatcgacattgataaatatccaaataattgagcaaccaccagaaaaccatattacactgataaaattatatactatatgcagccattcataaaatttaatgcaaaacctaatctttttgttgagtaaaaattcataaatgaactaatttagttgtagattaacgttgatatcattaaaggtttggttacag

SEQ ID NO: 73763 - DNA, 504 bp, Carica papaya
  Intron number 1 from transcript evm.model.supercontig_107. 121 (locus evm.TU.supercontig_107.121) derived from phytoz ome v7.0 (chr-ID supercontig_107; pos 651586 to 652089)
cttcaagtgcggcatttctcctcctggtacgtttcgttttctttcctttccgttagtgccgctctttgtttggtggttccaggaaaatttcctggaaaatatcagtgaaaattttacgtttaatgttttccgcttgatcttttgttgtctctaatctggcagtcgcggagggagtattgacctgtgtttatggattatgtttatcaggtttcttcataaataaaacgctgagttagggtttatgtttgtgtgtaaatcaatttaatgcacgtttagaatgtgccaaattagacctgaaaattgcagagaaaggaaaaaatggcaactattggtgtgaattttgatctcaataaatgcaagtgctgttttataaaagctaagtggttgctgtaagtatgctgaagagatgttgtttggattgctgtgttttatgcgttcatatgatagagtatgtgctttggaactttaaaacgtcattgttctacttacttctcagcatctgct

SEQ ID NO: 73764 - DNA, 551 bp, Carica papaya
  Intron number 1 from transcript evm.model.supercontig_11.1 47 (locus evm.TU.supercontig_11.147) derived from phytozom e v7.0 (chr-ID supercontig_11; pos 2194052 to 2194602)
gaaagtggggtgtggggacaggatcagattctgggaagatgattggttggaggggggccctctaagagacagatttcctgctgtttttgatattgttgtgaataaaaatatccgggtgcaagattgtttcagaagcagccgagatggtgaggggttttgtgcaggtggtgttaactagaaacttaaatgattgggagattactgaatatgaagttgctgagagtgttggctgagataagattaggcaacaacgaggacaaacctgaatggagacaacaaaaatgattccttctctgtcaaatcttggtacaaaaagctcaggcaggttcctcttttccagtttcatagggcagatgtattgccacatttcccttacaaattgatttggaagatcaaggtacccccaagaatttctttttttctttcgcttgcgaagcttgctgagagtgcattttgatcattgataaacacaaaaggagtttaattttggtaaatgcttgctacctatgcaagcaggcagaagaaatctgctgtcgtctactgttacatat

SEQ ID NO: 73765 - DNA, 321 bp, Carica papaya
  Intron number 1 from transcript evm.model.supercontig_114. 3 (locus evm.TU.supercontig_114.3) derived from phytozome v7.0 (chr-ID supercontig_114; pos 62606 to 62926)
ttgtgtgattcgggtccttaccagtgacgtcttagtgatagtgttaggattaactgcaagtcttcaaatgttaccaattcctagaaatcactgaggttgattcttttgtcattggttcgaaccaatttctattgaagatttagatgtgcttatgaactgatttaaaatctgttatggaaagaagttgaggatttgtttgttgtttgaagctcaaaccagtgctgttgagtaattgtaatgtttgagctactcttcttttcactgacctaatcaaatgctgtaatagggcttcgagtgcaacttcagttactgaagctggag

SEQ ID NO: 73766 - DNA, 958 bp, Carica papaya
  Intron number 1 from transcript evm.model.supercontig_14.2 54 (locus evm.TU.supercontig_14.254) derived from phytozom e v7.0 (chr-ID supercontig_14; pos 2836752 to 2837709 reve rse strand)
tgtaagcctcatttctctctctataatttaattcaatattactacgaatttctcggtgttaaaggagtgtttcgttgctagattatgttttgtagtttggaaaacaaattttctgaataagtaggtgatgtatatcaagtacatgatcggactgcaagtagcatagggattctaattgttagatttaggcatatgtgttccttcccctatcgcccgagatatcttgtcatgcccacaactcatcctccacttaacccaccctgactcatgcacttttagaagaatctaaataacatcctgctaaatatgaaacgcagcttcttggcaaataatgatctggagtctgcatcgtctttgtgcataggaaacatcaacttaccgtgatctttaccatgttagataggattttcacattctctaagtactaaatgtcggattttcatgtaaaattccaacaaaaatcattgatttgtttgaaacatagccttactaaatttccttctttgaaatctctctttgatcttctccttcgttctggaccatttattttctttagccactctgttttctctcttttcttatcacatcttctgtttcttcctttctcatgaaaatatcgcatcaattgaatatccaattctgcctagtggttgttaacacttgaagaggcttgtggtacttcttttcttctcaaagaaggaaattcattaaagatgtattcttcaatctctatagaatacaagctaattgaaccttgtatagatcctatacagatgcttaattctaacaatatgccccccttcttacagtgcttgcaaaaaatgctatatcctatatctgatatagatatataggtctaaaaaatatatttttcttctggttaggtatcttaatcttttaggcggttggttttattttgtgttaatggcggttttgcaggtttgagaaaggagcttat

SEQ ID NO: 73767 - DNA, 837 bp, Carica papaya
  Intron number 1 from transcript evm.model.supercontig_104. 11 (locus evm.TU.supercontig_104.11) derived from phytozom e v7.0 (chr-ID supercontig_104; pos 116900 to 117736 rever se strand)
accgagcttggagtgctggagttgatcgaatcatagttaagtctgctgcttaccaaattttgatcaaattatgcttattttcatttgaaaatttctttagatagtatatcgtagtatagtgctgtgcacaaacatagaagacaccaagaagtagtgggtttttctgccatttttgggctaagaaagaaaccgtaggtggacttgtttagcttcttggagttcaaccattgctgatgcttggtacgactagcgaactcattctccaatttctgttatttatggtagtgtaagtgtaccaaaagactcaagtttggtttaagtttccagaataaaagttacaatataatacaaatgagataaagatttgaatgaacatatcattataattttatgttaaatctatgtggtattgtgatttcttctttaataagtgggaatacgaattctacattgtgaaattgaagatatgagtggagttgtataattatgcattaaatatgtaaattatgacatatgatacttatcaattatccaagatttgagaattaaatgagaatagaatatatttaaatcaaatgcaatgtaagttctaaactatcatttcacaaaacccgctgcttaatggaggatgattaaagttttctatatcttgtttctctctctctctctctctcttaccttgtatgactggatgagaatatagttcatgaagctacaaattgaataatacctatccacctcagtagcaagtggcataaataatctcataggtttacaatttggatttggtttatggttacaggtgactggtgggtccttggacgaatcaaaggaagc

SEQ ID NO: 73768 - DNA, 953 bp, Carica papaya
  Intron number 1 from transcript evm.model.supercontig_139. 43 (locus evm.TU.supercontig_139.43) derived from phytozom e v7.0 (chr-ID supercontig_139; pos 295444 to 296396)
ggaatcgcatatctggtgagttcggttctataatataactgaattgtgaaaaatttgagtagttattttctgttgttgttgcgaattctccttccaatgggcttgatgggtggttaatctctgttgcattttggttgtgctttggctgcatttgagattgctaaataatcgttcaggtcagattgtgtttacttgttagttgaatttgatgttaagcaggtgttggggcttttgccgtagcttattttgtaagaatttataagctgtataatttataacctatctaacagcagataagttaatacagtttttatataaataagtcataggcgtctggctaacacgagcgtatggtaagttttatgagtttatttatgtgtttattaaatacgtagatagtaaggtgaaaaattctatcaaaataatagttttactatttttagtttatacagttgcaaaaataatttttttcttgaaaatcatttctttatattttttactaattaaaatataaaataatattttaattctaattattatttttttatttatgttcattcttaattatgagtttagtcaacagcggtgttcttttaaatattagtaatgagcagctttctaaaaaattgttgcaagagctaataaaatctttaacttatcaccttttaggtgtttgccaaatcagtaaaaaatttttaaaatgctgctagagagcttttaaattcctgttgactggtttataagcttaactaaatgccctcttataattggttcaacctgtgattgaactttctttattgttgacgtcctttcccattcactctgtgttttagaacatgaattgatcccttggcttacctgaattttcagaactgactttcatgtaacatgtttggttaattttcttttccttttgttggtgcagggattgtgggaaacaagtttatttgggt

SEQ ID NO: 73769 - DNA, 965 bp, Carica papaya
  Intron number 1 from transcript evm.model.supercontig_110. 30 (locus evm.TU.supercontig_110.30) derived from phytozom e v7.0 (chr-ID supercontig_110; pos 596069 to 597033 rever se strand)
catttcttattgcattacaagtcctcctccgtggcgtgagcatctttgcttcgcactttacttttatgctttaatgagctttcaactagttctgtaaaattatagcttcaaaattctgtttattttttgagatataaattggattttcacggaatgtttttggttctgagtgagtgactgtgattcccgtgaatccagcttaggaatattttagataagcttttggtatttgttcttttgagaggaagtcttttggtatttgttattgtgttgggtatgtgcttttctcagtatttctttagctgaaagtagctttttgggtcctcttttcttttactagatatttcttttcaaaaagcaaatgctctcttctgaaaacaagttcccggtgtttcattgttttaatattctaattttgtgaaaaaacaaaaaagaaaataaagaagagaaaacccaaccacccttcttatttaaacatcttagaattttaattatattctgctgatatgttttagcctcctttttcgttactgttcagggaacttgggaactggatttctctgtcagttgtacattaattaatcggcagattctatttccaacaaattggaataatttttttcctttattattaattgatttcctcttgattgaatctcttttttcacttatcattatggctcatctgcacaaagattttgtctcattttggggttgcctgcatcaacttctgttgccattttgatatatgtaaggaactttcaacaaatgtactgttgtggttcagaaaaatttaccatactactctgggtaaatttttgtagtcaaattatctttgcttgtctttttcttttatcttgactggttgtagctttcatcgtagagaaattgcatttaatttactgaaactctgattcatgtttgttgcagcggaggctatactacttggctttcagcattatctt

SEQ ID NO: 73770 - DNA, 918 bp, Carica papaya
  Intron number 2 from transcript evm.model.supercontig_112. 97 (locus evm.TU.supercontig_112.97) derived from phytozom e v7.0 (chr-ID supercontig_112; pos 743991 to 744908 rever se strand)
attggaagcttatttttgctggaatcgtgtttcaggttctctccctctctggttgaagtttcttcacaaaattttatcaagcttgataatcaaagcatttaaatccttttattttctttacgatgctaatttgtttagttaatcatttggtaagcgaagtttctgttgaggtgtgtgtttggatagtgggaaaatcaagcgtaaagtccatagttatccgggttgcctcaattccttgtgctgcagttgctctgttagagttgtcgcagatatctctttagcgacaaactgattatttactacgatcttttcgaaaggtgttcttctttttagagagctatttaaagatattggtgatgcgttctcaatatgtaggcagttacaaacgtatacgtggggttgaacaataccaagattatcctttaggactataaagttataaaaactctatgatctgaattctgcttttatggtgaagtttttctcattgcttcgaggtctatctaaagttttgagacgtttaatgtttgtggaaagaaatttgtcttccaacatggattttccttttcattgtgtatcagtgtgcttttggtatggacagaaatagaccaggagtttagctcattcacaatgagtagagctccccatccttttatagtggctaaaatgctttgtggaaacacaagaaattctttttgatggtctttcagaagttaagggcagatcacatgtaggttgaattttctcttttatccttctttgccctttcctcaattgatcaaggacatttttacccgctgtagttctatgcatgtgctgtgttcttttccttgctcttttattgtacttttctgtttaggatactttagtttcttttttgattcatttatttatttattttttatatgtagtgcctac

SEQ ID NO: 73771 - DNA, 544 bp, Carica papaya
  Intron number 1 from transcript evm.model.supercontig_119. 55 (locus evm.TU.supercontig_119.55) derived from phytozom e v7.0 (chr-ID supercontig_119; pos 381291 to 381834)
ctcatcctccgcctccaccgccttctcggcaaccggtacttttactcaacaaaaacatacatatatattataatacagtgtaaatacttataggaagtagtattatcttctggctaaggaatttgatctgtatatttctttttacacgatttccaaagaatgatccacggaatttgaacttagctgcaagctgttatgaacaaatgtaagttagcaaccccttgagtggttaggtatactgggtatcatgaactagggtttcgttttgaggaaaaaaaagcctataattccttttcgtatttatctctgtacaggtaggtttagggtttcctgttcactggatttctttcttctctagtttgggtttctagggctttttttttttttaatttccttcagatctctgaaaagctgacattgttttttatcccggttttcttcttccttttttctttttggatatacatgtatggatatattatttctgattatcgatttgagtgaatgacataacatatatatgtatttgtatatgtatgagcag

SEQ ID NO: 73772 - DNA, 594 bp, Carica papaya
  Intron number 1 from transcript evm.model.supercontig_116. 77 (locus evm.TU.supercontig_116.77) derived from phytozom e v7.0 (chr-ID supercontig_116; pos 822449 to 823042)
cctgcgcttcccggtttgttttcgttaaatttgctttgttttaatctgcgtttgtgattgtatttatttgttgggtttgattgggatcaaattatgctggattgttgtgcgactgtggctcttcgctgcttttaaatcctactatacacagatggcctgattgttttttttttttttgtttcatttgaagcttttgaatcttgttgcattgctcgtttcggattgattgtgttgcctattctgttttcccgttgggttggatcgtcttctaaattttgcataacttttaaccctctttagcattttttcagggtgacctttcttgataaattgacaagttaatgcaattttattagaagtccagggttcagttccgtatgttttgtaagaattttgattctgagaaatttcagatatgtggaaaagagtgaggtggtatgatagggtcatgaactttatgatttatatgctgatttgagtttgcgcctttgattttcttctgaccttaatcacatttatcttgcacatgtgcatcaacattttgtggctaattatacattatgtttgacacaccaaaggttttgtatcttagga

SEQ ID NO: 73773 - DNA, 825 bp, Carica papaya
  Intron number 1 from transcript evm.model.supercontig_118. 18 (locus evm.TU.supercontig_118.18) derived from phytozom e v7.0 (chr-ID supercontig_118; pos 187438 to 188262 rever se strand)
tgactgggcagtggtagggacctggttcggcaatgaaggcctgttttgggaggagggccggctatgaaggtggttgtagattagggttgtctttgatattttcttctattctaccaatgaagactagattagcgtttgagaaaagaatataatgttatgattattattgaataatttgatcctatatggacacaagtttaagagcaagaaaaaaagcactaataattagttatataagtttattcttaaaaatattccttttacaaggaaacaaataatcgcaaattatacactttccaacaggaactattaaaataggtctattattggtttaagaatgttatttattatttttctggaagtcccatttttttattattttccttatttattctatcaaaagagaaactgtttttcttatttagagactctagtcgtattagactatataaacaccttataaatgtttttcttacttatatggatgattcttcattatttcatgaactgcttatgaataaaatatattgattttctcttgttgaattgaatgcctacaaacatgattgtggttgtcaattcttatgagtgtgaattagatttattctctctttaaagctttctattgttcaaaccctattttattgttctatgttaatgtagtaatagagctaagattcttgtttttggtatcaaattttcatatcacgaactcataaattttccagatccttgaaatatcttaataagtcgaaattcaaaagtatccaagaactcaaattgcaaatagacgttgaacatcagagctgcaacagtttctttctc

SEQ ID NO: 73774 - DNA, 545 bp, Carica papaya
  Intron number 4 from transcript evm.model.supercontig_112. 45 (locus evm.TU.supercontig_112.45) derived from phytozom e v7.0 (chr-ID supercontig_112; pos 399119 to 399663 rever se strand)
tggtttttgcatcagacaggccccaccacatacaggttagtgttcatgcttttatctttttgcaccaaaattcattctgtttgttttctggagtgcagcctgtagttcaagtttatttttaatttatatgtttaactattgaatatatcaaatttagtcataatttatgtatttaatgcataaaaaatatttttagtagatattgaacggatttagaattagaacatgcttctttcattcaaaatagtattaatcttgtatcatatttttacctttattttatagaattaaatttgaaccaagctcaacttaatagatgcaaaattcaaaaagtgtatagataagaaattaaattaggcttgcattacttactattttcaagaaggtcacaagccagattgtcaaagaagttatctatcatatacatgtctatgctgcatcactaaattcctcttgctcactcttctttttattgattgcttttccctgttcaatctatcagtctggtaggttccttaaacaaggttcccatctccattgccggt

SEQ ID NO: 73775 - DNA, 842 bp, Carica papaya
  Intron number 3 from transcript evm.model.supercontig_104. 103 (locus evm.TU.supercontig_104.103) derived from phytoz ome v7.0 (chr-ID supercontig_104; pos 692460 to 693301)
ctgatcctcccaaacaggtatccttttaggcaatagctccattgccactgttttttcttcttatgatgaatcttttcagagttggctagattgcattgcaaaatgtccagttctctttgtttgtttgtatcccatgatgatggcactgggcaaatttagaccattaaacaatgctttctttcttaatttataatacattttttaaacttgcaggatagtaagtcagttctttagaatttctatatatagttttagcattctttttctacctataatcagtagagcaaggttatattactaagctatcacgtatggtcaaaattatgaacctaataagtggttaaaacttcaaacaaaatggggtaacaaccaagctaactcccttaaacccaaatttagtatcttccatatcttgtgcttgcactccatgctggggtgcagatttctgttgctcaagttgctgtaacctagatatgaagggcagagttctttgacatagcaaagcaaatgtggaaagctcttctcatttgggaagtgcagttactatttttccgcttcttaaatataatatactttgcccatttattttattttgtttttgttatttcttttgagagttatgatgatataatcagtaagtggtgtatatactgctttttctactgttgccacttgttcgacgggtatttttcttgatagttctctggcacttgaaaattcgcatggacctgaaaggattggcaattgccattttattctcaaatgagaacaatgctgtgccttaccgtgttatttgatgcagagcagctgtgggtgctggattctgttccgggagaagtgag

SEQ ID NO: 73776 - DNA, 1000 bp, Carica papaya
  Intron number 1 from transcript evm.model.supercontig_10.2 06 (locus evm.TU.supercontig_10.206) derived from phytozom e v7.0 (chr-ID supercontig_10; pos 2652032 to 2653031)
ttctttatcgtcaaaggtgtgctgagcccttaaactctccattatattttcaaatatagaggttcatattcattgtgaagcatatttgtaacttattcacttgtaaatttgatccactagaatataagcttaagctgcatggtcctacatctgccctgtagttgttctgctgtaaatttcatatgctattgttttttaacatcactggggaatttactattcatttcttccaaaggggaagcatattttgctcctttttagctttctagacaatgcgatagtctcatcttcggtagaagggagaagtaattgttgaaattgtgtgattggtaaataacgtctgaattagacgacacaatatttttgtataagagtagatgcttcgaacccgattcctactatgtcctattcttttttttttttttttttttttttttaataatttcattcccattcacttcatcaaatgggtgataccatgtcttctcctcatagtcctttttctaatgccttgaaatggttgctgtttcaaacaatgttttgaagtagttgaatataaactaattaattaagtaatttaaatatcaaaccgtattataaaattttaaatgaatatccaaaatccagaaagcaaaaaatttatctattaattaaacccatatgtgtaagtagtgtataataatattaaaagtaaaactaattaggtgtaagacttttaccgtaattcatgacctcccaattataaattatggttaaaattctccaataattacagttataaataatttttatccacaccttgggatttatttcattttcgatatgctctgttttggctactgaggaattctaacttggatgaagaaagaattttagcctaatagatttagttttatcaaattgtttcggcccactattagcccaattatttaagaatttcagcttggcccaaataatttcaacagagttcagactctcgggtctcatttgaatcatctct

SEQ ID NO: 73777 - DNA, 1006 bp, Carica papaya
  Intron number 1 from transcript evm.model.supercontig_104. 89 (locus evm.TU.supercontig_104.89) derived from phytozom e v7.0 (chr-ID supercontig_104; pos 587844 to 588849 rever se strand)
tcgcagaggtattgcttctaagctcttcgtcggaggtactctctcttcccctctctattttcattctctctgtttactccaacgctttcttttctgttaatctcattcctcttatgtttgatcctcgttcgtatttcgaggagagaaacctaatataaggaaaatactcttgatttcatgataaccgtagttttgaggagaaaaggttgttcagtcgttcgagagggtgacaaatgttaattccattcctatctcgaattagttatgaatttaagttcctaattgattaggttttattagaaactattctctgataatcaaagtaggaatggaagttatttcttcggaaactttatgatcaaattttatacatgaagaatagtaattaagcgaatagaatttgagttgaattgaaccagccgttaatgttggaagaaaatgatagatggaggattcaatgtttattcctgctaaattaaatggtttataaccaagctgattagcttagtttctcttgggtttggaataaacaattcaaccaatttttatttgtgatttgatttttttgccatcaacttctacagttaattgccatatcttctgcaagtcagttttaatggaaaaagaatcatctcctcatggatattactgttaaaaagaaactccctagctttttagctacttaaactatggatattattatgtgcacatataacattttcctagtgtgttattatagctttattaataacgaaatataaatttgtgttgactaataaataaaattcataattaaaatctttatcaaactattaactaaactgtacgattaattcgatatgtactcattagacaacgaattttccctccaactgaatgggaatttgtactctattcaaaattatatgactttcattcggaaaatgagaagaagaatgtaatataaaatgattgtcctccattcttggcaggtctgtcattctacacaacagagaagggcttatct

SEQ ID NO: 73778 - DNA, 462 bp, Carica papaya
  Intron number 1 from transcript evm.model.supercontig_131. 94 (locus evm.TU.supercontig_131.94) derived from phytozom e v7.0 (chr-ID supercontig_131; pos 728890 to 729351 rever se strand)
tgctaatttgcttacccctgcagctttttactgtgcccagagtgttaattctgatgagaattaatattattatagtttaatctttataatcatataattaaattttaaatactgataacttattcagttttagccaattatgttattatataatagttaataacataattaaaattatatatatatatatatgtgtgtgtgtataagaagatggtaacgccaaccaaaataactggcaactctagaaactgaaaatatatgaatatgcaacaatgaaattttgttcttcagttttttacagtaagaacatggagaacaactcccaagtctgattcactctcgttgctttcttcctctttgctttctcttaccaaacatttatcctcaatgtaactgcacatgataccttgattcaaaagctatgcagcaaaagccaaaaacccgtctacccgtgcagcctgt

SEQ ID NO: 73779 - DNA, 697 bp, Carica papaya
  Intron number 1 from transcript evm.model.supercontig_14.1 39 (locus evm.TU.supercontig_14.139) derived from phytozom e v7.0 (chr-ID supercontig_14; pos 1672014 to 1672710 reve rse strand)
atcccatcttcaagagccagcctgacgttgggtgagtattatttggtgttctttctcgtctattttcattttctttctgcggtaagataaccaaaatttgatttgataattgcattttgtgaactgcaatagaaattccacttaagttatgtgatgaatcgtgaacagtctagctggttagttcaggtttagagagtttgggcatttatttgtattaagacagaatggaagtaataaattactttgtaaagtcttcaaggattgaatgaacttattccatagttttctaccttatgttgaatgcacagtttttccctctcttgtttcctctgaagttaagtccacatagtggagtgagctggtttgaatcagtcgggaactttcaaatgaaaccctcctaacactgaattttttttccaatttagatatagaatgggagtttagttataaaaaaaaacatccaataaaacgagtaaaatacaaaatcttgagacagattttctctagcattctagaaagaaatgaagtgaatttaagaaagggggactgctattgacagcattgagaatcatactttcactcagaagcctttccatttaattaaagtcgactttgcaacagtggcttaggtgtaataaaggtgaattgtccaactgctgctgatacattctttctttgatgaatataacaggcagca

SEQ ID NO: 73780 - DNA, 976 bp, Carica papaya
  Intron number 1 from transcript evm.model.supercontig_12.3 1 (locus evm.TU.supercontig_12.31) derived from phytozome v7.0 (chr-ID supercontig_12; pos 211626 to 212601)
ttaataaagcaaagagaagtgatagctctgatcaggtactgctcaaactctttgtaacaaagccaaaggatttggtcatccttgaagtttagtagcattagtaggtcatggtttagagaaattccttagttatgttttgtgtttctttaaagaagtagggaatcatgttggggttggaagtgtgtcccagatagtgaaatggggtagtgagtgcagtaaatttatggtgaataagcaagactataccacacgcatactttagatgccatggattattataccatgctgaaaagatacattgattcttttatcttagaatggcttaacagttattggagtacacaagaatgcaattaagatttttatggaggggatcactctgcatatggaattacagaatttgtaataaccttaggttgtcctttgttcaaacttactgtattctcattaattcgtagaagttagttatttgatagttaaaagttataatttatattaaatcaacttcacttctatctccaatttcatagcaattaaggaataaataacaaaaacattcaattttacttggatgtgaaattactttgaattaaactactatttttgttcaagtttatatcatttttgtcatttgtactcgttcatattcgatggaattagaattttattcaacctcaacgttgatggcattatagttcaatagctcttcttgcttgtcttccccctttgtcttttttcttttctttcagaatggttgtgcatgtggattaattacaacaaatacatgcatcattttcattgaagtgtttatgttaagcattttgatataattgcaaattgtccttgaaatagcatatgtaggtcaaatattggggctagatcaggtgtttcttatttattctagggtatgtatattttcacagaatgtttctattttcttcttcatattcttctttatctcttgcgttccagattt

SEQ ID NO: 73781 - DNA, 227 bp, Carica papaya
  Intron number 1 from transcript evm.model.supercontig_107. 60 (locus evm.TU.supercontig_107.60) derived from phytozom e v7.0 (chr-ID supercontig_107; pos 288791 to 289017 rever se strand)
ttgttgcactcaccttcccaaacactgttgaggtttattctctctctctgatttctttttccgtttgtttggcgggaaaatgatagaaaacaaactgtttggttgtttgtttttgacgagaagggaaatattaatgattagcatcttgttcttctctgtagtttgatttaatatctagaaacgttttctctgtttaatttttgtttaattttttgtagctcgtgata

SEQ ID NO: 73782 - DNA, 699 bp, Carica papaya
  Intron number 1 from transcript evm.model.supercontig_107. 110 (locus evm.TU.supercontig_107.110) derived from phytoz ome v7.0 (chr-ID supercontig_107; pos 591001 to 591699)
ccaataatcctggtagaccgattccagatagtaaggtaatgcgtttttctgtgttttttatttctgttggtcgacgagaaaataaggatgaaaacctgtgctgatttttgaatgaacagcgtaaaggcagttgattataaatgaaatgagtggttggtggctgaggtgagtgacagaattttcttctaaaaaatgggtttggtctgtcagaaactccatgggaataaaaaggaaaggacagacaatgacgtaggatgctttgctatttggacaaatgtaattcttcagttacaattataagattattgaaaagtagaactcgaattttacccttatcagttgtttgatgtctggaatcagtagtcctggttaatttttgttcgacgtaaaagcttctgttgcctttctttttcttttttttcttttaattgtaacttttgtagcatttcagatggaagcaagtgcagtagcttttgcttctttttttcttttggatttaatcttttgggatcactctttgaaagactagaaccagtggctgttttgaataaactttcacatcgttattatttcttttttcaatcatatgtatgtaaaactaaggctttgcttattctggaagtagatgaaatgtggcattccctcattgactttgtctatgcaggttaaatcatttagaacaaccaaggaggtagacga

SEQ ID NO: 73783 - DNA, 541 bp, Carica papaya
  Intron number 2 from transcript evm.model.supercontig_139. 55 (locus evm.TU.supercontig_139.55) derived from phytozom e v7.0 (chr-ID supercontig_139; pos 391711 to 392251)
ctgtcgtgttacttttctccagcatctcgttagtaatcatctcactctgcagacatgtttaaatgcttgttgtgtaatacaatcatttgaagaaaaatagtaagagtttgtaaaatttcaaatttatttcattttgtttttcaaataaaaagtataaaatgtggtattcatatggtcaccaaagggatgtcaacccatgtataaaagtatttacaagtcaatcaatttatcaattaggttccttaaatcctccaacgaatttagagtataacccaatagcaaaaaattaagggtctgaaaccttttattctaagtaaatcaaaactattcacatcgtcaaccccttcaaaatcttttttgtttctctcgttccacactgtccataagatatggtttctcgtaactaaaatataacaacttgaaatactgaaacatctattttactcctgaattttttttgctagttatttatgctgccagaaattaccattgcatgtgatttccgaattattacctgactgtaaaatgaaacttgtagggc

SEQ ID NO: 73784 - DNA, 908 bp, Carica papaya
  Intron number 1 from transcript evm.model.supercontig_111. 26 (locus evm.TU.supercontig_111.26) derived from phytozom e v7.0 (chr-ID supercontig_111; pos 635401 to 636308)
aatctctatcaacccgcttccttcacttttacgaggtttttccaatgcttctttttgtaattgtatttatttgatttagttctgagttttataggtggaaattttttatatcgtcgcgccaaaacctggattagagaattacatttttggtaaccctgaatggttgaccttccttgttctttctttatcagagctttaatttgcttgattgccgtgttttagagtttgatcctgtttatttcaatggaattatatggggtaggcatgggtttatgttctggaaatcttaattggttaatatacggctattgtgatcaatgatgaaatttttccttctttttctcagttcttattgattatcagaattgtgagagaattgagcgtatttggttagtttgcagttttggtgcaccattgaaatcgtatataagctttagctcttttgtgcttctcttcaactgatattacggcaccattctctgcccaattgtaattgtgatggaaggttatgaatttcagggtaagcaaggtagagaaaggtttttggaaaaacttttaccgaaatatggcttctatgcttgtctccaattaatatgattgagttgttttctttatttggattacttaggctggtctttctatgatctgattagtgtctaggatcctattatcctccgaaccataatagagccctcgttatgcaatgtggttctcttatttatttagcttcatttgaacgctgaacatagcatgtttaaagtgcaaatgttcatgtgcatgtccataaaatatatttgttcacataatttcgaccacatttagttagtgttgccgtttctgatatgcttccctgatatattgtataaatttcaggaggaaaattcactctgtagtaaaggcaacttctc

SEQ ID NO: 73785 - DNA, 926 bp, Carica papaya
  Intron number 1 from transcript evm.model.supercontig_12.2 31 (locus evm.TU.supercontig_12.231) derived from phytozom e v7.0 (chr-ID supercontig_12; pos 2036166 to 2037091)
agaatttgctgcaacagaggtccctccgctaatctgtatgttccttttcttaattgactttaatttgatgttttttagttgttgtctttcatgtgcataagttttctattttcatggagatttgtgctctttattctaatttggagactgtgaattcgtatttggggaatttgaaatccatcactccgtttaatttaagttttgagagtagtcataatcagtttctgttcagagttttgactttgctcaagagccattacatctgtaggctcctagggattttaagttctccattttcttcaattgcgaattcaatggagtgcgtgtgattgctgctatagccattgaaatttgttaccgaaaatttggatttttgaaaatttagaaattgatcataaatcatagtagagctggtgagggttccttggatggcttctagctttgaatgttctgagtgccttgctaatggaggttggatctcttgactgaagctcagataaaattgtaagttcatcttaaatgagatatctgcattggatataatctcggtttagatctctggaagaggatcattttaacaacgtcttgaaacagagtagcttaactcctctaaatggtccctatgcctttaatacatgtattgtctcatgaagtggatttttttaatggatgatacatatctatactgatgaataaattttgaagtttagaacttctgctatccagttcttcaattccctaatattttgtcgttttcttggttactagatcacttcatctgaagaattatatacttttctgtttattttcttagttcctggaatacttcacttaaggaaatatatagttttctgtttatgtaagatagctaatttgtgttttctattgcaggttgcacctcacattggttatcacggcaactgttt

SEQ ID NO: 73786 - DNA, 688 bp, Carica papaya
  Intron number 1 from transcript evm.model.supercontig_1.88 (locus evm.TU.supercontig_1.88) derived from phytozome v7 .0 (chr-ID supercontig_1; pos 1614480 to 1615167 reverse s trand)
aggtgagcactatgttatacatgctttcttgcttagctccgtttgaggtctaagattcatgaagacaaaagagttgtatagcttttctatggaattatttcgacttaaaagcattttatcttccattcttgtcagattttgtgaactgcgatcttttctttctgactgttgcctgtaatcatgatcttgtaaaattgtacttggcttcttataactttaattctttgatatggccatccccagtactgagcagattttggaaaattgatgctcggtcaaggcctgataggtagctaaggtaaaattatttgcataaaaagccatttgacttaccactcagatttaggagggggttcaggccagcttttaatcttatacgtgtttcttgcatcactattctttacttgctggtgagaatctctgcttgaaattatgctgtcttgccccttggaacttaaagatgctcttactcttctgggaaatccaaatttgtgataattgattcaagtcaaacttgcctatgatatgatgcatggggtagtaaatagatgatatttctgatattatccatcagcatatgatgcatgcgatagtaaataggtgatatttccaatattatgatgcatgtgatagtaaataggtgacatttctgatatttgtcttttgatggatggggaacagaacttgg

SEQ ID NO: 73787 - DNA, 841 bp, Carica papaya
  Intron number 4 from transcript evm.model.supercontig_136. 18 (locus evm.TU.supercontig_136.18) derived from phytozom e v7.0 (chr-ID supercontig_136; pos 217300 to 218140)
ctattgacttctgggattatagccttctctgggtcgtaagtgtctttccctctcacatttgcatactgaatatactttgtatacatgaatacttcctttagttagtgggtttttatttggcttttgatgtttgtcattggtaatttgcattatgctaaaaagatttagtacttcttactacttctaaggctttgtctgaaacaaatgaacaatggaatttcattctattaatcatttataaatgaattgaacaaggaatttgtttgcaaatgaatttgtaataaatcacgatattttaaagcattttgtgaaattcaattgaatcacttcttttgaaatacaatgcacaaaacacttgcaataagcctctttcctccacactctcaatttcattttagaacccacttgctccattccatatggaattcatctcaaaatggctttcatagtttagagcaactctaagcatagaaattaaatgaactgcagattttttttgatgaaattattttgttccaatgtgtaaaagtacctgtcctatttcctgtttcaaacaatcttttcaggttttaagaccaaattacagttccactaatttaacctcgttatagtcaaatttcatgattttttttttctgtgacaatttactgcacaggacttgttattatgatgctatttttaataaactacaggttttgaactgcaattagatcaaaccgcatggtgaaactgtactttattatcttttttaacgatgccatcttctagatttgttcgttttgggtttgttatgctggagaggacaattcagtccgggaaattgttggattctgcaggtgct

SEQ ID NO: 73788 - DNA, 861 bp, Carica papaya
  Intron number 2 from transcript evm.model.supercontig_113. 39 (locus evm.TU.supercontig_113.39) derived from phytozom e v7.0 (chr-ID supercontig_113; pos 532780 to 533640)
gtcccatcatcttgggaacctgctgcactagcaaggtggagttttaactctgaaactgttttcttgaacaacattgtctgattacatgtttcatattattaaattcttttggggtacttataccagaaccaagaacttgataataagctcttctgcatgatttaaataaaaaagctgagtagctaacatgatttatttgaaggcttatccttgattagcatcatgtgttcttgctaagcatatctatcctacagttgatgtgtgtgtgcatgagcgatgctgtgtccaagaacttcataataaagctcctttgcatgttttagcttgaaaatatgactagatagctttatttactggttaaagcttgaacctcaatcagcattaggcaattttgccaagcatagctatcctgcggctaacgtgtctgttatatatattggatggcaaaagattattgacaagagcaatgacaatatatcctagcaataaaaaataaaaaggaaaatagaaatagaaaggaaaaaaaaaagattataactaagaaaccaactgattggaaatttccaagaccaaggactcaggactgaagcgcatatgtatagccagcatcagaactccagcaaataaaacttccctaaccatacttcaattaaacttgcttaaactgttatctatcctcaggatgattgtgggatgacggactcaaaattattacagcctatatcagaatttggtactgtcactacagacattcatcactttctttttttcattattgtatttattaatacttacagtgttttgctttcaaatccataatgaaattatgatgtgttcttcatgccaggtttatcgagacat

SEQ ID NO: 73789 - DNA, 651 bp, Carica papaya
  Intron number 1 from transcript evm.model.supercontig_136. 32 (locus evm.TU.supercontig_136.32) derived from phytozom e v7.0 (chr-ID supercontig_136; pos 472540 to 473190)
tgccttacaacatttccgtactacagatcagtcaggtactgattcatatggattcattattaatttcttcttctgtttcaaattatatacgctctgcatttaatagtttaacttggtaattaatttttataaataaaaaacttcagccggtataagtcgattattcgacgtttctggtggtttgaataagatctttgaaatggaaaattattttgatatgctattaaaagggattactgatgattgtgatagatttaatcagttttcttggttctggatctgaaatatgttgagcgtgtctttcagtagttaaagtttcctgaagaatttaaaatcgacaataactatatacaccgactttttacatcagaaaaataaatgataaactttaagaatttaaataatcagctgcgaaatttaaaaagacaacaaaaaaagttcatgaaggtataacatttttcaagaattagtcaatttagaaaatgatggttgttatataaaaaaacaaagaaattaatatcaacttttattattataaaaatgaaaatttgttaataattatgcattaaagatccctagatgttgtctgtttaaaatttgggcatgtggttatcagtccctgagttcgcctgaagccgaggcgccgacagg

SEQ ID NO: 73790 - DNA, 679 bp, Carica papaya
  Intron number 1 from transcript evm.model.supercontig_1028 .2 (locus evm.TU.supercontig_1028.2) derived from phytozom e v7.0 (chr-ID supercontig_1028; pos 2094 to 2772)
atttgcctctcttaattctgtgctccttggctgttggtattttcttttgtcctgaaatcccattgtttttcttcttcattttattttgtaggacggttataggacatgatctctttggtctttgtttgatctcttaagtgaaagattacccattttgtttatcaagtcggttcttaatccaggtttggaatccaaattggtagttggttcaagatatgaaaaatgcgcattatgagatggatttttcatttttatgcattagtgagatggggaatttaaattttgatcagaaacttagagagagaatggaggagatagtgtgcttaattaaggaatagtttcttgtgtttcaatttaggaggttgattacattttagttgtaacatgagcttagaggttaatgatatgggtttattccattcaaacattatgatcatggtggtgctgttggaattaatttactaccctgcatcatagtttaagacagtgcttgtggtccattgggctgcaaatattagtacactctcttatttattttcctgctagaaactttataagaacaagatataagatgaattccggatctgatcatagaaagtatttgttgttttctttttctgttcttggttagttgcagtagtcagtttttctgatcaattctgtgtttcaaatatcacag

SEQ ID NO: 73791 - DNA, 663 bp, Carica papaya
  Intron number 1 from transcript evm.model.supercontig_119. 50 (locus evm.TU.supercontig_119.50) derived from phytozom e v7.0 (chr-ID supercontig_119; pos 347388 to 348050)
tcttgcttcgatagtaaatacgccggtaagctctcctcctccttttccaattcttccattgtttatgattttacatattttccctcctttttcaatgttacgcaattctcgatgtatctggtaactagatcccattctccatttctattctgtgttcaatgcctgagattcagactgatttttttatcatttcgtcaactgtgcctatctgtatgcaaaggttcgcgtttttattcatattatgttggatatctgtttgttgttttactggtatttgcgtgcgtgcgtgcgtgcgtgcgtgtgatatgcatatatggttatttggtcgtgttcatttctgttgaaatatagatctgaattgcatacatattactacccgtatggattaagaattcagagatttagttttagcatgattctgttgtctgtgattgatgaacaagctttaatatggatcatgaatgatgctgatatcttttgatttgattcaaaagacatctttgtttgaggaatagatggcaaaattgattgaagaaaagcagggatagaaagcagataatgcgtttatggtacttgctggggttgggaatcttataatctgctaggacggatttttagaggaaaaaaaaagagctacaatttttgaatttgtaaatcttgcag

SEQ ID NO: 73792 - DNA, 771 bp, Carica papaya
  Intron number 1 from transcript evm.model.supercontig_107. 22 (locus evm.TU.supercontig_107.22) derived from phytozom e v7.0 (chr-ID supercontig_107; pos 117807 to 118577)
caatcagtgctcctcctgggtaattgactttttcgccaaacttttctatttcttctccacttcaaagctgtcccataggcagctatgtttgggaacttggaaatatttcttttgggcaaaggggattctgacaggtgacatttttcaaaatcattcaagctgtttagccctttttgttgtttattatttggttatttgttcaaacttgaagcttttaggttttataatgaaaacatctcaaatttcagggtgcttttccatatacatttcccaggttaacctttgtggttcagtgtgcaagtatattttattccctctctccccacactcgatgttcttttactcttttggattgggtttaaacttcactttgccaatcaaattccaattagttactgttgtaaatattagtagcaccccagacttccagtattttcttccctcctacccttcccctttttgatttaagtttggttagacaatgatcatgtcctccctcctttttcattttcatgatactctagctgcagtgtcttaaactcctaggcttttgcaccatcagaaccttttaactttgatgaagttaaaaaatcatatttgtgttttcctcgatttctgatgcacgctcatgttatcttgtagttgtgcattaatttgtaccttgccatttccagtgatctacaatgagcatgctgatttaatttttcgttttgaatttttcatgctaattctgaaggcaaggagggctttgagagccttgaaagcattggt

SEQ ID NO: 73793 - DNA, 423 bp, Carica papaya
  Intron number 2 from transcript evm.model.supercontig_107. 97 (locus evm.TU.supercontig_107.97) derived from phytozom e v7.0 (chr-ID supercontig_107; pos 515916 to 516338)
ctaattggtgtgacaattgtgcaactgatttagcagtaagtttctcaggttttctcttggggactttttgggggaaaattcttgtttccctggaattgattacctaattagtctaattagtgggcaagaatttaggtaacagaaattcaactcaaaaaattcagacctaagagagagtaatttgcttggagtgtttccctatgctaccattggcattttattttatgtatttaatcggcttatgggcatatattagataaaaagaattcacttcaaccatctgcagactgaagtctgcacatgcactggcaatacttctgctactccaatgtcaagttggaagaaacaagcagcagcttctttgcaaaactaaattagttgtggtagaccattggttgatggtaggatctttttcttgcaggt

SEQ ID NO: 73794 - DNA, 339 bp, Carica papaya
  Intron number 1 from transcript evm.model.supercontig_125. 34 (locus evm.TU.supercontig_125.34) derived from phytozom e v7.0 (chr-ID supercontig_125; pos 653210 to 653548)
ctccaatccagcaatcagctattcctttcatacttgttagtcgctcctctctctctctctctctctctctctctctctctctctctctctctctccccctttctctctgtctctctcttttttcttttttcaaattttaagagtaaaaaatcaattattgttacttggctctgaggaaatggagctaagaatttttttatttatttaggtgctacagaataaataataagtagataaactaaagttgaattgacaatttggttcatgaattttttgtttttacattctttttcttttttatttttgctgtttgatgagttctttatcaggaaggcaaag

SEQ ID NO: 73795 - DNA, 916 bp, Carica papaya
  Intron number 2 from transcript evm.model.supercontig_1.39 0 (locus evm.TU.supercontig_1.390) derived from phytozome v7.0 (chr-ID supercontig_1; pos 4881458 to 4882373 reverse strand)
ggacctccggatactctctagtgagtgatcgaattgtgtttttcttttgtaaattttgaatatttttatgttaatcatctgggttttgtttctctgggtatgttctgtttgaagttcttgggttgtgtttgtttgatcttgaatgatcggttgctggtggcaattcattgtgatttgggctttatgggtgtttgatattttcccctttttcttggaagggatggtgtgattgtgtattcatacagttctgtttgctttgttttgaatatgattttgtcaccaaagtgcttaatgagtaattgcagcttgatccttaatattgtggttttggcttttgatgttctaatttagaaattttgggattggtaaattgattggattactatctgattatatttggtaactgagatctaactgactagtttcgtctttaatggtgcctttttcgtgtttaggtatgaactcattatttggaaagtcgcatgttaatataaggttcttggtctattcttactttaatgttctggatctttgtttacttattcagtgagttacttggtttactggtaattattatttcatatctttgattggtgatgtcatgccattcagttattgcttaaatggtgatttcttatgagtttcctgtaattgaactctcatctgtaggtagcataaccaggaactggcattagattccttgctctagttcccaagagaatctgttaagcaatggcatcttgttctgaaagtcaatgtttctatatcagtttagcatgttgcaatctatgctaattataattgctgcttacttttgaggtattgtatatggtaaatacactaatatggacattcaaatgtttcttgacatgttttcttaaacaattcttctcttgtagtgaagggggattcttca

SEQ ID NO: 73796 - DNA, 915 bp, Carica papaya
  Intron number 1 from transcript evm.model.supercontig_12.6 8 (locus evm.TU.supercontig_12.68) derived from phytozome v7.0 (chr-ID supercontig_12; pos 565393 to 566307 reverse strand)
agagctttccacaagtcttctggcaacaaattcaagtcagtcccccctctctctctctctctctctctctctctctctccactgcatgtcgttttaattcactgatttttacttctcttattcgatttctctggttttttatcttattttcacagatgggtttgtgttttgttcttcagtattttgttggggttgctaggggctgttcggctgttgtgatctggtagttgtagtcttttctttctgggttttgttcatctacaatttttattatcttttatgttgatctcaagtgattcttcttcttcaaggaagattaattgtccgaactttgaggttagaggtcagatagagcgggcatggttcggagcttgaaagcatgtttctttttattcgtttattttttctttggggggagttctaattgactaggatatgacccaggtcttaatgcttgactggtaattaatgtgtaataattgatggggaaacttaaaaaattgccttcgtctattttttttttttactcaaacactgtcctgacatacaaaccccttaaagctagaagcatggattgagcagatatctagtaaaatagttaggattttgaactttagatctccagttgttggagtgtagatctcaaacttgattaatcaaactgtatgccatcctcttgttcattttactcttgcattttctttttaataatttgctccagatttaggcatttgtattattctctctgatgatggaagttattcttccaagctaatgaaatatgcagagggtgttcagcggccccaaaaataaaattttatggcagtttcgttaactggaggtaggaaacaaactggactttttcatattctatttatattttcacgttgtgtagggttcctactgttggcggca

SEQ ID NO: 73797 - DNA, 839 bp, Carica papaya
  Intron number 1 from transcript evm.model.supercontig_129. 68 (locus evm.TU.supercontig_129.68) derived from phytozom e v7.0 (chr-ID supercontig_129; pos 542740 to 543578 rever se strand)
ttgccggagccgcgctcgcgcacactcttggcaaggttagttcccgattagtctctctctctctttctctctctctctctctctctctctctctctctctctctctttctttctctatctctctctcttgtttcattagaaatatagccattgaatattttttattgtgactaaacttttgtagctcatcgtcttcttctcttttttattggaaaaaattgttttgtccttctctccccgactcctatcgagttttcattgtcttggttttgtgggaattctgtgtgtatagacacttatgcatatgcataggcatataccatgtatccatactatatgcatacatagatagtatatatggattgcgagttacaagggcgctttctcgcagtatagccaaaaccagtttatgtttgtttgaatcttgtacgtcctgacaatctggtttaacgtggcttgattgtgttttattctttgacatagttttttatttgcgatccgtggagttgcaattgccagggaaaggcacgcgggttcctttaatttatttgttttcataatttccacggattatctaattaaccatcttctcgatgaatagtaagggagatagaaatcagtgtctgatctttcagcaacagatccttcttcaatgttggttttacggtccgcttaaaacaataagttctacaactaagactaatgtgattcatgaactgattcttttttgagtttggcaattgccttattgtcaaacagttttgtgtcatagtttattttggaaagagatacaagtgaagtaacctgttgttacttaatgcaggaaggaagaagggttc

SEQ ID NO: 73798 - DNA, 317 bp, Carica papaya
  Intron number 1 from transcript evm.model.supercontig_101. 47 (locus evm.TU.supercontig_101.47) derived from phytozom e v7.0 (chr-ID supercontig_101; pos 834629 to 834945 rever se strand)
cacacagaaccttcaaagtaaatggacattgattcaaggccttctgtgaaggatttgcagcacaacaagttaaggaactcactttagacatcccttccgatagcaactgacagcaaaaggtaatgtccagcctagaacagtaaccaagggcacttaatgagtggcaaccattcggttttttgtttttttttttttttttttttttacttttttaaatttattttgatatttttatggtatcttgatttttatactttctgttattaacgtttcaacctcgatcactctaactggaatttttcttcattgtttacagg

SEQ ID NO: 73799 - DNA, 885 bp, Carica papaya
  Intron number 1 from transcript evm.model.supercontig_0.12 (locus evm.TU.supercontig_0.12) derived from phytozome v7 .0 (chr-ID supercontig_0; pos 324965 to 325849 reverse str and)
ccaggttagttacatctctgttccgtcttcaagaagaaaagaaaatgaaaacaagttgttaactgtgtaatgcgagggctagcgaaaatagtcgaatgttaacgatcatttgctttgatcaatttactctactttgggaattatttactacctgcattttgaactgatcaaacggaatgctctgatacactgtcaatttgttaaatgcgatatcgacttgagaactctatacgccagtttcccgttcttgtgattggacatggagttagcactggaaactggaagtaatggatatcgtgccatccaaactgataagataaagaatgaatctgatcaaacggcgagttaaaagttaggcttctatatgtaatgcaattggcacactagtttgaacaaccgtatgccgtggaaattgaaagagaatgaacgaataatgctctggtatgggcaagcaccatgttaaaaatcatctggtgcaaagatacttcacttataccttgggcaggaaatatatcctaaatttggaccagataaatgaaagctgtttgattatattttctttaagataaatattcacataaaactgttatttgtggctcaaagtcttaaggtaactagtctctttctttaaatttactttaaaattctagtatataattcaatggttttttggttataactatcgagttactttactgccttcttctgctgatctttagtggccgagtacttcgtttttttttttttactttttgttttgggttggatcagtttcatcagctccactgtctcttatgtattttggaacttcagtagtagctgttactttaaaagatctttcattgttggtaatttatggaacatggtatgttctctagtttgcac

SEQ ID NO: 73800 - DNA, 713 bp, Carica papaya
  Intron number 2 from transcript evm.model.supercontig_1.19 (locus evm.TU.supercontig_1.19) derived from phytozome v7 .0 (chr-ID supercontig_1; pos 407946 to 408658)
gatcatatgtgagttttattacttcgttgaatatttatgtcatataatattattatttttcaatgtgatttttagttcatatctttccatactactaatttttattaccatatgtctatgggaggttatcagagttatcgtttgtttttgtatatgcattatttttaggaggctgaatcatttatttgattacttgcataaaaagatttcttgactatatttatatgtactggcacctgttactggggtgaggacctgggtgatctggttaatactttgatggcgctgtgaattcctattttgttcatgggtggccgccttttggtgcctgtttatagtttatttttctctaaaaaaaaagtcagaaaacaataaaatcatttggcacttgtgctatatatgcttgagacgaacatttaggtttcttgtcattgagatgtgtaattaccttttttgtttgccttatttatttgcttgttcttgctgttgttcttcttctttttgttgttctctgtcgctcaagtttgctcaattgattgtgaaaacatttatgctctttccattattcagttagattgagcatgttgctatctagtcactgactcttgatgatgatttaattacaaggtcaatatcatacacgtggttttttgacttagaattatctgcaatgttcagggatttgttgagagggaaactactctgattgaatc

SEQ ID NO: 73801 - DNA, 854 bp, Carica papaya
  Intron number 1 from transcript evm.model.supercontig_115. 43 (locus evm.TU.supercontig_115.43) derived from phytozom e v7.0 (chr-ID supercontig_115; pos 646415 to 647268)
gaagaaaggtattctgaattttcttctctgtctatatttgtttagtctacatgtttaagtgcatgtttttgttgtgatttattaatgaactggtgtagttgagctggaatatggtcttagttccagagccagtttttgtacattttatatgtggagcatgcttgactgaatattggaaccacaaaaattagttaagttctttcattagttacatgtattgctccaggcgtgcaatcattttgattcacaatgttctttgactagagggcagctgtccaactgttaaaattatcactgaattgattggaaagtctattaaaatgtctcagaagcttaactgtaaaacttggaggaagaaagacgggtacttgtaaaaagaattcaacatcatcagcctgcagtattgactggactttgtcttccaatgttttctttaagctactattttgacataaatactgtcacttctttttaagcaatattgaactttatgtggtctaaaaacttacaatttgaacttatttaaaattttgcacctagaaaaaaagcttcatggtgttatgacgaacggaccttgaggagatgtcctctcaaacttatatgaattgcacggccaatgaagaaatttcggtcgtttacaattggttactataagtttaaatcatggccagaatttttaaatttacctgacagattcagaggcaaatatagcaaacttgacatgcttcctgtgctgttttttaacagttcaccattttcagcttcctatttccataggtcttaggctagccaataataattgatctgatttgtctctaggctggcccttgtgagtggactgaagtgggtggatc

SEQ ID NO: 73802 - DNA, 310 bp, Carica papaya
  Intron number 1 from transcript evm.model.supercontig_13.1 64 (locus evm.TU.supercontig_13.164) derived from phytozom e v7.0 (chr-ID supercontig_13; pos 1491069 to 1491378)
gttggtgaagctgagaaacaggtcagtcagtctggttgaaattgttgatgagattgtcatcaaaatgttgtcatatactgctaggcgcacgtagaaggggttttcgacttttcaatttaaggtacaaaataagaaattggattgagtttcatcacaattcaaataatcttctctgtaggatgatggttgactgagtccttgctgctaattttctaacattttatagtaatcgccattataggtaatctgagattcttttcccgaatcttgtgcaggcaagagaccagctgttttcagggaatattgaacc

SEQ ID NO: 73803 - DNA, 563 bp, Carica papaya
  Intron number 2 from transcript evm.model.supercontig_114. 8 (locus evm.TU.supercontig_114.8) derived from phytozome v7.0 (chr-ID supercontig_114; pos 162281 to 162843)
gacatagaactcagtaagagatggaggatttttgtgagttgtcttcctttgcctattttgagtttagtttaagagcttgttaggagagaaccaatgatctcttgagtaaaaaaaaacccagcactttcatcaacttcttcatacatgaaccagcccaaaagaatgggaaacttattacaatggaagagtagttatctggaagttatttctaaacttgtcctatatttatttttcttttttcttacgtaactgataactaccgcccataatacataattttacagaatctactaattatgtagtacacagtcagacacataacttcttcctcctctgacacaccttatcaaaggtctgactttgccatttgtggcatccctaacaaagtactggttgatatgaactttacactgtactctggacaattgctggtgtcatggtttgtttgtgtgtttaattcttttcttatattgagaattgggtggtagattttgatgcatatttgtctttgcatatttgtctttgcagttcataaacagcgagacattgtcccgttggatatt

SEQ ID NO: 73804 - DNA, 784 bp, Carica papaya
  Intron number 3 from transcript evm.model.supercontig_130. 71 (locus evm.TU.supercontig_130.71) derived from phytozom e v7.0 (chr-ID supercontig_130; pos 740129 to 740912 rever se strand)
ccaccagatgtatgtttattattgtcgttgctttttttaatctttcccagtcttctaaattgatggtattttatactgggaggtctaaccaatgatggactttaaatatggaatttaggaatttaaggcccttgtattggctcttgttggtgtttcctagaaaatcatttggatttctcaagtttaatgttttgattggttgctggcaagtaagaaataaatacgtatataagggacgttagaaccttttttctctttttgacggaaagttctgtttcaagaactgttggattatactgttctcgtgattaatgagttgggttttggatatcttaagaatttggtgactgggatttcttttatttgcatctcagtttattgtttcttgctgaaattgcatcaaagaaagaaaagtttatggacccggaaagttggatttgcaagtattttagtggctgttagccaacggtttcagtgttttcacacatttggtcgtgtttttaaatgggttttcttaaactataaacttaattgcttgttagataatactcgataagcctcgtgagaagttaaggtaagtggagttcaattcttatttttttctcagttgtagcttctttcttttttttttttttttgaaatatagttgtagcttctttccataggtgtatgagaaaaaagtcaagtggtaacttgattgctttcaaaataatttggttttggtgtctggattgattgtatatttgtacgtataggttaatttgtacaattttctgatctcaac

SEQ ID NO: 73805 - DNA, 1006 bp, Carica papaya
  Intron number 1 from transcript evm.model.supercontig_128. 67 (locus evm.TU.supercontig_128.67) derived from phytozom e v7.0 (chr-ID supercontig_128; pos 746388 to 747393 rever se strand)
gaagacgaggagctagtaaaaattccttcttattatcgaaattttagggttttgttcttttagtgattttctttacagcatcaagggttagtggcatgtcatgagttgcacattattgttgtttttttttactttgtaactggttgaagagaggaaagacgagatattgatgcgtagttaagtatatctgtgatgagtttcgtgtttaagcgagaaggcactttttagatagatcgaggatcgatctttttcatggttgaattgaggtttttgtttctttaggtttctgaatatgaaaattttttagatttgaattgcaaacaattttatgctgattttggaatttgtttaggaaaattagggtgttgcatgtttttcatttcctattgaattcctatttctaattgccatatttatcataatatacgtaattagaatgtcgttcattgtgtttgagttccgctattttgaattcgaattccttggtagtgataattcaatttctagttttagggtgcgaattgaatttcaccattaaagaatcaaaatgggtttttggtaattcaattataacaagttatgttcttattatgcatattaagaagaatgtgaaaattaaagctaggaattgattgagatttaaatgagaaatgaagctaacgcggacttattatctaggtacttttccccatcatgtattggcactgaactagtatattcaggaacctcatcaaatagctttttctatcgaagtatcatagccaatggacatccttctcagcctttaacatctctttttgacccttttctcatctatcttgcggactgtttgtattcatgttgtagtgcatatctaatttttagttttaaaaataatataaaagaatgatggaagtatcacttgcattgatatgtttcttgatgttgttgtaagttgattagatcctttttgtcaatatttgatttttttttgctttaaaggaagctgatttggttttgggcggag

SEQ ID NO: 73806 - DNA, 744 bp, Carica papaya
  Intron number 2 from transcript evm.model.supercontig_108. 65 (locus evm.TU.supercontig_108.65) derived from phytozom e v7.0 (chr-ID supercontig_108; pos 663232 to 663975)
ctcaagcaccttcaagtcaatcttagccttttcaggtctatctctctagtcctatatttaaatatgtgtaatcgttacgtgtacatttgaattgaaaagtaaccgtactttatgtggtccgggtttttattactatggaattgatctagaagaagtcatgttgttttgtaatgcaaattagctgagtgtttttctgattggatatgatgtactgggcgcggagaaaatgtaacagaagaagatactacaaataagccggggactgtatccatgttggttaatttggttcagagagtaaatttactaggacatgaagtatgagttccaaggaggttttcgccttcttcgtaatttatagacttggatttctttcatgattctcattcttttaggggtaggtttgcagtatatttcctctgcatgggtctatttaatacaaaagttgcactcggatactacaaggagctgatgaatcgtacatttcccatccggatatcgcattgcatttgagcatgggctatttttttgtacaatttgaagcatgtattaagttcatttgtcttttctgtgtgcgtataattcattagctgttaactctttcatcatttgtttagtttactatgtgtttttagctgttaaattggttttaactgtaggaataataggatctttttaaactacctattcatgattagtctcgtgcttgcaggagactgtgcattcttaaaggtgtttttccccgtg

SEQ ID NO: 73807 - DNA, 392 bp, Carica papaya
  Intron number 3 from transcript evm.model.supercontig_126. 34 (locus evm.TU.supercontig_126.34) derived from phytozom e v7.0 (chr-ID supercontig_126; pos 387972 to 388363)
agacactcggggaagaatactgtgatataactcaggtatccatgctccaatgtcaatttcagtcatagtttgaatttgatacagattatggctttagtttcttcttctgcatgcaagttgcataagactaggagagattatgtttgtactttacataaagcacctctttggctctagtattgataaaacaatataaataatctcatttgattaagagtagattctgataatcctcaaataatgcgagctccttcaatggttgttgaagtttcaatgcagtatatgtgtctgagagaagtgcattggacctgttgaaattttctcggctatattttgcttctttgttttttgtttgtgatgggttatccatcttttttaggtagcaggacctt

SEQ ID NO: 73808 - DNA, 474 bp, Carica papaya
  Intron number 1 from transcript evm.model.supercontig_10.2 57 (locus evm.TU.supercontig_10.257) derived from phytozom e v7.0 (chr-ID supercontig_10; pos 3122660 to 3123133)
gtgaaattctagatattttcatgcgggaatagactgaaggaagagcttatgagccagtggagatctgggaaaaatttcagttaatgattatctcttgtttgcaagtctttcagaactttgtttttttttttcgagaacaagaacagaaaatttggcttcaaagaggatctccatctgtgagttaatcaaaatatcaagatcttctgcttttggttgatattcctaatcatgcagttagtttgatgttgttttcttctttttggccttctctctgaatcccacatcgaaacaattatcataaaccccgttgtttaagcatgctttgtcattataccaaactataacagtttcacatattaattgagtaaaaaagttgcttttctaaaacaaaaaagagttacagtttttttgagtcatcctggctactatttatcaactacatgaccatttgtaacagagcagttgttgtctggg

SEQ ID NO: 73809 - DNA, 701 bp, Carica papaya
  Intron number 3 from transcript evm.model.supercontig_10.2 57 (locus evm.TU.supercontig_10.257) derived from phytozom e v7.0 (chr-ID supercontig_10; pos 3123618 to 3124318)
ttgggaataaaagatccgagaacggtacacaacaggttcgagaaccaaaattaaagtaagctgtcctggcaacatttctgagttctaaaatttgttgtgcaaattttctcaacttaattcctttgaatgctcttgtctgacaatctctgtttgttatgacttattttggtcatcactatgacacggtgcatgttggtgtctgttggtatctgttttatctgatttgagttcatcgggaaaaaacaaaaggaaaaattctcatacccgaacaataatccttaccaacaatctcaccgccccaaattactgagaggaaggatttccagctgcaaatcttgttaaaaggcgagtaggttgagtttatttatttatttttgagatgacaccttaaaaagattgttaaaccagaaggggtacatttgcttttgtttttaggtctgtagcagcataattccagtgagagatatcataatgcaagtgtttagaagtcccttccagtgtcattgtaatgtcaaaagttatgagaagataatcaagtgccaaattggtttatgtccgagtattagtaactgagatctatttgtgtctggataagtcggaaaagtattgctgaaatatgttggttgcggtcatgtaaacaaatgttgatcgttcatgaattcctcctttttctatcttttgtcagcactcattgcccctgc

SEQ ID NO: 73810 - DNA, 613 bp, Carica papaya
  Intron number 1 from transcript evm.model.supercontig_135. 38 (locus evm.TU.supercontig_135.38) derived from phytozom e v7.0 (chr-ID supercontig_135; pos 576032 to 576644)
atcaggtgagtccatctttcgaggttcatatatttctattctgtaattttgatatggaatgtccaatatcatatggttaatatgatactaaatatgtggcctaacaatcactgacttcaatcacttttgtctagtatcttgttttatcttcaaataatatttctgaaggcttttttaacaactaattctgcccttcattttgatcattttttgcagataagcttatttgagaactttcaagtttggtaggattttatgtttaggaaattttcttatatttgtctttatccttagctggatctatgatagttgtgttttaatagccatttaatgtatttaattctggtaaaaagacttaagaaagcatttatttctgcatgttatgtttttgtagttggttttaacagcaaaaaaggtagaatacacagtttttaatcgctttagacttgttcgcttgaggagtgaaaaacattgaatggttgtttacaagcaattaatggaggatagatatcataggatttaatggtaaaacaatttattttgagttaacaatgcatactttttcataggctactttcaactatgttctagtgacataacttagtggcagatt

SEQ ID NO: 73811 - DNA, 853 bp, Carica papaya
  Intron number 1 from transcript evm.model.supercontig_10.3 0 (locus evm.TU.supercontig_10.30) derived from phytozome v7.0 (chr-ID supercontig_10; pos 626724 to 627576 reverse strand)
ggaggacccgccttccctggccaggtggtaaatcattgtcttgtcttggcactaccgttgtgtatttgctgggtggcaggccttggagggtcttttgttatgggggtattcttataatttttgggtttttcttatttaactatacaaaggaaaatttctcagtctaagattcagtttctcaatagaatattttcactggcagttatgtggcatcagcacatcactgaatcacattacaattttctgttttcttcctcagtctcacttttactttaatttgtgtttgttgcatgggaatcttctttatgatcttatattatattttttatggatcaatgaatgtcttctgattgttgaacttccataatcagttttcgaagtatgttgtatcacgagggaagtgggtgattaaatttcatacacatgttgtcaaggtctagttatgatgctgtttttgagggtatttggaagtctatgtatggagtgaactttttgtttttctagtcttcttgttcttcatgttgttatgaagccgtcttgaccactgttgttttttgctagtcgtgctagtaggagcacataaaaatactcctaggtgcttcagtgaactacttgtggactttattgcagaaaattggttcgagtttgattctttcctcgtatcatctttatctttgtggttacaaatcctaacataaataaatagcatctgtttcctcagaaatgtatttccctctggaaattgtgatgaactggaaatctgttacgttatttcttatagttacaaaattgttaaatctttggtttaaaatgatttgatagggttatcttgcgcaagttctttcctttcagt

SEQ ID NO: 73812 - DNA, 304 bp, Carica papaya
  Intron number 3 from transcript evm.model.supercontig_127. 1 (locus evm.TU.supercontig_127.1) derived from phytozome v7.0 (chr-ID supercontig_127; pos 2264 to 2567 reverse str and)
caagcagctctaacagaagattgaggaggaaaaaggtaaattttaagggaattattacagaaactcatcattgaaatgcagatattagaagcctaatccctaaatccatctctgttttttggatggttttcttctagatcataagaaatagcttgatgggtctctggatatggattcttttattttgaattatgaagtcactgtgtgtcctgcatttctatggacttcagtctcagttaatattcatacttgattgatgacttctccagacatttgctgaacttaaagaggaagagagtctttt

SEQ ID NO: 73813 - DNA, 807 bp, Carica papaya
  Intron number 2 from transcript evm.model.supercontig_104. 6 (locus evm.TU.supercontig_104.6) derived from phytozome v7.0 (chr-ID supercontig_104; pos 36569 to 37375 reverse s trand)
tgggttcgggcactaaagtgagggaagatgtcttgatggtattttgtttcatctttcttttcgtgcttgagatttttttattatacatgtcaagtggagcctcttagagctacctgtttgtttgtttgtttgtttttttttgtgataaatcactaatttcaatgtcagtatattaatcaatcaaattgatgcctcctttacacacagcatttcccacagaaaagtttagtttacacagattttttcgagcccattgtcactaggggggctcttaacatttctttatttgtaactctacaaatttaaccagctgtagagagttgcaagttttgcattcaggtaacctccgttggcttcactctgatatgatcaataggttgagcgatcttaggcaatgctggcttttactgaactaagtgtttttctgtttgtaatgtattaatcctgtttccgaggtaaggatccttaggtactatatataactgtagataaactgtacacctaagtcaaaccaaaacaagttttggaaaaagcaagatttcttttccatgtccacaatgctagcaaatgaattggcatgtggggttagtgtgctgctggcaaaatggaggcagaaggaattcttgctttattagtttattactgcttaacttttctgcctcttctttaaacattcatggacatgactaggcgtcgttttcttgttgctacgtatgcagatcattattgtttcatttgagcttttaggaactcataaatctacatataactaaacatttgtccttctttgttctttatataggcata

SEQ ID NO: 73814 - DNA, 764 bp, Carica papaya
  Intron number 1 from transcript evm.model.supercontig_124. 53 (locus evm.TU.supercontig_124.53) derived from phytozom e v7.0 (chr-ID supercontig_124; pos 885315 to 886078)
tgcttttccgtttgagacaccccaatatcatcaccgtaagttcttccttaatttctttaaaggatttttactgtttcttgcttgcatttttgtagacttttactgaaagttaaatagttaaaaagataaatttctagtgtctttgttatctgctgcttccatgaaatagattcttttatcaaaaagcctggtctctgcacctatatttttttctcttctttgattactagcaattttcttacctacccaggtattctgctttgttgcattgttgaactacttccatcaagcatttattgagacatgttcgtcataccctttatgttgctacccattacacatgtgcatatttattgttcttactcttttatgactcattggcgagacttctgactttagtaactttggacttatctaaactcttgttctttcataactctttttctgctaccataactcatttgctacctattttttaattactgggtcataaaattgctgcacttccactaaatttgaccatgtttattttatatctcgcctcttttttatttctttactattgcatattgagttgtttgtggctttgacttcatttgttttaatgggtatggcggaagttgttgctatattttgaccttgttgagtttgtgtaaggagagtgcctaaatgggtcttggagcaggataaagttttgttgacttatagcttccacttcttctcttgcagtttgttgcagcctgtaagaaacctccagtgttctg

SEQ ID NO: 73815 - DNA, 502 bp, Carica papaya
  Intron number 1 from transcript evm.model.supercontig_108. 76 (locus evm.TU.supercontig_108.76) derived from phytozom e v7.0 (chr-ID supercontig_108; pos 909019 to 909520)
gatttggtgtctggttacaaggtaatactcctccctctacctttccttctccatctctatgattgtttttctttttattcctcgtctgctgctagtttgtgtgtgtcaacttttgatatgtttgtttgcatttctgtgtataatgtgtttcatcttctatttggtagtacgggttgatattgttgccgttaatactgtgatcaggtgttcaattgggacaaatgtaaataatgcgttttacaagtgaaatttctcgagttctggctgtgtttatgctaacacgtctcttctgatatggcatggaaggataattttggaatgcatcaaaatgatgattgaattgctacattttgtgtgtagtgaccctttggactggctcctttttgttatttgatcattgcattctagttacgacctagtctagttttggtttttcattttacatttttatgtattgggtgaggatttcttgtgcagggggttgttggtctcgtttttggca

SEQ ID NO: 73816 - DNA, 893 bp, Carica papaya
  Intron number 1 from transcript evm.model.supercontig_1152 .2 (locus evm.TU.supercontig_1152.2) derived from phytozom e v7.0 (chr-ID supercontig_1152; pos 3702 to 4594)
caaactctaaataagaagcttgaagaaacggtatgtcctactttcattagtgtgatgcagtcaagttactagtttttgtacaatgaaatttctttgaactgagaataaaccatttgtgcatttttagtttttgaaaattttgtggttttaaagcactttttttctgttttggaaacaaaacgagcatgtgtttagtttatgcatgtaacatttaaagtttcaaatgtttgaaaaatttacatctaattattggatatggttgatcttaatataataatgagtgttattgttttgcaatcttaacaactgatgtctttttaagaaaataaaagctgagaatgaaaatgaatagataaataaaaactttaaaacaattttctacaactaaacaggtctttgccagttacgtagaatggtttgtcaagacttgtgaggcttgcatataatttgctgatttttgttctctcacaaaagatggaacgtgtactgcactacaacaatatttcaggaatttatggagaattacctatgaagagtacattagatattctctagggtatcgtgtgaggcactagaaaatttgctattgaatcctaattgttctctatttctgatgaagagacttaactttttcttttacattaccaacccagagatcataaataggaggcaggtttgatgcgaggcccacctgcttcattttaaattgcttttgtgaataattttgattatcatgtcagtcatgcctaagtgtctaggccggagttagcctcatctttccctcagtagcttaccacttgttttgaggtgttgaacttgctgttaaatttttgtttcttgcttagatgtgttagattttgaatataaatctgttttccaggaggctgcaattg

SEQ ID NO: 73817 - DNA, 654 bp, Carica papaya
  Intron number 1 from transcript evm.model.supercontig_131. 48 (locus evm.TU.supercontig_131.48) derived from phytozom e v7.0 (chr-ID supercontig_131; pos 353415 to 354068 rever se strand)
ggaaccacagttgacagaagcacttgcgcgagcaggtaacagaagttcgttgatccaatatttacactgtattttgacaataatcatgggagaaacggataatcaaaataaaatggagctgttcatcaagggcctaaacaatcacattcttcatgaaaagaaaaattacgaagcataatgaaaaggagaattttacctgtcatcaagtttgacgtagaacatggtctttgattccccccacaaagctctggttttgatttacaagaattctccaatctccgggcctcacttctcaaaaacaccggtcttccgttgccgaactcccaaaggaggaatccgggtcccagatttctctcccgggctcttctatccttggttttcaaagatcctcgctctcaattctctgcacccgctgagaagggaaagaagaaaaagagacccttccgggctctagtgttccccgtcagaattgcctccaaagttccttcaatcgccttcattctggaacacgggatgaactctcctcatcccctcttcttctctttgaatgctaatcgggaaccctaaattcccaagtcttctaaaaccctctttccttcccttcaccatttcttgccttatccttatcccttcttatcttctccttttgtagac

SEQ ID NO: 73818 - DNA, 979 bp, Carica papaya
  Intron number 2 from transcript evm.model.supercontig_108. 55 (locus evm.TU.supercontig_108.55) derived from phytozom e v7.0 (chr-ID supercontig_108; pos 575454 to 576432)
ttcaggtatgagtattgtttgttttcttctgttcccagtgatatttgcatcatttgggggaatgaagtccaaaagaatgtgctgcaggaccttgacccaaccatgcattaatttttggaaatttatgatagggtagattcgaatttaataattttgtttgccttgccaattcatttttagaaaatgtatgggtatgggtcaaacttttcccagctatattaatttcttttgactaatttttttgtgatgcctactaaattgcagcactcaacctcgacggttaatgcctatgcatatccgggcaggatgagagcatttttttcgttggaatttcttttgttatttacctaacttttatttttcatcaaaaggctttgagaattcagattctatgtttccacatattgtgaaattataattggtttagccgatgaaactagcccttccatactgctaattcatgctaattttattcggattctctggcttttaaatgttatgtaatttgttatcttcaatgtgccaaaatgatgccagggtcacatttataaacctcattctgcagcttcatgtttttgtaatcccttatctgattaagaatctttggacctgtaacttgaaggagaaaccatcatgtttgattactacactagttctttcttcatgagccattcatgagccagtgctaaagggagaaaaggagagaaataaatctccgattactatattaattactggagatttagagccattcatgagccagtgctaaagggaaaaaaaggagagaaataaatctccgattactatattaattactggagatttagttgtttgttgaattgccatactgagaattttctggggctttagactctgttactgccttaagataattaactcgtgtactgaaattctctatcattgtgttcttttgccatttccagagcctctcccagttcaaccttcctgtttcacttcc

SEQ ID NO: 73819 - DNA, 764 bp, Carica papaya
  Intron number 1 from transcript evm.model.supercontig_1086 .2 (locus evm.TU.supercontig_1086.2) derived from phytozom e v7.0 (chr-ID supercontig_1086; pos 13408 to 14171 revers e strand)
ggtttgccaggtaagctctaagctttaattttaataaatagtttttgattttggcttttgattttctgctgtttgagtcttttagcatgttttttattgtgacatgttttttcacattcaaattttattgtttcaggctcattttgtaatccatttccccttagttgataagatatctgggttatgctgttctgcagtttgttttatataaatggggaatttattgcttcgaattctagttctagttctgttattagctcattgtttctttagcatatgtaatttcggggtttttacgtcttcccgtgtgtatagatataaagcgtatatataacatatatcaatctttgaagccgtcagttaattcgcatgtgagaatttctgggttttatgggtctatgaagcttgccattaatatgttgcttataccattctttttaaccgctgtaataattgggtattatatatagctttatgttgatggttgaatttaagagagaagtttatgtttatttttttcttttctgcttactctgtgatatggaatattgccaaagttgctgtatgtttcctgagttttagcaattgcattcggtggagatattaaaagaaaagaaatcaattctattttattcaaatagatacagcaatttcttttacttatttacaattcctttactgtgttcatgatatgtaatgggtctgattcatcatcctaacatttgacagactttgcaccattgatatttctgtcactcatagct

SEQ ID NO: 73820 - DNA, 780 bp, Carica papaya
  Intron number 1 from transcript evm.model.supercontig_125. 39 (locus evm.TU.supercontig_125.39) derived from phytozom e v7.0 (chr-ID supercontig_125; pos 735609 to 736388 rever se strand)
tgcatcaaggtatgaagtttctataagaatgttagtttatagccattgttgaattttatttccttatgaagtttggtttgtgatttgaagagcaacttttgtttctttcttagtttgattttgcagcatatatggttgagtcttcttcttcatgttgtgggtggttattgatgttttgagtggtctctgcaagtttatgttgtttgagcatttgctccttctgcgagtttaaattgataagaatagttaaattcattacttatattctaatacggttcttgttgcaagggcattggcattactactatgttaaataatatgctgaataacccattatggcaaaggatgaagttaataggagaaaactagttacttatttgtacaaattttatacatgcatttttatgagttaattttgtaaatcttaaagtgtaaatttgcctttaaagacccacatctaattctggtagtgaattgggaaaaaatgatggtaatatatatgtgttccaatgacttatatggcactggaaggtggtgtttcatatggaactaaaaatgtgtgatttgtaatctgccatgatactaggctcttagccgtcaatattgatagtggctcagaaagtattatatgtacatatgcctctgtccttgtgacaccaatagcaacaggagctgggacttttagacaatggatccacggttttgtttcccaatgattgaaaatgaaggttttgcaaattaacaggacggagcgagggtagaagcagccaggagattact

SEQ ID NO: 73821 - DNA, 463 bp, Carica papaya
  Intron number 2 from transcript evm.model.supercontig_10.1 82 (locus evm.TU.supercontig_10.182) derived from phytozom e v7.0 (chr-ID supercontig_10; pos 2358391 to 2358853 reve rse strand)
cctgcgtaagttattttatcattgtcaattaaattgttgtgtattattctacaaaacctttagctatactaatatcaaataaataacataattataggatataaaactctagctttatgaattggtggattaattttatgccatataaatttttgtataactaattaaagaacctacgatatatcaagtttaggccggtttagtaatcttgagcggttattattttttccaaatcataatttggtcaatggaatggccattaattcttctaaaaggcttgattgagataataaattgggacatgttcaagaatttcatttataccgctaagtaatataagaacattttgtaaagaaaatcaattttttcctttttaatttctccttctatatacttcttcaagaattttgctttagttatgactgattctctaaaaattcatgtgtttgtttaatttttaggc

SEQ ID NO: 73822 - DNA, 921 bp, Carica papaya
  Intron number 2 from transcript evm.model.supercontig_1210 .2 (locus evm.TU.supercontig_1210.2) derived from phytozom e v7.0 (chr-ID supercontig_1210; pos 12309 to 13229 revers e strand)
attttggaacagtacaggtctatttcttagtgtttgtgcttgtacatgattgttttttatagttgaacgacatagattaagtatataaacatggagcaggtcttttttattttttatagtaatatggatttccaaacatattacaagtaatttaaattcatgaaggttttacttttttactaggacatccggatttttcttttcagaggatgatggcagactatgttctaggatgtggaaattttagcttttcatgttatgtcattatgtgtattcctctactcagtttaattctgtgggaatacattgaaagctgatctgaagtttcattcctttgattgtcattgaagatggatagcacttaaattatatgcataaatatgcaagcgcctaattatatgcttaaatatgcatgcagtgagggagctcaatttctgtacatgcatgcatgctgatcagattttgctgtgtgacaatttgagattctttagtgatctttatggaaagagcttttaaaagcataacccaatattctgcccattttgctgacatattagcttttaaagtttgaaggatacaaaaatatattcaaatttgttggttctggttgctataaacctgcacacatgctatgtgactagcaagcaaaatatattcaaaattgttggttctggttgctataaacctgcaatcaagcctgtgaacaggcaggcattcagacagtaatgcatagtatgcttccagtagcctatttgccttctgcatgtaatttagcatagatattcttggatgagaaagaaagaaaagaggagattgaggtgtttgtttgatatcaatgtgcagtttttccccaattgatgattgtcagatatgccttgacagaaactttcacaccatattttgactattaacagcttgcag

SEQ ID NO: 73823 - DNA, 689 bp, Carica papaya
  Intron number 1 from transcript evm.model.supercontig_139. 73 (locus evm.TU.supercontig_139.73) derived from phytozom e v7.0 (chr-ID supercontig_139; pos 526868 to 527556 rever se strand)
tactaaccctaactcctgatactttctcggacaaggtaaatcttttaccagaaagtcctaatttaccttccaattgtctcaagtatcttcaatctgatttctgttgtacatatcgagtatatttagctggaattagcttatgtagatctgctgatgaattgtatttaaagttgcttgagatttagagtgtgcttagatcctcaaatgtcctattagttacctttccatttgatgcagtttgactctggagggattagataaaattatattcaataaaattatgtcgagagggttttacttaacagcatctctagcttccaattaatttttttggctgccagcatgcttgtttctaattggtagtttaagttatctatctttttgttaacctcttgattgaaatgatttgagttgggtgatatgctactttggtgaaatatctaatatagctataggttttgcagcaatatcactcttcaatgatgtacatgcgagcaaaattggagtggaacagaaaactatgctaaataaaaatttgattaatcataccagatggcatgggatattctaacaagttcttggactatatgttaaatagtatagttaggaattggagaacctcattcattgtttttatgtaattttgttgcttaggttaaggagaaggacaccgtgtggtttgtgaaatt

SEQ ID NO: 73824 - DNA, 765 bp, Carica papaya
  Intron number 2 from transcript evm.model.supercontig_125. 50 (locus evm.TU.supercontig_125.50) derived from phytozom e v7.0 (chr-ID supercontig_125; pos 866860 to 867624 rever se strand)
agtagtgagactaaagtcaacagagtccagaggtggtaggttaagaaacacttaggaactcagtgtattctggactttattcttttgttaaaaatctttgaccaattcgtcaatgggtttatattgatttttatcaggaaagcacacttgactgctttattttttttctcctgttgaatatttgcttctgttccatgccatttaaatctttgcatgtgaaatattgaccctgctggtgaaaatagaattttcgtcatttggccgtatgactttaatataacatagagcgtacatgcactaactgttgaatattattagttaactttagagtagacgattgtgaaagtaattggatattatttgtatgaagataaaagttcaaagtccttcctgagcatatctacaagacaagaataatgtttttcttcacatagatcaaagaggattaaaagtatactttctacaatactataattttgttttggacttcatggttgtatttgttcttattgtttagctcctcactgaagttatctgttctgaaattgagtcacattagaaattttcattaatacaaaactatggagatattcaagctttttgttgcttgggaattcgttgcttttcaatttccattattgtttaaaaggacatttctttgctatttgctggattgttttcaaaatacgacaattacattgcattaattgatttcaccttctcttgacaggcatcaaaacgttgtgtttcaacccttcttctcac

SEQ ID NO: 73825 - DNA, 618 bp, Carica papaya
  Intron number 1 from transcript evm.model.supercontig_13.8 6 (locus evm.TU.supercontig_13.86) derived from phytozome v7.0 (chr-ID supercontig_13; pos 867178 to 867795 reverse strand)
cggaattctataagaagaatttgtctccgatacaggtagtatgcatgcacactatacatgaatattacatacgtagatacactctgcatatactcgatgatgatgaagagatttaaatcgtatattatcttcaaagataaaatctattttgggggagggtgtttggatgatttatgtttcatatgaattgaattatttgttttgcatgatttttgaagattcttttgagtgatatttggctgatatatctgtatcctaggaatctgtatgatttctgactaattttcttctcaactttttaagaatccatttctttaaactatcaaagtcattttactgttgtattaactttaatcactgtattaatcttcttattgtcacaaaattgaatttgaatgtttttattgtgtgtattaattagtaagactgcaagtttgtgcatttgaagatatacattaatatatacatttaaaaatttcaggtaaaaattgcaccataactgctgatcaactctataaatctatagatgataatatttaatcacgcgaaaaatttaaactaataaaagagtttataatttcacaagtaatttattttctttttttcttctcagtcggg

SEQ ID NO: 73826 - DNA, 474 bp, Carica papaya
  Intron number 1 from transcript evm.model.supercontig_117. 38 (locus evm.TU.supercontig_117.38) derived from phytozom e v7.0 (chr-ID supercontig_117; pos 392027 to 392500 rever se strand)
ggtttcgatcttcttaaattatcgtgaacacgacggtaatttgggagataagcgaccaattggatgtcaaactgagtttgtttttgtttgtgaatcagtgatggaatgtgttgacgaggtaaacattgtttagtgattaacagagttgttgttttcttgcttatattggttttgatgttgtgtcctgcgttattattgcgttcatatcgatagagcgactctggattgacattcgatactgtgtgaatagcctatatgtttttgttttttggtttcttttcaaataaataagtttattgttgttctgtatttggtgcatttaggaatttcactagttccaatctgcttggctttttttctgtttgatttgggaaatctttgctacttctgtgagttcttatctctgaatctctttctttgggtttcttattatgtcatcattcaatttatttgttttatgcagggtttattgca

SEQ ID NO: 73827 - DNA, 460 bp, Carica papaya
  Intron number 1 from transcript evm.model.supercontig_12.2 17 (locus evm.TU.supercontig_12.217) derived from phytozom e v7.0 (chr-ID supercontig_12; pos 1915376 to 1915835 reve rse strand)
gtaactctctttctggcatcctactcagcatagaggtgagagtttttgttcttctagacttttctttccgtgttcttctagacttccgtatcctatagcgaatcaaataaaattaagaatatttagatgttagaatatccggacctctcatgcatgattgatagtcttgggaatcaaataaaatagtttctatcggtttgcattgtgaaggtcccatttgtcaggaatctcatcgtttcttttggattagaaaagatgcagcaatagggcttgatgctagaaacttctggagatagattaaaaaaattatggtttctgatcagtgaagaaactttatgcatttcttttacagcatttctagggacctttttgtcatactattcatttttcaacaagaggcaaatggagctcacttgagtcttttttttttatctaatctaagtcattcttgtttttcagc

SEQ ID NO: 73828 - DNA, 504 bp, Carica papaya
  Intron number 1 from transcript evm.model.supercontig_13.6 8 (locus evm.TU.supercontig_13.68) derived from phytozome v7.0 (chr-ID supercontig_13; pos 765259 to 765762)
accgtgcaagaaaacactagttctccttatttccggtgagtatgataattcctgccgccttttgagttatattattctgcagtctgtatattaaaatgtcagcctaaaataatgtacttaagccaagaaagaacaagcacttagatggttttgccccagagttctcatacctccaagcattttctctaccacaaaataaatccttgaacatccactaagagcgtttaagcacaaatccaagaaatgtctctgccaaacacaaatctcaaatgacagccaccatttgtagaaatgttctattttacagtatagaaaaaacagcaaacaataatgtaatgaaacaaagagtagttagaaacataaacttacaggattaatggtgaaaatacaataccccatctattttgctggtattggtggctttctagtgctaaccagatatataaaaacgttattgtttgatgagcagggtggccaagctaataggagataaaagagcagttg

SEQ ID NO: 73829 - DNA, 917 bp, Carica papaya
  Intron number 1 from transcript evm.model.supercontig_106. 50 (locus evm.TU.supercontig_106.50) derived from phytozom e v7.0 (chr-ID supercontig_106; pos 628187 to 629103)
agacgtaaccgttcccgattagaccgagaacccaggtgagcacctctttgatcctcctcgtgcatacacgtttttatgcatgcaccagacactcatacacacacgcacgcgcgtttacaggcgcatacactgttcagggaggctaattccattcacacttcgtgtatatatgtttatttgtagattatgagcgacttttttaggatttctactgtgattattagagtttgggagttttgttcatggggttttgtttgttttgttaaattggtttatagtgctttgatgaagaaagattacctgtttgagccagaggtaggtcatagtgttaggagaaaccctgtaattgttttatgattctgtttgatttcttcttgtgatctttttggctgattaagttcgagatgaagatgcttttgctgaaatgacacaatattaactcgaatcggaagatttgtaaagaatttttctttctagccatggctgagtcatggcacattttcattataatttacgaacattcttttcaagaagcacatgtatttttatataaatgtacatgaatttagaaatgaaaaattagaaatttctcacttaccaaaaggagtcaactcttctttatagtttcataaattgaatggttgatgttatcctctttggtttcaacatatggacatgatcaattgtcttacatgattttttcaagaagcacatgtatttttatataaatgtacttgaatttagaaatgaaaaattagaaatttctcacttgccaaaaggagtcaacccttctttatagtttcataaattgaatggttgatgttatcctctttggtttcaacatatggacatgatcaattgtcttacatgattttttttggtcattgtttgtgtcagtccaaaaaggtataggaggg

SEQ ID NO: 73830 - DNA, 911 bp, Carica papaya
  Intron number 2 from transcript evm.model.supercontig_139. 33 (locus evm.TU.supercontig_139.33) derived from phytozom e v7.0 (chr-ID supercontig_139; pos 203863 to 204773)
tcctattaatccttctgatataaatagaattgaaggtttgtttttctttttctcttttcttccttctattttatatttcttgttttctgtccagctgttctatgtgtagttgtttttgctaaattgggtttggtttatttgaaaagttagatttgataaaaagtgaaccgagcataaagaagctaaatggctcgtcaagtttagcttttttaataatctgctaaatgggttcttgagcttcgttaatttaggttaggctgtatttggaacaaagaaattacaatctaagttatttacaaattcatactcaagttcaactaactagtatatatataatagaatgaccataaaaataattttatgtagaattcaatgcattttaaatttcattaattaatttaagatgtatggttcaaattctacttggagattatttgaaatcgtattagaaaagattttggggattacttttaatcatcttcaagaagatttgttacatcttctagttaaattaacgtgagtttgcaaatgaattttagaaaattctagcttttccccaacatagccagtcttagaattgattcttgctatgatcggactcatgggcctaagcactttggttaagttgctcaatggcttgtatggtttgtatctttagaatgttaaggggcttgttttggttttagaaatgttcaattcaattggaaaacatctaaaatttatttcttgattttctctaggatagaaattgaaaatgagtttcagaaaccagacaaccactcaaaattttgaagatttcatattggtcatgtgttatatatgatatattggatagttgagtccatgcaaaaaatgattgtaatggtggtggtataggtgtctatccagtgagaccacaagtgccagcagtt

SEQ ID NO: 73831 - DNA, 819 bp, Carica papaya
  Intron number 1 from transcript evm.model.supercontig_123. 38 (locus evm.TU.supercontig_123.38) derived from phytozom e v7.0 (chr-ID supercontig_123; pos 495958 to 496776 rever se strand)
ctggcctttgtccgcacgaactcttccaattaacggtattccttagtttgagaatacgtttgcttaattagtttaacaggctttgtttgttcttgaaattttttcctgaggccctaatttgtcagtgtaagcggatattcagttaaagtctttttcatttatgagaacgcgaaagaaaaatggattacacgcctcttatttgattttttgctgcttcctgggttttatatggagctaaacaggattcctagactatagagcaggagagaaatcaatagttctagagagagagatgatgcagcaatgcaaaagctttttttatgttaaaactcgtatgctagcctcgtctgaacatgttattggaagaagctggcttgcaagagaagaaatatatatatgtagggttctgccgctcaatgagtttgtgcgctgtgcatatagatatctgatatctacacatatctgcaagatatatgtgtttactcgggtataattacatacatgccagcatgtagtggggtagactgggagagagaatgcaatgccgtgtaggttaactacaatatgaggttcgttctgttgtgccctttttctaaatttttgtccttccctttttgctgtttttgctggatgagactggttttgttagtccttgcactagattgtgcgcgccagtttattttttatttttgttctttttccaaatccaaaacagattttgtcttgaggttatatcagttttgaatgtgctcttctttgttattattggcttattttaatcttctgaccctagatctcgttctttggtttgagcagaaa

SEQ ID NO: 73832 - DNA, 485 bp, Carica papaya
  Intron number 1 from transcript evm.model.supercontig_108. 32 (locus evm.TU.supercontig_108.32) derived from phytozom e v7.0 (chr-ID supercontig_108; pos 334379 to 334863)
tgggatatcattaggtgggttaagttgaaatgattgctttgttcgtcaaattatctttccctttttcagcttttcaatcttacgcattattttgtctggcatcagtttgtggtgttttatatcgaattattgtcatgattggtatatcattttgttcacttttatatgctcttttcttcttctttgatctttttcttttgttcttctctcatatttggggaggagtggagatggtttatttctattaatgttttccctttttctccttaagttgtggagagtgagttaatcttgtgttttgatgaattggcaattctgttttgggattatttcattttcctgaggatatatcttacaatactcttttatagctcctcaaatttacttttcatttttggctggaagattatgtatggaccatctttcatgaataataagttgacatgaaaaaaggggtgaggtaactttgcaatttcttaagcagg

SEQ ID NO: 73833 - DNA, 545 bp, Carica papaya
  Intron number 2 from transcript evm.model.supercontig_108. 32 (locus evm.TU.supercontig_108.32) derived from phytozom e v7.0 (chr-ID supercontig_108; pos 335182 to 335726)
tatttctattatactcagtaagctatctcttattcctggcctagtttgttatttggatggcctacaaatccatgtttgggaagaattttggtcagtcttatggtgaaggtggctccatcttttggataacctgttatatggtgataatttaagatgcaaggattttgcagagaaaatgtcatcaaattcttctctgttttttctaagcataatatgcttatataactcacttagaaggtagtggagtaattagttttgatgagggcacaaaaatggttatggggaattaccattatcttctatgagccatttgagattgttcacaaacaaaaaatgagcatctgtcttctctaggaatggatgttctagtataaaacatttattatctctgtgtctacctacatatctctgtatactctagaattatctattgtatcataaccatagatcataagacaatttacctccagcttcctaattaatgctgaaatatgttgtcttgagataaattttaacataaaattgttctttctggttcttgacag

SEQ ID NO: 73834 - DNA, 820 bp, Carica papaya
  Intron number 3 from transcript evm.model.supercontig_1.21 (locus evm.TU.supercontig_1.21) derived from phytozome v7 .0 (chr-ID supercontig_1; pos 438370 to 439189)
atcttacattgcattccataccttactccatccaggttcattcttggttttatcattttcatcctgtgctgcttaggttaaattataatttgagatttgcatccattactgaggaaatcttcttcttgccacaatttcggatcaattgacttctgttaagaaagatactgtttctactctatgtttgattcgagtctattgtattcttatttatactaagattttaagtaatcgataattagaaattagtcataatttacatatttgatataaataagtcaactcagctcatatttttaactccataatgatatattctcacttgtttacaagaacactaaacttgactttggttgacatttcaaatttatggaataggaattagattacaatacaaatgtaataacatttggaatagaagtgggcattatcattctaagccaatttcacattcaattaaaattcgatgtttttgtaattttcttgttaacaagttgatatacattaacgaattatgaacaaatgatgaatatttaggaattaaatggaaatataatagagttaaaatcaaatacaatgtaacttagttggatatgaaattgacttggaattagagtgatatttttattcatttttattttgttaatattgcatttcattcttatttcatgaaatttaaatttgaatcaaactaaacttgatgactccagttggcaaacctctgtgatatgtggtattagatcagcaagtaattctctaaaatgttacctcttttttttttttttttttcgtcctctctatttacaggggcttttggaga

SEQ ID NO: 73835 - DNA, 858 bp, Carica papaya
  Intron number 1 from transcript evm.model.supercontig_108. 54 (locus evm.TU.supercontig_108.54) derived from phytozom e v7.0 (chr-ID supercontig_108; pos 559833 to 560690)
actctgctgattcgaagccaaattctgcttcgcctgtcagagtagaacccttttatctctcttactatctttgtgtatagttatatttcaattgttgtatcagggttcttgttttttttttctgtatgtgatgattagcttatatgggggtttttatttgggaaagtgaagagattaggcttcgattatgctgtgctgcttgatggagttttgtatagatggaatacagaagcgagtgctgcgatctttatgtgtcttttttatctttcttatggggtttttatttgggaaagtgaagagattatgctttcattatactgtgctgcttgattgagttttgtatagatggaatatggaagcgagtgctgcgatctttatgtgtctttttgatctttctgtgtctttagttgatttgctagtttcatggatttggtggctatatataagaacttgtattatgctacaatttcaatgaggctatgtttgaaacgaacttagaatttatgtagaattcgtagtggaaatgcccagttaattttataaggggatagtgaaaggtttatctaaaattataaaacttgagttctaggaaacttaaaaggaaattggagtacaacatcgttctaattactttgaattttatatgaactcaatttttatttgttatataacaaaattatatccttcctagttaaactagtttgaatgtctaataaattcgaccaatatactggacttgtctcgatcatagcctaatttttggtggatttagcactataattattacaattcaagcattgttcagtatggtggaggctgaatttatataaaattaccttatatgttcttcacagaatt

SEQ ID NO: 73836 - DNA, 556 bp, Carica papaya
  Intron number 1 from transcript evm.model.supercontig_12.1 55 (locus evm.TU.supercontig_12.155) derived from phytozom e v7.0 (chr-ID supercontig_12; pos 1435430 to 1435985 reve rse strand)
tgaggtttattctctccatttctgttgtctcgaagtgatttttcgtctggttttggtatttgggtctcgtctgaatttcgtttttttttttggggttactggctctgttttatttttttttaaaaaaaaattatgagtcgaattaactcgctctgtattcaagtgtgtttggttttactattgctttttagatctgggtattctctaatttctgtgtttgatgattttttttaatatagttgtagtggaatttcttgtgaatataactatatgtatagtactagcacagtcatatctttaagtgatgatttctatgtatttcttctttcccaattcaggtcttctgcatcttttgttgccagtttaggatttgtatgatcatatgaattttccctacttcccaagtgaagtgatagattcttcaatttatctctgtctggttgatctgaattcccatttctaattttttgcaacaactgtatttactccctcagtatgtctgtttactatatttatgtatttgttccatcttttgagctgtccagattcttggcaa

SEQ ID NO: 73837 - DNA, 729 bp, Carica papaya
  Intron number 3 from transcript evm.model.supercontig_1082 .1 (locus evm.TU.supercontig_1082.1) derived from phytozom e v7.0 (chr-ID supercontig_1082; pos 587 to 1315)
ggaagtaagttgcaacctaacatgattagagtagtttttagcttggcctataatttgtgatgatgttaactctggtggcatatgttctttctcccatgtaataatgttttaatttggcattaatgtgcgactcctacttatgcattttcttgggattcatggcttgaatatgctcttatcaacttaaatggcacagcaacttttacctattatctagagggaagtgcatccacttggagataaagaacctaaggaaaagaccttttgaggagttgttttatgttatcatagttgttataggctcagttagtttgaattattatggttttatgacttgctgaccaaaaacggattgttctgcatcatgttacattttggatatgcttaagtccttcaggtaccaatatgtgttcctagtaaggcaactgattctctgtagtggaagcaacttttatatggacaatgcatctgaatcatgagaagcttcattggtactcttttcactaatcctaatttctgttgtatgctcatgtttctccccactatttcctctcattttcttaaccagggcatttagacagctagccactaggccagtaagttattgttgcatgatagctgaagtttagtataattcttataaagttaattcttccattctcaactatgattggatattattattgctttttctgaatcccgaagcgatggatttgcaggctttgtgca

SEQ ID NO: 73838 - DNA, 784 bp, Carica papaya
  Intron number 1 from transcript evm.model.supercontig_132. 36 (locus evm.TU.supercontig_132.36) derived from phytozom e v7.0 (chr-ID supercontig_132; pos 422089 to 422872)
tggttcagctgactccctccaacttcaagtccaaggtaacttgcttaaaattccgcttattactctgttctttgtttggtccagaagctcgggaaaattggcggaaagtgttattgatgttcgtggtgaatttttatcttctttaccttttcttgataacaaaatggcgcatgaatctttgatcacaatctggattgattttaattaacttgtttgaattatttagatctgttttgattttcttagagttcttttaatagttatttatactctgtttatttaatccgcgaatcatttatttgaaaccaggtacttactatttttgcaatgaatgtaaagccaaaaacgcttcttatttaaaaagacgcctctgatttactttttcagtgtatgttatgagcgatcgctaagtggaaggtgttaaatttcttacggggataatgcaaataccacacgttaataactaatgtttaaacttagttgactataacatttatgaaattttttatttaaaaaaaataacatttatgaaatttggaattttgttgtttccaatattcaaagaaaattttcttgttttatgctatttctcccatatattttcgtatgtttttccattttaggatgaaagtgcatgtttagggtgaaaatcattcctatttttttggataggtccttgatttcttgagtgaaatttaaatgttgattaccgtactgttactgcaagatccggagcagtctactgttattgagagtttcaaattgtggcaggttctgaactcaa

SEQ ID NO: 73839 - DNA, 416 bp, Carica papaya
  Intron number 1 from transcript evm.model.supercontig_1.13 2 (locus evm.TU.supercontig_1.132) derived from phytozome v7.0 (chr-ID supercontig_1; pos 2034440 to 2034855)
attctgccatatctccgcctactaagactgagcaggtaaattttctattctacggcgaaggagacgtgcattaaaagattttgaagaagaataggaaaatggtttacaagttaatttttcatgtgtttaatttttaggaatgccgattccttgctaaatcaaatcattttttttttctgttatctctttaatcgactgcgtttacttgcatattcgatttttaatctttctctctttctctctctctctcttaaaattacttgatgcaagcttcatgttcgttcactgtagctttaaaaaagtattcttgtgttatcttgggtatatagaaagcatttgttctctcgtataactcaaaactttaataatggagttgctgatgtgtttgttggttcaccagctagtgttctccgttg

SEQ ID NO: 73840 - DNA, 787 bp, Carica papaya
  Intron number 1 from transcript evm.model.supercontig_1.35 3 (locus evm.TU.supercontig_1.353) derived from phytozome v7.0 (chr-ID supercontig_1; pos 4591453 to 4592239)
aataggtaatcttttgaagtatcaattttccatctgaacttttcttctcaaataattagctatagcttttaaaattaaaaaaaaaaagaattaaaaagaaatggcgatagcttttggttgaccataatctttttttctttctcatttggctaaataagtgggaacgcatcgttattatctgaatgcttatttgttttcgtatattgtagctttcacttagaatctggtgcatttcaattgctaattaatgtaataactgatttgtggtgtgggattaaattagctctgtttggttgcctagaaaatttcagaaatgaggaagggatggaggcagaaggaaaaaaggcaaaggttgagtatttgctaattcgaatattagaaattattaacctctattatcaaatgagctacgcaatataagcaacggcgcagagaacctttttctagtattatggttgatctttatgtgagatgagaatctgagaactcacctttacatggttagaaaactatccttataccttttgcctacgagaactttgtttattataccgaaaggtaatgactctggagcttcctttgcaaaatcctatttcccatgaccagcatggtcatcagtggcatcaaaacaggacttgtttatttattttgtttttttgtttctccatataggtgaattatatctggttggctgtggtttattgatatatttctgaattgtaaaacatttctcagctgcccttgattgctggagttcatcagttcccatgtttttgcagtgagactg

SEQ ID NO: 73841 - DNA, 840 bp, Carica papaya
  Intron number 1 from transcript evm.model.supercontig_139. 18 (locus evm.TU.supercontig_139.18) derived from phytozom e v7.0 (chr-ID supercontig_139; pos 93096 to 93935 reverse strand)
ttaaaaaggtcttggctttgctcaaggtactaattgtcacaattttgttttagtatttacttactcttatttcggtcccttctgatttcttgttcttgtctcttgtttgcatgttctgggtttttgtctattttctgtttggttactgagaaaatatggaatttggaacttgaaaacataaaccatatagacaaaataaaaatgcccataagttctcatcagcttcttatgttaaatatgttgctgagacaatttagggagtagaatcattttgatctgttatgctggttaatttttcagagaagaaaaacaaaagaaacaaaagggaaaaacccttttttctctcataattcaagagaattacatctgaaaattattgggttaaaagattttctttagtctttaggattcctattgtaattagaaagtttgtcatagagattagtacgaactgctaatttcttcagtatctattcagacagttaagttctttgtgcatgatatatatatgctcttagattcagaaatggaagattcagaagtcttcatttaatttctttctcttccagtttgctgtgagcatctattaatcttttgtagcaggagagaacagattcagtttctttgtttttcctatctaaactctcctccagttttacttgagcgataaacgttactgctttcttgcttctaaggaaatatattccatttttggattgtttgccaaaggaaaaatgagggaagaaaaccatttttgttctacttctcttcgaattctggcgtagtgaggtttctgtatcatttttgctaaattgtaggtctgtgcctccttaatatttg

SEQ ID NO: 73842 - DNA, 824 bp, Carica papaya
  Intron number 1 from transcript evm.model.supercontig_11.6 1 (locus evm.TU.supercontig_11.61) derived from phytozome v7.0 (chr-ID supercontig_11; pos 654991 to 655814 reverse strand)
gcaaccggttcacaaggttctaggtggaggaaagcgtatggacatttcagtttccttgtcttttatctgatttgttttacatgtttcttctgatctatggtttttgtttttttttaagtgattcttttatttttttttccgacggcgatttgatgaagtactctttcattgcggatgtttgcttatagatcgttttgacttcactgtttaagtgtttgaagataaatgatcaatgtggtggcttagaaaatgccggaaacgagcgggtttcagttaatattgttgctaaacctgattacttcctcgttcaagttggatgatgaacctagaaacgagtacttgatacttcttttctattttattttatttggaaagcaaaaaatttcctttagtttctttcttctggcaaccaaacaaagaataaggcaacctttggaacagatctcctacttggcggatttcaaatatgcaaattcctgtgaaagatgataagaattaagatcatttaatgtgaatattagaataataaattttaaaagaggatttcatcattttctaattgaactatgccaagatttgcaaatgaactccatataaatcttggatttgttccaacggtacgcggattgttggatatctaaaaccgaaatcatttgagacagtaaaccggcttgtctgtgttcttttcacagacaagccacaaaacaaccataaggtttggggcaattgcaagacgacgtttgcttttgtttagttgagctcaaagcgtaagcattttgcatttctctatttgaaatctttcgtacaacttggtgcagctgctg

SEQ ID NO: 73843 - DNA, 627 bp, Carica papaya
  Intron number 1 from transcript evm.model.supercontig_13.2 35 (locus evm.TU.supercontig_13.235) derived from phytozom e v7.0 (chr-ID supercontig_13; pos 2034002 to 2034628 reve rse strand)
attgattctgattctacggataaaaaggctgccgggtactttttcccctctcttggtacaaatatggttatgaacagttccagtttctattttcaaatttattattaattaagagcataagcttggataagctatgtcttcaaagaaatctatggcaactggaagcaatttgcacggtggattaaaaacaatgaagacacgccttggggaaaatagtaggatacttttatattagcatgcttaaggtttatatgtttgatcagctctgagatgttctcaactcggatgtaagaagctttcggtttaaactgccaacatgttgaattttataacatccagcgggggaacttttctcttttgtatcggttaataattaaggaatttcatggtggcaagagaatatgctaggaacatgcttctcataaatatttgattttgaaaatcagttaatacttcagaaatatgtcacgatgtacaagtactgccgtagtctgtgagggaaagtcttctagataactggtagttgtatcacttggtgataaaaaatattcatccgttgcttcataactcaaggttttctggtgcaaagcagattttgtatcatcgaagggcctgagacagtacagg

SEQ ID NO: 73844 - DNA, 670 bp, Carica papaya
  Intron number 2 from transcript evm.model.supercontig_14.2 08 (locus evm.TU.supercontig_14.208) derived from phytozom e v7.0 (chr-ID supercontig_14; pos 2267712 to 2268381)
ttgcacggggaaccaaaaatatagtttgttgagagtttgaacgtcaggtgttcggtaaaatatcccaatgaagttttctttgtcttgcttatgagcatgctgatttccttctttcagcggtgctgcgtgttctgagaatgaaattgaattaaaataacatgatacatacgtttcatagataacatatatataaaaataagccttgtttagggaaaatctacaagtaggaattaacctaaggagattgtaataagtcctaccaacaaaacgactactatgtgagaattaaagtaattctctttttaggctaacttctcttcttttaacccttgctggttgcttcttaagtcgtagttggctgtttatttctgtctaacatcttgtagtgtttccattgttttctcagccaaaacaaatacacggaaaaccaaaacctattaatcattactatttaattatatttccttgataatgaaaaatatatgtgcacacacatggacacatacacacaaagttgactttgcattaccggcttcaatttgattaatttgtagaaatctcttcttccatacaattactcttgatgggtttgctctttcatcaaaattttatttttattatcattcttgcatcagggttttttggtctggttgcagcctgctctaacgga

SEQ ID NO: 73845 - DNA, 285 bp, Carica papaya
  Intron number 2 from transcript evm.model.supercontig_13.1 56 (locus evm.TU.supercontig_13.156) derived from phytozom e v7.0 (chr-ID supercontig_13; pos 1409434 to 1409718)
tcgcagagaaggttctatttcatttcttttacctgttttcatttattattatctttttagttgcctcattttgttttcccgtgataataatatatacttatattttgatatatctcgattctcgttgaactaggttattgtgataagttcgtcatgatcaacatgattagttttctcttcatttttctaggaaagagggtttgttccttttttttgtaaatttggaattggtaattttttttttttctcctgtatttggaaacgctaatagggaaaatactggag

SEQ ID NO: 73846 - DNA, 213 bp, Carica papaya
  Intron number 1 from transcript evm.model.supercontig_125. 48 (locus evm.TU.supercontig_125.48) derived from phytozom e v7.0 (chr-ID supercontig_125; pos 844897 to 845109)
gagcctgtaagctgataaaaaagacagtcccttttgattatataagctcttttttttgggttccttctctgtttcatttttagccgtttctttttctttgagccgaagatattttatgttagacaagtagagatggagaatttgttgaggattaaatgttgtttgtgttttgttgcaggtggtagcgagagagagtgaagagagaggagagag

SEQ ID NO: 73847 - DNA, 488 bp, Carica papaya
  Intron number 2 from transcript evm.model.supercontig_125. 48 (locus evm.TU.supercontig_125.48) derived from phytozom e v7.0 (chr-ID supercontig_125; pos 845430 to 845917)
cttctcatcggtctcgctccacgcctacccctcaagtaagttctaggagaggattctcaaaagaaaaaaagcagctgggtttatttttttagttgattttttaagctggttattgagatattcagagatattcactaacatggaccatgtttatgaagaatcctaaaaaaatatagattcctgcctgattctcaggtcaactgtacccttttttccccataaaaaacacgagctggttggtctgaaaatttttcactttctcagtgggttatttatagtcttgattcttcaaatgaacaatcaagaattttttcttcttttgagctgattcttcatctctctaactctctctcaggtacaaaaaaagtcaaaagatatgttatattttcttcaaaacaaattcccagttattaatgtagttttggtgggttcttgttttctttctgtgggcagcaaacactatcatcattgaattcaactaggtacac

SEQ ID NO: 73848 - DNA, 628 bp, Carica papaya
  Intron number 1 from transcript evm.model.supercontig_130. 74 (locus evm.TU.supercontig_130.74) derived from phytozom e v7.0 (chr-ID supercontig_130; pos 751660 to 752287)
aatttggtaacgccggagtacccaagagttttcctgtacgcttccttgtttggcttactgttttctttttttaatggagctcgataggagtgtgatttaggattcactattgttttaatggggtaaatttgactggttatcagttagtaatgcttgtgattaagtaacttcatattcagttttgtggagcataaacttaatatgttgataattcagtaggttatatatatatatgcatatatataaatatatatatattgcgtgtatatgaatttatatatgtacaaatttatgatgcaggtcagtgcaagaacctgaaattaattgccatatatgtgtttatatataaacagatatatgctaaatttcttacattgggttttagatttgatggagatcatgcccatgtggaggaacctgcattaaatatgtatatgtatctattatgtatgcacatttcttatcctgggttttagatctgatgaggattatatccatgtgtgagaacctgcattgaatggagtcttcagttctgtgaatcgactttttttatcgaaaattaattttcttattcaagattttgattattggaaataataggtttgcatgatcgttacaggtgtgtgac

SEQ ID NO: 73849 - DNA, 603 bp, Carica papaya
  Intron number 1 from transcript evm.model.supercontig_1.10 2 (locus evm.TU.supercontig_1.102) derived from phytozome v7.0 (chr-ID supercontig_1; pos 1691186 to 1691788)
agaatctgaaaggaggtttaaggtattattaccaggtaattgacgttggcaattgggttttgtctttttatctgaaaggaggttgctggtattactctttggtttattgggttctactggttttattgacgaattgataattctgttctactttatttctttctttctttggttaagagtcataattattttttgatgaggtaatttcttcctgtatcgttttgtttgttttagttgtgctcatcattgtttatattcttctttgaaattttttaccagcataaactattttgttttctatagtggcgttttgttatatgctcattcattcatccttatcaatagagttaggtagctgtatccatcttcactcggaaaattgcaatagattaaatttcctgcctgaaagattctcaaggcagcgtaaggttgttacttcatggggtgggggaggggtggggggaggaatcaaattttaactagaacgaagggcacatcgtataaacaatgcataaaaaatttcatgtggatagctctgattttagagtgaaagttctttatatgacaggttggtagtgattctaaaggttggacttcaaccaa

SEQ ID NO: 73850 - DNA, 954 bp, Carica papaya
  Intron number 2 from transcript evm.model.supercontig_129. 41 (locus evm.TU.supercontig_129.41) derived from phytozom e v7.0 (chr-ID supercontig_129; pos 373615 to 374568 rever se strand)
gacactggtgctgttgtaagttcgtgtactcttgtttttttcttagaaatttgaattgtttggatgcttagaatcttaagtgtcttttaagttcaagttttgtgatgttattagtaatagtttcatgttataggatacttggctgttaattttgggattttgtattgattgtatcttaaacgaagttggggatgccaggttgaagggtttaaatctcgggaacttagaaacagtacatcaatatatccaactgggattttgagtgaagtcatagttaagaatcaaagagataagtcggactaagaaactggaaatgaaatatgcaattttcctgcagaatttgtgttgattgtctggctttgttcagtgcgatctgattattaaggttgcatttatagactttggttaagagtcataatctttttttcttttgatacgacaattgggaataaaatcattgagaagttcatttaggttggttttagttcagattttaattatattaaagaggaattaggatagaaaccaaatatgataaattcttcaagaaaatatttttatattttatgttcacttaagttaggtgctttggttaactatctctaacaaatggaactacaaactaatcattatgtaattgagtatatgagtgcgcttagtttacttatatatcaaaaatataaagtacagtaaaattcttggtataaacaaatcatagaatatagaaaaagaataggcttgaactaaaaagaagggcattaagtacagtatagccaaatggctcaggcaattacgaagtgattataaacattcgttccacaagacagtagtgatggtcctagttttagattgaacctccgttattgattgatctatgccccaagcaagttgactaaatgcaagaattgaaattatttaggtgcgtggatttttaggacaacaacaactggaggc

SEQ ID NO: 73851 - DNA, 574 bp, Carica papaya
  Intron number 2 from transcript evm.model.supercontig_120. 17 (locus evm.TU.supercontig_120.17) derived from phytozom e v7.0 (chr-ID supercontig_120; pos 302938 to 303511 rever se strand)
gtattcgctactcgaaatctgaagctagtaagattgtctttcaaattctgtcattgcttttgatgctatttttgggattaacatttagagggagggttttatctggctatttttatggttggagagaaacacagtgcttagtaatcagataaaaattagccagtgtgtgctgaagctattataaaaaacattatttcctggcagaagctaaacgccagcatattagtgttttaagtctgtttacaaaaaccaaatgtgttgtttaagttagttattgcctgtttattgcctgtttcttagttgcaatcttcatcttatatgttagatagaacttcttgtgcgatgcttgaggtcatagtttagttggctagttctggttttttcctccttggccatgtcttgttcagattttgttaaatggtttttgcttgttgtatctggcaaaaatactactttgcttgttctttggaatgaatctgctcaattccccaagcaaaagcaaaccaagatcagtgtagtatactatgttaatttatttttccttgttaacattctacttcaataacttcagggg

SEQ ID NO: 73852 - DNA, 867 bp, Carica papaya
  Intron number 1 from transcript evm.model.supercontig_106. 74 (locus evm.TU.supercontig_106.74) derived from phytozom e v7.0 (chr-ID supercontig_106; pos 753547 to 754413 rever se strand)
tacagagcagagacgcgacccagatcctcctgaaggtgcgagctgtttacttaaagaaatgcatttatgtgttcatttgaatttgaattgtagcccggcggggtttctttggttgtagcttttggtaagtttttttgtgtggtaagtgtttgatgaaagtcctcagagaagactccgtagggcatctgcacgatgggttatgtggattttgttcctttgttaggttttattcgcatttcgagtgtatgccaatgcactcgtgtgaatttctggtaccttttggtagatagatagatattaaggttgtgtttggtattagtccattctattcttgttcgatgactatatttcggattagtttatatgaaaattttagttaatatactaaatgcataactagaccaaatttactcataaattcaattttatggtttgatatatttgtattctcatatgtaaagttacaaaaatagctaacttgaattagaagtcaagttgaattgatcatgtagctcaaatctttatgtcatttatgttgtattctgtaatcacattcaacattattgaaatttgaatcaatgaactagcaaaagtcagataaggaacaaagataaatatcagtattgtttatatcggttatggatgtcatgtttaatacctagataaacatagaagaaagaacacgtgtcctgtttggtgtcatgcttggaaaatgtgaaattatactttgtgcagtgctatctatttctttcattttttatttgcataaaggatgaacatggtttgtttgtttgctaataaaatatccaattaacttgttgcaattgttcagggaaaatttgctgggcctgttaccaaagaagagct

SEQ ID NO: 73853 - DNA, 693 bp, Carica papaya
  Intron number 1 from transcript evm.model.supercontig_113. 41 (locus evm.TU.supercontig_113.41) derived from phytozom e v7.0 (chr-ID supercontig_113; pos 545587 to 546279 rever se strand)
cccaaggaaaagggcatctcgccatagaggaaaaggtttctattatgtctttgtctttttttttttgtatcagtatgtgctaattgttgaactacattgtaaagaagttgaagaattcttggcctatgttttcttctgtttcttgctgtgtgcattatttctatgtattgaaaacttatttcttgtgcagtcttgttttaatgtttgtttgacctctaaaattagctcccatgatatagttcgattgtcacttgtatcattttgatctgtgggtgaattttgataagattacctgctgttgcttatagaggttgtttggaggtctagtttgtgtattttgtagtcaatggttgtattgattttagtttccaatatttttttgtacgtaagttcttgaaatattatgtgttgttttcttctataaaagttacattgccttgtatgatatgtggtaaagcaacaaacccacttcctagtggagttaattagcattaaaaactaatgcaatgtgatgttttgaggatctttatcttgtcaaacattttggttttttgttggctccctaagtattgcggatatggttggactatttattgattggtatttgttgcagaatgtgtttttgcttctagtttcgtggaactgatgtttacttctaaatgttggtatgttcagtgaaggccttccccaagg

SEQ ID NO: 73854 - DNA, 392 bp, Carica papaya
  Intron number 1 from transcript evm.model.supercontig_122. 33 (locus evm.TU.supercontig_122.33) derived from phytozom e v7.0 (chr-ID supercontig_122; pos 730098 to 730489 rever se strand)
tccagataaagctatcggcactttggcgggtgcaggtattagtgagttacatttttgtgataaatttttgttaatttgctttgtcaggcttgttccgtatttcgtctgcttttctatattttggactaattttcttcatgatttgctttttaaatttgacatatttgttttcggtctttcttaatatgacatggatatggagatacacattaatgttgaaagtgttcgtgcaattataacgagtgtaaaatgataaactttaaattttattcctctcgattctcaataatacttctctatcaaaagaggagaaaaatattttgagggtgggttttggcatcaataactgacagtgtttattttaatcatttgatgactatgtataagtgaat

SEQ ID NO: 73855 - DNA, 640 bp, Carica papaya
  Intron number 1 from transcript evm.model.supercontig_112. 62 (locus evm.TU.supercontig_112.62) derived from phytozom e v7.0 (chr-ID supercontig_112; pos 542712 to 543351)
gcgatcgtgccgttgtctctgagcgcacgggtgagcaggtcgttctctgagtattgttcaggtgggtactctggtttcttcttaattgaatgtcgctttcaagatcttttctttccatttttaccaaaactttgttgggttgtaaatcgttatagttggtttttgaggaggaatgaacctgaaacctatgattttaaacttttccataactagctcaatctattattttagggtggtattatatttatatgttcaaatttaaaaatctcatcccctcttattatttgattattcattcttccatccattatagttgtgcagagcccatcaatctccatccggtatgcaccttacttccgggcctctgtgcttttcggtttatcttcttacacgtgaaagaatgtgtttacatataactaatagattatgttctctcatatcagcttaagatttcaagaattgaactgataaaacattccataaatttgatgtgtgtgtaactgtatataaacttatagtggccaatgataatggtctcttttcatggactgaaaatgaaagctgtctttagttgcatctaactttaccataaatatttgtggcagtcatcattcctttggggataccttgtctcgccgat

SEQ ID NO: 73856 - DNA, 1009 bp, Carica papaya
  Intron number 1 from transcript evm.model.supercontig_117. 26 (locus evm.TU.supercontig_117.26) derived from phytozom e v7.0 (chr-ID supercontig_117; pos 277152 to 278160 rever se strand)
caggctcgtcctcgtcaggtatccatcggattggtactcgctcttcttgttagaggagaatctgatctgttaatgatcggtgttgatctaatttgactttcgcttgttatggttttctgtttagcattttagaaaatctgagtattgatattttccggtggaggttttgacaaggattggtttgatctggtgaaattttgatctgctttgtcttgcatgtgatcactttctagttttctgatgtttaatcgagaaaatctcgtcagtacgttgtgtttcatttttttttcctcttcttgagagggagaagaagcatataattgatatttttgtttcttcagcgctaattcttgctgctgtttgtttaatctctgcatttcgcgtaggaatttctggatttaagaaactaatttcaattatgtattttttaaatttgtaatggttgctggtgattagttgtccttttctttttcagtaaggaaaagaatagagaatttatcaaacaggattaatttattactgtgtatgagaatgtttatgttgatcaattatcgtggtataatgtaagaaattcgaagctgctgtggaatattttgatgcattttgttgaaagaatgtcttttcctcatagagtttatctggtaaactgatggccaagatattttctcttctgtgatgcttttagtagttgcagaaataatcaggagtaaccctttgtatagggaggtacattaaatgtgatagcttaaagcatcatttctactattatacaggctctgtggatgtggttgttagggtgattatgtagttttggtatagatggttcataagcattctgcgttttggttttcttgttctggatggtgcatcttggggctcttatatttagcaattccttcttgtcccgtatgaaaaaagattaccagtttaattattctttattaattgattctgtggtcgaacatcatgaacaggcagcaacaaggttttccagtctgaagtctatttc

SEQ ID NO: 73857 - DNA, 480 bp, Carica papaya
  Intron number 3 from transcript evm.model.supercontig_103. 36 (locus evm.TU.supercontig_103.36) derived from phytozom e v7.0 (chr-ID supercontig_103; pos 280194 to 280673)
ggtaatggttgctaatttgatcctggaaatgaatgcatttttgttcctgctgctgttttttgtggtccagtattttgtgattgcttagtcaaatgactcttttcttcttttacatcttgtttgattacgaagaaaacatgtgaatgcacatgatatgtaattttcttgatactagattttattaccgctggggacttgagaaaaccagaagagttgctttggagattttgatagtattagggtatttaaattttttgattgcattagcacttccattttatgtagtaattgtccatttgcaaccaaatggtgggccttttggttttttctttttggactttgccggtgaaagtcaagatgttgctttagttaaaacagaaagtcaatttgtagttacagggaattatcgtcgggttgtaatttaattttcgtcctcttttgatcaattattagttgtggcacaaccggaaactgcaaata

SEQ ID NO: 73858 - DNA, 640 bp, Carica papaya
  Intron number 1 from transcript evm.model.supercontig_1.22 4 (locus evm.TU.supercontig_1.224) derived from phytozome v7.0 (chr-ID supercontig_1; pos 3140777 to 3141416)
tggtgcaggccattaaagctgttggcaccatcaaggtttaattttgcagttagctaattaaccagcctctaattaattctattttattttataatatatgcttttttagagctaatcaaccatttgtcaatatccaatgaactcattctattattcctaaaaatttaaaagaaaaatattaaagtaatttcatatttgtaacattaatcataaatattaactttttaatctttattcagtacctaaaagaatattaattttgtaaaaattataatataaacgggtaaagcactaatactctaagtagagttaattaatattttgaacttgaccgtacaatattcatatatactacccgaagacaaagactcatttttactctcctatttctttattatacttatggtcttatatttttttcaatatcaatttacttttaagttttttacttattttgaatatttactgtctaatatttttttttataaaaaaaattaacaatttgttttttttttaattgatttagtatttatttattcataatcaattaattaattaaaatagttacttaaaaatttgggaataattgaatgtaatttccccagaggtttttgccctcagaatttgggcacgacgtgga

SEQ ID NO: 73859 - DNA, 539 bp, Carica papaya
  Intron number 2 from transcript evm.model.supercontig_1.22 4 (locus evm.TU.supercontig_1.224) derived from phytozome v7.0 (chr-ID supercontig_1; pos 3141602 to 3142140)
gctccgtcaaaggtaagcaactattttatttgtcttcccaaactaatatttattcttcaaatattattttcggtaattatcataaaatcattatatttacgcgatcgcatacatatattctttttcctaaacggaaaaaggtaataatattttcatacatatataaaacaaagcaaatgaagtagtcacccaagttttgaatcatgagtctaaattatgtaagaacgcaagtttttatgtatattcatatatattctaacttctcttgcaaatacctatatatatatgtatataaaagttttcataactcgcatacttatacttaataatgtgatttaattttaaatttattaacaaactatattggttgaaaatgctcatatttgcatacatatcatgattttgtgcatgcatgtgtatgtatattgaaaaatatatttatgatttattgttttctaaataatttataattattttagtttatcaagtagattgattaataaatattatttttattgcagcatattttgttactggta

SEQ ID NO: 73860 - DNA, 851 bp, Carica papaya
  Intron number 1 from transcript evm.model.supercontig_119. 99 (locus evm.TU.supercontig_119.99) derived from phytozom e v7.0 (chr-ID supercontig_119; pos 668609 to 669459 rever se strand)
tcaacaggcttcatttccacgattgctttgtcaatgtaagattcgacccagtaccctttaacatagtttatgtgattgtttatcttatatttcactgtatattttgatacattatatatatatataaatatatatgtctatttaaatgtacatcatggtgtaccctttaatattcactatatattttgagatgtatctctctttacatgtatatcgtagtgggtattcagggattagtgaaacaatatattacgtatgttatttatttttgtgatgatgaagatatttaaagattttgtacagaaagattattaagaaactcaaatcttttctggttctgttttcttttctttccttcacttgtttttcttgctaaaagaggaataaaaagggttgggttaagcagacaagccaagtgtttttcttggttttctctggaaactattgattagtagattcagtgaaccttatcgttagttgactggtgcaattacggtaatatatatatatatttatatatatcacaccacaaacacgtacatacttacatagtacatatatatatatatatatatatatacagacacacaaacaaacacacatgggttgagaaaaggacagaaaaaatttatgcataaagtaaatgaactgaagatgacaggctaccaaaacatggaggtgggacgagaaaatcaaaccaagatgactaattttcatgtaattactcgatgactaaatgatccagcactgctagtccttaattttccctttcttttgctaataatttactaactaatctcatgtaaaacttaattactcaatcaagttcgtcgacaatctgtagggttgtg

SEQ ID NO: 73861 - DNA, 637 bp, Carica papaya
  Intron number 1 from transcript evm.model.supercontig_107. 10 (locus evm.TU.supercontig_107.10) derived from phytozom e v7.0 (chr-ID supercontig_107; pos 78158 to 78794)
gcagccggtcactccgactctacaattctcgctaggtatataaacggcctcctcgaactctctctctcttacccattcagtttccaaattaagcgagaaaaagcaacgtttcgctttttccagctagcgatttgaggttagtggcttcttctcttcaattttcttcattattttttttctattaattcatggcttttgttttttttttgttgttgttccaatttgtttgattttccgccgctcttaatctattatgatcgatctcttggactgttcaagctcactgtttatgtccaagaaatgatttttggtttctctttaggtgatttgttactcgatcttcctgtttggtttctagtataagactttaattgaatcatcttcgtattttcatggattttgaagattgggatttttaaacgatttattcgactggagtttgatcacagtttctttttgtttcagattccatgagaaattttttaattaaagctgaaaattttctgagctatttgtttcgatcgagtgatgccactttataatgtgccgaaattttgaggtttaataagtgttgttttgttgttcttttagttgccatggttaaaaaaattggggctttttaggtgcggcaagggag

SEQ ID NO: 73862 - DNA, 482 bp, Carica papaya
  Intron number 2 from transcript evm.model.supercontig_107. 10 (locus evm.TU.supercontig_107.10) derived from phytozom e v7.0 (chr-ID supercontig_107; pos 78798 to 79279)
cgcttttggtgtttgagggtttaatttggaatgatttagcattgcaaatataatttcaatctacttatttctttgagaaaatttatcttaaagagtttaccattttactctatcctattggcttatgttatcccgcaactaattttgttgtttgctttgtttattggactctgtttagatccctacaacaatttgttgaaagctgaaacagatcattaacattactcatcatttggtcacacaagagcttctatatttgtaatattccactgttcggtgacagtatacaagggatcagatttgtacttgtctttggttctgaagcaaggatactgatattaagtcttgttttttgtgaactgtttgtggggtttcttttctctgcatggacattgtatttttatgatatagagggggttttgtatttgttattataaaattaatcaggcctggctctggagagctatttggactccagccac

SEQ ID NO: 73863 - DNA, 506 bp, Carica papaya
  Intron number 1 from transcript evm.model.supercontig_1.41 0 (locus evm.TU.supercontig_1.410) derived from phytozome v7.0 (chr-ID supercontig_1; pos 5095814 to 5096319)
cgtgagtttcagttctattatagtgtttgatgttaatattctctttagttgataattgattatcggatctgtttgtctatcggcaaatctaaggagaattggaagagaaaatggaacttggacgttttattttgctgtttgactcttaacagtcaattgatctaagccggtttccttgtcagatcgctttttgttatcgaagtactctgttagtgtagatcagtaagatattttgccgttagatctaggaatgacttttgttttaattttttctttttgcaacggagattgaatgtggattggtcttgatattcatgccttgatcatttcttcttgttatctttttgactttaatggcgaaggtatttcgatgtgcatgcatgctggcttcatttattttcctattgcttctctaatcatagcctagttatatgttatttggtgtgttatacgtttaattcgtgaaatttaaagttggatttggctgaatatgctttgcatgtaga

SEQ ID NO: 73864 - DNA, 501 bp, Carica papaya
  Intron number 2 from transcript evm.model.supercontig_1.41 0 (locus evm.TU.supercontig_1.410) derived from phytozome v7.0 (chr-ID supercontig_1; pos 5096389 to 5096889)
ttgttggtaagtgaatcgttttaacttagttatatttcccgtatgcgtccttatttttcttacaccactagagtttaaaacaatattgactttgattagttataactaatagaagaggtaagtcggaagttattcactggcaacttgtttcattgtataatgatctgattgtgtctacccctagttaaaatttccatgctgcatttagaacttggtagaatttgaaccctctaaactgttgcagggctttggtcaatttgtctgtttttattctactaaaagattcctgtatgttgaatattcttttgatagctcaaggcataatctatttcttgtatctctttgttattcttctccatgattgtcagttaatcatcattttgtttattcttatcatgccgaaaaaggcactgatgcccatggattgttgacgcattgacatactaaagacttaattcttctgcagaagttgtgataagcccgccatttgtgtttcttcca

SEQ ID NO: 73865 - DNA, 557 bp, Carica papaya
  Intron number 1 from transcript evm.model.supercontig_112. 41 (locus evm.TU.supercontig_112.41) derived from phytozom e v7.0 (chr-ID supercontig_112; pos 367967 to 368523)
aatctcgttcccttgctcgttgtaggtgtttctttttcttttggttcatccgcttactgactgactattttgttggccattattgttttatctttttgaatttttaggcgttgttctgcattttttgcttggttgctcaggagctgggggtaaatggaagcatagggcaatacatatacgtatatacaatagacgacccatcttatatgtagtattatattttattgtgttaaataaatcagtccttgatttgaaggaagagactgttcggttgttaagaaactatgaggagaaaatcttttgcaaatggaaattaatctggaccatttcactgaaaagttaaccaatatcttgtgtgcaatgaacttgtgcaaaatatgactcgagaaagtagagaatttaactcataagaattttttcctcgaatcttcttggccatctaacaaaaattcagcatctacgcaatattaattatctgggttgttgttttgtcaatatttatttactggtaaagcaagctcatatgttccttgactttaatttttcaatttagggca

SEQ ID NO: 73866 - DNA, 790 bp, Carica papaya
  Intron number 2 from transcript evm.model.supercontig_128. 73 (locus evm.TU.supercontig_128.73) derived from phytozom e v7.0 (chr-ID supercontig_128; pos 784751 to 785540)
gtggaatcttttataaagaagtaatgacattacaattcatcagtttaccttactgttaaatatagtttctataatctgacaataaatggcagcaactttgctttaaacctacttttcttcatggctctgtcaaatgatttgggcactgcttgtttagtagtgcaaatagcttacctagggatatttgcataattggtgacatgtgggccattatggctctctatatgagtaggctaagagaatgcatgtttatatgtaagatgactgtcatccagttgcgtgtaggttaatttagattgtttgacattataaacaatatcttgaaatattcaaatatagattcaagctcgaaggataataatcttttaaagaagttcttttttttcctctttctaacgttttaatttttaattttcaacgtactttaataatgttataagaagttggtattgaatggcaattgtagacagacctaaccatagaaggttgaaacaaatggaattatgtaatgatcctttgccattgtttttgttgttggctacacttctttatgactcctattcaaaaaaaataaataaataaataaatctgtatgtctcaaaatgtccaattcatcacaagagtctatgtttctttaccatctacttgaagtcataatattaattttctgattgatgttcgccaaatagaaatatctgtcacattttctcagaaaagttgctatatgcaaccatgatatgccgttcatttattttacttcataaactcgcttccagatttcaaaggcaga

SEQ ID NO: 73867 - DNA, 327 bp, Carica papaya
  Intron number 1 from transcript evm.model.supercontig_1159 .3 (locus evm.TU.supercontig_1159.3) derived from phytozom e v7.0 (chr-ID supercontig_1159; pos 6678 to 7004)
ctgtggtggaattgtgctggtactttgatcttttggtctttacctctgtgtaaacttctgtttttgtacacgggttactcccaattgatgccctttcagtattgtgtccgttttattataaataaatgatatacttctatgtcttttgaaaaaaggatatactgccatcataatgctcttcagaatttatctgaatgttttataattgaactgttctctttggaagttttggaggaacaactggtgaaatttgtttttgagggaactgctggcgaatttaatgtgtcaaatgcatctaatcatgctttgcgttgcttcaggttcaaa

SEQ ID NO: 73868 - DNA, 482 bp, Carica papaya
  Intron number 2 from transcript evm.model.supercontig_104. 107 (locus evm.TU.supercontig_104.107) derived from phytoz ome v7.0 (chr-ID supercontig_104; pos 709318 to 709799)
ccggggtgtgtttcttttcctttttctttctttttgataatcaaaattgtcttgcttttccttcccttattatgttttattgtgttttatttgggaaattactggatggtgataatttagttgaagcagtttcttgttaagatatatggaccaaattatttattgagtagccttgattgcttcaccaggaggtataagttgagcttattgctgatattgacattggacttcacttgaggatctgatcttatatgtacttgtaaagtgatcatattataaatgctgtcgtctagagaattaagattcaatagcttctccatgacagatgttactaccattgatatgttaaaccaatcgtttattatctcctcggtaaggtaatacttgaaaatttgtgaaaataatggtgttatcagaacttcctaatctttatttccttggatttggcagattcgtgttctcgtatccagggaatttcttga

SEQ ID NO: 73869 - DNA, 781 bp, Carica papaya
  Intron number 1 from transcript evm.model.supercontig_126. 49 (locus evm.TU.supercontig_126.49) derived from phytozom e v7.0 (chr-ID supercontig_126; pos 512328 to 513108)
cactatagtcaagcaacctcaattccccattataggtaagtttacatatttattttctttatttaaatatttatttgtcaaaaacatatattaatttcatatttattttgttaattgcttttttttttataaaaaaaataaagaattgagttagagcaaatagtttcacgacaaatttgtttttcaatttttttaattttgttcattcttatttttatttttattgtaattagagaaaataggcatattttgttgaaacttcttttatgatggttgatagtagataaattttttaagtgattcatggaattttgatattttgcagaggcaaatttatgttcttggtattagtatttttcaaaataaatatataattgatagtttttaagaaaaaaaaaaaaagtttgcaaaataagggtcttgaagacttttacaggacttatataataattatactatatgattattaacaactattataaacactatatggttttattttaaaatgggtaatcatcacaaaagttaaaattaatataatttagcatttgaatatttagtctcatgtatttgaaataaaataaaataaaaaaattgtgcaatttactaaaaaattcatggaattttttatttaaaaataatgaaaattaaatattaaattatgtaaaattttcgttggaactttgggaatgcactactaaaaaaaattaaaaatgagaattatgtgggattgattttgtgtgcaggagagattgaaagggaggataagaaggaagtgaaa

SEQ ID NO: 73870 - DNA, 973 bp, Carica papaya
  Intron number 2 from transcript evm.model.supercontig_1.45 (locus evm.TU.supercontig_1.45) derived from phytozome v7 .0 (chr-ID supercontig_1; pos 850678 to 851650 reverse str and)
caccggaagacgcaggtaccctcttcttttattttcttaattatttgcatatgtggaatcgaattgatttttaacacagccgaatcacaaggctaagaaagcttgataaaacatcaaatggggtttttccaatgtggagaaatgatcgtcgtaggctgtacttttttgtttcgaagattcatttaaatgcgtttcagataataaccatgtgattacaatcaagtagcgaggcaatttcgtttgtcaggactcagatagctaagtagctcaataattcaataaatgagaactaagctgcttctattagctaatgtggcaactatgaggctgattttatatagagcatcactagaaaatgatttttttattgccttgagggggatccttttagtattagcatttacctctactctccatttctcgaaagtttttggtaatatttacaaaaagaaagaggcgaagttattggggatattttgtagatatattgatattgttcacgaatgacatttgcaatacacctcaagttcaaagcattcgtcaatcttgattgttcatcgtagtgtctttcagcaactgttcacatcgcacattttagtaatgaaaataatcccgttgctcaaacataaacaggattaaacatggcctatttagtggggaccaggaacctgttctttcatgtaaagtactgcactttgagatgacagacacttgaatataatataacattgatatcttaaaacggaagaatcactttgtaacaaacacatgctggttctttggaattgttcataaagctcattctacaatgtgtttaatataaagtaattctcttgtccattatgattgcactcaagcatgtaaactcttttgaaatggtattgttgtttgcagtgctgttgttattaaagtctctttactcttttttgatattttagtagcatcgaagaggttattgcaaaatttgctcagc

SEQ ID NO: 73871 - DNA, 676 bp, Carica papaya
  Intron number 1 from transcript evm.model.supercontig_1.45 (locus evm.TU.supercontig_1.45) derived from phytozome v7 .0 (chr-ID supercontig_1; pos 851824 to 852499 reverse str and)
ggaaaaacgagcggtaaagttaaagctagttgtgggtatgaagagcggtgaagggcggagtggttggtttgggcgggtgtgttgtttgggacgcgccaaatttctaacgatccctattctccagctacaccatgaccgtttttctcgctcacccggtcgtcttaacgtagcctatttctgtgctttacaatcatctctttctttctctctctctctacctctggtttctcctttcggctgcttatgtccttcctttaagacctttagatcatgccccctccgcttgtcgtttgatttgcttatttgagtaagttccctttttgctttttaacaccaaaacaccctttggatttttcaggggaaaacggataataaacatgtcttttcttctcttcaacttgctcggtattctctttttgtgttcctgcccctctctttttaaacctttttctcttctttttcattctccctcaacccaattctttttactttctttcaactcgtttttccacttgccctgtcatgcaaattattgtaaactcttcgtctgattggattaactagtttattattttcacctggtgtgatgatcggagatccgagatattttctttgttgttatcaagggggtgggatcaagagctaagctgttcccatttggctatatgtgtgcagg

SEQ ID NO: 73872 - DNA, 639 bp, Carica papaya
  Intron number 2 from transcript evm.model.supercontig_122. 23 (locus evm.TU.supercontig_122.23) derived from phytozom e v7.0 (chr-ID supercontig_122; pos 530660 to 531298)
tttatattaatattggtatgtaacatgaataagttcactcaggtaaaaaagcaatatatcattgtgaaagtgaaagtatccatatgaggaaatcagaaacaacttaagcatcctgcttttttgccccacatagatccggtagtatattaatttgaccctctagcaacccttaacttgtggcctttccatatttctgcatgccttttgttggcctggaaattaatgttaggttattttgtttggcctacagaggagcttgatggacattaatgaacttccaggcttgattgaatatttttaagttgttgattattttcaactttttaggagaaagaggggcttctatcataactaattgcctaaacatataattacttcgaagagaaaatagtgtctccattattccctccccctattctcactgaagattgaaaacaaacaaactcagggaagaggaagaacagtttattttgctttagagtcctattgtttactgaatcccatgaagtcaagatttcttattttatgaaaataggggaaaataatacttagggttatattggaaattttgaatgttataaaactaaaggaaccacttgcagctctttgacgtcataacaattttacttttttatacag

SEQ ID NO: 73873 - DNA, 489 bp, Carica papaya
  Intron number 1 from transcript evm.model.supercontig_125. 17 (locus evm.TU.supercontig_125.17) derived from phytozom e v7.0 (chr-ID supercontig_125; pos 289436 to 289924 rever se strand)
ggaggacgctcaggagcagcaaagtcaatctcttggtgagttttccatgctcccgtttaagatactgaattctttaatttcggattttagtacttgaatatgcgatcttacaaggcatattaatgaggaaaaaaatgttcagttgtgcaagtatcatttgatcttatatagctatatttaaaattaaaacgaaaaaattgcttcttggattatacacaccagcaatttctaatgtaactgaatattttgtgaagagtacttttggataattattatgtattgaattagctgttttcttaagactaagtattgcgttgactttctttttattttacactgtaaaaagctatataattggcaagagaaaatctttttctagcataaaattgtgatattttttggtcttgctggaagatgaacttgctgcagattacattgcaaaacaaggtgagttcatgcccttgttttttgtaggtcaagaccaagaaa

SEQ ID NO: 73874 - DNA, 443 bp, Carica papaya
  Intron number 2 from transcript evm.model.supercontig_14.1 4 (locus evm.TU.supercontig_14.14) derived from phytozome v7.0 (chr-ID supercontig_14; pos 186463 to 186905)
caggtttattactttctccctcttaattttattatctttcacaaatgatgatcttcaaaacagtcaatcacaattcaatccaatgcaaaatgggtgaaccaggcatccttgccaaagttcattgcaaggtgacctgtatcgccagttcacatcgaccccgctgggtttgaacctacatggtccgtggactgtttctttgtcctttgcactttcttcttcactagtcaatctcaacacaccttttttcattactaatttcctaacattatcttacgcctaacatacatcactgtcacattttttttctgcgaaatgttttttttttttcgtataaattatcttttactgggttggtaaggctgtgaaattgacaattatttgagtgctctgcttttattttttattttttatttattttgttttcgtttttgaacagagattgc

SEQ ID NO: 73875 - DNA, 637 bp, Carica papaya
  Intron number 1 from transcript evm.model.supercontig_136. 35 (locus evm.TU.supercontig_136.35) derived from phytozom e v7.0 (chr-ID supercontig_136; pos 544018 to 544654)
tctgcaactgggttctcatcgacggtggcaacaaagtaaattaaaaccaactcctctcctttctttttctcagaaaacaaacagaagatcattcgagaaatgaatcgttttattcgtattaattgattttgccgttcctaatcaatgaatgatctgggttttttctttttaatagaagagatcctgattaatatatacttgtcgtactctttttttgtgggaaacaaacagagaataatggaaaaaaggaaatgagtttattcgtacccgttgattttgagttatcaaatcaacagaatgtattgggtttttgataaaaatttgacaggtgacaagggtgacaccatgaaaattggtcaataagttttttcgattatgggtttgttcatactttttcttcgctgtaaaaaacagagcttcaaattagagaagtcatctgggaagaagtgcttcacactgtctgctagagaatccgatggagcaatgatccaatgagctggggccgggagccctcaaatgaatcaaggtttgttcaaatggatgataaagctctgtttgtatttcccaatttgaacgtaagtaatttagaaattttgttttaggttcccaggacttgcctgccttctcctctaactac

SEQ ID NO: 73876 - DNA, 515 bp, Carica papaya
  Intron number 2 from transcript evm.model.supercontig_10.1 87 (locus evm.TU.supercontig_10.187) derived from phytozom e v7.0 (chr-ID supercontig_10; pos 2429088 to 2429602 reve rse strand)
cttgcgtaagttactttatttttattaattaaattgagatatagtattctatagaaataacctttacctatattattatcaaataaatgatataattgtagaaggtaatacttaaaattctagctttatgtataggtagattaattttgtcttatgttaatataaccaaagacccttttgatatatcaagttctaggctgggtttgtaaacttgagtaattattattgttttctaaaatcttgatttggtcaataaaatgccacgaattcttctaaaaggcttgatcgagatataaattagggacctcttcaagaattacacttataattaaggctttggcaaagctaaatagactataatgaaatcttgtagaaaagttttcagtttgtccttttatttacccttcaaatatgttttcaagaattttggtttaattatgattaatttttgaagtactcatgtatttgtttaatttttaggcgtggagtaacgaaaggattaaacctggttacca

SEQ ID NO: 73877 - DNA, 697 bp, Carica papaya
  Intron number 1 from transcript evm.model.supercontig_13.2 23 (locus evm.TU.supercontig_13.223) derived from phytozom e v7.0 (chr-ID supercontig_13; pos 1966499 to 1967195)
tcctgcaccttgctacctggaaaaaacaacgccaggtgaagttatcaactctgctagtctgtaggtttgctctcttagatttgtatctggtagtggaagatttcaaataaagcattttggttttcatttttttaatctccaggcaatatctatgactataatcatatttttttggggggccttttgggttctaggtataattttttattgaattttataataagcagcagattttaatatgctggcaatgctagaactacataaattgagggtaacaataaatcaaagtaagccatgtttgaaacaaattggaaactgtaagaaatttatttgtgaatacatatttcaatcaagaagttgatgaaaattttacttttgagatctgtaagaattattttcccagtaaactaacttgcagctttttcctgacgtaatgtttgtttatctgtgataaatgaaggtttggttcctctacaaattcacactataacatgctttgttacgtaatctgggtctgttttgattgttgactgagcctgtgcttgtgaaaaaccaatgacatcagagactggtttgaccttaaatgaaattttgatgaggtctgttatctttctctttgaagtggttaaagaaaagctgaagggaaattttgattcttgcagataatagaattgttgattggaaaaggaaccactaa

SEQ ID NO: 73878 - DNA, 251 bp, Carica papaya
  Intron number 3 from transcript evm.model.supercontig_125. 7 (locus evm.TU.supercontig_125.7) derived from phytozome v7.0 (chr-ID supercontig_125; pos 197246 to 197496 reverse strand)
agttctacactggcaggtgtgcaagtatcattgaattgatatttgaagagaataaacagtagaatattacaaatgaaaaattgcgtaatatcatatattactccgtagaagttcacttcgtcatcatcttcttcattatgctattttgataatgttcttctggttgttaaattatgtaatcggaaatctttctttttcactctattttctaactcattgttttcgcatttatgaatttagaaaacaaagat

SEQ ID NO: 73879 - DNA, 399 bp, Carica papaya
  Intron number 2 from transcript evm.model.supercontig_135. 16 (locus evm.TU.supercontig_135.16) derived from phytozom e v7.0 (chr-ID supercontig_135; pos 403530 to 403928)
gattgtacgcaattgatatcttggaccctgacttggtacctttcgtctttgacttttaatgcacgatttctgcagtttttttcggtagaaaatttgtttattttttattttttggaagaatccgtagaaaattggttttatttggatattttgtgctttgagagtatatttgtggattatctcacgtgatgctttatgcaaacttatcttgtatgaaatctatcatttgtctttttaaaacttttgtagacgatggcatgctaacccctggagaactttgtgattagttcatgatgcttcgttcacaattttcttcaaaatctactttgcataaaactttaacaaggctaactaactgatggttccattcccatgtccactgcagataattggcagaga

SEQ ID NO: 73880 - DNA, 307 bp, Carica papaya
  Intron number 1 from transcript evm.model.supercontig_119. 37 (locus evm.TU.supercontig_119.37) derived from phytozom e v7.0 (chr-ID supercontig_119; pos 208974 to 209280 rever se strand)
aacatagaaagtgttggttggtaagcaaagcaatatttttaaattcaaaagtatacccttttaaatgcatacagatacaggtttataatatatttatggcagttactgttgaaattctgtttggtagggtcttgaaactccttcaacaatcttttctctcttaatcctttccagctaatccactctttccttttcattttcttctatatcaatctcaatctctctgtttacatttttttttttttccatttctacttcttctcttcttcatggtttacagttctagcaaggccttgcagcttgctgg

SEQ ID NO: 73881 - DNA, 564 bp, Carica papaya
  Intron number 2 from transcript evm.model.supercontig_13.1 40 (locus evm.TU.supercontig_13.140) derived from phytozom e v7.0 (chr-ID supercontig_13; pos 1218497 to 1219060 reve rse strand)
aagatcacattggtgcgttgccttgggtaaagtttccttctactttgaggtgccaatttgattctgatattgacagattaactacttggacttgtctgataaatttatctcattagcactgttcgcaagcatccatattgaactgtccgagcttctggtacatcattgtctacagtaaatttagatgcagagatggcagttctcacagtatggtgaagtaaattggtatatttgcagatatcttgtggttgatggcacttgctatatactttgtatttaatgggtgacccctggcctggtgaaaatttggtaactgtgaattgagtaattttctggaaagccaattgagttgcatttaatgggtgactcctggcctggtgaaaatttggtgaatgtgaattgagtaattttctggaaagccaattgagttgcatcatttaattgtttcagatcttcgtttctttcttctgttgctactgctcttttgtaaacattcattcttattttttacttatttctttatgagcaggtgatcccagctttagattcccatacaccaatata

SEQ ID NO: 73882 - DNA, 411 bp, Carica papaya
  Intron number 1 from transcript evm.model.supercontig_139. 69 (locus evm.TU.supercontig_139.69) derived from phytozom e v7.0 (chr-ID supercontig_139; pos 512803 to 513213 rever se strand)
cttcattatttcctcagatcatttcctctcactttgtaagttacccatacaggcttttttctttttatttatatgaggaaaagtatgtttttaagacaagtgaaaaggtcaaggttagaattcgtgttaccagcagaattgatgtcaaggtcaaagtatatgtattgaattgcactaaagctaaaccataaaagctgaaattttaatttgcctattcatctataattgttcttcttacagttctcatttgtttgtaaactctgtccattctgattcaagtaggatcttccttctttttattttttttttaaaaagaaagtatgaactaattttagtagaccttttgatgcaagacattaaagaagattaatttaacttcaatgacatgtacttttcagcctggagctatct

SEQ ID NO: 73883 - DNA, 760 bp, Carica papaya
  Intron number 1 from transcript evm.model.supercontig_1.29 4 (locus evm.TU.supercontig_1.294) derived from phytozome v7.0 (chr-ID supercontig_1; pos 4100993 to 4101752)
gtgcattgttgctctgctagaaacagaagtactcttttgcaatgctcaattttggggctttatagtggtgctttctcatggataattgaatttaattccgtctttgattggctatgaggctatattgctttcttctatttggttatgcatttctgccatgacagatatgttgtaatgttgattagttgattgtaaaggtccctactctggaattttgttatagacaataaaaatcagaacccaaagaagatgaacactttctggattttcttccttcttttcatattttaaattttgaataattgtatgggctcattaaaagaggacccaataatctcgaaatatttaaaagagctaaagaacttaagaaaattgttctcagcataaaatcctgttcaaatcagagtaaccttttacggcttataaaataagtgcatttcagacataaaaccgacagataactaactgtaaattcttgtgtaaaaaaaccagtaacactcacaaaaaaaactgacataaatttaaagtaaaactgaatataaacagattagattaggacaatctgtctgctcagtcagttgctgactaggccagtctctcccgcgacagtgaaataagactggttttgttcatgtgcttactacactgcccgtaatgcagcagttacctattgttaatttgtgggaaggcctttaatgtgataactcgcttgtttgaatttctagccttttacgttgataattggtgggggagaactgct

SEQ ID NO: 73884 - DNA, 476 bp, Carica papaya
  Intron number 2 from transcript evm.model.supercontig_1.2 (locus evm.TU.supercontig_1.2) derived from phytozome v7.0 (chr-ID supercontig_1; pos 22642 to 23117 reverse strand)
cgtggtggggagggatttccttcctcgtggatccggtaattatgaatttcttcctttgtgatatacctgttgttttcggttttcaatcatgtctgtttggttgggtggaaatgagtgaaaaggttagaacatgactttgatctttggttaataacagtccatctcaagaaaacgaatttaatgcgaaatattgtttaagttgactagtctggttcttggtatagtggtgaacaagttgatttctatattgaagaaataagttaccaagtacaagtatttcacattctccttatgacataaaatattaaactaagtaatcaccatcatctaattcctgttttagtaacaagtggaactacaatgagcaatttgtttcttgaagaatcatttttacttactttgccttttttgtttgtgtgttttgtttttcttttcaaaaaggcattgtcactcgaaggccgttagtactgcagctt

SEQ ID NO: 73885 - DNA, 712 bp, Carica papaya
  Intron number 3 from transcript evm.model.supercontig_117. 48 (locus evm.TU.supercontig_117.48) derived from phytozom e v7.0 (chr-ID supercontig_117; pos 483287 to 483998 rever se strand)
cacaagttgagctcagaactccagaagcttcatcggtaaggcagctttaactggttctttctttaaacgatgtcctgaatcatgtcattttaatatatattgcattcttcttctttgtcaatcttgcaaaagtactgatgttgttatctgattcttttttaattcggttccatttttaagtttttgattgcaaagtatgtgttctacttgttttatgggctataaagatgaggtttttttctccttgtactcaaacacactaatatatatatatatatatgcgtgcgtatgtgtttgtgttgaaatgtaattcaaaatttgaacgagtctttctcttatctgttagtttcctagatttaagcaagtttcttttacagttgcaaataagtagcacagtagtgggattagttgtgggatttgatgacggtttttttttatagctctgtttgttttatgtaagcctatatatagaggctctttttgcttgttttatatagactaaaatcagaagaaaagatttataggttctgctacgtttgctttcctgctctggttttttttgcttttatctttttccatcagtttgtgcatgtatatgtgtgcatatggatgtatgtattgcatttgttgtgagactaagtaactaatcgcttaacgttgtaattttcttaatgtaggttaaaaaagtcaatcaggagaaagaaagaggtaa

SEQ ID NO: 73886 - DNA, 406 bp, Carica papaya
  Intron number 1 from transcript evm.model.supercontig_13.2 69 (locus evm.TU.supercontig_13.269) derived from phytozom e v7.0 (chr-ID supercontig_13; pos 2426831 to 2427236 reve rse strand)
aagagacaaaattgacaaagcaattcaatcaggaggtatggactcattcatcttacaataatcacaatggttcattatgaacagagaaaggacataatgagatgttttgtagaaacttcttgatgcctattctggaacaatcaaatgccttggttcctttggctgccatgtgtaaacttttaactgccatgtattttcagcttaagaaaattgttggtaatatcttcattgatcttcagctttccatcctctagagttgaaatgatgatggctctttgtaacctttttttctgtgacatgagaaagccaattgtatgattttttccccctttttgtgcacaatttctgttctttcagcttgaaatcttaagcaaaattcgacacccgcacttgcttctccttcttg

SEQ ID NO: 73887 - DNA, 688 bp, Carica papaya
  Intron number 1 from transcript evm.model.supercontig_119. 59 (locus evm.TU.supercontig_119.59) derived from phytozom e v7.0 (chr-ID supercontig_119; pos 411984 to 412671 rever se strand)
ggccgccggtaattgaatcttgcgatttgttttgtagttttctttcactatatctggggattgatcactcttctattcttctaattcaaccatttcaactattatagattttgcaagctaaactattggacatgattttttttttgaagttaaaatgaatctattgtaacccatgattgtgcttttttttttaaaaaaaaaataagaatcccaacacacccaatctcacaaagtgcttatgctattttcctttcatctcatcaacgagaaacaaattatatccttccatatactccacaaatatacagctcctttcttgaagggtgctgaattttgtggttgaagcataactctaggatctttaagcagcttttcctcctgctcatctcaaagattaattttctaagaaaaacaaaaaaggataagaggcgctaaagcattttaagttcgattagtagatttattgtgtcatattagatgcattttgcatgagtgcaactctcttgatgactattccatgagtcccttttacttaataacttaaggttaagtgaacttttattttactattgctctcatatgattggattctacattcagccagattcttgcactttcttgttcttcaataacttcttccaacaatcatgcaggtgcacacattcaagcaagcaggtgtagctgttta

SEQ ID NO: 73888 - DNA, 271 bp, Carica papaya
  Intron number 1 from transcript evm.model.supercontig_106. 87 (locus evm.TU.supercontig_106.87) derived from phytozom e v7.0 (chr-ID supercontig_106; pos 810599 to 810869 rever se strand)
gtgatctttgcctgccttctctcccaatcattcaggtccgtccgatcaaatcctcctcttcaattttatttcacgaaactataaaattaatcactcacaaatctcaaatcaaacaataattgatccagaaacaactcgattcgcattcaaacaaattttaaatcaaacagtaatttatccagaaacaactcgattcgcattcaaaacgtaataattcattaaacaagaaaacatatgatccaatcgaagcaggtagcattggcatcgggag

SEQ ID NO: 73889 - DNA, 562 bp, Carica papaya
  Intron number 2 from transcript evm.model.supercontig_119. 47 (locus evm.TU.supercontig_119.47) derived from phytozom e v7.0 (chr-ID supercontig_119; pos 300115 to 300676 rever se strand)
ctatagcccgtcttaaccttcttaaacttatcaaggtgagatatttcattcttttaaatcataacttttggtgcttttgttccctgatttactagtagaacatttctttttcaaaagataagtagtagaacatatgggaggaggattaacatgtcaatcaatgttgcccgcatgataaaattttgtaaatggtctggttaccaagtcccaccagtcctttaattccttttcatcccaaaaatctgttgaaagtttatgttagaatccaggaaaggatcaaggttccttgggttgtgaaattttagcttatgattttttgagtctgtaatacctctaatgcaggctggaaacacaattttgtaccaatgtttgtactttagggactaggttaaaagttcaatttaatttgttttgatgtttttcttctcagtttgtgtgcgagtcttcgtgggaataagtttgactaatattttgagtggacgttttgttatgccttgggagatttaatgttggaatttttagttgctcacatattgatataaattcatccggcaggctgttt

SEQ ID NO: 73890 - DNA, 599 bp, Carica papaya
  Intron number 2 from transcript evm.model.supercontig_139. 47 (locus evm.TU.supercontig_139.47) derived from phytozom e v7.0 (chr-ID supercontig_139; pos 358834 to 359432)
aaaatgtgagtgttaatctctgtgctttgtcgtgtttttcagtttaatttgggatttctttttaattttgttatggtgtgtctagattataaacgtttgggtcaaaataaattgatttgttgacttgattttttccccctttgaatctgagtagtttaatgctatactttataagggtggtagcttgtgtgtgtttaagaaagaaagtcgcttttaattgaagaatatcccttttttggacttgttttaatgataattttcactgaaagtggatatgactggcactttgtgatttgaagggtgtgtataagctgcgttaaccagtaaaaaaaaaaaagctatatgagcgtttgttctgatataaagaatatcctcctaataagtgcttttacagcttcaagtaaccttgagaagttgaaaacttgcctaattgtggttattttagacaagtgctttggtttccatggtttaatgcaggatagctaatgctaagtctgtttgattgagtcagattttggaacgaagatgttagcattggctttttgtacgattctaatatgtgggatttatttcttcaaaacaggtcgtaggtataagag

SEQ ID NO: 73891 - DNA, 832 bp, Carica papaya
  Intron number 1 from transcript evm.model.supercontig_115. 19 (locus evm.TU.supercontig_115.19) derived from phytozom e v7.0 (chr-ID supercontig_115; pos 418130 to 418961 rever se strand)
ttgttgccatatttagaggtgtttagggactatagaaactagtaaataatgtgttagtggaggtcatttgtagtatacaagtcatatataaggaagttatttaggagtactaaaataagaaaacataggctgtccataaggtgtccaattcaataattgctttctatctgtatatatatatatatttatctttgcttaaatctaagtatatatttgttgtagagttagaatttaaataattaatcttgttacttagcctacaccagaatgtgggtgcctaacaccttcctaacttgaaaatttttgaaagaccgtatatacttttggcatctaattctgctcataatatatttagttgtgactccttttctttttggaagaccattcttgtggagtttttttgccttgcatcacctgttgtgacacccttagctgtgtatctttagttttcatatctttctgctatgggaaatcgatcttccttaactcttgcactgacaacacacctccaaacttattaaattgttcgatttccctcccccactattgcctacaaaaatctcttcatgcacccctctattctttccacaagttcaacgtgtacactaaaacatttactctcttcatgtgcccttcctagaattattatagaatttagagtttttgaactgatagtctgttttgtgcatatgataatgttcatttgtgtgttacctgcatattgatattattgcatattgatattacttttgtgtacatatttgaattagacttcgattctctagttcagtgacatggcctttttgtttctattatcttgtgacaggaaagt

SEQ ID NO: 73892 - DNA, 901 bp, Carica papaya
  Intron number 1 from transcript evm.model.supercontig_112. 16 (locus evm.TU.supercontig_112.16) derived from phytozom e v7.0 (chr-ID supercontig_112; pos 161643 to 162543 rever se strand)
ccctgctgtgctcgtgactctggtccagatctaaggtgagctgagtcaaggtgccaataattagacccaagggcatctcttaatgtgccaataattagaccccatttgttttgggtgaactggatgcccaaggaaaaattgaagtttcgtttatagcaaattgcagcttcaattggttgatcagtatatgcaaaagagcttgtgaataagtcgtcaatattatatcatcaacatataagagaagcaagcccaaggctccacctgtatataaaaataaagggcttatagaaagaaatgagggaagttgatatcatcaagcttgaggagcttgtttaagaccatgtagggccttatgtagctgatgaacataatcttggttattggcatcctcaaaatgagactggcacatgcagacaatttccttgagatgactatttaggaatatgttcataatgtccagttggtgaatcaaccactgataagaaagtgggagagataaaacatgtacgcaggttgccttcacaatgtaactatatatcttggagtagtcaatctcttcaatatggggcttgtgctggaattttccagttttctatctttaacttaagttgcttccttatgctatcaaccgctaggataagtgtaataaagtcagtggggctttattagagcaaatcctgaatggtggagcggaacattagagggtatagatttgattcttcatatattgcatgttgattttcaacttttaccaaatttataatgtttgtttggaatcaaagataaccctcctgattaggaataaacttgattcttcagcatgttaatcatggtaatttattttgcaaacttgttattacatgcattataataattttttagtcccaaagtcagcaagcta

SEQ ID NO: 73893 - DNA, 802 bp, Carica papaya
  Intron number 1 from transcript evm.model.supercontig_13.2 94 (locus evm.TU.supercontig_13.294) derived from phytozom e v7.0 (chr-ID supercontig_13; pos 2714914 to 2715715 reve rse strand)
ctcgtatcagggtattataaccttttggttgcctgacatgtttcaattaatttaatggcattttctgtatttcagtttttagctagatgtaatttctgaggtgttcttccgactatttaatttttacatgctctaatggaggttgatcatgctacatattctttttggaagtagttacttgtttttgtctttcgttcctttttcctggttctatggaaattttcattgtggaactcaatattttaaatgcgatggctttaaataaaacaggattgttagaatatgtttctttttttcttaattaaaaaaataagatgaggtcgtggattgttatgaagcagataatggaaacttggttgtaaatgtgtttagatgaggaatcaataaattcagtcacgagttgttctcaaacaaccaaaagagactgtctttatttggttttaccaattagagtacctgataaattttttttttttttaatgttttcttctatgatccatttgcataaatcaacagctgaataattttaaatcataggtaagcacatttgagataaaggattttaaggagaatggcattaaaatgaaattctagtggcttagtttagtataagtcgggcttggaacttgctgcctcgacattcaattgaattttgggtctgctatcttctccaaaaaaataaaaataaaaattgtgactgctaaagaaaatagaatatttggtctatttgacgtatcttttgtcaatgattggaattctttttacagttacttcggtgaagtcagctagacaagtcattgat

SEQ ID NO: 73894 - DNA, 680 bp, Carica papaya
  Intron number 1 from transcript evm.model.supercontig_128. 61 (locus evm.TU.supercontig_128.61) derived from phytozom e v7.0 (chr-ID supercontig_128; pos 543077 to 543756 rever se strand)
gttcccaatttgaagctctctaggtaagcttttctagttcggttttaaacctggaattttcatttccagttttatgttgttgagcttgtattgggatcagtttttgttgctattgttcttccaatcttctgtagattgatctcaagatattttaacctttgttttttaacattaaggtctgattgtggggcatgtttaaggagacgtgtaattttggatgtgtgtctttgtttgaaatgacgagggatcataaaatcgtgctttggataaccaagggttctacattggatttatgtttgaatttgacagaagaaggaaaatctattgttgctttgaagaaattgttaatggatagcgccaagataaacgagaaaagaaaagtcaatggttgctggttaaagttctttgggttgataaattcgattctaccatgcctgtgaggcaaggtgttgtgagagagaattatgaatggataaggtttttctaacagttgaaaacacggaggcaccatgccttggaggcatggtaatagcactcatttggccaccttgctttgtctgtattgttatattattttctgtaatgagttaattttatagcatgtaattatcctaggctagtggcacagagctttcctaatgttcttctatttataggtcgcatcgcttgccatcacattc

SEQ ID NO: 73895 - DNA, 526 bp, Carica papaya
  Intron number 2 from transcript evm.model.supercontig_114. 54 (locus evm.TU.supercontig_114.54) derived from phytozom e v7.0 (chr-ID supercontig_114; pos 720848 to 721373 rever se strand)
attaatttcggtgccgattctgaagctccaatcaggtttgcctaaacaatcttattaagtgaggcatatatttgtgatctttatgaactttaaaccataaaaattaaaagctttaagaataaaaagagaaaagaaagggagaaacaaaccacgtaatgaaaaaggctaaacataagaaggttttaaaaaaattttgttcaaactaatatgctagctgatgtgaatattgcggatatcagttaaatgtgatcatataattgatatggattgcgtatctatactgtcacatcagtttgtaaatgacttttcgatggaaccatgtgtgtttatagcattactcttatgttatttgtggttcatgagttgaaatgcctttcaagtattataatcaaagaagttgagctggaaaagctgtagaatgaattagatcagttgtcttgttaacttaactgctactattctggaacaaatctttccttaatttggaaataagaatgtgctatattccattgtctcaggtatccag

SEQ ID NO: 73896 - DNA, 771 bp, Carica papaya
  Intron number 1 from transcript evm.model.supercontig_10.2 68 (locus evm.TU.supercontig_10.268) derived from phytozom e v7.0 (chr-ID supercontig_10; pos 3222695 to 3223465 reve rse strand)
ctcagcttaatactctattggctggtcttaatacggtactcttcatatcgtacttggcctttgtgtatgcctttttgtattttgttttcagcagaacatttcgctgttaatttttcaagctttgtgattcaatgcggccagatttctgactttgggttttgcatttattatgtgggtttgatggaagttccggggaaaaaaaaaagaaagcagaggggagggaggaaatgatttttacttattgattttatttttttttttatctgggtttgtttttaccaaaacattttgcttttgattttcaaatgggttactgttagggcagatttctgatcttcggtttttatgtttggcatgtgggtttaatgtgcattcagaaaaaagaaaaagaaccgagggggaggtagataaagatttttacttgctgattttatcttttcttatctgcgtacttccatattcattcagcaaaaaattgcatttcatattttggtttctttatagtttataggtactgaacttgattttatgaatttccagatctgggttttgtttctttttccattttttccaattttgtggtcagatacataaagcattttcaattgatattggaggagaggatagagtggagagatatgcaattaaagagagtgagatagagggagttgagtggggttgtgtttctgcacatggaatgacaggtgagattcaatgtcgtttagtcaatttgtggtgatttagtctgtttggttttaggtgtttgttggt

SEQ ID NO: 73897 - DNA, 317 bp, Carica papaya
  Intron number 2 from transcript evm.model.supercontig_132. 3 (locus evm.TU.supercontig_132.3) derived from phytozome v7.0 (chr-ID supercontig_132; pos 19401 to 19717)
gaaattgaaggccgctgctgaaggactccaacaaagtaggctctgtttggtttcttctggatcatgcattcctttttgaacatagttattcttcgtcatgtccttcttgtcaatgtgttttggcataatattttcctgtctgtttcttcaagaaattaattaatacagaaaaatataagaagcaaacttataggtttcattttcagtatccatacatgcccgtgtcacattttcttgattgttttcataaactgaaaaagtgtttttcttttctgctttttacagttggaaaagcatttgcagtggctactgtaatt

SEQ ID NO: 73898 - DNA, 420 bp, Carica papaya
  Intron number 2 from transcript evm.model.supercontig_122. 41 (locus evm.TU.supercontig_122.41) derived from phytozom e v7.0 (chr-ID supercontig_122; pos 905952 to 906371 rever se strand)
agttgaagaagttgagggagtttaagcccaatgtatgaattagttattttgattctttgtagtcgattttaccatgtatggatttaattacatcatttgatgtttccatgactcttgctttaaaagattgtatttgatcattggatgatttttaattgctgaccacttccgtccttagctatagattgttgtatcattctctatttaacgttaaggatggataattttcctaggttttgttctcaagaagaatggaaaagaaggaaaaattaaatgcatttttttgtttattttctaccattttatgatgattgctgaaacctagtggaaagagaatttaatgtccttttacaacctgattgatttgagctgatattttcttcaggctttccctgttgggcaaactttgaaggacaagga

SEQ ID NO: 73899 - DNA, 828 bp, Carica papaya
  Intron number 4 from transcript evm.model.supercontig_136. 72 (locus evm.TU.supercontig_136.72) derived from phytozom e v7.0 (chr-ID supercontig_136; pos 746978 to 747805)
tggtgaagatacaattataggaaacctcgatactggttagtttccttttttcttcctttggatttctaatcttgttaagccatgtacagcgtctagaactgtttagtcaactttcctcagtccacttggttgattcagattggatccgacgcagaaaagattgaacttgaatagttgacttcagttacgcagcgaaagagaaatacatatatatatatatatatatattattttacggaattagtgttaataaaaaaatggatttgaagaagcacgtagagaattacgtaagctaatatatgataattatggaagcattaactaccccacgttcatgcatatgatgaaatcttcattaaattatacttttgttgcctaaacaatggaccaccctcgtaaactcttattataaataaataaataaattaattaatatgtcgcttttaaacgaagtaatatttatatatatatttataaaaatctgaattttagttaaatttaatgatttctaatatattttttaaattgattatgttgtcagcatatattatttaattattaaaatatataaatttttattaaaaaaattaactagtaaaccataaatgaagatcaaaacctgatatgaagaagaaaaatatgaaagaaaatggagataaaggtttatacccagaaagggtttttgttttgttttttttccaaaaaagtgagtgtttttggggaggatgtctatatgtgtgtatattgagttggtgtagggtgatggtaatgtttgattggaacattgtggaaggtgtgtggcctgaatcaaaaagctttagcgacgag

SEQ ID NO: 73900 - DNA, 463 bp, Carica papaya
  Intron number 1 from transcript evm.model.supercontig_12.5 (locus evm.TU.supercontig_12.5) derived from phytozome v7 .0 (chr-ID supercontig_12; pos 30371 to 30833 reverse stra nd)
gaggcttcgaggtttattcttgaagaagctctcgaacaggaattcatggattattagctgatgatttgattggataattgttgaattatacaggaagaacaaaaaaaaaaagaatatttcgaaagattttccctttgtctgatctcttgttcattcactaactcatttattcttgtttaatatgagaggttgaaagaattgcagtcaactcatttattcttgtttaatatgagaggttgaaagaattgcagtcttactgaaattaaattttccagagattattatcttcttggtaaatgaacttaaacttgcaagccaatcttctcctgaatgcaaatttatatgttgagaaaaagcatatggtcgggtcacattgaagagaaactggtctggtcagttcactgttattatatacatatgttgttcagcctttgccaagatctaagagaagttgatcccaata

SEQ ID NO: 73901 - DNA, 760 bp, Carica papaya
  Intron number 1 from transcript evm.model.supercontig_107. 75 (locus evm.TU.supercontig_107.75) derived from phytozom e v7.0 (chr-ID supercontig_107; pos 379847 to 380606)
ccacgttcatcagtctgctcgcgtggctgcattgagtgagttctttgatttcgtcaattaggaatttcctcgaatgttacttgttagcctgggtatgacgatctggttggttgctgggaaagtggaggaaaaaggaaaaacggaattttttgtgcttaccatctacttatttcaatgaagtctcggcaatatttgtgcaaaaacggaatcttagctgatctgatatcgagtttaatggtcgagttggagtgaaatagtttaacaaaattaattttcatttctatttactaatattggctaagtagaattgtagatgaatgatatcacttgttcagtgtcctttatgaaagtaatggaaattttgatatcagaagttacatcaaaaactttcctctcaataaaaatagagagagaaatacatcaaaacattagaaagtaaagaatttggagacctccaaccattttgtaattggcacatctattgaaattatgtttttcttctctatcagatttctaaatgtttattatgtttgcttggaaacagatgctcggaaggattgtatgaacaagtatataaatttttttcattttattatatgaacactatggatggattttagagattcagttatttgagtttagctatcatcttctgaattttgaaataggtatcatttgatagctgtaacaatatcttactgggttatgtatctcgtttcaaaaagattatttgtattgcatgcagctgacaggaagcttg

SEQ ID NO: 73902 - DNA, 828 bp, Carica papaya
  Intron number 3 from transcript evm.model.supercontig_114. 15 (locus evm.TU.supercontig_114.15) derived from phytozom e v7.0 (chr-ID supercontig_114; pos 276435 to 277262 rever se strand)
gtagtcaagcccttgaaggcataacattgtcagtaagttcaaaaattcttgcgtagttctctgcagcttcactctcattggctttttatgagccattgttattccaaatcatagcaaaagaatggcattttctttatcacatgtttttggaatttcttcgtgtaggattatcatattttgacatttaactttatcatgcaaagaaactttttaaggccaggatacatgtaatagggcttgcttacaaaatgtactatttaagacaattaagcctctattgacaatgtatagaatatgataaaatacttctcatgatgatatctccttcaaacacacactagacttagagaccaactggctacattttaaacccagaattggaatatagaaaaaaaatcaactaggcaagaaatcatttattttctttaatgggaaggagcattttcctgctgattctgttgatggaagaataaattgtttcaatgaggacagaatggaaacaagtacgcttagacttttctggaagaataatgaagctagatgaacttatagaaggatactaatgcctgaattaagcttttgagtcattccatacgagaggttcttactttgtttttcatttctagtaggcacgagctttgtttttctgaataaactacttggttttcctaataggcagaatggtgaaattttcctcgattttatcttcagttggtgattagatatttaactgggctttgtatttgctgatacattgagtttaaccgcaggttaactcttttgtatgactcagattcttgaagcaccaaacgaggaagaacttttgct

SEQ ID NO: 73903 - DNA, 720 bp, Carica papaya
  Intron number 1 from transcript evm.model.supercontig_1195 .1 (locus evm.TU.supercontig_1195.1) derived from phytozom e v7.0 (chr-ID supercontig_1195; pos 5012 to 5731 reverse strand)
ctgaagcagacaccgcgcgagccaaaggtaataaccctaatttcctttctccgcttcctaatttgatcaaggaatcaataccttactgttctttccaccgataaccgcaccttctcgttttaattcagtcacaacttgaatttcttcttcatttttttgttactgattattgagtgattcaagtgatgcgtgatgatatctgattatgatatattactgatttactactgcaccaaattcctgagttactatgaagtattatcggattggaaaaaagggacattgcctccaaggtagcatggtagaaagcctgctaattgggcacttttgaatgctactgttgatggtgtcagagtttatgctgagataaaggaattattaggtttctgcataaaagttaataaatcccaccgcagatagagttgagggaagaaaactttatgcttcatgtaaagtaaggtatctcagaggggacaagaagtccattcaggggttcagcacaaactctctgcatgaaagaaataatttcatagtaattaatgtaagaaaaggttgtgtcatatgagattaggtatctaatataacaaaataactccatccagcctttaggggttcagcacaaactctgggaatatcaactctgctttgaatggtattcaaatttattttgatattgttgattcagcaaacagtgccagattaagactgctgaggttgtca

SEQ ID NO: 73904 - DNA, 618 bp, Carica papaya
  Intron number 1 from transcript evm.model.supercontig_1.26 4 (locus evm.TU.supercontig_1.264) derived from phytozome v7.0 (chr-ID supercontig_1; pos 3744806 to 3745423 reverse strand)
tgcgtctccgagttcatcagcttcattaccagcgagtaagttgaaattccttcggtctctatgttctattctaatttcctctgttgtgaaatgctgtgccattggtgaattgtgattcttactgcttattgaaagcaaggattgttaagtttagctgcttttatgaggtgtttaatatgattttcggtgtttctgggacttgcccgcagtttttgcgaatatgaatatgacaccagagattagacatgtattcttttcgtgaaataaataagtaaataactggtgttttttggttccttttgctagtattctaaaatttgcgattggtctttttaggatagaggactttgttattaacccaagtgtttgaagttaatgttcatattgatagatattccttttctaaagaaaaaaaaaaatccaataccctggatgtagcttcagaaaaaaattacactacttgagaatcaaagttctttatgattgttgtttggtgtttcgcggaattggttgattcttttcctgaatattagttgttttttcgggagttggctttttgatttgagatataacctactttttcgtggcgtgttggttcttttgcagggccagtgacaa

SEQ ID NO: 73905 - DNA, 878 bp, Carica papaya
  Intron number 1 from transcript evm.model.supercontig_12.1 06 (locus evm.TU.supercontig_12.106) derived from phytozom e v7.0 (chr-ID supercontig_12; pos 965070 to 965947)
tatttcttcgtgagcttatcagcaattcttctgatgtaagtggctttccttatgtgaaacctttgtatgtgtctggttatgagtttatacatgagatctactcactgtttttgccttttctactttgtcgatgttgacgatgatccgtacagacgtgtgaggacacgatttataaggacatagattaataagatcatacgaagagtaacatgttatgttcgtttggctttgatgtttgttccttttttgtttgaacggctatcgatcttttttattacatgtaaatgctgtttgcaatttcccttacgctaaaaacctaacaatagagatgtaaaatagacgcatttctgtcaaaatttgtttggtgagagttaaaagctcataaatgactgtggtatgtagacaactggcttgggatgccttctcttagttctatcctacacttatacaacgtagtaggaggtaagcagatgacaaaatcgtagtctaatttaagattaataacgtgttaaagatttataacatatgaattcagtttctaatgatacagtaaaccaaataagtaggcatgaaacttttacatttagcttttggttagtagacagaaagtacttgattaagctagggattatttttatgaatcagaaataggatcttaaaagtttgagatataagaataaccattttaaggtatttccttgattatcagtgttggtagctagacatctgcatatgtcttgttgatagtttcttttttcttgacattcatattacgctcattctcttaatggttttgtttgtcttttaatgtgttcgtattaatcctggtttgcttattgacaggccttggataagatcaggttcgagagcttgacaga

SEQ ID NO: 73906 - DNA, 685 bp, Carica papaya
  Intron number 1 from transcript evm.model.supercontig_111. 35 (locus evm.TU.supercontig_111.35) derived from phytozom e v7.0 (chr-ID supercontig_111; pos 726610 to 727294 rever se strand)
tcctgcttcactcttctttcttggttctttactcggtatagaattaattcttatcattctctttataaattttatgatagattgtgtttgttttcaattttctaatatttaatatggttaattgtttaataaaaaattagaattagagttcctgttttcttagtattttatttaccttttttttttaatattattgaattttgaatttgagggatgacaaaaaaatattgaattagtagtggacaaatcctatgtgatgttactcattaccactttttaaattgagtcgatcagatcagagttaatttttaattaaaacttcaagttatattgtgattctgagtttaattttttttctttggtttgagtcagcataactagaaaattctgcttatctgggtcttaagctaaaacttttgggattatgatgtacagatatatatgtatatgattatgtaatccatgttttggttggcagggtctaattaaaagatctagttaatctttaattaaaacttggagttacatcgtatttgagtttatttatttatttattggttcgagtcagcatagcttaaaattctacttatctgggtcttaagttcaaacttttgggattatgaaatgcgtgtaaatatatatataattattatatagttgatgtttttgtttggcagggtctgca

SEQ ID NO: 73907 - DNA, 585 bp, Carica papaya
  Intron number 3 from transcript evm.model.supercontig_111. 16 (locus evm.TU.supercontig_111.16) derived from phytozom e v7.0 (chr-ID supercontig_111; pos 403336 to 403920)
tacccttgaggccaaagagaaggagctagcaagtaactcagtaatcaaccatatctttcacattttaatacttggttaattagacacggttaactaaaacctttactttttgagtttacttcaaatttatttatattctagttcaattcattcaaagatcttagttattcatttaaatcattataatttacgcatttgatacatgatcgatttaacttgattcgggtattcaagtctaccattgtagattttgtattcttacttcttgtaaggaatcacaaaaaacaagtactaattgagttggatcttgaatttacttataattatatcgctagttacttggatggagattttatgtttccacttgtcagtgaaagaatcacaaaagaaaaagtgtggtctagaatttagttggaattagattgctatttttattcgaaaaatattgtttaatgaagaaatcacaaaaaaagaactgcttgaatataccatagaatttacttggaattttcactcaaaattttctatgatatttgaaggaaacttaaagatagtgtgtggttgatgaatacagggagactggca

SEQ ID NO: 73908 - DNA, 309 bp, Carica papaya
  Intron number 1 from transcript evm.model.supercontig_13.1 97 (locus evm.TU.supercontig_13.197) derived from phytozom e v7.0 (chr-ID supercontig_13; pos 1786525 to 1786833 reve rse strand)
gggaaataaagaaaactattagggtgagtttcaatttgttttcactgatttttaagatttgattgaagaagaaaattttgtttgtatgggaaccctgatatgtacgatgatcccctctaaatggaaaatccaggttttgttcctatcatttctaaagtaggttaaatggggtaaatacataaatatattccctaaattggaccacgagatcatttattgtcatatcatgtccatgaacttcattgttattattatttttttaacggtcttttcatcaggacagcaataacaataccaaatatccagaag

SEQ ID NO: 73909 - DNA, 689 bp, Carica papaya
  Intron number 1 from transcript evm.model.supercontig_106. 90 (locus evm.TU.supercontig_106.90) derived from phytozom e v7.0 (chr-ID supercontig_106; pos 823626 to 824314)
ctgtctttccccaatacctccgtcgaattatcaaggttttctcttcatatctctggaattctctgcttctctctgcggatctgatctccactgtgttcaaagtcccattcgtctcttaacactcacgcaagcacgcttatttgattagatcaaattaagaagagtacatttataattcctctctaaaattgacgtattggttttaggttttcatttctggaaatttgcgtaatgtttgcatggcagtatcctgttatccctctaaatcaagcattcgaggtttccattactgttgcgatatttagcttgccatttcttgcccaagtctgtttgatgcaagttttaacgtccatgagtttcgcgttgcttaagttgctatttgctgtgaccagttttaattttcacgattagaagatcttgtactcgtgaaccaattcatttacttgaaatcgagaagaaaatttctaactgaagaatggtagagagtgatattaaaataattgaaattaaaatgtctgatgcgagccatgttgacaccaaatcggtgatagaatgttgttatttgcatatgtgtgtgtgtgtgtgtgtgtattctcttgtctggttcttttatctgaaatcagaaatgggatgtatattgtattttattttttattttcattttctgtttgtcattgtagtggcaacaa

SEQ ID NO: 73910 - DNA, 480 bp, Carica papaya
  Intron number 2 from transcript evm.model.supercontig_106. 90 (locus evm.TU.supercontig_106.90) derived from phytozom e v7.0 (chr-ID supercontig_106; pos 824356 to 824835)
cacttcaccaaaagttgtgtaagtttacaagtatttgaatcattatcttctttctagttcttcatattgttgtggctcattttatcattatgttccttccatccaactgtcagaaattggtgaattaagtactcttgtatgaaatctcaagatttgctgccttgaccctgaagggtcataggaagaggagcagtttgtgggttgtcatttaactctgtaggctaacaaccaattatttagttcaatttctggtatgaccttataagttttcctttgggtttagggttgtctttatgcctgctctgtctcactgcgagaaattgagaagtggagttctccaatgtggattaaatattttgcttagtgttaagaagatttggcacttggaattttcctaatcaatgtgattttgaattttgcatgtggaactgtacaatggatgcagctaccagcatacgaaatatcacaaacgtaagcctc

SEQ ID NO: 73911 - DNA, 489 bp, Carica papaya
  Intron number 1 from transcript evm.model.supercontig_1.22 6 (locus evm.TU.supercontig_1.226) derived from phytozome v7.0 (chr-ID supercontig_1; pos 3193298 to 3193786)
ctggcaagaccacctctgctgtattcgctgctcaggtgtctttgagttttaaagttgcttttctctttttcctgttgggttgattttgcgattttctcagctgcaaattattgtgatgcagtaacattcagttgaattctttctgttagtgcgatctaaaattgttatgatgcaggagagtgcaatataacacactttagattttggcttgtggggtttgaagagcatttgtgtagtgggtttctttgtactagatggattgggttttagttggtgataaagttttggttgttaatatgaaaaaatcctttttttttttgtaggaactttaggaaacgagtattcatacattctttcgtaacttgtcagagttgaagttgaacaggaatgaatttatgttcttagtgaagctttggtgactttaaatttgagaacagctgcttaatctcttctcatctttcttctacctaatttatgccatacagcatt

SEQ ID NO: 73912 - DNA, 671 bp, Carica papaya
  Intron number 1 from transcript evm.model.supercontig_129. 78 (locus evm.TU.supercontig_129.78) derived from phytozom e v7.0 (chr-ID supercontig_129; pos 749013 to 749683 rever se strand)
attttgagggtatgtattttcacttgctacaatatattatattttactattttcgatatagaagattgatttagcaaaaaaatgtacatttctagtacctggaggtggaggagtttttgtcggtagatatgggatgtgggttggcttgttgctctcaagctgctgctcacattaaacgtatttgtttttttttttcctttttgattttgttttcctctagtaattatacagctctatggtggactttatctctaactgagtttaggaaccaagtctactagtggacaaattttctgaactaattgtgtcctgagagaggtatatttaagcttaatatcttaatttgagtaatggagtggtatagtttcaaattgacgtctggctgttgagctgtgtcgtagttgcgtcgatctatgcactctaggcaagacttgtcacttcaatccttcttgtacatgttttttgttgagattaatcttgattaaggattcatttgtctggactttttttttccatatgcatatttggcttacattttgatgtgcagttgaaatgacaatgtgctttcatatgtttattcctgttatgatttatcggattttgctcctcttgagaatgaaaatcaagctgatatcaaagatctttttcgtttgattttcacagattttgac

SEQ ID NO: 73913 - DNA, 950 bp, Carica papaya
  Intron number 1 from transcript evm.model.supercontig_113. 35 (locus evm.TU.supercontig_113.35) derived from phytozom e v7.0 (chr-ID supercontig_113; pos 478819 to 479768 rever se strand)
ggaaacagtttgccgctgaggagatttcggctcaggtaaatgttttgtttctttccttcatttcttgtttacttgcttctatgcgatgttttattggttgttctgaaatggtaggtgtgggacagaaaatgcaatttgttgccggctggttgagcttttggttcgtttgggagataggttggtcgagttttgatgtttggtcgttgagaaagaggggtagggcctaagatggcaataaaataaaaaactgaattaggatttcacgttaacgagtttaaagtcaatcgagtattgggtcatgggcgttcagctgttctgactggtctttgtttaatgagcatgttgaagtacaggtataaaattgattctgttgtgcaagtagatggaatgaatcgcattttggaatctgaattccattgatattgtgtgatattttcacgttgtagtcttcagtttgctgcatgtcttagttatgttttggtttggggttagttctctattttgttgggtttatttcatttgctagttggtggttccttctcttaatgatggcacattattctggaggaaaatatgtgatatattgaaattttaaacttaaagaagcaggtaactttggttgttaagatgattgctatagtttggcttggaaaatccccggtatgtactgtggcttatactttatatggatgttgctattgttgctttcttggctattgtttctatgcacgtatgggtggatattctattttgcaatcaagtgggtgctgtattgaattataatacctgtgactggttactggttgacaaatagcaaacgataatcatttgtctttcttcttcttctcactccaacataagtgccagttgattggttgctgttataagtttttactgttggtgacaattatttttgcttgttttggtataggttttgagaaagcttgtgg

SEQ ID NO: 73914 - DNA, 414 bp, Carica papaya
  Intron number 1 from transcript evm.model.supercontig_14.1 74 (locus evm.TU.supercontig_14.174) derived from phytozom e v7.0 (chr-ID supercontig_14; pos 1997216 to 1997629 reve rse strand)
gtgcttcccaaacaaggcagaggtagtattggttttctttttcgttagttagcaattcgtatatgatacaaatattagtcgtattgattgattaatcttgttgttcttagcttgttgatccgatcctaagcttgttcattgtgtcgatgttgtataatggtttttggcgatgattcatttggtttttttggccttcaatgtttgaggagtttaattttgggttaggttattcatatggtggcggcgtctcttgtattgagagctgccatcatagttgttgtggtgtttggcttaggaattgcagaaatttttctttttgaacttgggtttttccttaattaaatgctgctaagatttatcaattcttcttttggtgcaggaaaaagagaaagtgggatcaaccggctgagtcaa

SEQ ID NO: 73915 - DNA, 752 bp, Carica papaya
  Intron number 2 from transcript evm.model.supercontig_111. 54 (locus evm.TU.supercontig_111.54) derived from phytozom e v7.0 (chr-ID supercontig_111; pos 1030867 to 1031618 rev erse strand)
gctgaatttgatcataaggtgccattgttacttatataacttttgagagaaatttatgtgaaaagctttaacttcactagctttatgttttgtcttcactgaatcccgatggttgttgtgttagaaatggtagccttgaaatgcaggatacagtgggaaaaaaaatttccagggagagggtgtctctttagctattttgcaaagataccaaggctgctatcttgtactgattttgttcttgcttttgtttttgtgttgttgaggttgctctggggtactcctttcccccttttttgaattctttgcttcttttatcctaataatagttcttctttgatctaaaacaatcattaaaaaattaaaattgaagaacataatattcatatagtcagcagccatatggatgatattctgtcctcttatattgtttgagaagaaaattacaaggtgatcaaatgcctgcaaactggggtatgtaaaatgaacaaaaggtatatctatttgctgaaagggaaaaaagcaaatagctattgatatttggtgtgtactagctaagcacacaatatatgagataataggttactattccttccaataaatggacataagtcctaatttctggaatctgagaaggtcaatgttagttctctctcaaatttgaattttttgtttcctaccaggatgcttttaactttgaatcttttcccttctttttaggcattgctagaggagtggatctcaactcgtacgtt

SEQ ID NO: 73916 - DNA, 771 bp, Carica papaya
  Intron number 1 from transcript evm.model.supercontig_107. 45 (locus evm.TU.supercontig_107.45) derived from phytozom e v7.0 (chr-ID supercontig_107; pos 213599 to 214369)
aaagtcaagtatgtttctcttctttcctttttttttttttctttaaacgtcatattcgaacgaagctttcgaaaaccctagataaaccttgttgtttctttaatgttcggctgtcgagaaagtggatcataggaaagaagtgacgcttgttaaaaaaaaaaaaaaagaagaagaggaactgtgctccgtctatttcctcttggttactaagagatgaaagatatgtttgggataaccttaaattacttcgatttgatcggttatgcatgttaactgacaacatttaataatggtttcttatattactaatcaaagtgcagttggattgttaaatatctctgcatgccactcaattatgttcaactggggccaagtgattaccctaggattttgtttttgagaatcggatatccaccttttaaagttaacttagaagtatggccctgaattttaagaagaattctggacggtttaataattctgttggcttgtgtttgagacactgtaaaaatgcattttgcttcacgagggaaatgcattttccttttgttgctttcttttgatatctaggtgcttccgcagatgcttaatttgttcaagttctcaagtttgattttttttttttttttaattttcaaaatactgccttgcaagggaaaaagtagggcattaataaatctagcatgaataatcgtgtctttgaaatccaaagcctgtattggacacctcaactagattttgattattgtttcaattctgagttacagctat

SEQ ID NO: 73917 - DNA, 371 bp, Carica papaya
  Intron number 1 from transcript evm.model.supercontig_112. 19 (locus evm.TU.supercontig_112.19) derived from phytozom e v7.0 (chr-ID supercontig_112; pos 176496 to 176866 rever se strand)
gtttctggtttccaggttttcctcactcacattgttgttatagttgtgttttgcaagatgttttaagtcatttccttcattttgtttttttttcctcccggaaatctcttagatggttttccaaagtaagtacctcaacaactcaactgtcactcatcaagtgtttgaaatcgattaaagagcatgccttttctgcatcgccatatcctgtcataattattcttgaagaccatctcgccaaaaatcttcaggataaagtttgtcaggttgtttgcttcttctatgaattctgaccatccaggtttctttgactgttattaactgattggaaaattttacttctgtaggcattccgtggaatatttggagat

SEQ ID NO: 73918 - DNA, 326 bp, Carica papaya
  Intron number 2 from transcript evm.model.supercontig_104. 34 (locus evm.TU.supercontig_104.34) derived from phytozom e v7.0 (chr-ID supercontig_104; pos 246520 to 246845)
ctacagatactcaaatcaaatccagaggtaaagaatagtttattaactttctatttgcactgttgcctgttggtactgcagtttggttcatatttcttttcttcttgagattaatgatgactcaaatatattaatattcaaaaccttagaaaaaaaaaaacaaatccttactatttgaatagagtgattttttttttatataaaaaaaacagggagtggggctcattttgattcgtaagttgattctgatgagctaaccaaattgatgaaatttttgtgtgtaatgagcagctattatacttcctgaacagagtgtggcagcagaa

SEQ ID NO: 73919 - DNA, 482 bp, Carica papaya
  Intron number 1 from transcript evm.model.supercontig_14.2 42 (locus evm.TU.supercontig_14.242) derived from phytozom e v7.0 (chr-ID supercontig_14; pos 2708778 to 2709259 reve rse strand)
cagtcagctgcctcaaagacatacaggccagacaggtaaatgtttgtgttttaacacatatgcagaaatatagaaacatattcaggtagataataagttagattcatgagacttactaaaaactaataaatcaaagtcagacatgagtttctcattttcctcgtatgtgatccatagacttgccaaccagctagcaagattgttgttctgaatgctatattggttgcactcctttctattagaaattatcataattaattcatttttgtattcctcctatccatctttatcttttcttaaattcatcttgtatcttcacttgattccttgaattgttcataaaactttgattctcttgcaattaatccaatcttgcatctattagaagtcatttttcaaaatgactttttgttgattccattttctttttgtggatttgaaacataggaaagaagttgccaggctttgtgaagaaattagcg

SEQ ID NO: 73920 - DNA, 527 bp, Carica papaya
  Intron number 2 from transcript evm.model.supercontig_114. 11 (locus evm.TU.supercontig_114.11) derived from phytozom e v7.0 (chr-ID supercontig_114; pos 237170 to 237696)
cccgttgcatattgctgtcagtcaagggcaccttggtaatgtcgcttttctgttgcatatcatagtttcttctctttgccccatccaacattgcatggaatatctacctgacttgtttcacattctcttttctgttcaaatgtcgcttgaattatcctctcagaaatgatttaaggaagttatgaatcttaattctagagaaggttcaacgaatatagtgaagaacatttgtaaggtctaaactgttttagatatcagcacctgtatttacattcttcttatgctatttatttgaagtcaagatagacatgtagagcaattgcacaagaaactactttgaagcatgctgttgcttaagcatgtgaaaggaaaattatcatgctagttctataggctacaagtggaggaaaggaagctactaaaagtgctttctgtttgacttctttttgttcttaagaagaaactagtgcacaaaactcaagtcaaaagataactttatgcagctattgtccaggagctactcaacc

SEQ ID NO: 73921 - DNA, 429 bp, Carica papaya
  Intron number 1 from transcript evm.model.supercontig_12.3 7 (locus evm.TU.supercontig_12.37) derived from phytozome v7.0 (chr-ID supercontig_12; pos 247381 to 247809)
cggaggcaactgaaattgctcgcttcataaaaaaggtatgaaaattatttatgcagccaattaaataattcagcgacgttttacccaacagtttcagactgttgccagcgttgtcacagatttgctttttcagtgatatagcgatattctgttcaggaattcgaaatgattaaataataatagcgacagttttcaaaatttacccattgtttgtaacactcagcaaatttctgttgaggattttctgttttcttataataatataattgtgttttgtccaggaattcaacagagtaaataactcaacatcagtttgtaaatttaccaactatttcttgggacacgcaagtttttcttgcagatttactgctttcttatcgtgatataattgtgttttattcaggaatttgacaggacgtggggagcagg

SEQ ID NO: 73922 - DNA, 506 bp, Carica papaya
  Intron number 1 from transcript evm.model.supercontig_116. 56 (locus evm.TU.supercontig_116.56) derived from phytozom e v7.0 (chr-ID supercontig_116; pos 526215 to 526720)
tgacaagagtacgttgtttttcccctcttaatctttagaaattttcttcaatttcatttgtgagtcagaagacaatgtaaagttcgatagaatgtattcacttgtaattctattttcagattgaattttttcaagttctaatccaactagttaatatttatacataaaacatttgctccgaaagtagcattattattctttagctattagttgtctgctactaaagttgataacgagttgtagttcatttggtgagaccatacataaaatttgaattcgactaatcaattttctaataaaatattatatcatctgagttagtattcttaactgtttttcatattcttttctaagtttgtaactcgtgagcttctaaatttttcggataatgaaagcttacttaaaatataaacaagaactaaattgttttcttgtgcaattctgatggttgcctgagttgatataatataatcttttgcagctagactacgcggcgagggagaaaa

SEQ ID NO: 73923 - DNA, 915 bp, Carica papaya
  Intron number 1 from transcript evm.model.supercontig_128. 24 (locus evm.TU.supercontig_128.24) derived from phytozom e v7.0 (chr-ID supercontig_128; pos 187083 to 187997)
tgaggttattcaagactctgagattcaaacacaaggtttgtgcagtaataaatgtatatgcttctctattgattttccttttaggtattgttagtttgctattcctttcacctagtagcagcattgtccttgattcttctcttgtattgccttattggcttttgtaatgtgtgaatatattgattattactttatcatcagcagtgattagggatgtgtgtttgaacatgaggcatctgatgatttgagttagagttaatatggaggtaaggtagtattaagtgttgacttggagattgaattttgatgtcaagtttgcttgtgtatttctttcgtgaaaatgttatttatttaggaatgaactaaaagtaggaaaaaagaattttttgctatatgaattcaatgtttagtgttagttggtcaaaattattgttctaccccatattatgtcctagctttatgattacaatagcttccaaagattaggttgtggaaagcttttgtggagattccatctagttaagcataatcaattagtagacacagtggccattttggctagacataaccattgtttggtggtcactttcttgatatctatgttgccatgctttttcttgtgttgaagttttggagttgactaaaaatgtccaattacagctgggggtttttgacgtgaatgatgacttaaaatgttttgaactgagcattgtcaagttttaaaaaatgttgaaaggttatgcatctgttttgtataatgttaatagtgtggaaatgtgtatgaaatacttagtacattgtttttttcgtctcatggagttttgctatttttgtgagtatgatcctaatgacttttaccctatttcacctgcgcttttaggagaagctcaagatacaaaacgtcatattagaacg

SEQ ID NO: 73924 - DNA, 578 bp, Carica papaya
  Intron number 1 from transcript evm.model.supercontig_13.2 0 (locus evm.TU.supercontig_13.20) derived from phytozome v7.0 (chr-ID supercontig_13; pos 231889 to 232466)
ttctcccgtctctgttgtctccaatttttggaaaggtaacatcattatgtacaattttgtatgtaaatgtacttcgttttttctgagcttggcgacaattgttgaagtgcttgtagtcggacgaattgcattcagatgtcatcactagatagtggggtatcttatcaggaacatgaagttatttatggatttgattatgtttactaagcggatacagttggttacttggtttgattcggtactgcagccaagagaatggtttaagcttttcaataggctgttagtttcgcgcatggttatttgtactgtacttctcttcttaataatcatcatggagaaatgcttatatgttttgtgcgtaatgtaacattattcttcaagaagccattttctgctctaggagctggactgtttaataattttttataatcagttctctttaattggttctatgcaaatgtgtggagcaactttttctttttgaagtatttgctgatcagattgtttgcttttttcttttttcttttttttccttttttccagaatttgaattggaaaaggaaaaaagtgtgctcgat

SEQ ID NO: 73925 - DNA, 760 bp, Carica papaya
  Intron number 1 from transcript evm.model.supercontig_102. 18 (locus evm.TU.supercontig_102.18) derived from phytozom e v7.0 (chr-ID supercontig_102; pos 635086 to 635845)
cgatgtaaattaagtttctattctgtacacgtttctaaagctattgctagttttaagcactgaatagtgttgaattgtgaatcctgctttattaatattttgtgagtatcttgtgtcatttctttagcttgacactttcgttacaaacagtttctacaaggtttcttcagtgctaatgttttataacagtacgtgcatggtctgagttctctactccagcatgtactttcttggcgtctttataaccagttctgtgtgtcttcttgtacctgttttagtcaaatattcttcgattctgtctattgtttgtttttttaaccattttttcctcggacaaataaaaaaaattatgttgtaaagttgattgaataattagcagagataaccttgtactactgagtttgagatctttatttggtgttcataatgtttatgtgaatgaaattaccagcagtgatatttgaagtaactttttctttatgtttgtgttgtttgtctgcttatatttttctccatggtgcatgcatgttttgatcatgtccactgaacggagtaattggcgagctggaatattgggtttgattatttttttgtatttctaaattctgttgatggcgttacttgtaaactatttggaaggtttattctgatagaaaataagtacttattagatatctttatgaaagccttttgcttatcatgtttgactttgacatttggctctgtagagggcaactcagttggaaggttcatcagaaga

SEQ ID NO: 73926 - DNA, 407 bp, Carica papaya
  Intron number 1 from transcript evm.model.supercontig_119. 28 (locus evm.TU.supercontig_119.28) derived from phytozom e v7.0 (chr-ID supercontig_119; pos 145036 to 145442)
accgcctcggcttatacctgctggctctcaccaaggttcactttctttgctgttttttccttttcttttcttttttgaaagaaaatagactttccaccacactttcaatttctgaataagttgcagacattagattttttattgtttcaagttgttctctgattctgatggaaaagaatcttgttgatcttgtctggttgcttagaaaacttcttttaaaaaaaaatcaaaaacaaaataagaaagcttctgtttgttgagtttctttttgctatagattgtatgtgcagaaatagaggaacttaatagttatcttgacctttaaagaaagttgagcagttcttaatgctggagccatgtctggcgataaagttgtttggtttctccttttatcttgcagtcctgtg

SEQ ID NO: 73927 - DNA, 427 bp, Carica papaya
  Intron number 1 from transcript evm.model.supercontig_107. 48 (locus evm.TU.supercontig_107.48) derived from phytozom e v7.0 (chr-ID supercontig_107; pos 228319 to 228745)
gtagttggcgtacacttcctaagcttgcaggtttcttcttcttcttctttaatgttggcatctggtttgttcttcttccatgtatcaaaagcttgctttacttctgtttcagtggatttgcgcttgaaacatcttattaactgagtcttttcttctgggtgaatggaaatgtcgactcttgtgccattgttaatgctttgttaagtcaaagcaatcacctttttgaagtgttttgaggttttttaagccaattttctgtgacattttccacttctgtttcctacaagttcatgtttctcttggttttttatacaactccagtcttcttttaagtttttaaatttcaaaagtcttgaagctttagaagattctgagtgaatgagaacaattaggtctgagtcggtgtggtaagagctgtagacttcga

SEQ ID NO: 73928 - DNA, 966 bp, Carica papaya
  Intron number 1 from transcript evm.model.supercontig_115. 13 (locus evm.TU.supercontig_115.13) derived from phytozom e v7.0 (chr-ID supercontig_115; pos 334133 to 335098)
acaacaccactcagtcaaattcacctcctgtccaagtaactgctttcccctagctaacgttgttttttgttttcttcatgttaaacttggacccgtatgtggattttccctccttattttttagttcctttagtttttgtgattttcaaacttgttcgtttatctttggcatgtattactatgtagtcgtcttcttttggttttttttttttgtgagaaattgactttattttttcacgcagggcagattgagtttaaggtttgaccaattttactgcatgtaatttttagggtttatgttgatggattcttgttggtcaacgtgttcaggtgtctcggcgttatgatcgcatctcttttacagttctattgcttatgagattttcactttttattttattttgacctgatagattggaggtctaactgatcaagcactagaaagtcagaatctttgccgttgggaattctgcattgaaatgtgattttctcccggtttcggtggtggagtagaattcagtggaatttgatgggtccttcacttgttcgaacttccacataaacattaaattaaacttaagagagttatagatcgtacattaatatgtgatttaatgttttgattggaataccttattcggcaattaattttcattttcttacttagtggttgccactcaccacgagcaactgaggaacctgagaagtgcttgtgcatatttatttttcagctctaacggggagtttatgtgatatcttaaccaagttaagaggtagcagattattatgttatggaatttaaacattgcataattttggtgtcaatttttggtttcattggttgtggacttgcagatgctttagaattaactgttgactttcattgtactgctctgtggatatcttctttaatcgtttcgattgacatcaggagtctccattctctaattacataagcaatctatc

SEQ ID NO: 73929 - DNA, 845 bp, Carica papaya
  Intron number 2 from transcript evm.model.supercontig_116. 57 (locus evm.TU.supercontig_116.57) derived from phytozom e v7.0 (chr-ID supercontig_116; pos 539811 to 540655 rever se strand)
tcgctattcccgccctgcagtgactagccacactggtaattgcagcacccgctctgtatttggttatgcttcgtctatgtttctatttgctttgttcttctttcagttaccaggagataatcacatggcgtattagattgatgcttaatttcgcggaaatgcatatatggatttgtcttaggttgagaaattgctcagtcgttgcagagtgttctgttccatttactcatggagttgtatgttctttaagttgctttttatctgagcctgtgttttcggttttggggagctgtcatctaaaaaatgtcattggaacggatgaatttcattaaaagaatgtggaattcatttttttgcgtccaactttttatgttttagaataattccaaattatggaatttatattgaaataaattgcatatggaattggtttatcggaaaaaaaaatcatatggttttagtcaaataaacatttcaggtttatacaattttaatggaattgggtaaatagttggagaaaaaaagtttgacacattttacgttaatgcttgtgtttttgcaatctaattaaattccatcaaatgttaaaaaacattgttcagttcaatttacaaatgaagtctagtttcagtactcatttgatccaaacgaagccaaaagtcttaatttctttcagttttctttgagaacctaattatctttctgttagtttggcaagcaaaaagagctatggttagggtatgtttttgttttttcttttgcaaacagctgcataaattttcacttgtatcttctctgatgtggtgttagggaagtctggaggggatcgtttcggcagtatttct

SEQ ID NO: 73930 - DNA, 523 bp, Carica papaya
  Intron number 3 from transcript evm.model.supercontig_104. 20 (locus evm.TU.supercontig_104.20) derived from phytozom e v7.0 (chr-ID supercontig_104; pos 156129 to 156651)
attctccttctgcaccatatccgctagaagttgaggtgatatgttcaaatttacatgctttcattcttgatttggttcttaatgcttttcctactttattttgttgttgctcaatatgaagaatttctttttgtttttgacgaactcttagaatttgtttagtgttgttttcatggcagagtcgaaggaaacaagtttaagagtacacttgaaaaatcttgtgtttgtaaaacctgaaaatattttaggagtaacaacttagattacatcggaactgataggagtgggggattatactagtgttgacactgggcgaagagaaccatgctttagcaagagcatactactataggtggactctaaggaaattcttatgctgtgccccttgttgcttaatttcttataagaaaaacttgcaaggcactgaaggttgggaaagcttcattttggcaagacatacattcaaatgacaatctaatttcatgcaggctgttgtgactaatcatttggttgttagaggcag

SEQ ID NO: 73931 - DNA, 605 bp, Carica papaya
  Intron number 1 from transcript evm.model.supercontig_10.2 50 (locus evm.TU.supercontig_10.250) derived from phytozom e v7.0 (chr-ID supercontig_10; pos 3011308 to 3011912)
attctcgagtatgtattcacgtatataaacattctcatgtatgtatttactcttatttctaacgaagcttttacttaaacaaaagaaaaaaaaggaagaatcaaaattttctccatactgattccttatgtgtacgcatttacatacatggatacatacggattccttctcgatattgatacacgtacacatatatgtatatatatacacatcccatccttctaattagtcctttacttatatttccttaaaaacttatatccatatatatatatattaaatttggaagcaacattattggtaagatcaagttattcagtaattaatattcaaatattttactacgtatacaaataaaagttatacgtcaataaataatttaataaagtttatttgtacctttctatatatatataaatgtatatatacgacacgcatataaatgtagatttatagacataataagctgattacttgtgcgaaaaaaatgtcttttaattattttaattgtttttttttcagcaattaagaagaatatcttatttaattatcgttaattaatatttgatttgaatttattaaaatgtaaaggcttttagcaaggc

SEQ ID NO: 73932 - DNA, 551 bp, Carica papaya
  Intron number 1 from transcript evm.model.supercontig_135. 33 (locus evm.TU.supercontig_135.33) derived from phytozom e v7.0 (chr-ID supercontig_135; pos 498448 to 498998 rever se strand)
agatcgactccctccaccagtccttcaccgaaaaggtctgcctttcttctctctgtcttcaatcttccatttcttgtaccaaagtgtaaaaaacatggcaagtgcgaaaagaaaagtcaatgaagctgcctcgttttgttttgcaaaataacaacctatgttttatttgtcttcgagattccgagttcagtttacccatatatttaatatagttagaagcgatgagaacatcaattttttccctcttatctccaaattaatgcgcaaaatcggttccttggtggcgaggcattttcctacgtcaaatttaaactttgtagaaagtgaatgtgcattactgttcttcttacttaggctgtgtttagttgaatcaattgaaaatcctgccttgtttgattgcgtaatgtatttcagtgtattttaccacttccttcggctgttagctgcattctataactagtttctttaatgtgattttgatttttgtaagcaagttaaggacaattgtggatgcagggaatccgaaatctttgttgtgagctgttggattt

SEQ ID NO: 73933 - DNA, 827 bp, Carica papaya
  Intron number 1 from transcript evm.model.supercontig_13.2 20 (locus evm.TU.supercontig_13.220) derived from phytozom e v7.0 (chr-ID supercontig_13; pos 1943487 to 1944313)
gattggaattcattgattgttgcaggttaataatccctcgtcagcgtgaattatttaactttagtgatgctttagttttacttgtgaaattggaaattaaggccctgtttaattgtggataactattttgattttcactttctaaattcttatatactagcacacaaaatatagtaatgagtttgaaaatagtaaaatcatgtttctcagatcatactatcttatctctcactcccaaatcaagctttttcattttccttttcttcattaactaagaaaaacatagaagaattcaaagattgaaactcaatagttttctacaactaaacatggcctgaactttttgctacgtatttcagggcattcataatcataaataaaaaactgtgacctcttaagatctcagcgatggagaactttcttgatctacatctgtgcaatataggattgggatttgggcagacagtccaaaatttcaccaaacaaaattcataaccatccggtttgttttgtgtagaaatctgacttatcataaaagttcaattcccatataaatatgtatttgtaggaattcgatttcttgtaaaaattcaatgtttatacaaattgtaatctgacttctatgattaaaagatatttttttttttatatgactgatttatatttagttttctattaaaattttttcttatatatatatattcaaatattgtaatttaaatattataaataaaagttcaataaaaaaaaaattatttataaatttttattttgtatatgttggttttgtagaagcaaggaggaggaagtttcttgaactgtaccca

SEQ ID NO: 73934 - DNA, 961 bp, Carica papaya
  Intron number 1 from transcript evm.model.supercontig_116. 21 (locus evm.TU.supercontig_116.21) derived from phytozom e v7.0 (chr-ID supercontig_116; pos 151519 to 152479 rever se strand)
ttcctcagtacacacttgttggcattgatactcaggtttgtgtcacgattgctatcacttggtttggttcctgataaaaaggttgatggaaaatggggggcgggggcgggggggagaattaggatgtaaacaatgcattcccccctctgatggaggtttattgttcttgaaagaaagtatttgattttgtttagctaagcttttatattggaacttattttggatatggaacatcggtataaaatgagtgtttttgagacaagatggaattttttgtttgctgcttagttgaataatgatgctttcttgattgatgtaaagaagcttgcttgtccgagcttataagtcgtgaaggaacttaagtattgccctcattcagttgttgtgagaacttaggtctgatttattttttctttcaattgccatattcagattttatattttaagatttgacttcttcatcaccctcgcaatagattaatacggaaaaccatttgcatatttcgattttatatttgaagttttgacttcttcatcaccctcttagtggattaacacggaaactatgtaaagatagatgaataatttcgaagaattagtattgatcatttttttggttgacatgatcacgatttgacaatagtttttaattttcgtgttaggtacatttctgtatccacgttattaagctgttgtttgtaaattggtccttttaaacgtacttgcttgcacaaaagaatgtcgagttggcgtttactgcattcgtgattgaatctgctctttgagcttcttcttttttataatgtttattttattttatatttgacatctgcatagttgcttctaactttgtagtcttcgaactagattactttaagggcactagattttcctatgattttaatgttccagataacatctcttgtttacgtctctcttgaacagcaaagttactttgcag

SEQ ID NO: 73935 - DNA, 552 bp, Carica papaya
  Intron number 1 from transcript evm.model.supercontig_113. 3 (locus evm.TU.supercontig_113.3) derived from phytozome v7.0 (chr-ID supercontig_113; pos 25730 to 26281)
tttctgcagaagggttctcgagtatgttggttattagtatactaaacactaacaacttttctagtttgagaaaatttattataatcttctttgtagtgtttgtgccttcccccagtctggtctgatttatgttactaatgcttttgtagcttatatggaaccaattatacattccccattaccaaaattttcaatttgtaaggtgaaaaattttggactaggttcataatggaaacatgggttatagtgtctatcagtagtatggaatatgaattgctctggtttatttttgtatctgtgagcagccagcagcctgtttatcttattatgattgaagataagttgcatacttaaattcatgggtatttaatggaataatggattctggttgtgatgattttcaatcaaattcatgttttttactgaatgcagtgccagttttggtttttgcttgttttatattttctacttgtatatttgctatttctcatgctaggttgtattttcattttcttgtcaggcttctgtattatcagatccaaagagcaaatc

SEQ ID NO: 73936 - DNA, 537 bp, Carica papaya
  Intron number 2 from transcript evm.model.supercontig_13.2 40 (locus evm.TU.supercontig_13.240) derived from phytozom e v7.0 (chr-ID supercontig_13; pos 2098423 to 2098959)
actcctttctggccccataatccccctgattacaggtatttttatattatatatatatatgtcttctctctcaaacgtcatgtgggtcactgaaaacaaagtattgcatataccagtaatatatgcggatgagggtatacgtaatttgcaataaccatacatgatcccggtacatacagaactagtttgttaatagtttaattaattctcaggtgttcattttatcttttgattccatctgactttgtcgatggtcattgctcatatacatgcataattattttattatattaaacacaccgcttacgcttgcttgtcgcatgtgattatagttatatgagctatgaactatactcgagaaataaacaaaaatgtaacagtatgccatgtgacctcaaggttaatttaaagcttgcccattacaacaacagatgcaatgaacttagtcttgtgaaaaatacatacacccagatacccttttgtgatatatatacatatgtagagtgtaactatgtatttcattatctcaggaaaaaa

SEQ ID NO: 73937 - DNA, 307 bp, Carica papaya
  Intron number 1 from transcript evm.model.supercontig_12.2 81 (locus evm.TU.supercontig_12.281) derived from phytozom e v7.0 (chr-ID supercontig_12; pos 2572015 to 2572321 reve rse strand)
ggagcgtgttttcactgatttgaaatctgatctaggtatctaagttttccttattttaaaaaaatcttaatgaattccttttaatatctatcgcaggttttttgtttttagtttatatttactaattttgactgttaacagataatcctctcattacgtttctctgaatttattcgtctttttatattttacttttttatttatcgtactggattggatttttgctgttataatgaaaaattgatcaccgagttatcttcttgattaatcggcgaagattctgataagcggtcaccgaaggaagacg

SEQ ID NO: 73938 - DNA, 585 bp, Carica papaya
  Intron number 1 from transcript evm.model.supercontig_13.2 34 (locus evm.TU.supercontig_13.234) derived from phytozom e v7.0 (chr-ID supercontig_13; pos 2024191 to 2024775)
gtagagcttttggtattgaaagtagtattaatagattaaaagatagatgaattcattattttgaatttattttgttaggttatgacataattagtgatgtgcattttaagaacgtcataaatactctaatattattgtaaattttttgtatatggacggtactcttgtttttagtactttgataatatatatcttacactttttatctcaaaaaaaatttcaaatctattatgcatcatcagcgtgaagaaattcatatccatatcttattttttaaaaaaagaaactcatatccataggatttatcgcagtagttgtagttagtaatgggctgtgttttttggaggatgaaaagaaaacctgagttgggttactattgataaaagaggaccttcaattgttaatcagatatcattcccacaaaaacataactgaacagtgaaacattaaatttatcattcatcttctatattctgcatgcttatgacttaacacttgagaaatttggatttgatttcatttgacattcgcttgttcgattctcatgtagggtgatttaagtattaagtatcgacacattccgag

SEQ ID NO: 73939 - DNA, 386 bp, Carica papaya
  Intron number 1 from transcript evm.model.supercontig_11.3 3 (locus evm.TU.supercontig_11.33) derived from phytozome v7.0 (chr-ID supercontig_11; pos 453083 to 453468 reverse strand)
atttgcgatatataagaggtgcaacagttcatactctgctccctcgattaattagatttattttcactttaaatctttttgggttttgatggtttatggagtatttttactgataggtcgtcgttaaaatttgagaaaatttgttgaattagttggtaagaaaggtgttggatttttgctcttgtatagtttatctttttggtcaggcattaagttgtagaagtcaccatgaagatctgacgaggtgtttctatatgggtttatgatgcaattataaaataatgctcgtagttcatacagttttctaattgaatgtattaaacaattatcttacgcctttggattgtgtaattgatgcagttgatttgccaccatcgttctcttcc

SEQ ID NO: 73940 - DNA, 738 bp, Carica papaya
  Intron number 1 from transcript evm.model.supercontig_139. 35 (locus evm.TU.supercontig_139.35) derived from phytozom e v7.0 (chr-ID supercontig_139; pos 217155 to 217892 rever se strand)
cagcccgtcggtcgcggcgcatacggcatcgtttggtaactttcttcccttccttttgtttttgttcgtaggttagtgcttttcttgctttctgaaggttggaaaaggatttttggtttacttgtttggatttgttttagctttctgttaatctcaagtagtgagctgttagctccgcgtgcgtgtgtgcttgtgtgtgtgtgtgtgtgttttttttttttttttccttagaatttttggattgacagttgtgtttctatagattggatgaggagattcattttctttttttactttttatgcttcgaagatgatcgaatttctgttccaagtagagcatagatttggcaaattgagttttgtatttaattttgaaatgagtttttttttttttttttcaaaaatgttatagattttaagtgatatattttgaatcaattttcaaaaatcttgagcgggtaaggaagccatattctgttgcttacgtactaaaaatgtacttatatgagcacatgaaacttgaactggtgtaaaattgcctactccaataattaagagtaggctcattccttaatttgaattttgaagaaactaatcttagtatgttcgatatgtttctcttgctatgactcgtttgtttaatgttagaattctatgttttagattagtagcatgtgagatttaaactttgcatgtggttataatggtggatatatatttttttatcacagctgtgca

SEQ ID NO: 73941 - DNA, 532 bp, Carica papaya
  Intron number 1 from transcript evm.model.supercontig_10.1 3 (locus evm.TU.supercontig_10.13) derived from phytozome v7.0 (chr-ID supercontig_10; pos 229440 to 229971)
ccgtttcgtccattcatccactgataaaagttagtgcaacccatgtgtatatatatacatatatatatgcacctgtttatgtatatacgttttttggaataccaactgtttgatgtatggatattaccttatataatgtttgacaagtgaatctggcatgcaaagtctaggtcttttcttagttctcatataccaattaaagattgactggttattgatgaggaaggaaattaacaccttatagaatgtaaataaaaagttttgacctctaatgaaatcttgatcttcattgattctctctggaaaatctcaagtggaaggggacattcgtatgcaattttgtgagtattctgctgcaaatattggaatttccttcacatttttgtttgaggaaagcttagagacccaaatcgaaatttctcgtaactaaatttccatcaaacaccttgtttgtttcattgctttccacaattatacagatttctttggcagactaatatttgttcattggatttcgtagtttcagccctca

SEQ ID NO: 73942 - DNA, 557 bp, Carica papaya
  Intron number 1 from transcript evm.model.supercontig_113. 45 (locus evm.TU.supercontig_113.45) derived from phytozom e v7.0 (chr-ID supercontig_113; pos 589755 to 590311)
agcccaagtgccgtacggtcgtcggtgtactggaggtagtctttgaatttcgtttgctcactgggaaaatgaagggaaaagaaaggaaggaaatagtgcaactctgttgtgttctgttgctgaaaaaatctgtacttttcgggcttgtaacaattggttttggaaaaaaaagcaaaacaatcccaatggatcagcagaaatctttgaacttttcttatctctgaggatttttatttaagactttgattagtgagaaactaaggaaaaaaattttctttagatttttcaatattctggaccgtaggaaataacgttttctctactactaggctttggaatattgtggtatattggagttgttatttattctttttttggaatattacttttgttgttcctttttttaatgaaaattttcagggcattgcctggttcgcctataataagccatgctcattttagatcaaataacaagatttctgaaatgctgttattgtgattctattgtcattatctttgtaggaggctttccataaatttatcggccagccggtttc

SEQ ID NO: 73943 - DNA, 505 bp, Carica papaya
  Intron number 2 from transcript evm.model.supercontig_123. 46 (locus evm.TU.supercontig_123.46) derived from phytozom e v7.0 (chr-ID supercontig_123; pos 584246 to 584750 rever se strand)
tcttcctagttccccaagttgttttagtcactcaagtacttctcatttacccaatctttctgtctgaggatctgtataaaaatttgcatgtggttgtttgataagtttttaaaattttactctttgttcaaatttatgtcatttctatataaccatttgttcactaggaagattggtcgcattattttgaagtccagaaatttttgactgaaaatttactttgtgtaaagcacttctttttcaaatttttagcatacaattattttgacaaattctttcaatcggatgttgacaaaaaaaatgaacaaagttgtagggtatggcatgatagttgaagctagagcttaagatgaggcttttttctttcttttttttcacgctatatatatatatatatatgtttctctttgttccatttgtatggctttaaaacgaacccaaaaatgtttgaaaaaatttatttcttttggttttttgttgtttttagcaagcaggagctgtagaa

SEQ ID NO: 73944 - DNA, 224 bp, Carica papaya
  Intron number 1 from transcript evm.model.supercontig_0.73 (locus evm.TU.supercontig_0.73) derived from phytozome v7 .0 (chr-ID supercontig_0; pos 2633136 to 2633359)
ttgacaggtactcaccaacccacaactaaagtgatgatgatgattatgcccaccttaacccatcaaaattgaaaaagataatgaagatgatacacttgactcgctctgtgcttttgatttgtatgcttgctactttgcgtaattctggtctttttgatctgctagtgtgtttttctttttcatctgcagtcaatacttgtcagagctgttagctgagcatcaaa

SEQ ID NO: 73945 - DNA, 963 bp, Carica papaya
  Intron number 2 from transcript evm.model.supercontig_0.73 (locus evm.TU.supercontig_0.73) derived from phytozome v7 .0 (chr-ID supercontig_0; pos 2633394 to 2634356)
tagccgacttttgaatcaaggttgctccttaatgtttcacttttggatctaggtttttctgggtttatcttcttcttatctcttttactttccttttctctattacccaccatggaaatgtgtgtttttctgggtatagatccatctaattgtgctttttttgcttgaaactgtagtttgtttttgccaattcttctctcagatatatttacctcgccttgtaccatcttttattgtggaattgcttatacttatagccatagttccatcatatggtgatacgcttagtttctgatttcacctgatattatcattttcaagagtttaaacttccggggtgaaaggatcgtgctctagcttttagtaagtcggggtcccaagagagcttgtgtataccttagtaatgtggataataaattgcggccaagcttatgtaaagctctataatgtcaaggacttaatggggcttgattagcttccttcacttacttgtgcaagaggggtctgtctcatttcacgcattgctggatgttcacttgtagaatagaaaatggacagttgatagtgagggggatagagttggtactttatttatgttaacaatttcttgattggggttcataaactttccaagtcacaaaacttagcagctgctgggaagcttatgcagaatatggaacagcagaattagttgatatatatatacatatatactcatgtatgtatgttggatgtaacctttcatattaatgaactttctttatggattttataatgatctgacttctgttgatgactttgaataagaaattgcctgtataaaacacaatcgtgtttatgtgtttgttttttctatacccttttgcttttgtcattgtatatgggtgcggttgtctctactgatgatgcatatataatcatatggcaatctcctcttttgcagagatatttcgggtttctgga

SEQ ID NO: 73946 - DNA, 1032 bp, Carica papaya
  Intron number 1 from transcript evm.model.supercontig_1250 .2 (locus evm.TU.supercontig_1250.2) derived from phytozom e v7.0 (chr-ID supercontig_1250; pos 10641 to 11672 revers e strand)
gcaaaacccgcttggaaatcgagttcccgtaatcacttcttcatccttgaatctttcttttctgatatttgcctcttttaatggtttatttcggccgcgtttttttttttgtttctatattttatcttcttcccaggaaattagtcggtactaaggaaattacatttgtagcttgtaaatttcgggttatgaaattatatatatatattatatatttctcctgaaaagcttgagtctagcatgtgtttaattgtgcttgattgcctgaagtgattcattgagaaaacaaattcgctctcagccttcttttttttttttttccttgcaaagcgaagagaaaattaaatttagccccagtttacttgctagttcattgttttttcccaaacaagcagcaaagctgtaatctgaaatcagatagtatcctgaactagtgagatggggctggtagctaaactgggataagatttcagaaataatttgacatagttaactaaaggtagggagggacaaaaatgaggaagctgaatcatagtttttaaaggtatgtggaagaaatttaaacatttttttgtaaaatttattcgcaaattcagatttagttgaatcaaaattttctccaaaatgataaacatttgatctcatataaaatttcaaatgtaactgaaataataacttctgatttcatcaaagttgatggaatttggaatacattaatctaattacaaatgaatttaatataaggttaattttaatcatcttataataaatttttgtatttgttccaaacatagcacaaaagttattgaaaataagttagtaatgcagcaagaacttaaggatcatttatgaattgaactgttatcatttttattaatatttctcggtttttctactatttatgttttttgctcggttttcattttattcttctaacacttatttctatttcttctcctccttaaacctttttacttctcactttgtgcatctccaggcccctgccgagcaacatttcttcttacaaggtac

SEQ ID NO: 73947 - DNA, 241 bp, Carica papaya
  Intron number 1 from transcript evm.model.supercontig_106. 118 (locus evm.TU.supercontig_106.118) derived from phytoz ome v7.0 (chr-ID supercontig_106; pos 957321 to 957561 rev erse strand)
ctccattctgaattcatcctccctccaggagtattctctctctctctctctctctatatatatatatatacatatataatgtatttttctctttggttttttggtgattgaaatgatagttgcgtgttaatggctaaactttgaattttcattctatatttcgcgaactcttcttggtaacagacatggcttggatgatctttcaggtgggaagaaaggcttcagacatctcacttgccgg

SEQ ID NO: 73948 - DNA, 1016 bp, Carica papaya
  Intron number 3 from transcript evm.model.supercontig_135. 44 (locus evm.TU.supercontig_135.44) derived from phytozom e v7.0 (chr-ID supercontig_135; pos 660629 to 661644)
ttcgtagctcacctgtttccgcatttgctttgggggtatgtgttattttattttagtgactcaaacatttgactttggtcttataccttggaggcagtttatattttctgttcttagtgatgtattgctttggtgctccaaacagaacaattcttctaatatttcttggaacgctttcactaatgtatcactgtgcaacttatgacacgtgtttaaaatttgttggttatgctaggaatgagtgaattatttttgtggaataagtgtgattaaaatttgatatgcaatttcttcaaactctttatagtttcttgcttttgtgatttcttattagcactttctgtacaatatttgctgtttagcctaaaattaaaaatctagtttgcccattcagtgaggcatatccatatagttgtgcgggcttatgttacctctagttttttcctttcaattttgaacttcctcgaaagagatacttcctttttttttttttgtgtgacattaaacaatatatggaacctgcgaagaaacacgtacaaggtataggttgcatttcagctttctaactctcatacgctcataaataaaaaaacatgtgatacttgaaaatgaataggatgggtgaaagacaaaagtaacaataaagtatgcaccataacaaaagtttctttttcttttgatcgaaaatataataaaaggttgcttttagtgttttcaagagtgttgttcttgtttttctaattaatacttttatgtatcatccaccacatgttactatacatattcttatacatatttgtatgtataacatacaatttatttcatgtatcaaatgtcatcattcatttccccaccttttttttagcatgttgaacttttttcgatgttttttttagtaaattattctagattgacttgtgagcaaaattctgagaagcattctaaaggtgatatggtgtttctttgcatatccttttacaggtttccgttggctacttccttgctgatcttggaat

SEQ ID NO: 73949 - DNA, 470 bp, Carica papaya
  Intron number 1 from transcript evm.model.supercontig_1118 .2 (locus evm.TU.supercontig_1118.2) derived from phytozom e v7.0 (chr-ID supercontig_1118; pos 6285 to 6754)
gacagatctgcagggtaaatatatatatacatttaattatatctgttattttaatctatttttattttattttattatcttttattcactaataaaatattatagtaactgcgtgtatgtttgtgtatatacacacatatatatatatatatatatattctctaagagcgtatgtgtatatatttgtatatatcttctctaaaaatggttaggcaatttttaacttatttcttttaggttaaataattaaattgattatcaaactaacagatctctaatattttataatttgatattatgaaaattaactcatctatactatctaagctcttctttctaatagttattatatatatatatatatatattgtttgaaaagttagaaaactttgttaattttataataactatttaatatcttataaattaagttcttttacgttaatatatgcagtattattacgatataa

SEQ ID NO: 73950 - DNA, 668 bp, Carica papaya
  Intron number 2 from transcript evm.model.supercontig_134. 7 (locus evm.TU.supercontig_134.7) derived from phytozome v7.0 (chr-ID supercontig_134; pos 417577 to 418244 reverse strand)
ttcagcaatatttctagaagttgcagaccgagtaggtatgctactgtccttctgtttttctcttccatttagttaatctagtgagccttatgtaacctagaatcataataagatattagggatttgttagaaattaattagacaaagctaaacactccaggaaactagaaattaatctcatttttcacaacagttgggcgtattgcgtaaaactattcttcaagctttcaatccaaccttttcttttgattctttggcttgttgctgctatttctttgaggtaagatgggtaatagtttagttcatataaagatggcatttctagattgcatttaatgggatgtgttctttaaaaatgcataaaggaagtggatttttaaatggaaaaagggtgagtcttgtgcttgataattatgtaattagttttaattgtattaaatatgtttttgttatgtttgattgtgatggatgatgatgaacgtcttaaaagcaaaaaagagaagaagagggacagaaaatagaggccattagcctctgttaagcattcgggcatcaaaatgcccctgaaatcatgtttcacagtttgttctttgctgcacgtgaaagagatggattctaggtacaaatgtataacttataacttcctctagtagtttttcaactcgaag

SEQ ID NO: 73951 - DNA, 556 bp, Carica papaya
  Intron number 1 from transcript evm.model.supercontig_10.1 07 (locus evm.TU.supercontig_10.107) derived from phytozom e v7.0 (chr-ID supercontig_10; pos 1661189 to 1661744)
gtttggactcggtgtttatcactcgggtgttcaaggtttgtaaccttcttcattttttaatgtcaagagatttctgtattactcttcttctctttctcttccctgttgggttttagtgagtttgtttttttattttttttttgaaatttttttgggtgaaatttgtactgtagtttagatctgtgtttgagtttgtttcagtgtttttttgctgttccgggtttccttcaataatgcagatcactgtacacccacccacccctattaatatatatatgctgagtgagcttcaagtgacctgatttgcagatttaggaagaaggaactgttttgttatatttctgtttggttggtcagaaaatgggagaccaatgtgttatccctttctacagtttttggagtatggtaatttatggaataatcaaactgaaggaagttcaattttcaattatcgagatggatttgtggaaaaacccaggaaaggaaagaattgaaaatgaatttggtgtttttgtagatgaggtttaattctaaggaaattgttttgatgcagttc

SEQ ID NO: 73952 - DNA, 546 bp, Carica papaya
  Intron number 1 from transcript evm.model.supercontig_109. 5 (locus evm.TU.supercontig_109.5) derived from phytozome v7.0 (chr-ID supercontig_109; pos 56120 to 56665 reverse s trand)
aagttccttcagaagttcagaaacagaatcgataagtatgttttatttttttcttttttaacagtttttatttcttcaaattttagtttctttaaaaaatttgagaagattaggacagcttatacattcagtatatatattaatcatgggcatcttaattttcccaattattatatcaaattatattttatataatgtaattatagaataaaaggagggtatgaatattaagaaacaagttgcagaataataattgtagttgacaattccccttttatattaatttctattttgttattatttgctgagtaaagacaaacaaattaattcagtgcaagaataattttttttacagctttgtttgcttttgcttcataagagaatcaatcattcactatctttacctaatttgaattgtttaaaatttggagcagataaattacattgtcgattaaaaactattacatagaattagaatttagactaaaattcaatgttacgttaattacagggtgggaattcggctaccaacagtagaagttcggt

SEQ ID NO: 73953 - DNA, 574 bp, Carica papaya
  Intron number 2 from transcript evm.model.supercontig_1.23 4 (locus evm.TU.supercontig_1.234) derived from phytozome v7.0 (chr-ID supercontig_1; pos 3282416 to 3282989 reverse strand)
agtacattttgttcagaggaagtgatatcaaggtatcatgttcagggaagcacttggttttactttagaaattccttcctcatgacaatgttccaagtgatgagatttttggacttattaatatttctttcaagaaaataccacttcaaatatgctcgggacattctaatggaccagtgtgcaagcttccttaattaactatttacgaaataggatttcaatttcttttttctgtattttcaactataagattagtcgagagtcacttgtttgattatctttcttctctactgtgttttactgtaaattatttccttagttggacaatgatcgagttactatgttcttacttctttatttcttaatagactgtgagctgttatacagtaaaggtaaatggctgtctagaacataaaataataccctcattcatataaaaattttaggtactcagtcgactttgtccaggttcttccttttcttgtttattttcatcagaattgttagtaacattgaaatattttttgtgctttttacaggatttgcaggttaaatcttctccacctgttcagtc

SEQ ID NO: 73954 - DNA, 754 bp, Carica papaya
  Intron number 1 from transcript evm.model.supercontig_1.23 4 (locus evm.TU.supercontig_1.234) derived from phytozome v7.0 (chr-ID supercontig_1; pos 3283024 to 3283777 reverse strand)
caacaccgaggagtccagtattggattgagaagtgcgctttattcgctttgttttcttgggaaggtgaggtcgaggggtttgcctcgtttacttgaatttcaattttcttgtttgattccttatgtgcaaattgattatgttagttgattttatgatatcggtttgtcattttcctcctaaactccttaaaaccatttcccccagaacgttgtctatatttcttatgctttttgtacattaagagctagacaaagagaaatagaacaacgtaagttcgttggatatttagttgaacggagatgaagagaagaaattgcaaatatatccaattgagctgtaaatattaaagccaatgttttaagacaaccagtagataaatgggttttagttcctttcttgtctctggtgtagactctaccaattctctgttactttaaatcagtaagtgcacgttaaagaaagaaaaagatcccataattggctattttggactttgagcttacctttgtaattatatttagcttttagtccatgatacttaaattatttaagagattattggagtcacgtaaccttatggcagtgaaagcatgtgaatgtttttgttatcggcaattttatcattctttgtgtgttattcttaacggtagacataaatattgaaagggataattttacataaatattctataagttgattttgtcttttatgtggcagtacgatcttttggaaccgaaggaaggaaaaaggat

SEQ ID NO: 73955 - DNA, 548 bp, Carica papaya
  Intron number 1 from transcript evm.model.supercontig_131. 9 (locus evm.TU.supercontig_131.9) derived from phytozome v7.0 (chr-ID supercontig_131; pos 57685 to 58232 reverse s trand)
gaatgtatgaaatctcaagcctatctattttttttttcagaaattgaaaagagaaagattgctaaaaagaaaatggagacgtttggatttgaaatgatagcttgatgaacagatttcttagaatatttgctattgcacaggcaaaaaatatgcttgtccaggatgcttacataatcagtaatggctgtgttgattgttttgaatatggaaaaaagtggtagattttcggttaagtcttattacagtcatttaactagaacagatcatgttcggcttccacttttccctatgaggcagatttgaaaagctaaagtgccaccaagagttgtgtttttttcatgggaagtttgcagggagtgtatattgactatcgataaattaaaagcaagagagctgtttattcccaaccggtgctatatgtgtatgaaagcagaagaatcgtgcaaccccgtattgctgtggtgttctgtggctttcattctctggagtcttatttataaccttttaggtataaattgggttatgtcactgtctgttagggaggaatt

SEQ ID NO: 73956 - DNA, 449 bp, Carica papaya
  Intron number 1 from transcript evm.model.supercontig_12.1 67 (locus evm.TU.supercontig_12.167) derived from phytozom e v7.0 (chr-ID supercontig_12; pos 1533018 to 1533466)
tcaccagttcgtttcttcctctgctcacgttcaggactgcttttagtgttttcttttggaaaatgctttgtatttagctcaaagtaagaattacgttgtgagactgaagaatacaaaatttttgcttctcgactgttgaagtatgattggaaccaaaagttctctgactttgtttggattaagcgacaaaactaatttcaaaattgctagaactgtgattcatctttttatgttactttctttccaagaaagaactatggagatcatcagaattaccaatcagttcagtagttagtaatgaacgcaaattgatcgggtagatggcgaattcttaagatctcataatgtattgaatgtgcattgatctagcattatgactttgattcacttcactgttctataattgatttgcagcttatacttcagaagaaattgatcacaagacaaaa

SEQ ID NO: 73957 - DNA, 1020 bp, Carica papaya
  Intron number 1 from transcript evm.model.supercontig_114. 64 (locus evm.TU.supercontig_114.64) derived from phytozom e v7.0 (chr-ID supercontig_114; pos 823360 to 824379 rever se strand)
cacccgttgtgtggagaggtcctgtatgttactgtccatctctccatcattcgttttctttcacttgctcaaaatatggttatcccttttcagtttaaagtgtatccatctatcttttatataaaaaatattgcccttacaccccattgagagaacttctattttttcttttgcaaccagccaattactttcaaaaccatcaagatatggataaggaaactaagaattatttaagcttcatgaaggcataccaagctcaaatctttctgattaatgtggctgctgtctaacattattcagtacaattgaaatctaacttccaatgcctagcccaacagacacgacaagatgatccatcccaagattcggtataaatacactctttcaaaagcttgcattatcctccataagtctccacaactgaatttactaaattatgggaaaagagttctaaaactgttatgagatccctgtaaaatgaaatacattaaacttcattatatgtcaaaccttcttgtacggggagtgacacggataaggcttcttttccaaatagtttttgtccatccttctaggagcttccttttctggtccaattagcctatgaatttgccaatcattacaatcttcattaggtaaaaggctttttgaagtcagttgtgtacttcagctattctctcatctcagtttccctataaaaggcatgtaattaatagttcactgccttattatatgtctttcaatctataaaattatatattaaatagtctaagcatggtgtcagtttttgtctgaggtaggatgtttaggtttataacaaagactaaattacacaaattcatgagtgccacattaatatcaatattagcagtaaagtgtagtggtgatgctgtaagagcctaaatcgatgctaaaacataaggatgcaatattttcaagattacaaagataagtctacaaaacccaacttttaggaattgtcgtctaatttgaagatagttgattgtatcactgcaggta

SEQ ID NO: 73958 - DNA, 823 bp, Carica papaya
  Intron number 1 from transcript evm.model.supercontig_138. 55 (locus evm.TU.supercontig_138.55) derived from phytozom e v7.0 (chr-ID supercontig_138; pos 685809 to 686631 rever se strand)
aaggaagaggtgatcttgagtctctcatttccaaggaaaacataacacgaatattgattgagagaggacaaataggcctgcaaagtgttaagcctgttgagaatagcaatactagcttagttactaattaatttagttgaataatttcctttagtggaaaggtaatcatcatgcatattgtcatttttaataatttaatgttttctccggttttgagaactttttttccctgttatgcttttttggtttattttacataatacgacataagtgaccactgttcacctagggtgtagaaggcaatgtttccagatcaatgttaggcaacattttgtctttcaattgggtatttttgtttgagtggttgttgaggctatttttaggtgagtgattttacttgagaatttgctgctgtaatttgtgtttctcctactcagttgtatttgtggggcttaaatgttgtgacattttcgggcacctgtccctttgcacagtcaaatacaataaagaagatgaaattatccatgctacaatcaacatttagtttaatttaactagagttctgagcaaggtgcttaatctgggactacattgttttatttacccatatactacatgggcaagtacttcatgccatatgcattataaattttatttttctataagtattttatttttttaactgtcatgattaactttgcttcacttagtattcatgatttgatgtggtagagttgtaaatgttttctgcagttataatcactgactagattttatataatttgcaggacaggaaggcactccgtcctactgaacgtttgat

SEQ ID NO: 73959 - DNA, 277 bp, Carica papaya
  Intron number 1 from transcript evm.model.supercontig_1.28 4 (locus evm.TU.supercontig_1.284) derived from phytozome v7.0 (chr-ID supercontig_1; pos 3914023 to 3914299)
acgagatctcctcctccggtccccttgcctctaaggttagggtttttcttctttttcacgaatcaggtcgtttcctttgaatttttccgtgatttgacttctgggcttttgtttacttcaaattcccattatttcttcattgatttttctttatggatttgcactggtgaaaatatgttgtatgtgcagagtccggactaatgggcgctgtctttgtttgttttgttgttttttgtggcttcatgttcttttttgcagcttaaggagattgttaacc

SEQ ID NO: 73960 - DNA, 865 bp, Carica papaya
  Intron number 1 from transcript evm.model.supercontig_114. 39 (locus evm.TU.supercontig_114.39) derived from phytozom e v7.0 (chr-ID supercontig_114; pos 592339 to 593203)
gggtatgttttctctttcagattctttccccttttcgttaatcctgacggcacgcaaagtttattagatattagcattttattgcttacatcatgcgataatatgatttcatggaagctactagtttccactgtacagttctatgaggtttgtttgtgttttggttctttgtttcttaacttgatagtccggattctaggctatttgcagcagattcatgttttgatttgttttcttgcaatttttagtgttcgagggacaattgtgaatggaataagaaatagtttatccctttacattattttagagtttgatataaatattgcataagcgtccattataatcatatcagattgttttcagttttgagagagtatatgtaaatatcaaaaactatattggataggaaattaaacttcaatgataataggaagccactctcatgtcaaaatctgattttttcggcaaagaaatatttagtttgtggtatgtcactgcttgaaggtagatcccgcatcttatccattttgatgtccaatatgtttctggtatgtttatgtagatttcaaaactgttaagggcattaatgtgatcgtttttagtatgttgagttggcatccatatatatagatatatgtagtactaaaatgtactgaaactgcagcaaggtagctccattgatgagtgtttatttaaattggtgaactattatcgataagtaattagaattttatcttgtaattttataatattgtttggattcaattttcctatcaatacggaatagcaaattggtatgtacgtttattttttccctgataaatatgtaaacaatgggcctattcttctcaggaagacacgtggt

SEQ ID NO: 73961 - DNA, 519 bp, Carica papaya
  Intron number 1 from transcript evm.model.supercontig_13.8 9 (locus evm.TU.supercontig_13.89) derived from phytozome v7.0 (chr-ID supercontig_13; pos 880089 to 880607)
taaggtacagtcaatgaaaatgaaatggatgttggattcttgaccatgtttatgtttttcaagctttgtagtccttaagctccaattttaatcttcttggatttgcttctgggatatgcttgtttgagcagaaagaaatgcgtgggaagaaaatatttatgttttctttctgttttttcaattaattagacagttaaatgatttcgcttcaatagcagatcaaagtgttgagatttgtgtggattttggagcaatacgaaacaaataacgggcatgtaaatagttttttttttttttttttgaagatttcagtaaatttgattatatcacagcctatttaactctttgcccgcaagtgaaccattgtgagaaactgcagcattgtgcttagcagactatcaatttgtttacttgtctgttttctgtgtacaagaggatgctttcttttgcaagaaagatcaagtggttctgatgctccttcatttacttctgtttctgaaaggaatcaagctgatatag

SEQ ID NO: 73962 - DNA, 385 bp, Carica papaya
  Intron number 1 from transcript evm.model.supercontig_116. 17 (locus evm.TU.supercontig_116.17) derived from phytozom e v7.0 (chr-ID supercontig_116; pos 138259 to 138643)
cttacgttaaagtgcccggtgagattgttactgttatcagctttgggttgagatttgaaatttttagttttaatctccgccgtccttctgctcttcgatctctacttcccttcagttttttttttttttttaaaaaaaaattatatacactggttttaaaatttataaatatattttttaaaaaaaaataaatttaaaaatttgactgttctttaataataataataataatataatacaacaaaatattaaataaattgttactataaattcataatgcttctaaattttctatatctatacatatatgtatatatatatatattacttattatttaaaaaataaactgtggagcaggacgcattgcgcagaacgctactgcgg

SEQ ID NO: 73963 - DNA, 382 bp, Carica papaya
  Intron number 2 from transcript evm.model.supercontig_139. 72 (locus evm.TU.supercontig_139.72) derived from phytozom e v7.0 (chr-ID supercontig_139; pos 524108 to 524489)
aactctcaggaaagctcttcaattccatcagcaatgtaagtttcttctttctttgccaacatttttttataaattattataactaacatttaaaatataatcttttgaaaaaaaaaaaaactaaactaaacttttgctttttaaaatgattaattaatcacataattgatcaaaccccatttatattaaaattaaaatgattaatcacaaagaatgtttggacacgatataattaattatctaatcaacaattatacagataatgctcaataaaaatatttttaaaaattgaacagtaataaagtcaaatataatttatattaaagtatttatgttgtaatgcaataaagtttcttgcttcttgttaattaccagctggatc

SEQ ID NO: 73964 - DNA, 480 bp, Carica papaya
  Intron number 1 from transcript evm.model.supercontig_114. 63 (locus evm.TU.supercontig_114.63) derived from phytozom e v7.0 (chr-ID supercontig_114; pos 813849 to 814328)
ctccgaaatcttcacttggttcactcagtcaccaggttatgtcgactcgattcactcctcgactcaccttcatcctttttttagttttggttgtaagaatttcctgtggaagttttgtgttttttttggtcgaataagatgtcgttataattgtgaaaaattggttctgtcttctcttatgataattttgaactgtgttaatttgggtattcttcaaaattctgtcttcactcgttttacttgatcagatcggcaattaatgtggaaagctcttggtgcttatttgaattttttcgtctttgtatgatttctttttaaagtttaaacttcttctaaccttatgaatgaagtactttgtgctgattcacaagtttgttgttattcatttgatttttatgtaaagaatgttatgggaattgttcaattcgtgaggttctgattgttttctcttttaatttgttacagagccgctttacattg

SEQ ID NO: 73965 - DNA, 614 bp, Carica papaya
  Intron number 2 from transcript evm.model.supercontig_14.1 1 (locus evm.TU.supercontig_14.11) derived from phytozome v7.0 (chr-ID supercontig_14; pos 170133 to 170746)
attgtgaatattttctaagacttgctatctgttcttattttatcaatttattgtttcctttggttttgggaagagagattatcatatgtttcgatgctcagagagttgacgcgatcttattctttcgaagtttcgttattcgtaacataaagaagattcgaatgttttcataaaaattattatcagcctttgatattattcgtgagaaataagcaaaagattgggatctattttccatatcttccctttccttcttgattcaacttgatagggtcaaagaattttctattttcacacgttttccctccatcatcttttcgtgttcccactaaaatattttacgatgcgtgaatagtactccaccagattaaaaaccatgatcattttacccacccaaagaattaccatgacaagtttctttttgtaagcttttaaccatagaaaagcaccgacttataagatttggtaaagagtattaatgtatagcgactgatatgcgaatggtttgttttgacaggagacattgtagttggacaaagctggatatttggtcttttttctttttttttttttttgtaggcttcgattagcttctttgtagaactaagtagaat

SEQ ID NO: 73966 - DNA, 537 bp, Carica papaya
  Intron number 2 from transcript evm.model.supercontig_11.1 80 (locus evm.TU.supercontig_11.180) derived from phytozom e v7.0 (chr-ID supercontig_11; pos 2708616 to 2709152)
tactgctattattactgctattactaccacagcaggtactactgttactactattatttctactactgctactatcacttttattactactgctgctgctatactgctactgttactactactactactattgttagtactactgcattatatgtaataccataaaaaatttagtttattttaatagtattattaactatccagtatttttttcctttagatttccttatttgaattaattaattaatttaaataaagaaaaaaaagttttgttgccatattaattcaattgaagagaattttaatgtaaaaatcaacctacaaatggcagaatgatcaattaggcttgatttgtttttattagaaaaaatgaagagatagactagttgaatataataatttattgaaatatgagaggaagaaataagagagactaattgaggaactcaagttttgatttgtcgttgatgctaaaagctttcgagtacgtgggtatttataggcactactactattactgctactactattactaat

SEQ ID NO: 73967 - DNA, 554 bp, Carica papaya
  Intron number 1 from transcript evm.model.supercontig_123. 52 (locus evm.TU.supercontig_123.52) derived from phytozom e v7.0 (chr-ID supercontig_123; pos 678230 to 678783)
cctagatttaaaggttcttatttattttctctctttaatattttctttttcctgtttggtgaatgagaaaacaagctgttggctgttctagtccctttcatcgtttgcagatgtaataaatgcaaaaaaacatagcagatcttgtgcttttctttgttattatgtgaaaatatattaaggggatcttttatttaatgcttccctttgtctcttctgttcatctctccttttgccatgctaagagttgcgcataacccaaagaaaaaaaaaaaaaaaccctaaaaggtattcaactttgaggaaaaaaaattcctctctctttccctttttgattatatatagacccatttgattaatctcctttcttaccccttttccctttcaaagtgattagctttctaggttttagacggtaaaaagaaaaagaatccatatttgtaattggcatagaaataagaaaggaaagatttttcttttctgtttctgttatgcatagtaattttggtttgatggatttttgcagacaggggaaatttactacataaactggagaa

SEQ ID NO: 73968 - DNA, 608 bp, Carica papaya
  Intron number 4 from transcript evm.model.supercontig_129. 30 (locus evm.TU.supercontig_129.30) derived from phytozom e v7.0 (chr-ID supercontig_129; pos 258101 to 258708)
cttctactattattgtatgcgtttctcataaaatctttttgaactcatttttgtgcatgccaagtgatctacatgagtggaatattccgaagcattcaattgtgaaaatattttaactgagccaaagtaatcttattgggtgcaaacagaactaaactgactaattcagttgagtttaaacaccaaaaaaaaacatccttggtttgatccctattaaattgttagccttatggctggttgttttgttaaatataacaggctaaagctagcacagatgctttaatgttcacataactggttttacttttaactgataaatatgtattggcagtttctatttcccttctagtcatgctagatctgctaaggcagacgaccagacaaataaattatcaacttgaacttggctcgatccgacagatcatcaaatcacctggtcgactttgcatgctgcatatatttttcttctgaaaagagaaggctgacaaaatgcatgaagataatattattatgtttgattttcaaaaaattatttgatagcctgaactttttatgtggaattgaaatggtactttttaaggttggattcatcttctcagaagtatcag

SEQ ID NO: 73969 - DNA, 497 bp, Carica papaya
  Intron number 1 from transcript evm.model.supercontig_12.2 69 (locus evm.TU.supercontig_12.269) derived from phytozom e v7.0 (chr-ID supercontig_12; pos 2432969 to 2433465 reve rse strand)
gcccataaattattttctcagtttctccgtgaaaggtaaaagattttacccaaaacacagtttattaggaaaagcgaggagggaagctaataatgctgataatagctgctgctatttcttggggaactggaatacggggatggcacgtttggttgctgagagaaataaagcagaaaggacaaagcgtgattttttgagttgttattcatgttataggagctagaatatttgtacttccaaccattgccttacttttgttttcctttataggaatcgagatacacacacacacacacacacacacatatatgtaaatatgcatttatgtttgcgcatatgtgtttgtgtatgtaatcatcagcatattgaagaaggcagggggtttcctctctttatctctgctttctggattattctttgtctttgtactttgctcaaagccacgtattctttcttatatcaattttgcaggcacaaggccttgaaggaccttaaag

SEQ ID NO: 73970 - DNA, 883 bp, Carica papaya
  Intron number 1 from transcript evm.model.supercontig_13.1 77 (locus evm.TU.supercontig_13.177) derived from phytozom e v7.0 (chr-ID supercontig_13; pos 1600734 to 1601616 reve rse strand)
ggaaagaagctgctgaaccttttgttgctcacaaggtatgtccttaaacactcatgtaaatactgacaactttgtcatctttgatggctcaatttaagtgttgcatctaatagctgatttgtttgagttatgagtcccatcactcattgtgcacttcagacacttattaggtgcaggatttgcctaattttattgttttcatttgttaaatttatcattttaatatataaaaacatgtaggtggtatatatatgtgtagtactccagtgtaaacaaaaacagtttctacaaaatattaataatatttgtttttctcttcaaaatcataacatattttgactatcaatttttaaatattgctttcgttttcaactgttacattcatatttttctataaactctgtgatataaaacataaaaactaaaagatcttttcatgaacagtttcccattgctagatgcagaactaaaaagctaattctctctattctttttttttaacgaaaaaattagttcgtttataatcttaaacaaactattgggacttctaaagtggccacttgccagttctgagcattagttgaggtcagcagccagaaccaagttcttttagtcatggtgtttcttgtctattatttgccttgctacaaatacataccgaaaaagttgtgaaaaaatttctttgatggtctttttctcactgaattttctggtgtcgtagccagaaataaagtggaatttggagttttcacatatttatcaaaattatgaggtttcttaggtttctttcctttttagtattatcccaaatatatgaaggttcttactagattgttaaaaagcagttcatgtctatggctgcactggttgtcttaaaagaata

SEQ ID NO: 73971 - DNA, 418 bp, Carica papaya
  Intron number 1 from transcript evm.model.supercontig_123. 29 (locus evm.TU.supercontig_123.29) derived from phytozom e v7.0 (chr-ID supercontig_123; pos 436761 to 437178)
tcgaccctgatccttccttttccgacgagtttcaggtactttttcttttatcttttatccttcttccacctgcacgacttacttttctttccaattctattgatttttctttttctggtaccaaaaaccctatgggaaatgttggcaggtgagtgtttcttttttttttttttgaatgaattgggttgtataggatacaattgaactcacgagcataatcctgttcataagattttagactagcaattaatttatgttgaaaattctggatttgattctttaatttggaaatgtgaagaaatttctctatattcccccttgattaatgatttctcattattgtcgctagttgaatattgttatatttgattaagactagataattgaaactaataatttttgaactttcagagtcttt

SEQ ID NO: 73972 - DNA, 928 bp, Carica papaya
  Intron number 1 from transcript evm.model.supercontig_130. 64 (locus evm.TU.supercontig_130.64) derived from phytozom e v7.0 (chr-ID supercontig_130; pos 706840 to 707767 rever se strand)
ctgttagcgtgcagtaccttcaacagcccgagaaggttagattaggttactttgtttttgcttcccgaaggatctagttaattcctaaacatgataatgcctgctaggcatgtggtttcatgctagactacaaatttaagttgtcttttgattcatttcatattcaaagtttagttctcattctcgtattaatcttaaaatgcataattctaacataattttttgtatttaagttatcatcgcaccccattttgaattttttgacagtaaggtgaacctaaactttcacattaagaaattcaaagtcggggtggagttaactcaaccacaagaaaataaagttctaagtatacatgatcaagttcatataattagaagtacaaactgaatgaaaaatgattcaaacacaacaacagttaatgggggatttgaggtgcactgagactttggtttaggtaatcaacggaagaacatcttttgacagtaacagcatcatagttatggttctacaaaaatgctactagcgtactgaaaaaagctcagctaacctggctatgcacttcactagataacccttggaacttatatgaaatttgtggagctgtcaaatcgacatcttcagctaggcctcacctgctgagccccaccaagaatcaaacttaaaaagccagaaaatgcaacataacttagcactttgtaagaaaaagaagagagaactaacaagttcttgattataaatgctaaagaaaagcaggaaaaaaagtgaggtatgatagtgcagcaaggaaagatgtggtcctggttcaaattagaatagcagaaaatgattaaagcagtcaatttatcatgcaactaaaatttaacaattcttcattgattataataatctgcaggtatttgcagaagtttttcgggtgctaagaccagg

SEQ ID NO: 73973 - DNA, 1020 bp, Carica papaya
  Intron number 1 from transcript evm.model.supercontig_114. 51 (locus evm.TU.supercontig_114.51) derived from phytozom e v7.0 (chr-ID supercontig_114; pos 703426 to 704445 rever se strand)
tgcgtttctgagttcattagctttatcaccagcgagtatgcttttttttttggtttcatttgtctgttttaatgacctcgacgcttttggttatcaaatttattgatcgtgctctgagaactggttattaatttcttagcttcgttattagcttcagtatgttctatttatcccgcttgccctggaaaaagaaaatactttctggtggtgaattaaacgtatatttagtcactaatttcattatccgcaagtatatttgtgaaggaggagaagaaagaaatacatagagaagaaaaagaaagaaataccgggagaagaaagactgataattatcatttctcacatgtcttttctactggtccatccctattaataccattgtcagctattaactgcctgtaactatctcagaaccgtaactaaccagctatttcatcatttcatacatatcttcaatacttgcgcttaaaagtcaccttcagggagatcaaagtggtcctcttgtggacatcccataaaattgaatcaaatcaaaataggtatgctatcatactgaaaaaactttttttttttggtaattctctaatcatactgaaaaattttaattgccttcagcttcaaatctgccatttttgtgttttactgtgcctaatcaaagcatccaactagtagctggaccaaatgattttttggatgaagtttgttatatagcgaagcatcagaaggaactccaagcaaactgagacagagaacctttttttttctttttttttttttttgcaaatgattgattggaaaggcaagcctgaaccttcattgaacaccatcttcttcatcctattccaagttctatagacaacctttctgatctctgatactgttcgacaggtcttgttaggtctgacagcagaaaattcctattaaagataggaattgccaagatttgatccaagatacatattaagtaccctctttgtatccacagcttcttgtacgctccaaccatcttcattgttgttg

SEQ ID NO: 73974 - DNA, 910 bp, Carica papaya
  Intron number 1 from transcript evm.model.supercontig_13.3 07 (locus evm.TU.supercontig_13.307) derived from phytozom e v7.0 (chr-ID supercontig_13; pos 2850544 to 2851453)
tccctgggcttgttctcgtcttctcgcagtttcaggtactcccacctccctttctgatctgcttggttattgggtcattttctaaaacagtttgtgagcactgtaaattgacgggtttttgaaactgaacataaaaggattgttcttgcaactaaaagcaagcttttttgtctaattccccagattgaagtttgtatcgttatggctgaagcgaagctttagttgatatactggcatatggtttagtttcaaattcgtctctttctgtattcagcaattcaaaatgcataatctttttcttcgtttgtgaaaactgtttgagttgggttttttttttttttgcttcgtatatgtgttaatgtcatttgtatagcaacaaattgtggattgtgttggatggcatgaccttttgtgtaaagactgttctgctgatttgagattaagagaaacagagttgttactttcaatgttctcccataagttagctggaagctcctttaatcgagtagaattttccatggatccttttggttaaaattattgctgtaagctcctagttgaatagaagctgccgttggactagattcgctgcttgtacgaaagacatgttactgaattacatggtttgtttaagtctgatataatttcacgcaattttccccaggattttctaccatctaatattgagattaaactgtataatgcatgagcctaaacatatgttagctttgattgtcttcgagattatttattggtgtcagttcattcgggtgcttttggatttttcttgattcaagatgatgggtgagattgataccaaacccattgagccagtgcaagtagcattgtctcattttggtgaaaaatgtgaccagagaagcagcagtctggcggcagtgtaagagggttc

SEQ ID NO: 73975 - DNA, 786 bp, Carica papaya
  Intron number 1 from transcript evm.model.supercontig_136. 25 (locus evm.TU.supercontig_136.25) derived from phytozom e v7.0 (chr-ID supercontig_136; pos 425368 to 426153 rever se strand)
caacttgttcatcttgaatttaggtaaatattgtctcaatatattaataagctttgatttttgctcttagaagcttactctatcattctacttgcatgttctctcctaccaaattaggcaacttatttttagcaaatatgaaaagaagttttctggcttgctctgtatctcaaataaaatatattgcttgaagataatattagaatttcgatgagtcatgttttcatgtacatagtcaagcatataccacctgtatgagtcagaattatgctaccatgatttcaagatttatagataaatattgttcgatatgcaatgtgttcatattttctgaaatgtacaataaaaagtcgtacggcaccatcaatctggcatttgtagaggagaaaaagaaaaaggaataatgactgtttttacacccagaagctctttcgtttttggtttgattttgaagattcaaagtggcactctatgtaactctctaatgagattaagatttaaaagggaaatttttgtaaatacagatctaagcgtacatatgaaagttgctctcttatctcagactacaatccaccaggcaacaggattgattcttggacagttgaatttaacttactcagtttatagaatctgtgcattaaaaatagtaagtggtattgatttgttgccttctatgtattcgcaaatgactaaagggtaacaatagatgcagtcagtgttggtgattctaactgcatatttaatgttgtaggatttctcacccagcacccgggattcctgaaagtt

SEQ ID NO: 73976 - DNA, 806 bp, Carica papaya
  Intron number 2 from transcript evm.model.supercontig_13.2 73 (locus evm.TU.supercontig_13.273) derived from phytozom e v7.0 (chr-ID supercontig_13; pos 2462597 to 2463402 reve rse strand)
acaaggttgctgttgggaagataaaagtagaagaggtatataacctgaaaagtttttctcaaacgtctttgagtgttgtatttctcattttgtatatttgaatgtaaaaattgaatttctggagagagtttgtgacagttatcagctactgtcaatgatttgaacagatctctgaggtgattgtaaagttatctaaggtatctgattaatttttacctgtttagttgtgtttctagcttaaagtgctggttggcactccatcaagacccaagatacagttggtatctgtaagaagaagctacttttatatcaaaacgttttgaaaataatgagagacagatattaattctttttttctcaagaaatattttttattatttgaatctctgactaagatatgattctgttctgctgtattatattaccttttattttgtaagagaggacctaattaccttatttcatgagaggatagcactttagtttcttatgaaaagcatacaggttgtgcgattaaaagtgatgttgaagatatatgctttctagtagttgatgatttttcatactttccttacatcttttaatagaatgcttctctgaaagctataatttctcaagaaacatggaattatacagcaaggacatttgatacttgatattctgttattggcaatggtcacctgagttcagatcaatttctttcactcttagattacccttgtagatgaatttagaaaaactgacacctctgggttgctgaatacctttcaggtggcaaaaaagacatcacagaaaagtaagaatat

SEQ ID NO: 73977 - DNA, 649 bp, Carica papaya
  Intron number 3 from transcript evm.model.supercontig_1.64 (locus evm.TU.supercontig_1.64) derived from phytozome v7 .0 (chr-ID supercontig_1; pos 1208930 to 1209578 reverse s trand)
cggtatgtctggattgtactaatttctctttttctgaatagaagtttatttaatgaggcactgatactttggatttcctttattctggcgtctggttatttctactgttgtttgatttgtcccttttatatcagaatatgcttacacaagcctctctttgcagtttgattttcctgctgctttacttatgttagctttacttatttcttggtagcttagaaaggaaaacaaattcttttcttttaatttcaaatggtaactaaggtacttggaaggataacttaatggtcaaaagccatttgatattgttcatcttgtactctaaataggatcatacaaccatcttctctctggtgcagcacgtcctgctgattttattcatattattatatttttgatggttttgaaagaaactataattcttctcttctgttttaatttgaagtgactggctaaggtattgttagaaattagtttctttctcacttccacctaaatgatgaatttgtgaaccacttaaatgtgatgctatttgaatattcacacagcagacaccatgcaggttgtctcttgtttaatttcttcaaaaggttttagtgactggtagaagttggtataggtttctgctgatcaaagagaaagattgacc

SEQ ID NO: 73978 - DNA, 859 bp, Carica papaya
  Intron number 2 from transcript evm.model.supercontig_11.1 64 (locus evm.TU.supercontig_11.164) derived from phytozom e v7.0 (chr-ID supercontig_11; pos 2338007 to 2338865)
aagaaaaagactttgaggtgtttgtttcgttcaaggtatgcatgtatgatatcttgggcatatttatatgaaagtaagtatattacaatatgtttagaagaaaggagaattaattcatttgtgtcttaatttgcaccatttacttccactttgcactattatttagatcaagaattcaaagatttagattgctgtaaaacagaggttttatatgattttgacattctccaacttatctgtttcaggtaaaccggaatttattattaaaaaaattgtgagcaactgaacatccttcaaaaacacacagtatagatgtgaccataaacatgtccaaccggccccagaacagacgcacattcagacatccataaaatagacagagagatgaatgacttaagatgcagttgctgaaaaaaaaaacagaaataatcctggaaagaccacaaagctgctcaatccaacaattatatctactccaaaaaaccccattctgtgaagcatttgctacagtctcaaatgagtaaatcatacactaaaccaatcacaacatgcagtggtcagggccactctgaaactcctggtttatataggagtgtaaaactactttatacatatatcaaatagctttagttcaaacaaaaaaatcactatccataaaatttaacatcaaatttgacagattatgaagatgaagttgggagtttaaagaagaaaatttagaatatctttgcactggtttgtgttataaaagatcaaaattatatgatgttcacttatagatgaaatgaaactttattgtttctttgttgagacagtgttattgaaacttgaaattttgttgcaggtgggtgctacaagc

SEQ ID NO: 73979 - DNA, 642 bp, Carica papaya
  Intron number 2 from transcript evm.model.supercontig_12.2 54 (locus evm.TU.supercontig_12.254) derived from phytozom e v7.0 (chr-ID supercontig_12; pos 2297538 to 2298179)
ggctgaggtaataaaatatatttctctggtttttttttttttttcccattctaattttattttttgatagttcattttttaattgatttacattaaattatcagatattatattaatttaatataacaattaaatatattattaaaattgcttctatatttgaattttatgaaatatatagtttgtaattaactaaaattaaattatatttttaaaatttaaattgaaaattataatatatattatgacactaattttatttttttattttaaaatttaaatggataatatttaaattttgtatttatataattacattaatattagtataatattttatattaaaaataaatagataattattatttatttattttttaaaaaaaaacagtaatttaacatgttttaattttgaattatatatagattttatgttcttaattatgactgttaattttacaattattagattttaacattcgaaaacaataatatttgtaacagcaataacacatttggagcgtggaaaccacgctttttaataaattttctctcataaatgaaagcgtgtggggatattatctattaattaattaataggagaagataatgaataaagtcaaattagttttcaggtgggag

SEQ ID NO: 73980 - DNA, 768 bp, Carica papaya
  Intron number 2 from transcript evm.model.supercontig_1042 .2 (locus evm.TU.supercontig_1042.2) derived from phytozom e v7.0 (chr-ID supercontig_1042; pos 7421 to 8188)
gcccaaccggcattcaacaaagttctggtcatcaggtccctctctctctctctcaatcgatttgtctctctctctctctctatatatatatacatatatctctatgtgtgtgtatgtgtattataatgaacacgttgtgccggatttcatgtctgcaatcggttgcctgcctttcttgttcaccgattatttgaaagtagagaaggtcaataaccatgactatgtttcaaaatctggaaaaggagatgaataatgaggaaataatacattgtaagcattgtttagcaacaaatgagatgaaactaaagatatttgatggttcatcacgagtgtggaaatagatgaccagctataagattatcaaaatctaggcgcagaatgaatgaataccaaaagaaaaacttccatggaagaagtttaatgcatgcctcaggcctctctagttgaaaatgaaaattaaacagacgcatggctgtatatctatgaagatcggttggccaggttagcagtcttcatcaaacaaatgtaaatactattggttctgtgattgtcatcccagagggggaaaattttaaactgggaagaccatgctgttgagaggctaatttttagggtatcaaatgaggaacctgctttttcttaatagatacattgctgtagtttcaaagtagttgtaagttgcagtcattcccttctttctcatctttggatttactgtttttactgtttgcaggcttattctgagtcacgcggtcataattttacact

SEQ ID NO: 73981 - DNA, 965 bp, Carica papaya
  Intron number 1 from transcript evm.model.supercontig_139. 25 (locus evm.TU.supercontig_139.25) derived from phytozom e v7.0 (chr-ID supercontig_139; pos 160013 to 160977)
tttccacatatcgcagccattgtttgtttctggaggtgcatagcttctcttctcgttttttgttttggtcggaattctcttcgctttgccttgcgtagctttggacttacatttcggagtctgaatttgttgaatgacttgggaattgcagttttgctgtttaaatagtgcgtgcttgtgtcatggaataaaagaaattggtgcgtgctttaatggaaatatgaagatttagctgttgtttgttatggctgactttcttttggacttacatgattgctctccgatttttggttgctttccttcttttagaatggtttttgtcacgtatagatcggatctaatggatggattaggattagctgatctgatagaagaatgattagttgattgtttccttcctctttttggtgctggatttggtggttagtatagcacattctgagcctaagttggagcacatatcccaagttgcgtttttgatttatgtttcttttagcattgattgttagtcactatatccgaactagttgaatgtaagtgttgttcattgggttcgccatggtaataatcatcctttgtttcttatctcaccatcttataggtgttactagttattgacaaggccagctagaaaatctgttattaatcgatcctgattgtacttttcttttcgtgagaaccctgattagacatatctgaacttgtatttaacttattgcagaaccaacatttttattgcaaaattctttttaagaaaaccatttgttgcaaataattctgaaatttccttgattggagaatgcttgggttagatgaccagttaaaatgaaaggaattaccattctatctgatgatggtgttttgtgtctgtttttcttccatttaactgataatagggttcttagagagcagcaggtttgtcactaaagtaaatggctactaaagtaaatggcttttggcaggtg

SEQ ID NO: 73982 - DNA, 894 bp, Carica papaya
  Intron number 1 from transcript evm.model.supercontig_132. 19 (locus evm.TU.supercontig_132.19) derived from phytozom e v7.0 (chr-ID supercontig_132; pos 205793 to 206686)
cttattccctttaacgagtctccaaatcgggtatgaatcctttcggtatcgaattgatcacctaacaataatgcttgcattttccgtagcactattgtgtttgaccttttcataatgacgttagatttgggtttctattttatacttctgttcatagtttttcctggcctgaaaaactcgattaagtactacctttcggtggtctgagaaaatcatcatcttcatcattatttgcggttttctggaccgtgttatttcttttgctgatgttgatcttcgcttgttgttaaacgcacagtagcgagattctaataattttttttttatcccaattaatattttcctggttgaacgtatctgttttggtaccttttgcttctgcaaattacatatttgttgtttccctgttgcaagatatttgagttctttttcgagttaaatcagaatgggctccatgattaagaacacggttagaacaaatgaattcacctataagtttctaggattagttttgtctcttgttatttcatcgtacttctcaaggagataagttgatgaaacatacacgtgtttgtaggccaatagactattttgaaagagcatagatgggagtatgattttggtttaattgtcatttaattggttctttgatgttccttttaattctattaactattaacacttatgaggatttcgcgacaaaaacttttgctttctataaatcattgtaggtcgtgtatgttcttagtgaagtttggttatactgagtttataactttgattggactgagagtgaggtactcggaggtattactcaatttgcaaaattcttatttatgatgccctatgttgattgcagagacctgcagtcttacctttctgatctcagtattt

SEQ ID NO: 73983 - DNA, 924 bp, Carica papaya
  Intron number 1 from transcript evm.model.supercontig_131. 14 (locus evm.TU.supercontig_131.14) derived from phytozom e v7.0 (chr-ID supercontig_131; pos 135586 to 136509)
catcagtgttctacaggagacaaatcccaagtcaggttacgtattgcctcatttttcttttatctatatgattcggctatacttttctgttactgcttctttgagtccatgtaagtgatttaagcatttgtgaattggtatgactttgatgaatgcttttaattatgaatcatacaactgagccatcggtattgcaagaagcaaagtttgttgtctgttggctgagtgatacctatgtttgtgttctttcttcttcttctttcattgatgttgtacttttgactattttgcataaaaatgaagtagccacaaacattcttttctttaactgacacatgttgattaatttgttgttattggaagggaaggacaacgagaagattaaaatgaaagtttacttgtctagtagtaagatttgatttacttacaagatctgatgaatggaattttatgttggggtgggtgggggtggggtgggtgggggggggggtgggtatttgctcaggtaataactggatggactgtgattgagatggattgtggttatgagccttttcctacataaaaattgtacatagattacatgtttgtaatggatggaaaaatgcattcagatctagacatcgatgttgttaagggttacaagttcaaagttttggggactatgaatttatctctagtgtcgtgtacatgtaagattaattgagattcatatatatgttgggtttatttcttactatgatatgggcataggtggaccaagtactttttgatatttttttgtatactttcagattcttatataatttgatgggatgtttttgttagagatgaatttataactgtttggaagtagttcaggaaaagatccatttcaaatgatctagttgaaaggtagtagatatttgtttgtttataaccagc

SEQ ID NO: 73984 - DNA, 473 bp, Carica papaya
  Intron number 1 from transcript evm.model.supercontig_117. 68 (locus evm.TU.supercontig_117.68) derived from phytozom e v7.0 (chr-ID supercontig_117; pos 705132 to 705604 rever se strand)
cactgccatcacaaaacaggtaaagatcttctcgtgttcatttctccttgaaagccacatgtaacaggaggactcaaagcaagtaaagtgtttgactgctatgaagttaatttttaagtaagaaataacccatttcgaagaaataaaatgtttctttttaatgtttcttcatatgaatgctgcattggggttactaattgtatttccttgggcgtaaaccgtataattcagttatctagcccttttcttttcttttcacaattccgtatatctagtgttgattccaattgaaaaaatcattcagtagggagcctctaccatacgacatcaatcactatctcatttatcaaataatggggctcatatatacatgaattaaacaatgtaaaagataatagaaccaaaaagtcactcatttggatccctaaatctatgcaggccaggaggctcagctgttccaatcaccaaaggaa

SEQ ID NO: 73985 - DNA, 987 bp, Carica papaya
  Intron number 2 from transcript evm.model.supercontig_128. 31 (locus evm.TU.supercontig_128.31) derived from phytozom e v7.0 (chr-ID supercontig_128; pos 237759 to 238745)
actgcgatcctgatagtcctttcaacccatctgaggttccaatctttacaatcccttccttacatatacatatacatatacatatctttttatttggtaaaaatggaaagaaagaaaaggaaatattgggtatttgctttaaactaaagagatttcgtttgagcaaattcatcatctctttccttgtcagtatcatagaatgttaccatctactgttttttgctttggaattgtcatgtgtgtgtgtgtatgtatatatatatatatatatatatatatatgtatattacactccagaaaattttacgccggccacaaggctgtataataggacccgatgcatttaacgttaattatatataataagtacttataattaatataataatcttttctcagtgattatagccaccagataaatagagctctttttaaccttttcgttttcttcaattcatttattcatattttattatatatttattattaccattattgaattctttggtcaaccatgaaataaaactatatctacataattttctattattaattaaaaaaaaattgatattgtatttttttttttttacatattttgaggtgtatatactgtatcatttgtcacctttatttttttttttactaccatttactattatttttaattattatttattattaaaaataaaaaattaaatttaaataattaaacatgattaaactctttatcttattaacaaattaaattaaatgtaacttatgaatatcacaatttagatttaattatgattcataaattatacttgattataacttgtgtatttgaaattttataagtttcattaatgtttatatatacccacttgaaattttctattaatttctctttcttcttcttctattatccatatacatgcaacgttgctgtgtgtacgtaatggtgtgtgtgtgtgtatatatatgtagatatcagatctttcgggcagg

SEQ ID NO: 73986 - DNA, 662 bp, Carica papaya
  Intron number 1 from transcript evm.model.supercontig_1.15 9 (locus evm.TU.supercontig_1.159) derived from phytozome v7.0 (chr-ID supercontig_1; pos 2307728 to 2308389 reverse strand)
agatttaacgaggaatttatcgctcgggtaagttcggtgtatctacaaacacacacaccatttttcctttaaatcctaggctgatggtctgcaccttttattctcctcttcagtcatgggcttgggaaatcagtcctccgtagaggcccatcatatattgataacatttataaaatttgaaaaaaaaaatgatttaattaaatattttgattactcaattaataatattctgattgattcagttctagttcgtttatcttcgatcggattggttgattaagagtctttgaatgcaagtcctattttttagtgtgcttttttagttgcaccctaggtgggaaatttattgcttcatttcatttcttaggtactatttgcggctgctccgattattgtgatttggatatttttgagctaggttttgttagagaggacttttcttatttcttttcatgcgtgaattgtccaattgtggtggggttttgaatctaggtattctggaattacgaaaacaagttctgttattgacgtgaatgtgtaatgggttctgtgggtttttgatcttaaccttttacgctgttgtttttgtttgtctctgaaccatatactgttccatctcggtatcagaatctcaactcccacatcctgaattgccattgctg

SEQ ID NO: 73987 - DNA, 793 bp, Carica papaya
  Intron number 2 from transcript evm.model.supercontig_1142 .2 (locus evm.TU.supercontig_1142.2) derived from phytozom e v7.0 (chr-ID supercontig_1142; pos 10908 to 11700 revers e strand)
tttaccaagtgagtgaaccttctcatcgtgatagtatcattattattggtacaaatttaaggtatctttgggcaaatgaattatttttgtggaatacatttggaaaattttgatttattaattataaatagacttttgaacataggaaagaaacaaatttaaaatcatcaaaattcacattccatcaatttcaatggaatttggaatttattattttaattcaaattagaatttatttggtaatggattttcatattttcatgtttgaagcaagcgaaaaaaactaaagcttttcccaaatgaagtccataaaataattcatttgttccaataatatccttagcgtcttatatttaaattgataaagtgctgttttccatagtttggacattctctgagtttgtgcatttatgttgacatttaagaagtgctgtttctcataattagaacatttttgagtttgtccactttatatcgtaagttttgccgtattggttttgcagctagttcttttcttttgtttttttttttggggggggggggggggggaggggtgatgagtcttattcttaatctctttatgtgattttaagacttctcatctctagatccatttggaaaaaaaaaaacttcttatttctaggataatgcttgttggatattgctacatttgccagtggttcttatcatggcttgtggaactatatattttcctgtggaacaatgttgtgtctgcctcatggtcagcactgttttctttttttttttttttttttttgcaggtacctgcaag

SEQ ID NO: 73988 - DNA, 882 bp, Carica papaya
  Intron number 1 from transcript evm.model.supercontig_112. 66 (locus evm.TU.supercontig_112.66) derived from phytozom e v7.0 (chr-ID supercontig_112; pos 571162 to 572043 rever se strand)
agtcctgtctcggcgacaatccttacgtgcgagtattgattcgaaatcccgtctaaacttaagttaagatttttgttttcttgtcgaatcatatattcgagtgtgatttgcgtggcttaacttaggtagttgttaaattagtatgatttatcgatgttatgtggtgcgtaatgttcgctttattctttgatgttattttggattttgggtttctttaatttgaacttgcggattcgcgcacttgtatttttattttcacatgaatatttgtgaacttcgatgttggtaaaaggaaaccatgaaatgtcaccggccttccatgaaggctgacaatcgaggggagtatgatattggagttgaaagggcacctgtttggttatatcgggcaagaagtgtttctacgtagatatagccccgaggcaattatgggagtatgttttcttgaggtagcacggattggagatagacatgttgtaaaaattattgtgcaatctaggacacctatttgggtatatccagaaagaattctacccagggatgcttctgtgcaatgatggcagtgtgtttttgagctagcgaaggatgggagtgtgtttctgaggtagcacaggttggagatagacatgttgtaagcactgttatgcactatccactctggaatcacgagtaaattactgtgtgattggttatgtttgttgcttgattattatcatgactgcagtttgacctatttgttattgagataattaattgtatggtatagagggtaaatattatgaagaagaatattttatgttatagtttaagttcttctgtcaggaaaatccattgcttgtatgatttattagtttatttttgttggaattcagacgaaagcagatt

SEQ ID NO: 73989 - DNA, 551 bp, Carica papaya
  Intron number 3 from transcript evm.model.supercontig_104. 59 (locus evm.TU.supercontig_104.59) derived from phytozom e v7.0 (chr-ID supercontig_104; pos 380279 to 380829)
tgtcaaatttcatcccaccaattatctggcatctggttcttacagttgtttttcgctgttttaatgtgttgataaatagatctaaatgtatttgattttatctacatttcacatttattagaatggcagttcaagttaaactctcttgtcccaactgatagttactggccttagaagaattttatattcagttttaaatatactcatggatatatttcactagaagtttttcaattgttgtatagattactgtatgtttccggaaatgcgatctggaaagttattgagtgaacctcattggcaagatgttagaagtttatttcatttttagcgaatatcttgatagaaatttgatgaagaacatgcatggctctgtccatctcctttagtacaatcggattctttagacattgagatttttcattgttttttatttgagaattttaagcattaaattttaatcaccaaaataatccctaaagtctactacaaatgctaataatgtgtttctatttctcagcaaataaaaaggaagactgctacgagtgaga

SEQ ID NO: 73990 - DNA, 702 bp, Carica papaya
  Intron number 2 from transcript evm.model.supercontig_14.3 0 (locus evm.TU.supercontig_14.30) derived from phytozome v7.0 (chr-ID supercontig_14; pos 349949 to 350650)
gtcagcctcagtaccttgacaaattacaggtgcgtcgtttcttcaggaagaacctagagttggaaattattctggtttacgggtcatttgaattaattaaatgagccaaatatggagtaatattgtgacgaattctttagattgaattctgtgcaagaaaacatattttggtgtatgttttgtacgttagttcttcttagttgtccctgtatttctgttcattttaattttcttgtagagtttgttatttttctattccaataactatagtctgttacgttatattgaagttatgttttattattggtattcagaaatacttctcttgttttcttgtaaaaccttccatttaccttttgttgtaaattctggaagattttgctcttgcaagtgatgagacgttaatgtcaactcagtgctgcctgaacttatagtatctacctaaaaatttccatttctgattataactgtactggaaattttttaatcatgtgtactaacaatgccaagtatttagctatgtcattggatccggttgaaataatgtctaaaaaatatccacttttctcatgtttacgtggagggagattatgctatcagaaatgctctataaaatgaatctaattttttggtgttgcaaaagttactgaaattttgacactattaggtagaaagagaaagggggatcactgtcaaagctca

SEQ ID NO: 73991 - DNA, 884 bp, Carica papaya
  Intron number 2 from transcript evm.model.supercontig_1.27 5 (locus evm.TU.supercontig_1.275) derived from phytozome v7.0 (chr-ID supercontig_1; pos 3828055 to 3828938 reverse strand)
tcttcgtcaaagcaatttgaatcctgaaaggcctggttagttaaactagttaatacatgagtttacccccctctttttaaaaatgtaactgaacaatgattgactagttgttgaaataagaaacctttaatggtacttgtacatatcccaattggaatagaaaaacgcttcataggggatacagtgagagggactttagttatgaggaatgtcgagaagatgttttgatggtaagaaagatgaacttttctggtggtttgattgctgtagtaatttcattggaggcgtagttcagatttgacaaagaaattgtccctgatgaagggacaagcatttggctatccaaagactatattcctttctaagaaccttttttttttgggtgaaagtatgtctatttgactgtgggtcttaaagtagttatcctgaatcccatcgaaaggggtgatttctcctccaaatgctcttcagtttctctgtttgttttaatcaaacattgtcatcaattgacccagccactaaccatttcattctcattattgctaggacttcttcccaccggttccttgtccatgtggaccacaattgacttgggaatgtcttattttttatttgaaaaaaaaacaattgacaatgaatgtgtttagctatttctgcttataagaaagcattgattcaaccagttgatagtatttatagtatttatagctatgtcttaattggttctaccttgttatgccatgttgaacggacatatagtttcaaataattttctgaaggactgtatctttcaatactttgacgctaatcactgcttcatttttatttgtgttttactcttggttccagactcaggcttccttaggacattggattctagcatc

SEQ ID NO: 73992 - DNA, 891 bp, Carica papaya
  Intron number 2 from transcript evm.model.supercontig_12.2 89 (locus evm.TU.supercontig_12.289) derived from phytozom e v7.0 (chr-ID supercontig_12; pos 2653674 to 2654564 reve rse strand)
ctgattcaggagtacggcctctcattttaactagggtatttctctttgtctatgattttcttaattttatggaaattggtacaatctacaaagccatttcagttttgtgttaaaaattaccaagggataatggtcatggccaaaaattttcagggttgatacctaaggaactatatagtgagttcagttgattgagaggtaattcaaagtgtgctatggttctatgtttattatgtaacttatgtctgttctacacttataatcaaggtgttggtagcatatggactaatgcggcagagtagtatagtcaacaagaagtagaaatgaggttgtgtaggatttcttcattgtgtaataactgttggaaaagaaagaaattgaaccagaattataaattaagcataagtcgatacggtggcatgtatgggttaaaggttcattacattgtttttaactaactgatgtaagacaaaatgaacttgaagataaaacttaaggaaattttattaagaacaaaacttggatctcaataatcaaaataatatctcaaatttaaatgataatcataagtagtcgacctaataactaagttaagttatctaatttataggcaccaaagtacatcaatggaaaatctataaaacctagtaaataggaaaataagaactctaggacttgaaaataaatcttactattttcctttattgtaaaattttccgaaaattaggaaaagaaattaaatattcttactctttttagttaatttcccaagacatttatctcctttactggttctgtcttatatatatcctattattgaaatatatctattttaggagcttcctattctgcatcactaacttaagtgataattgtttttctggcagggtt

SEQ ID NO: 73993 - DNA, 581 bp, Carica papaya
  Intron number 3 from transcript evm.model.supercontig_114. 37 (locus evm.TU.supercontig_114.37) derived from phytozom e v7.0 (chr-ID supercontig_114; pos 580471 to 581051)
ttgcgcagcgtgtgtggatcactagaaattacaaggttgttcctctctcatttttcgatttctcttcctttttatttctttttgcaaaatatgttcttcgtataactgcctttatcaaattgaaaaagaaccacgtatggaattataaaattgttttctgattttgatgctcgttttcatgtttatttttaagttttcagtttcattttccattttttgtttttcttccctaagaaacttattttacaaataagtcctccaactcgaatggacttgaataaggacaatgatctgagaattttggacgcaatagacgaccttgttaaaatatattagtttatttaaaaattctgttcttgtcaaaaagtgaacatgttttttatgtatttgtatttattgtcagatttttttattaaagaaacaacagaaaattcgactaattatcagttagattatcgaaacatattttttaatttcttttagttaattcacgatcccacttgttttgtcctctctcgactatgtctgaccgactttggcttgcagggactacaagacaagattaaattggttcctctgaa

SEQ ID NO: 73994 - DNA, 726 bp, Carica papaya
  Intron number 4 from transcript evm.model.supercontig_114. 37 (locus evm.TU.supercontig_114.37) derived from phytozom e v7.0 (chr-ID supercontig_114; pos 581069 to 581794)
cttggtataaggagaaagtataccctcagaataaggttatttactttcataaaaccctcttcggtacttttttggatatctttattgaaaattctgtggtcgatgtggtaaagtttgatagtccgtggatgccattttagtcgattgacaagtcattaaatgagtcatatatattcatgtcttagatggtgaatagatgatctgcctttaccattttgacaaattacttttcaagtttcaatggttaaaaacctgtatgttctaactttttgttaagtatttagttgattatattgtacatcaaacaggcaaagttctattaggcttttgttatattttgactttcataaaacatctactgctatatatgcatatagttgcataaacaaatgcatgattgcctcaggaccgtgtctttcgggtttccttttccacaaggagtcaagcttattaaagtatatgaatttgaacgcatgattgccaccggactcgtaccagaagaatgttatgtatgcataacttcgagttcctgtattttataagaatgaacctgttgaataacttggatgattcattaccaacttatttggcttacaattgcatggtagccttttgttttgttctgttccagtttggtagttttctcaactcacaaaatataatgttgttaaattgctcttacatttatgaaaaatgcttatcagtaggtgccatcattggagcata

SEQ ID NO: 73995 - DNA, 932 bp, Carica papaya
  Intron number 2 from transcript evm.model.supercontig_113. 50 (locus evm.TU.supercontig_113.50) derived from phytozom e v7.0 (chr-ID supercontig_113; pos 637235 to 638166)
tggtaagacctgatttatcttcatttcccttcttaaactgtgcatgctccaaattcaccgagaagtatcttatacatgagattatgtttttatggtcccttgcttttgtgcttgaaactaaaatggccatatctactatttgcatcaagcatttaatctaggagaaatggagaataatttttgtaggccgagggctttggcagtgagcatcttttggtacctcaatttgatccatcaatataattctctagcctatgcatgatgttactaagattgtctacttaaaatggtgtctgggaatgatgcaaggttgggccccctaaaaaggagttctttacagtatttgtttgtttttaccagtaagaggcttagaaagaccatatttattgaaaggactagttcgacttacaaagtcattgaagcttgaggcagaaaatcgtaggttcggatttagcttgtgtgaacttgagtggataacagggtagtattgtgagagttaactactcagaacagttaaatgcttgaaaagatgtttgattctttgtcatcaactattcttatgttatcaatattcattaacttcagtaagtgaacagaaaacctgtcagaagcagcttacgtaaacatgtagggaagttataatttctgttttttattaaaaaattccactacagaggtaatagatgaatatgccatttgtccttttcccccttatccttttctaacacaatttccaaatatgttgaacttggtgaatgcttatttcttgaggtggttaagcaagtggtattctaatggaatttgatgcctcaaattgtcattttagtttgtacattcagcacctggaaatgataatgctttaccaataaaatattacattcatttttattttggagcaatagtattacaggtgaccttaattgctcaaggag

SEQ ID NO: 73996 - DNA, 924 bp, Carica papaya
  Intron number 1 from transcript evm.model.supercontig_1376 .2 (locus evm.TU.supercontig_1376.2) derived from phytozom e v7.0 (chr-ID supercontig_1376; pos 13711 to 14634 revers e strand)
tcttcgctgggtggcttctcattattaccacccaggtactctgtttttgtcctttttttttttttttgttttttttgaagtctattaattgttctttttcttgcttaatattatatatattaataaaattttaaggggaaatatatgtatatatagtaatttggcaacagttatgtatatacattctgctataaaattactattaaaaaaaaaaaagtaagaaatggttggtgtctacaaagataatatgattttcttttctaaaaaaactaggaatttttttttatgggttttacacttttattttattttattttttgaagcaaaagctggtaatgtttttcattttagtacaaagagatgttataaattgagacgagggaggaagcgtacttgtgaaaacagttgttggctcgctgtctgggaaactgttgacgtcatatcaggcatagaaatttattattgtatagtttttcactaaataccttatttatacactattaaattattagttgtgtgtttttaattattttaacctacaatatcttttttaagtaagcagtcacagtgttatgtgaaagttataagtaaaataaaaatatatatttaattaagtacgtttgttgcttatttttgaaagaagtttataagttttacatagttgcgtaagtcaaagaataagacaaattaataaaaaaaaatgtaggtaggtgataattacaataaatatgaattagtgcattcctcaaaaactacttgtgaaaatccaattttatgtgtatttttgttttaattaaattttttggaaagagaatttatttgatttttaagtatgcatattatacctttttattttctgaaaattattaaactagtgaaactaatatacatatatattatccgaatatatataggtgctgggat

SEQ ID NO: 73997 - DNA, 568 bp, Carica papaya
  Intron number 2 from transcript evm.model.supercontig_1294 .1 (locus evm.TU.supercontig_1294.1) derived from phytozom e v7.0 (chr-ID supercontig_1294; pos 1667 to 2234 reverse strand)
ttcacaaggtaaatatatattttataaatcaacataattcctctttattcagtcaatcagctaaagtgaaccaagattagcttggctgtctgtgttcataaggtactttatatcatagaaaagatagtttcctctttgtgtaatcagttgcctggctatgtatagtgttaactgttacatactttctctgaccagtacctaccagtaaatatcttctgtagccaaaatccaaatttaatccgcaacagtatgcatagaattgggatatctgtcccatgatgagtttatccctttttcctcctgtcccagtgaaattaatggcgtgtcttcctctcagaaggaatggtgctgctcgagtacttcaaacatatttcctgcacctacactttcaaaaactaatacctcggtgcaaagtgcaaacttcagtttatctttcaatgtttgtttatgtttttcttttctaaattattcagtgtatattctccaaattattcaatgtatattctctaattaaatgctctttgattttttagcttcatctacctgaactagcacttgcatattgtga

SEQ ID NO: 73998 - DNA, 575 bp, Carica papaya
  Intron number 1 from transcript evm.model.supercontig_13.2 48 (locus evm.TU.supercontig_13.248) derived from phytozom e v7.0 (chr-ID supercontig_13; pos 2188677 to 2189251)
aattaattccaagaagcgttcagaaagaaagaagggtatgtataatatatacctacttttcatgtatatttcttaaattctgtgagtgaggatgagagttattcacacccagaaaaacagagagaaacaaaatttgagagatgagattgaagtgagtgatttagggcttccagctggtttattctaattctcccccttctctgtaacatcccgcttcactgaatccctttcggttttccaaaagaaatcctgttttttattttgaaacctcattgatcttttccttttgattgtctgtttccttttgattttgacaaaaagcagataattggttttataaattttcttctgttttccaagaatgcaaaatggaaaaaatacttttagcaaattcggttacaatcttaccctgtaaattctaaacttacccattaaaagtttgattaaagaaattcaagaattaccataactggttgtgggtactaaatttggttaatgtaaaaatggaaaccctaattgattaaagattctggtataattttattcatggttggaaaaaatatttcaggaaatcc

SEQ ID NO: 73999 - DNA, 440 bp, Carica papaya
  Intron number 1 from transcript evm.model.supercontig_131. 26 (locus evm.TU.supercontig_131.26) derived from phytozom e v7.0 (chr-ID supercontig_131; pos 204021 to 204460)
aggttaatacatagacatgaacgaataattttggttgtctcttctgtggtgaggttaatatataaacatgaatgaacagttaaccatacaggatataaaacatgcgagagcatcctagttagggactgtttctaaaaagcataaatagacaaatagtagacaggcatgtgaaaagaacaataagaagaaattctactatcggtttgaagcatatgaagcaagtagaagaatttggagttgcataaatgtcaatcagcagaacttctgttggttggttttgtcaaataagatttatggttgtattggaatttgctttattgcattatgctaatgatttatatcattctactccaatgttaattcaaatttcttggtagaaaaatttgattatatatggtttttcagtgactaccttttcaaacttctgctcattggagatt

SEQ ID NO: 74000 - DNA, 554 bp, Carica papaya
  Intron number 1 from transcript evm.model.supercontig_119. 27 (locus evm.TU.supercontig_119.27) derived from phytozom e v7.0 (chr-ID supercontig_119; pos 140339 to 140892)
ttttgcagccccagagccgccagagagctcgctctgtatgattccttttctctctttcgccttctcctgtttttaagccttccttcttttccttccttttgtctccgactataagcattttgttcgttttaaaatttttctaaaaattcaagaccttacttagctcagcggagctttagaatcagaaggcttcagtatatgttacaattccaaatttgttagcaatggatttgggtaattacgagattcttgttgagtcaaaaatcaaattcaagaatcttctctatactttcagtctcgtgaacttgtatgtttagtttcttttctttattagtttaactcataaaccaatccttatatatttgatagttagattgtaagttcggtgctccttctgcaagtactttgctcctctttttctatttgtatgatatgctgcctactttagttaactaattaaactctgactaattatatctataactagaatgggacattagataactagtgtatcgtttggtgattttcatggacagattaatagtttacgcagc

SEQ ID NO: 74001 - DNA, 946 bp, Carica papaya
  Intron number 1 from transcript evm.model.supercontig_136. 38 (locus evm.TU.supercontig_136.38) derived from phytozom e v7.0 (chr-ID supercontig_136; pos 557121 to 558066 rever se strand)
ttgtgcctccatctctcgtcatcaacgctgattctgtaagattctatttgttttcttgaaaattttgtggcaacgttgacagtttttctgtattaatatatgaatctttaagcgttgtgttgagagacagccaactttcctataaaagataaaatggtgataaaaaatgagatgtaactccagtccgagttgccgtgtttgtttttcattagcttctttcagcttagtatcagcttatagcgtgcactatatatgatgctgtaccctttctaaaatccttagaatagactgctataggaaaaatgaacatatttgtcagattcatcaaggagatccagaacagtctcctttatagcctacgtatggctggggaagatgccttggttttatttgcatcattcacacctgcatgtgcctttgtgcatgtttatattcagccttaggtacttcaccgaaatcccaaatattttcagtttgatgcaaagaagagtgattatacaatagaagtaacaggaaaaatgaagcttttaagataatatactataattaagtattgcacatgtatcagattaaaaaattatgttgacaatttaattttgcaagaacaatgtcggctttcacttcaaccatgaattcaattttgtggacttttgtgtgagagataatgtattattatcaataataaaatataaggtcgtttcttatatgatttagtgttagaacattcttcttttttgcatcatgttctggtttctactttctgggttattatccatattttaatgttttcgtgaagatctatttttccttggaaagcattctttattgaggccaatatatccactttacgttatttatgtggtaattttcatgtgctcgtttatatgtgtgttgccgcaattttgcactaggagtggagctgtcccgaggctggtcaagtcttaaa

SEQ ID NO: 74002 - DNA, 852 bp, Carica papaya
  Intron number 1 from transcript evm.model.supercontig_100. 29 (locus evm.TU.supercontig_100.29) derived from phytozom e v7.0 (chr-ID supercontig_100; pos 1097116 to 1097967 rev erse strand)
taccactcacactagattcacacaatcacttccaggtacattttctcttccatctttggcaaatcctaaccctaaaaacatgtttcgttagatttaataattttgtaatcttaaataatgtaactactttcataatataatataattagtatagggaactaaaacgtggggaattcttttgcgacacaaatattttcattaatttttttttctttaagctttttggacatttattgaccttgtcaaaattccaacattttttcattatcttccttagaacacttcttaatttgcacaatataaggatagatatacatggcagtctttattattgcttttgatgatgtggctagattatgtaatattttgtttatatgctgatagatattttatattttaaatagaaattttatatatattctaaaaaatatttgtgtatattttagagaatattttattttatttttttcataatttctaggctctataactttattaatgatatatttttatttgattatagtagaatttttttttcccatctttttttgtagatatatgtataattattgaatcacattaaattttatattttttaatattttattataattgtacacattttaaaaatttattttctcaataatttgatatagtgaaatcaaacacatcttagtaacatatatgctttaaattagttttagttgagaaaaaatatatacatatatgtattcacttattgggttttcattaaaattaacttgaacatgagataggaatgaaatagtatataatatatatatatatatatatatatattcatataaagaatattggttgcaggttgttgtc

SEQ ID NO: 74003 - DNA, 832 bp, Carica papaya
  Intron number 1 from transcript evm.model.supercontig_14.1 67 (locus evm.TU.supercontig_14.167) derived from phytozom e v7.0 (chr-ID supercontig_14; pos 1916433 to 1917264)
cttgcatcaagtagtaactttatctctctcttggttataattgcatttttttttcatttgctaattctaagattgttttgtttcttatcttctgaatggtttcagtggcttagtgagatcactaaaatcattgttaatttgagttgggtagttggattgacagaaaacatgcttaatgtggggcagaagcttctgagctgaggtcttaggtttatgactgcaaagcatgtaggattgcatattattttcaattgtgtaattcagtttttgatgttagtgcagcttactgccaccagtgcatgcatcttcgtgctggttcctgatatatgcatttatatttgtttgcctggaactctatgttagcacatatcaatgatatgtaaaggtttatattaattgtgtgaccatgcaagatgtgttttcatctcaagggtttagttaatcactacacatgctacttttgtgtgattgcgacagctggcttattgtgaaaatataacctaatgtggttgtaatcaaactaatgtcaagagatttttctagattaccaccttttcacattatggttatagtggaaaatatttgttttgagttttaaaggtctcgagtatcctggtgttaatgttagtttttatacatttttgagtattgaccttcattttccatgctaggcaactggtagtactggtttttgtactcgttgacataagttttggaaacttttgcatggtctgttggtctcttctggagttgtggtttcagttctctttgcaagtctgacttttttaagattacaggtgtctgtgctctgtaagtgaagtggctagaaaag

SEQ ID NO: 74004 - DNA, 388 bp, Carica papaya
  Intron number 2 from transcript evm.model.supercontig_1212 .2 (locus evm.TU.supercontig_1212.2) derived from phytozom e v7.0 (chr-ID supercontig_1212; pos 6119 to 6506)
atcctgctgattatcgccctgatattactcaccaggtctgtgaactttctaccaaacaaaattgatgttaaatgctataagttattttttttttttaatttttgattccgcaaataattaatttatctaaagttctgaagatggtcggtttgtctcatgttattgtgtaacgagacaacaagtttgcaggaagttctaacttctttctgtgagcaaactacttagcagtgtattttggagaaaaaaggattgttcaaaactggaaaggcattgtatttctattggcacattaattttattgtagtagttaacttgtccttgtttgccaacaatgtcattgtttttattttcaggctctactaacgattctggacagtccagttaataa

SEQ ID NO: 74005 - DNA, 809 bp, Carica papaya
  Intron number 3 from transcript evm.model.supercontig_101. 4 (locus evm.TU.supercontig_101.4) derived from phytozome v7.0 (chr-ID supercontig_101; pos 177401 to 178209 reverse strand)
gagctggctttgatacaacgtattttcagttgaaggtgccttaaattacttgtaattaagtgctgcacatagaaagttaggagttacatctgtttctttctttacccatctatcttttttttttttttttttttgccccattattaacactatatttgcagaaaaggaaggggaaggagaggaaggaaatgaaaaatagggaatactcgttgttccttcatttgtttattgtttcactcgtctaagattaaaaataataataagtaaaagggaaatacaatgagcatctcccttagacttaaaactgttttgttcatttctcaaatatagctaaaataagagggaagagaagtatttaaaaatttttgaagaaaaaaaaatttatttattttttaagtacttaacttgtcattatagtaataaaggtcatttctgactaaattttttgtaactatcaactttttttctctaagtaaaatatctcggctatattttgttttatcttttcgatatttagttatccgaagaaggaaagtatctttccttttattttctgcataaattactcttttgctttttatttctttattttattttttctattcctttacttaatttttgaccaaatttagcataaaatgcagggcacctgcctgtttcatatgttgagtgatttattagaatatatcttttgttctgtacatgcatatccaattcttggaaaagcttctgttgctttcactttatgtaggcacaaaattctcaataataaacatctgctgtctttgtttccctgtttaattcacagg

SEQ ID NO: 74006 - DNA, 847 bp, Carica papaya
  Intron number 1 from transcript evm.model.supercontig_108. 56 (locus evm.TU.supercontig_108.56) derived from phytozom e v7.0 (chr-ID supercontig_108; pos 577544 to 578390)
acttccgaaaacagttggacaaatttgagaaacaagtacatccctctctttttcatatgactatatatatacatatggtgtctgattttgtacgttcagcatacaaattaaaagcgtgcacgtacatatgactatatatatacatatgatgtctgattttgtacgttcagcatacaaattaaaagcgtgcatgtacatttcttagattgctctcagagctaaaggtcctaattcatttttgaatattttcttttgttcattttgtcaatgtgaaagtgctagggagccctaatgctaggatacttggtttgagttgtggtgttagagcagaaaatagaaatactggaagtgtatgcctatgttcttatgctatattcctctaagaaaatgttcttatcctatgttgcacaacaagcaatgatttttgcagttaaaaaaacacgtaatacgatttgctgctatgttgcctccaaaatacttaacaaaatttgtggcaaatattgtgcaatttaggaaggatgaggaagggaaaaatatgtctagattgatgatatttgagtacttccttgattcttggcagtccaaaaatcgttgggatataaaatttttgatctaggccattataagaatcacttggtgtccataggataccatactcatgtaaatatgcatagttggatgcacttatttaattgtatttaatttgaacttaatggtgaataaacatgagggcaccatgtccgtaaggacattatagttagatgcctaatattaatctgttcttacatcagattactttcaacttcttgcaggctactgggcccaagggggagccagtgacagagca

SEQ ID NO: 74007 - DNA, 277 bp, Carica papaya
  Intron number 3 from transcript evm.model.supercontig_106. 39 (locus evm.TU.supercontig_106.39) derived from phytozom e v7.0 (chr-ID supercontig_106; pos 505410 to 505686 rever se strand)
tctttcttgatcctcatcaggttcttcaacccagtttgtcaattacctttgtttaatgcataaatgcatataattatacgtatttatatacgtatgtaaaccttcattttgtttgtcaaggtgaatgattaaatgtccactagaaacaattgagaaaggatatttttctttgaaattcccattgtttttctttgatgatttgatagattttgatcactgatgagttaaactatgtgggtttttttttaatgaacaatttcagaggtttaaacagacc

SEQ ID NO: 74008 - DNA, 559 bp, Carica papaya
  Intron number 1 from transcript evm.model.supercontig_130. 9 (locus evm.TU.supercontig_130.9) derived from phytozome v7.0 (chr-ID supercontig_130; pos 172035 to 172593)
ccttccaagcactctctcggctacctatatctcctgtgagtttccttctccttcttcttggccaattcatcgtccccttccataaaatatgagtatagttgtttggcatattaggttttagttgtttttgagggattatacgttaaataggatcgtctatttgtctctgcaaaagtggggaccagaatggtgaaagacggaaagttcttgtgtggttgctgagaaaaatgaaggaaagaagtggaaatttttattttgagttgtggggttttgttgatgtggttactggattataagaactatgaaaaagttggttgttgttgagttgcttttcaatttgagtagaactgtaagttaaattgacacttgaagtagacttcatgatttgatttagttatcttcattaagatgctagtgggagaaaaagatactgatatatgagctatatcttctgtaattcatggattgaacgtggggattccttaatcaggtttatgatagtggaagaaatggaatttgttactgggttctcactgtgcattttttggttgtggcagtg

SEQ ID NO: 74009 - DNA, 276 bp, Carica papaya
  Intron number 2 from transcript evm.model.supercontig_118. 17 (locus evm.TU.supercontig_118.17) derived from phytozom e v7.0 (chr-ID supercontig_118; pos 184033 to 184308 rever se strand)
ctgctaaaccacctggtttgctttttcatatttttgtatctacatgccatgataatttaaactcaaaaccaaataattgaccttttctatctggtttcctttttacccccctccttcattttgtctatccatttttcttttcctgctttatctaagacctgagggctaaaaaaacaaagatcaaaggggaagaaaataaacaaaacttgacttgctggtttccttttgtcatcggcaacagtggtgtactgcgctaaaccttcctcttgtaaggtg

SEQ ID NO: 74010 - DNA, 693 bp, Carica papaya
  Intron number 1 from transcript evm.model.supercontig_125. 56 (locus evm.TU.supercontig_125.56) derived from phytozom e v7.0 (chr-ID supercontig_125; pos 926315 to 927007 rever se strand)
cccgtaattattcgcttccctctctttcttagtcttgattaatttatcatttcgtatctgctactctgaaaattcttcactccagtagactcctgtaacgaattgattagttatagtttattctttacgtgtttgaatctcgttctgttgtttctaattttcttttgttggggaattttgatgtttaagttgttatttcatcgagttgctcggttttgtggatggaaatgtgtaggaaatgtggaaatgtggattgatttcttttgtgggtttatgggtttttgaatgattttggagttaaaactgaactttgctatttggtagtttatgagcattagagttgcataattatgttgctatcgttgggaagtgttgatgttttaattgttttttcgccgagttgctccagttttgttgataaaaaagtctgggaaagtaaaagggtggattgacgttttttgtgggtttatgggtttttgaatttttttggggttaaaactgaactttttgctatttgttagtttatgagcattgaagtttcatccttaaaaggcgaatgggttataaatagttgattttggtaatgagaggtttcttgaattagaaaggttcccggtttaacaaatcttgtctaattgccttgtatgcacttttggataaagcttaatgtaaagttgctttttgtttccagtt

SEQ ID NO: 74011 - DNA, 982 bp, Carica papaya
  Intron number 1 from transcript evm.model.supercontig_12.1 48 (locus evm.TU.supercontig_12.148) derived from phytozom e v7.0 (chr-ID supercontig_12; pos 1388622 to 1389603 reve rse strand)
tggcgatttgttgctggaaacagccgcattttcaggtcgcccctacgcactcattctatcttttttctctccatctttctctagttctctgtttggttgccgataaaacatgaagaaagacgagtcgagaattttggaatttccttccagcgttattctggtttcaatgataaattgaataactcaaccagattaagctgtgttgccgtcagtatggtagctgacgattgacgaataggttaaggaccggaggagaaagtgcaagccattgtttggggtggcattttcaaataaaatagctgatgcatggagattggattgatattaaaaccttttgaggtgatgagacgtgcattattgaaatcttacccaaaatcaacccaatttttattcctacaaaattgtgttctagagactcagtttggcaatacattatctttcagtttggtgatacaatatctttgcctcccatcagaggatgttacggtcatagtttcatcactaggaagattagtataaaggttattttagtatctttgaattctatgttagagaacgggaatctttatttggatattcatcttacaacaatgtcctctagctttaacttgtttgaatgctttgaaaattgaagttttttttaataaataaaaagctgaagttatttgatgcatgaagaagttttatttcaataatgaaagaaaaattatattaaattcgagtctcttgtcccctatcccccttcccctttcacttgggaagatcaaaaccatgtattggtcatgtatgttgacagtttactaattgacgagataataaggcctttggttacgatttacattttcttgtgaacattagactgagaggtataggtttcatgttgaattcatcatgattttgatgcttttcttttaccatcctgaaagaagaggggaaaatgaaactatttcttgacagtttttcatgatacatttattgcagc

SEQ ID NO: 74012 - DNA, 565 bp, Carica papaya
  Intron number 3 from transcript evm.model.supercontig_107. 92 (locus evm.TU.supercontig_107.92) derived from phytozom e v7.0 (chr-ID supercontig_107; pos 495247 to 495811)
tgctttccgcaggtgtgattcttaatcttctatttggtttcttagagagttcagtaaatgctcactttcatacaaatattcgtctcgattgagttggactggtattttgtgattaactctctaaagctgaatttcttaataaaacgtctaatgccgtgacttgttatattcgttgcccagaatggttttctaacaaaattattggatttttttcctttggatatatataatttaatcaggacgcattggcaatttgtcagtgttttacaatttgaaccatacaactgcagtttatgcgatactcttccatatagaaagaaactagccgtgtggagggcttcagtccagagttagctattgttaccattagggaagggaaggaactggaatagaaacttgtggtatgcagataatcagcagttgtatgaatctctgactgactatagttggtgatagtactggttcgagtccgtggaaacttatgacctgagttctggctttgattgttgcacttcttgaggttgtggcaggttcgaccaacaagtgaaaccattgtgaatcacat

SEQ ID NO: 74013 - DNA, 666 bp, Carica papaya
  Intron number 2 from transcript evm.model.supercontig_129. 32 (locus evm.TU.supercontig_129.32) derived from phytozom e v7.0 (chr-ID supercontig_129; pos 263292 to 263957)
cactccgggtaccggaattcagtaagatttgctggttttcatttgattgcaaagtaaaatctttacttataaggaatcttgaatttatatcacttgcagatgactggatggtcctatctgagacattcattcttaatagattctcttacggcatttgacatttttcatgattgcaatttgagtattcttccaagcatgtacatctggtccaaggttaggaaatgtagcatgggaagtagaaatcacaaagggatgtagcgggaatcatagtaatatttccaggattcgtgacatgattattcatgtcaaataaattgatgtctggatttccctcgaaaaaaaaaatgatgcctggatattgtaattagttattcataaagtttactgtttgtgttgtctgtgtactgctcaggaagggcatcagttctcttaatcagaaatgttcgtactttgcatgtgtatattcacatgcagatattgtgcatatctgcattagcatcagtaaagagataactgaaatttatatcttgaaagtgatttaacagcctaattactgttacataggttgcaaaataagttatcaaatttcccattatattcctcttctaattacttaaccataaaatattgcttacaggggagattttaacttgaacaactttgaag

SEQ ID NO: 74014 - DNA, 573 bp, Carica papaya
  Intron number 1 from transcript evm.model.supercontig_132. 37 (locus evm.TU.supercontig_132.37) derived from phytozom e v7.0 (chr-ID supercontig_132; pos 435542 to 436114 rever se strand)
aggaaagagtggttggattgctttgaggaggtaaagaaaattttatttcattttatttttctaaaaatggatcttgattggtcgctaagaaacttgaagaacgtaagagttagtttttgagtgtttttacattgctttgctctctagttctactagtgaacagtaaatatagtttaataaaactaccttttagcttctaattatttttatgtattagttgcaatttattttctgagctaacgaacagatcatcatatattccaataaacttctccttttctccttcttcctccttcttctccctcacccccctcttctcaatcccccaacagagaagaaaatttggtattttatattgtatagcctgtagactttatataccgtggaattagcttcattatagagtatttgtggaaggcattagttgctttcttttcaccttccattgttttatcagcaagtgaactgggttatgtagttttgttttagtgattggtgattcaaatgtttgtgttattgtttttagaggaattggatttgggtttgtagattcaagaattgctcgtgaagttc

SEQ ID NO: 74015 - DNA, 855 bp, Carica papaya
  Intron number 1 from transcript evm.model.supercontig_1.11 5 (locus evm.TU.supercontig_1.115) derived from phytozome v7.0 (chr-ID supercontig_1; pos 1805230 to 1806084)
ggccaagctcgccgaacaagccgagcgatacgaaggtatgttttattttcttatatttctctctttatatcgtggatcgggtcgtttcctggtgcaacattctggtttagtccaggttattgattaaaatattctccttttctgcgatgtagctagacaaataagattttcggttcgagttcggttttctcttctgttgttatttttttcctttgtacgtgattgtctgcttgattattgaatatcgaaagaaatcgtgctcagactgtccttcattggtttcgaaattcgtttggactaatttatgcacgtaattaaaacttttgacttagaattagaggtgcaattgaaggtgctatcaggaatgaatgaaaaattccttatgtgttctaataagaaagctagacgatcttttttgtagaattctttcaagaggaattgtagtaacaaacagaaaatttctgtttttaagttagtttgttgtaatgccgcatctgatccttattatggtctagttattgatgcattaactgacatgattatgggctaaaagtacccatttggtgtttttttttaataatatcagttgattatcaactgtttattctcatctgccgtaaatatgctcgctattgagctttaatgaactattgtttgagttgaagctattgagctttaatgaaccattgtttgagttgaaatgtaaacggttccggatccactaccatgcacgacaggttgtaacagtttgccagaagtgtagggaagtatggagttgctgtagattgaaaacattggataacaaactgggagtataatctttattctgaatttttgcttggttgtcacgcagaa

SEQ ID NO: 74016 - DNA, 740 bp, Carica papaya
  Intron number 1 from transcript evm.model.supercontig_14.1 63 (locus evm.TU.supercontig_14.163) derived from phytozom e v7.0 (chr-ID supercontig_14; pos 1856152 to 1856891 reve rse strand)
caggaggtattttctgctgttattgaatattggcattgttatgtgtttatttatggtgattcttatggtatagttaggtgatggctattgcaattcagtgaatttctagtaaattttacttcttatgtttttttttttcatcagggtgttagtgaatggtgctctttaggtctacgaagtggaaatttttttaagtttatttagatgtgatatgtgaagaatgtaagtaatggtgatgtataactgtattatcaatatctttgtattcagttcttcttttgctcgatcttttgattcttcttctgctatgattaagtgaaaaatgatgaagaacattgtgtatttgtggctaagttaaattttttcttttcaactttataagtaatatcaaatggcgccttttcacctgcatgagtgaaattgttggtttatttttactcattgtgcaattgacacagatgttttggtgttttccctaattgttgattagttaggagttacaagcctccttattttgtcagaaacctgaaagaaatttattgttaatttggtttacctgaaagaaatacaggtagttatgtagcctaataatttgtaattgatctggtttttgccaaatttttaacttctctgtatctgttattctggtttatttgatgatgaactggggaagtaatttccttttttcttcctgacttgctgtaggttgagggacaaactgaggaagttatctttgatca

SEQ ID NO: 74017 - DNA, 717 bp, Carica papaya
  Intron number 1 from transcript evm.model.supercontig_10.1 48 (locus evm.TU.supercontig_10.148) derived from phytozom e v7.0 (chr-ID supercontig_10; pos 2019487 to 2020203)
aatttggacaattgcaggtgagcacaactaagtttgactattttattatgctaagccacttagcatactctgctagatttgttctcttgacatttagaactgacaacaaactgttactttttgttctatgacgaaattcatatctatcattgatcaagagctttgatgacaaacttcggtgctgcgtacatacttgctttttgatctaccccttggtatactaacatttttttccttcaaaagattatgtttggatttcgatgttatattctcaggaactgtgtataaggcattaataggaagaccttcaattgatggataacaatattaagaaatgttcatgtaattatgttatgattgtttgtgttattaagtgtatttagttctttaggaaatattaaatatctcctaaaggtattacggggttctaaagtatttagaatcatgtaatgatgactgattagcttcttcttttgtctcctttgtttttctactacatcagctagacatgtctctttacttttttgtcttcttttgttggacattttctggcttgtacacataattattaatggaatttgatacaagaaaaaagatgtaatcgccttcctttacagaactggtgtacttcatagcattatatatttgttttgcctcttttacatattcatataattttcacaatcacccgtttcttttcaaggtacttgacattgg

SEQ ID NO: 74018 - DNA, 692 bp, Carica papaya
  Intron number 1 from transcript evm.model.supercontig_123. 30 (locus evm.TU.supercontig_123.30) derived from phytozom e v7.0 (chr-ID supercontig_123; pos 441279 to 441970 rever se strand)
gtctcttctctttgaggtatggaaagaaagaaagtagaattttgaaggaccatttcctacttcattgcttatttgggagaagctgaatttttagttttagccttctgtttgagctaaaggtgaatgcattgactttgatacttgactgactgttcttccttgatctttttttgtttcagctgtttctctaatttttttttataaaaaatattcttttaagatttattttgatccttttctttttggtggatgcctaatcttcccatgatgtatgtaattctaatgctatcaataatacttcttttctcataaaaaagtcaaaaccagttgtaatcatacacctaaacataatagcttgctcgtttagagtatttcaatattagcatgttgatgagacactttagtagaaactgtccacctcataaagcaagaagagaaagaggataaatggcatgagaacaaataaatgtaagagttggttgccttattttttggaggttgatctagtgcatttctgcccaggaccacactgcattgcacataaatcttctaattctttatcatgtattacaggaaagaggcatctcagagtgaagaaagaagaatgacagatatagcagggaagcaattcggttaattcctcaaaatatatcacaggaaagagacatcttcgaacctggaaagaagcagga

SEQ ID NO: 74019 - DNA, 734 bp, Carica papaya
  Intron number 2 from transcript evm.model.supercontig_1.18 1 (locus evm.TU.supercontig_1.181) derived from phytozome v7.0 (chr-ID supercontig_1; pos 2792839 to 2793572)
ttttctatttgttattgaaggactgggtgattagggtttatgtatctgtttttgttgtgtattgtgttgttttacgtttgccgagaatgcgatgagagtgtaaattaattgattactgtgaattctttgtctaaattttagtgttttgagtgctttttcttttcttttttttgtttctcttggtttcgtcaaggtttaatttgtctctgtaagaggtgttaggtaggttcgcttgttgaattgtgtgggacatgaagagagattgtttgaatttaggtattgaagcgtaaacctcgctaattgtttacttcaggagtgaagtttttgcagtgtacctacaatttggcattgttgtgattaaatgagggatttattcaattgggtattggtaagactatgttgtgggctttgtgattgatgggcgtatttgatgtgtgcctgattttaagatgtacagcaaatatgcttttacttcagtacaagcaatgtgtgagattgtcaccctcttgagttttcttcttagaggggcaagctaattatataaagcagattcctttcagtgtggaaatagcattgagaagaagagggatcttgttatatattgcatttattttaactacaatactagtccttccgcatgcatgtagcttgcgtgtatgcacaaagagacagattatattgtttgtcatatctgtgtaggattgcgaacaaacggtcacttcccattcatcttt

SEQ ID NO: 74020 - DNA, 576 bp, Carica papaya
  Intron number 2 from transcript evm.model.supercontig_119. 5 (locus evm.TU.supercontig_119.5) derived from phytozome v7.0 (chr-ID supercontig_119; pos 32636 to 33211 reverse s trand)
tagttttgccaattattcaccgtggttttgagaaggtagagttgcatttcagttaattacttttggacatttatgctgagctgattctgaatatttgcattgacgattattaaattagaggatcaaatgcagacaatgaaatgacttatatggatggccaccttggataacctgtaacgaatgatggataactcgttctcatgtttttcttgtgaaggagaaaaagagcaagaaactaggaaggagaaaattagaaaattacatatgtagaaaaggtatggttttgagtggaaatgatgcacaatcaactggagaggacaaagcattaaaatagcttcaatttattttagtagctgtaacacttgagtttttatttgagttataagatactcctgatgcttatcagagcaggaagaaactggatttattggctgcagtttaagcttatgcacgaatttttatcacttgttttaaacttggagactttgtaaaatgttgtgctcatttaagaatttgatctggttgattaaattgctcattggcctgcttatatttttttgttgtgtttaacagata

SEQ ID NO: 74021 - DNA, 865 bp, Carica papaya
  Intron number 1 from transcript evm.model.supercontig_136. 75 (locus evm.TU.supercontig_136.75) derived from phytozom e v7.0 (chr-ID supercontig_136; pos 768330 to 769194)
tcttgatcctgacgccagcagggtgagtttctccattccgaatggtttttaagaaaatgcgaagttaacgacggtacatgagattcatgtgaagttgtttctctttttgtcactgtagcttttaaaaattgttgtttgattcgattaattattcctttttggtttcctgttgtgggaaacagttgcatgattgcttctattataaactttattttatgtgcgtattcctttgcataagtaacacgcacagatataacaaactcgtatatttgacggatcttcttcattatagtcgatgaatcactgcatttacatgtatttggcagtcaaatggataataatttgaattcaaatggtcacaacattatcttcaaaatcgtgatctaagtagtcctatgaatggaatagatgaattctatgcgcaggagttctacatacaaaagtcggtcgggtcccaactcgatacggaattcatgatgtcattcttttacaatctagcccttattggacgagcagcggagggttcctgtgggtttctaatcccatttgtatttccatttaagagttatctatattgtactataattgatttacgtatattagtgattgataaaattattaagaacttttttagtcctcctttagaaatttatgcaccggattaattatatgtacatccaatcaggtagatgagaatcaaggatcccaactgattattttatggttcacaaactgatcatgaagttctccgctttttatctcttttgcgctgtggagttcctgtaaattacataataactttttttctttcaatttctgatttcgaatagagcgtgctaggtattattcttggaggtggtgccgg

SEQ ID NO: 74022 - DNA, 923 bp, Carica papaya
  Intron number 1 from transcript evm.model.supercontig_135. 40 (locus evm.TU.supercontig_135.40) derived from phytozom e v7.0 (chr-ID supercontig_135; pos 620650 to 621572)
gccatatagacctccgtttactgagccttttcctggtatatggatcttcccttgcaaatttcttttcaaaattttatctgtcttattaattggatacgagttctgtcttatttaatcgttagaagtgtagtcaaagaataagacttgtaataggataaacaattgaccaaaaaattagaataaactcgaataccagaggattgttgtactgtatatcctcaaacacgtaaaactttcaatgaactcgaaataatagataactttttcaaaaaaaaaaaaaaatttcttatgttgaacaatctaataatgttgaacatctaatatgtgaaaaatagaaatgataaaaattaaaaatcaggtcaatatcataaaattttcttatttttatcattttatcaattttctccttgtatttttagttaaattaattcaagcattataaaaatgtatcaacttttgacatccgaagaattaaggtgaagaaattttatcttgtttcatgttcacaatacaaataaaaagtttttggcaataatttcagctaaagatacgaagtagaatttaatacagttgtaaaagttatgtggatttactgaagttggactctttgttgctgctttgtttgcttattttcatttctgtgcagaaggtctttctttgttgttctattatttatttttttatttagttttgtaacttgtagcccagtaagcaaatgtagttaaacttttaagttttttcttgctcaggagaaatttcgtgcatgttctaggttttccattgtttgtaagacttgtggcttctgtttcatgactaaagcttgaaattaatggtgtgtgtattgtcatgaattggtcctgtgggacaacactttgattttgttaacagattcttcctctcaagagatacaatcagtgacatta

SEQ ID NO: 74023 - DNA, 748 bp, Carica papaya
  Intron number 1 from transcript evm.model.supercontig_1.20 5 (locus evm.TU.supercontig_1.205) derived from phytozome v7.0 (chr-ID supercontig_1; pos 2949108 to 2949855 reverse strand)
cctctgattccgcttccgtctctgctgtcgatcaggtaatcctctctcccatctttctcttatgttctgtctacttcactaagtttgcgttgatgaagtgaacattttctcctgaattgcagaaattgatggcaagttcttttcggttcaaatattttaattattaaaaaaaactgtaacggattatttgttttctgtgtttagtaacttaagttcgccagttttctttcctttttttctttaaaaaaaaaaaaaacgatacgagtccggttttggttaccttgatcatgcattggctaaatcattttgtcaaagcaactaataaattcaaagcttcaagcctttatccgtaaagttttacggctgtcaatcacttcgattttggtcatctcgtttatggtatatttcatggtttcagtttttttttttggagaaattcatggtttcactttttccgacgagttcgtgtctcgttctgattttacgattacaatgattttgattggcttcgttgtctttcgaacttcaacgtctctatttccattttgtattcagtttataaatcactaattgtatcacatatttacatttatgtattctcactttcactctaaagttcccgcacccatcgtcatatatgatatatatagacatactttaggttacgtattcatttaaatgtctatatattaagaaagttctcaagtttatttccgttttcgtaatgttggctttttgcgagttcaga

SEQ ID NO: 74024 - DNA, 355 bp, Carica papaya
  Intron number 3 from transcript evm.model.supercontig_112. 21 (locus evm.TU.supercontig_112.21) derived from phytozom e v7.0 (chr-ID supercontig_112; pos 180131 to 180485 rever se strand)
ttcaagtcagtgaggcttcttatgcactttgaatttgtgccctaggagcagcttttgtgatgtaggcacacttctgatgattcttcttttttaatttaatcagatgtccatttgctggcttatattcaatcttggctgctgctttttcttaaattctttctactgttttcctgaggatacttttatatgtgaaaagagagcacgaagtagggattcgtttgtccatgtctcttgcccccttgatgttatttgccttatataatcacctaattgggagaattattaagatgggaattttctggatgtttattttttactaggaaatttgaagcgatcatcggaaagcatctgccag

SEQ ID NO: 74025 - DNA, 799 bp, Carica papaya
  Intron number 1 from transcript evm.model.supercontig_13.3 02 (locus evm.TU.supercontig_13.302) derived from phytozom e v7.0 (chr-ID supercontig_13; pos 2824851 to 2825649 reve rse strand)
cacttagacccgacgcttttgagaaactggagaaggttcttcctcgtactttttgctgcatcttttcatttcccatttctaaatttgtcgctctacttgattctgttttgatacgtttgttcgtttcgctgagctgcgtagttgattggttcagatgatcgtgtcgggttcttgcgaattctgaacagagatgtttcgtttctttcttatttgttctggtccattggattttatatgtgttgattttgagaaaagaactttacaagtctgttcccagatttccttccttcttcttcttctttactatttgctctttccatgcttttccccttattaaatcctctgttcaaaataagttagctacaaaagggaacttttgtttttttcttcattcgaggatacagaacggaacttaacctcacttctctgttcaagcatgccttatggcatttatttagcctgatccttttgttcgagccagacgactcgagattatctttttcccttgttaaaaggtacccagatttgcaaagctaaaattttcacctggacttattacccagatctactagcggtggaacagacttataatcactccgctaatgacaactcaatcaactctactaatgcaatttcctctttctaaattcttttcaccctttatttctaagcattaactcaataattacattccagaatttgacactggttatgctactttaagtagattgtctaactaatttgatttcaaattgcttgtctagattggacagggtacatatagcagcgtgtttcgggc

SEQ ID NO: 74026 - DNA, 883 bp, Carica papaya
  Intron number 1 from transcript evm.model.supercontig_10.9 8 (locus evm.TU.supercontig_10.98) derived from phytozome v7.0 (chr-ID supercontig_10; pos 1561695 to 1562577 revers e strand)
tcaaaaagactggtaattgtctttctttttgtttttgttttgttatctttcgatttctgtacttcatatcatattccgctttcatccaaggcctatgagtaggtagtttctggaagtattagattggtgcattttggatttttgttttgaaccttttgataagttttcttagacccacccatataacttacagttttatggattggccttttctcgtttttttttttttttaaaatcaaaatacgtgttatctaaaatgcacgagcctttctaatgtttcagtttaatatggggctgatcctgcatcaattcaatgtattttcattagatattacatgtaatgaagacaagcaaaagtttggtccactttatttggttcatagccttcccatgtccgtgtcacttacaaggaggaaactgaatatatcgggtctattgcagattatagaattaacacaatatgacaactcatttgtgaaactaattgatcaaaccaagtcattggaactggcttgtaaagtactccggcaattgattctcattcatttttaccttctattaattgaagtaggtgttatcaaaaagtaacattttgcatcttttctttttctcttcatttaagtacaagttcttggtaattatcaagccttagtctagactgagtatattggatatgttggtaagtcccgtcaaagacttgaaattgattttgttttaactcaatcctagatatgtctcgagtaataattatccaaataaatttgttcacatagagactgtctgaacttgtctgggtttcgttgacttgtggacactcgtgtaaattttttattttgtaacttttttagacagtagcagaggtaaaaaaggtgagcttagcaag

SEQ ID NO: 74027 - DNA, 251 bp, Carica papaya
  Intron number 2 from transcript evm.model.supercontig_119. 95 (locus evm.TU.supercontig_119.95) derived from phytozom e v7.0 (chr-ID supercontig_119; pos 651208 to 651458)
ccaatattatattgcttgcattaaaggtactgaaacaatagtccttctgttttttataatttctgaaaaggaatattaggttaattttcttgacatgtttagttgaagactaaattaattttctcgacatgtttagttgaagactaaggggtggatgtcacatgaaattttgtctttagtgggtcgtcttcttcctaaatttgatctagtaggaaacaacttatgtcaaattgtcaatcatttgcaggcgt

SEQ ID NO: 74028 - DNA, 635 bp, Carica papaya
  Intron number 1 from transcript evm.model.supercontig_13.2 14 (locus evm.TU.supercontig_13.214) derived from phytozom e v7.0 (chr-ID supercontig_13; pos 1902961 to 1903595 reve rse strand)
ctctctggtaatctccatgttcttttttaaataagaaaagttggtgtatctgcaatttgaattgaaattttttgtttaatttctgattagagggctgattatttgaatttatggtaggttatatgaaaatttccacatcctcttcttagatttacttacaaaacgaatttctgtttgatataaataacaaattaaaaaatattttccgaaattgaagttgatcgccagtgtttggcggaaaaaccaaggatatcactatagattaaaaagcctcagggtatgctgaatggtaaattcatacattattatgcccttaatcggcatttaattaaaatgtgaaccaaactcaagatagaaattgcttgtgacttcttgatctgaaccttgtttagctctgtcctgatgcaccatctaagacaaagtttggggaacacttagagcagttccactatttagtcaacttttacaatgttgaaagactcgtacttgtagatagttgactattaaagcttcttttcagtctttcgaatctactttatgtatctattgtttgtaatgacatgttgcaatattcttccactttttgggattaatttgcagaagaagaacctgaactttgcaagcggccaacaaag

SEQ ID NO: 74029 - DNA, 438 bp, Carica papaya
  Intron number 2 from transcript evm.model.supercontig_130. 75 (locus evm.TU.supercontig_130.75) derived from phytozom e v7.0 (chr-ID supercontig_130; pos 759810 to 760247)
atcagcgtgttgttcttgtaaatcaagtaatttccccatttttctcaatgtatttttggtaatgataattattattatttaacatcaagttagggaatgaagaacaacgctaacctatatgggattgttttaatggatctactaaagaattttcaaatcctggaaataagagaaaacagaatatgaattaattctatgtaagttttctttttcttttaattttaatttatttagtttaaaattttgaagtatccgtgaatagtagtctcaaggcaaaaaacttatattgaattctgataataaaacaaaatggtttgaattgtaataagatcaaactacaaaaagattaagactctacttgttacagatttgatctttctgtttgtatgtggaattactgtaggattcgttttaccactctctcagtgaagagaagct

SEQ ID NO: 74030 - DNA, 401 bp, Carica papaya
  Intron number 1 from transcript evm.model.supercontig_1.42 4 (locus evm.TU.supercontig_1.424) derived from phytozome v7.0 (chr-ID supercontig_1; pos 5231491 to 5231891 reverse strand)
agccacctagaaaagtacccaaaactccccataaggtctgcatctttttctcggtggttttcttttggagtcttccatttgttgactgagaaaataggaaaaagaaaattttatctattctgaacgatgaggataagattttccagttcttttttttttcattattgcgggttttgattttgaagagaacatccaaatctagaggatcattggtttgtcatagcaatttttgcccttgataattatttttttgttaggttccatctgctagctaagaaaatggaaaaaaaaaatagatcaaatactatatagatttatcaaatatgagttgttatttctagatgtggtagatggaacgagtgcaaatgtatgattaaaacttgaatggctgcaggttttgg

SEQ ID NO: 74031 - DNA, 904 bp, Carica papaya
  Intron number 1 from transcript evm.model.supercontig_108. 19 (locus evm.TU.supercontig_108.19) derived from phytozom e v7.0 (chr-ID supercontig_108; pos 247189 to 248092)
tgtttctgtcaaaagggagttacttgccttggaaggtatcaaattcaataacagatggcacagagttattcctcttacaatcctctggatcatttggaaggaaagaaactacagaacttttgaaagtagagaaactaaccttacttatattaaggacaagtggctgcacttttttggttccattgttcttggtcataaccttgtttcttctgatgatcttggttatcttgtagatattcttactgacctgtaaatttctttcgtgcatgggttcgcccccttggcgtctctttaatatttcatcttacttttatctcaaaaaaataaaggcatattagtttattattatgtttccaagcatcagacaaactgaaatctggacgaattgtctgaatcatggattccctctatactatcttgcgtaggagtagactgccatggagataagcactaaaatcatcaatattgtgttacattgaaaatagcacctagggccatgctgtattgcttgctggatgaattcagttactgaaagtttctccttttaatcattttgttttctctataatcttttcagcaccattgattatattttgtttgttgattttcttaccttctgtagcttggtgaattttacttaagaagagtatgaaattaatatttgattattttatttagcgaactgctttgctgttgtattgatagaatagctccatgcagaatcctatactgtcttgctcatgatgtgattttatatgttttaatgaatctgagttctcatgcttgatgcaaattcatgtgattagtggaaaaaatgagaaataatttctggttttccatatagaaagctataaacatatatcttttaaccatcctgccatatgaacagggatctatataggtg

SEQ ID NO: 74032 - DNA, 347 bp, Carica papaya
  Intron number 1 from transcript evm.model.supercontig_13.2 18 (locus evm.TU.supercontig_13.218) derived from phytozom e v7.0 (chr-ID supercontig_13; pos 1928686 to 1929032)
acgcgattacaaatacttcctcgtaagctcctgttattttctccatttgatttttttttgaatttacaattttgcattatagtttttttttttaattaatgctctcaatatatctcgattgtctctatttggttgctggagaataaaacagaagagaacaaagattttttaattggaatggagaaactttttgttcttttatgagttttttagttcttatatgcaaattacttgtttatttctcaccatttttctgtagttcataatgatcttattcagtttagctttaattttattaagaaattatgagatgattttcagaccaaagaacatatacaaggatccag

SEQ ID NO: 74033 - DNA, 802 bp, Carica papaya
  Intron number 2 from transcript evm.model.supercontig_13.8 5 (locus evm.TU.supercontig_13.85) derived from phytozome v7.0 (chr-ID supercontig_13; pos 865035 to 865836)
aattcttctgagggtggacctgcgtttcaggtttgtcctactatccaagtattggatatggttgcatccttaaatggttgtttatcttgttctttatatggattaatgtcattagtattctgtagaatatttcagagaggatctgtgactttttaaacgctttcgaaatataactttagtttgctagtttttttaacactcaaagcccggtgatggtgggagtcttaagttcttaatctgatagaggtatctatacttgtatatttgttggagcctatgcaaggatttgctgttcttttccgaaatctttttttcgggttgcattcaaatttaagtagaaaaaatagatgttgcagttgctgcttgcgctcaagtacttgctgataaattctcgtactttctcaacctagtatgttagctttaaaccggtccttttgtttttaatttctttctttcaacaaagtgaaggtgccttagttgaagttggttacgttctgagtaatttaggtgtttgctgtatctttgtgctggctgtaaattcttaccattgcatgcgttgagttccctccagtgcttgtcagttattgttagtaagaaggcttgatatctgaaccaatcatccagaagcttacttgcactggacacttggtccttctcaattactggaattcagcttttgaatcctggaagagagaaaacattgttgcatacaactacaattttccgtcaggttcttctgattctgagaaatattgttttaactgcaggtagcagtttctttagcagcttgcatatattttct

SEQ ID NO: 74034 - DNA, 311 bp, Carica papaya
  Intron number 1 from transcript evm.model.supercontig_102. 32 (locus evm.TU.supercontig_102.32) derived from phytozom e v7.0 (chr-ID supercontig_102; pos 941968 to 942278 rever se strand)
ccgacggaggtcagttattatttcccttttcttttcaataaacaaaaattatgtgcagaaggaaattttcatgtttagtttatttgttgggtatttgacacaatagtcgcaacggataatttgtttctaatttgattaatggggttatctattgttttcttaattttcatcatcaatttgtactggtcttgtcagtcgccttgaccgacaaaatgatttgtttctatgaagatttttggctcgcttgttgatgaaattagtggatgatttcttttttctttctggtattgctttgtgtttatagcaattga

SEQ ID NO: 74035 - DNA, 874 bp, Carica papaya
  Intron number 3 from transcript evm.model.supercontig_1.32 9 (locus evm.TU.supercontig_1.329) derived from phytozome v7.0 (chr-ID supercontig_1; pos 4426614 to 4427487)
ccttccttaatttctcctcctgaagttgcctctgtgtatgattctctctctctctctctctctcgacttgctgttttgtttatggttttgttgtcttttgatgtatggcataattgtgcgaagttcaaaatttttggaatcttctgtttttgttggctgtttatgatttgttgtttttctttcatactttaatctggtagctagcttttcaaatattatgttttttgtttgttggggtctgcaattatcttctttgcatattttctgccctggtaggataggttgcgcgcggaaaactgaaaggtgattcgagaagctaagcttttgtttaatggtaaaaatgtgaaaactatgtttggaaaattagaatggaaatataaagtgagttgaagataattttttactcgttccccattcatgctatattttcattttctttctggaaatcctattttcattttcaatggctgtctatgtttatatgcataaaaatacatgaatctagaaaaacttaacacttattctacaagtaacgtgacctaaaagtttcccctggaaatcaaaatgcattaccacttccttacatctcacacaaagttaatagcttgtaaatgccacgaacaggactttgttttgggcggtcatctgttcattttttttattttttggctaatgaattgtgtgtctccctttgcaccttctttaaaaagtataaaaggagagaagaaaatagttttctttttctatccaatcattggcttttcccttatttacttgcttgactcctgtgattcgttatcaactgaaattttgattctccacctaattgggtactgcagcggatcaaaaatattttgggcatttttcacatttc

SEQ ID NO: 74036 - DNA, 1036 bp, Carica papaya
  Intron number 1 from transcript evm.model.supercontig_1046 .3 (locus evm.TU.supercontig_1046.3) derived from phytozom e v7.0 (chr-ID supercontig_1046; pos 10769 to 11804)
cattaaggcaagagaagcaaaaaaggctacttaaggtgatttgacaaccactgagaggtggactttatctatctttttttgttatgtgaacaatgtctctgcaattttagagaaatacaagcgaatacttttttgttacggacagtaatagctaagtggttgcttgttagttgctgttgtgattaaactcttgaagactatataaacaggttcacccttcctgggtatagtttctaccaatgaaatatgtttctataatttaccaccttgtgacgcggtcatggtgtcttgcaattcttttgtagggacaaggtatgcatataatattgtttcttgtgttaagttctggagtgaaagaatattggaactcttgagtagcagtggcattttttgattagaaaatggaatttgtctaagtttggcttcatcttccattatattaagccattttcttttgcatgcttatttttaatcattcagcatcaacctttactttcttaaagaatacttttggtcattttattacctccctttttttttggctgcatttgtagcatctgttggttattcagagaaagaaaatgggaagattatgagttgaataaactgaaaccgataacagtttttttttcttttcttttccattttgccttaaagtggtaaaatgcagaaaaagattaattaaaattgtgttgctatagaggctaatcaattcaaagtaggatattaaagttgtcctggaaaattgatctacattgtgttaaaataagttatatattttgatatagagagattaagaattgttccttgttgagtgtttcaaaatcttcaaggtgcccctctaaaaagagcgaggtatcattttatcttcttcccagctttgttgtccatgaagtgatgatttcaatccttttgcttacttcgtatgccttctacatctatttacgtgtgaaattttttttagaattggatgctttaagaaatgttcttattcctgaaaaatgtttctttactaaagcttcaaggcttggggagg

SEQ ID NO: 74037 - DNA, 783 bp, Carica papaya
  Intron number 1 from transcript evm.model.supercontig_12.2 95 (locus evm.TU.supercontig_12.295) derived from phytozom e v7.0 (chr-ID supercontig_12; pos 2688513 to 2689295 reve rse strand)
ggctgcttttgtgctgggatccttttctccgataggtaatttttctcattctctgagtttttcttttgtttgtttagcattgggtttagcttatccgttaagctgcagctttttcaatttatgggttttgaaaggcttatgatttagagaaaaggttctgattgttctgggtttctggatgtgggttctgatttttctgggtttttgcatgtgggtttctggtttttttcttgtataaagtagatttgtggtattaacaacggaaaattttggttgaaattacccaagatagatctctaaagttcatgcggcggattcaaatcagtagaagtttaaagtaatccctttttacccctctgttattttacccattaaaaggtaaggtaaaatgttttatcccagaatcggcaaatataccagaaagaatcctttttatttgaaaggaaagataaaatgttgcttgtaaaaaaaaagtcaaaaaagccaaagtttacgacttgaaagcaatgtttgtaaatggtcttaatgagcacataattttggctcttgatggtgatgatataatcataaaatgctgctatggatgaacactttttagcttaggtttgcatagaccttaccattttcgagagctcatttagccgaagaaatagctacttctagttattgcaatgattcagtactaagaaatgtgcattttgttctggaatttttcatgtaatcttttgaaatctcaggctctggtttaagtgttcaatactaatttgatatgttgatactaga

SEQ ID NO: 74038 - DNA, 765 bp, Carica papaya
  Intron number 1 from transcript evm.model.supercontig_139. 79 (locus evm.TU.supercontig_139.79) derived from phytozom e v7.0 (chr-ID supercontig_139; pos 631471 to 632235)
ccagttctcttctcttcgacgatacgcagttacaggtttcgtttcagttttacacgaattgcatagctgttttatgcatgttagattggagttatggagcttatctcaatcagctcgttaataggatttgattgttgagtaaatatttgtccgttcttgttgctttcttgtccttacaaaagccgtgtacaaatttgcttcgtctagttgactgctatttattttaatttatgaaaatagacaagagaagttagtttggatttttgttaagcattatagaggagataaaattggttttgaattcgtgtttatattattggatttagaagtacagataaagttttgataatgttctgacaactgaaggaatatttttgtaatttttttttgagtcggggatggaggatagtactctaactctaagcgctgtgctatgatgctcttggcaacttttgtaaatttaacattccatttgacaggtaatagtaagtatgatatcaaaaagattattacgtggtaaaaatcaactcctaatgtgactctggctaaataaagctgtgttttgcagttatagctataatgagttaggtagaataagatattagatttttggaaaaaaatgtagccgcattttggtttcctgaaaaaagcttactcaattacataggaattattattgctggccaactactgactccataatgcactgacgtttactcgatgattgcagtttaaagaaagcgtttctcaatttgcacaagaaca

SEQ ID NO: 74039 - DNA, 1002 bp, Carica papaya
  Intron number 1 from transcript evm.model.supercontig_116. 20 (locus evm.TU.supercontig_116.20) derived from phytozom e v7.0 (chr-ID supercontig_116; pos 147382 to 148383 rever se strand)
ctttggttagccttttatttggctgtactgaagcagtaagtaataatgtttttagatttcctcatgatatctattatcctatttgacactatgtattaagccttgaaacttttgttggtctccttggctgcacatgcatatacctgcagacagagatgcttcatttatttatgcctgtgtgtataagaattaaaaaaaaatagaaagttcatttatttatacctgtagaaagagttgcttcatttatttatgtctctatgtataagcattaaaaaaaaagtttcttttgatcataagatattgaaagcttttaagtttctattcggtttggttccgtatggtcaaagattgaatgctgacctgactaggagttaaatatgtcataaaacaatccaggaagagaagtatgctctggaaatttaatatctaagagacatgtaagaaatttttgtttcttggatcgcaatggtttataattaaatgttaattgaacaattgagatcttggagggtgataattgatatgcagattggtaaaagaataatctattggccactgaacacaaacattttcaattgcaaactcatctgtgctggataacatcttaattgagataaagctatctttccatgtcctaaaaaaattgaattaattctcaacaagattggatatgcaataacctaaatgtcaagaagaatctatattctagagcgagtaaaacttagtacaattaactgaagaaggaaagaatatgaaaggaaaaaagagaggtccaaatggaagaaaagaaagatccaaagatctaataactatgatatataactagaaagtcaaaattgctttagatgaaaatatctatcagttttaataagtttttggttaattaccatttcatacgaatataaatcttatgatagtttacagctggatttgattttcttatttcctcttgttcccctgtttgcagcctttctacacaaggagccagctatttacaaaggt

SEQ ID NO: 74040 - DNA, 490 bp, Carica papaya
  Intron number 2 from transcript evm.model.supercontig_14.1 32 (locus evm.TU.supercontig_14.132) derived from phytozom e v7.0 (chr-ID supercontig_14; pos 1601521 to 1602010)
acgatttcatcagtgtgagtggaggtaatgagaacaacttctactggatggtatattctatgtttgtaagatgaaacgattgttcctgtcgaggaaaataagtatgcaatttgccaaaatacaacccttacgctcattctagatgtttccaaagagatgctgaactaaagaatggctgatggatgtgatatttggcgattattttctccttctgctgaattgttggccctgctgctaattggcaagcacaatacttacatatatgtatatggaaagcatattttggactttgccagcctgattatgctatgaagctgataaacagtaggccctttagctgtttttgttatgccatgaagcagttaaaataataagccgttcagcagttttctttaattctagatgagtgaaatttttttgttttatttatcagtaaattctgactcacgttgtctttgatttttaattttcttttccctctttatgttag

SEQ ID NO: 74041 - DNA, 852 bp, Carica papaya
  Intron number 4 from transcript evm.model.supercontig_1212 .3 (locus evm.TU.supercontig_1212.3) derived from phytozom e v7.0 (chr-ID supercontig_1212; pos 15474 to 16325 revers e strand)
caggtgagtgaagtcatttagtatctgtttcacatctgctcctgcattcactatgtgaacacaagaagaagagctctagactagcaccaggacacctggcccaacagtttccaatttgcaaactgtagcaagtatgaataaaagtttgctacatcagtataaaactttgtgagaaaacaaaacagaactctttaatttacacaatcacagcttactgccataaatcaattctggaaacttacgcataacttcttctggaatcttgttagttgtttacaacatagtagtaaataaagatttaagaaatttgaagatggcacagcagtaacctagtttaacttaaaggaaaatgatggtgtaacagaaaataggaaaattttggcaaagcagcctttgaacaacataatgtaagaaccatacaggctaacagagcataacatcccgctgattggtattctttcaataatcaataatcagagaagagtttccaaaagtaatatatagttgcttggatgtggatttgtaaggctaggaactttagcattcccggtaaaaagttatggcagaattgctgtcatttattatgggtgttaattcctgctttgcttcttgcaaaccttaattgaattctatgtcatactacacattttctatttcaaaaaagataattgaattctatttcctgtttcccacaccttctctttggtttgcctttgtttttctatttcattttttttataaattcaacaacttgagaatcaaatcttgcaaactgaagatgccttgaattatgagattcaatttctttttcctaatttccacgtatcttctttctctgttgttaggaagatt

SEQ ID NO: 74042 - DNA, 988 bp, Carica papaya
  Intron number 2 from transcript evm.model.supercontig_119. 45 (locus evm.TU.supercontig_119.45) derived from phytozom e v7.0 (chr-ID supercontig_119; pos 275473 to 276460 rever se strand)
ttgcaagcatcattagcgaggtcttctcttaaaaggtatatttgagttaaggcaagaatcgccaatctgtgcacctgtgactttgttgtcactgctgttagggcataagtttcaagtgtttgattattatgtatcataatgcctaaaattaactagatgtcttgccaaaattgatgcaagatattttgaacttacaggttttggctacaaaattggataggaccatctccgacagggttcatctttcttcaagcattggttagtgctgtgtcatttcagttttatgcatttgttttttggttctttaatcacaatgatgcagcattcattgaaaaaaaaaaaaacttggatagtcatgcaaaactaagaaagaccggccacatccacttcgctattaattgaaatattgaattactaacagaaataaccatgacattttacgacaaccctgattgaattgtaaatctttgtacatggataggtgccccttggtgccaatattaatacacactacacaatttttatttttaaaaaaagacattttatgacaacccataactcttgcttttcttttctactctttcttgtgaaaaaaaacttgtttcgtccactagagtagcctgttccatttttggcttattcctggaaggacttgttttcacatttagtttgtgattgagaattagaatagttatttgaaaaaaaataagactatagttctttatgcgtagggtagctttgaatagtcatcgccatttcttcatccatcaggatggttttactgatggtctaatatatcagattctaaagaatgtctaaatttaattttcattcagataagtgcacatgttttctttggcttcatcttgtcacagtttatccaactaacttcgacgtcctttaatggtttatgaatcttttgactgtaccttcccataatcttgttttcacagggctggtaacttagattctatagaaggatcttggc

SEQ ID NO: 74043 - DNA, 1003 bp, Carica papaya
  Intron number 2 from transcript evm.model.supercontig_12.2 79 (locus evm.TU.supercontig_12.279) derived from phytozom e v7.0 (chr-ID supercontig_12; pos 2553818 to 2554820 reve rse strand)
tatcttgaccttctccaggctgactacagcgaagggtgagttgtgtttggaccttgcagaattcactttgctatatgattgactgatggggaataatggcataaatggactgctgctcagttcttaaattgcaaaaataatatatgatagattagggatcaaactgcatgaagtctttgacattgcagttcttaattgaattatgatacggtgctgactttttttataaaaaaaatgtagtaataaccttgcagttcttaattgagttatgtagtacttgcagttcttaattgaattacatagtactgaccttaaatctcctcatttaggccctgaaattattaatcatcatgggcacgtactatgttggcgaatctctgtcagatatttctaaagtttgttcctgtctgaagaaggtttaagcagctttcagttacctagggaacctagtttcatgatttagcatgtattaaatctgccatgttagtttttggtatgagtttctatcttgttttctgttcattctgtgtcatgtatgtaatgggaaattgatgtttggaaattctaccatgccttgcattgtgtctccacatgttatctgaggtataatttattaattaattgcattgcttttatccttgaagtttcttttctctgttgttgtctaagggctggaaatatgtagtcaccatgcctttgaggtatgggactagcagcaattaatgtttctggtgaaaaaatacattgaacaatggattctaacccttaacatcctagtgattttcattatgttataaaatttaatacactgtcatccatgtacccttattttcagctgctatttgcaaaatgcattctttcaatctttagcctgagtaaggggtagatagcttctatatccataatattgcactgatcacttaagcataacctactttgtggattagttttaaattaggcagtatgatacaaacaattacttatggttgtttggcatgcagag

SEQ ID NO: 74044 - DNA, 382 bp, Carica papaya
  Intron number 1 from transcript evm.model.supercontig_1077 .4 (locus evm.TU.supercontig_1077.4) derived from phytozom e v7.0 (chr-ID supercontig_1077; pos 15211 to 15592 revers e strand)
gggagtcgcagggtcttcccgattgggaagcttgagtatgttccacttagctttctcagtttttcaaatgtttggtcattgtatttttcttcttttaattgctgtttggtttccgagaaaacagggagagaaaaaggaaaagaaagtcatatgtgatgtgggttttgattaaataaacattgctgatgaaattttcttgagtatggaccgtttagctttctgggtattccaaacgttcggtcgtttttcttttgtttttctgtttgattcccgataaaactgagggagaaagaggaaaagaaaatcatatgtgaggcgggttttggttaaataagcatcaccataaaatgttgctaatgaaatttgcaggggattacggttc

SEQ ID NO: 74045 - DNA, 793 bp, Carica papaya
  Intron number 1 from transcript evm.model.supercontig_13.2 22 (locus evm.TU.supercontig_13.222) derived from phytozom e v7.0 (chr-ID supercontig_13; pos 1959854 to 1960646)
aataaccagtttcaagccacaagggtgttagtggatttggcaagggagttgaagaaggaacatgtcttgaacatgagagatgaatagggcaatacagttctgcaccttgcttcctggaaaaaacaacaccaggtgaagttataaactctgctagtctgcaggtttgctttcttagatatgtatctggtagtggaagatttcgaataaagcattttggttttcatttttttaatctccaggcaatatctatgactagaatcatattttttggggggccttttgggttctaggtataattttttattgaattttataataagcagcagattttaatatgctggcaatgctagaactacataaattgagggtaacaataaaccaaagtaagccacgtttgaaacaaattggaaacggtaagaaatttatttgtgaatacatatttcaatcaagaagttgatgaaaatttttcttttgagatctgtaaaaattattttcccagtaaactaacttgcagctttttcctgacgtaatgtttgtttatctgtgataaatgaaggtttggttcctgtacaaattcacactattacatgctttgttacgtaatctgggtctgttttgattgttgactgagcctgtgcttgtgaaaaaccattgacatcagagactggtttgaccttaaatgaaattttgatgaggtctgttatctttctctttgaagtggttaaagaaaagctgaagggaaattttgattcttgcagataatagaattgttgattggaaaaggaaccactaa

SEQ ID NO: 74046 - DNA, 999 bp, Carica papaya
  Intron number 1 from transcript evm.model.supercontig_1.38 5 (locus evm.TU.supercontig_1.385) derived from phytozome v7.0 (chr-ID supercontig_1; pos 4842115 to 4843113)
aggtgagacattgctgaattctttcatctcatttattatatttcattcttttccgattggtagtttaatgttcttttaatctccaaataagattttgttagactgcctatacatgatttggaatgagcattactatctttcaggtcagctgtcaatttaggtattttaagtttcttgtatatatgattgccatatcacatgtttgtagttgttggtagtgtctaataacaaacttgatacctaccaatgaaggtgaaatgaattggtaaactgtcccaactcattatcaaaataaaaaagttgttatttgaagaattcttttgatgattgcttctttgtttggtgctattgctgttattagtacagtttcagctagtacactgctgtaatattctcaagctgacgcttttgctgtctgtatatgttcattataagtccagtttttggttgtaatctgaagggccaataaaaatctaattctattgagtgtctttaatttttggagcaatttaaagtcgtttgcatatgctcttagtattctgtgttataatttcctttcgctatcattttttccatttcccaagctttggtggattggggtattccagttcctaatgacaataagcaaaccatatatgtttggtttgatgctttactagggtatgcttctttatgcacgattcgaaccatatagctccatgtctaatttggtgtgtttaatttatggttagaatactgtgtttaatttatggttaggatactgtttttttcgagatactgtattgttctctttatcactgcatgtaacggccatattacttaccataatttagcagctgattgttgaatatgtatgtatcttcttggttcatttgttaccactattactaagatggcttaacaaaatttgtacaaataattatatcaaacatgtttttcttcctcctgtttttgcttgaaacagttatatatagctctattagaggataaggagccaca

SEQ ID NO: 74047 - DNA, 927 bp, Carica papaya
  Intron number 1 from transcript evm.model.supercontig_127. 47 (locus evm.TU.supercontig_127.47) derived from phytozom e v7.0 (chr-ID supercontig_127; pos 598164 to 599090 rever se strand)
cttgagaacctgaggaaagagtaccagagactgcggtgagtccagtaaaattcttacaagtacctcttatctctttctttttagacgataatataaaaaaacataattgaatcctttcttatcaatttaaaatttttggataactggtcacccaatacaattatttcacgttatttagttctggttctgttttgtatgcactatttgacgtatgaatttatgtccttttggattttcttctaaaatgacaataatgaagacaacaagatggtttaagccaacaaagtttcctcatgacctctctttttatttatgggaaatcaaattttaggacgtcataatcctgggattttttgtttatggtagttatttctttcatattttcatttcttaacggagggatatagtccctttttaatctatttttgcattcatttgaacatgctctcctttctatattagaggcttatcacattttctagttgattagctgtatcttgtagttagcttattcctgtggttttatcggaaggtttaaacttggcttccttgccaggatgtggcaatcacgaaataatatataataagtattggaaagaaacgagggggaaccagtatcttctttgtaatcataaggacactggtataatgaagggcatgtttgtacgaaaacaagaagttcaaacattttccagctaaatctcctcatgaaccagaagcaattaccaatatagtttactagaatgattttttttccggaaatggtgtcatatttgcatgcaacattaacaaaatagtttacatgacaagaattttattttattctaaattccaatttaattatcatggcacataaaagtccttagtggagcctaattattgtttttccacctattatttggtaaatatatagtgcaatatttgagt

SEQ ID NO: 74048 - DNA, 1012 bp, Carica papaya
  Intron number 1 from transcript evm.model.supercontig_1.25 6 (locus evm.TU.supercontig_1.256) derived from phytozome v7.0 (chr-ID supercontig_1; pos 3683717 to 3684728 reverse strand)
cgaagcttcgcttaatcaggcctctcttcaaccaggttttatacttgcccatttctcttttgatttttacgataaattctagatttgtataatcgggcagaattctatgataattattgttgatgttgtctttgactaattcgtctgccatggtacttggaattggatagtggattgattaaaattttatgcggagattagtggcatttcaaattttagttcccataaaactggaaccaattgagtgatacagagtgctataatgttgatctggagtatcctgagctctaggtcgtatagattttattgttgtatcttgaacatggatggcaataatcatgacagaagctattcctgtaacaggatcgcctttggtagaattattatgctctagtgccattgttggacaatcaacttttatctgtttctgtagtttacatacttctgtatcgaactgatatataatagttcgttgcttgcttggcctgtaggttttggggccgcattaacgaaggttgctgctaacaaggagcttccattaggactgcgccagatatcctttctgacattgcttattttttcttttaattgcttgttaaattttcctattttaagagaggtgctcttcttggtatattctttttatacaaggtgaatgtagttatatgcttatgaaattctaatattgcgggcaggagtagtcttccttgacttattacttttaataaaagccaaataatggagctcctttgccttcttgcttgaaggagatctgtatatgacatttatcatcatcctgcatttttttaactcagttccgtattggtaaaataaatgaacagtaaatgttttagcctgttctgtttcctactttttttcctcttttaaatggaagtattataactacattttgcattttgagtctgggtgaagtttctcatgtacggcatatttgagattttgttgattatttgaagacttaacattcttttacctggctgccgtcctttta

SEQ ID NO: 74049 - DNA, 695 bp, Carica papaya
  Intron number 1 from transcript evm.model.supercontig_130. 12 (locus evm.TU.supercontig_130.12) derived from phytozom e v7.0 (chr-ID supercontig_130; pos 193835 to 194529 rever se strand)
tcgacggcagcattgttgaaagggttctgtgttgtggctatttctctgcttctttttctagggtttttttagcatctgctgttgttatgttgattttggagttcacttttttggttctggatgagttttcgttgtgctttctggaaaactgataggtttctgttacttacggggttcggtggtaacttgggaaatttttggaagaaataaagaaatttttagggaactaatttgaaaatttaagctaggagttgtaaaaattagattagaagttgataacggattaattcatatgtagttttagatgaaattgtaaaaatgcatttccctcaagattgatttaacacactcttgacttgctctaagtataaccttaatgtttcatgtattgtttgtaccgtgctgtgtttctttggaatgaaatgtgagggcactttgaataaaaatgatataaagaagcacctatttaatagtgaacgaaatgaacattatatttcagctatttgtaaattgatgtcagtgcactatttctgtgaatctcgtagtgatcatgtttgattaagatagttttatttgtcattaagtgatgctatgcttttattcatgggtgactagctttggtaatgatgaatcaatggggtgaaaattttgtttttgcagatagcaaggggaaaatattcaaaaaaccagagtgt

SEQ ID NO: 74050 - DNA, 1026 bp, Carica papaya
  Intron number 1 from transcript evm.model.supercontig_13.1 00 (locus evm.TU.supercontig_13.100) derived from phytozom e v7.0 (chr-ID supercontig_13; pos 943010 to 944035 revers e strand)
gtgctgttcttgctgctattcccaattctcaaaaggtaataccagtattacaaattcgctttatttgagctgtcatttgttctcgaataggttaattgaattcttctatattcttactttttgagttcttagacttcgatgaaacatgatatagaggccttcgtgtatcaaaaagtttgggattggagagtcaatcttaagagaaggtacattggcatactgagtattcacgctagtagtggaaatagggattggtaatagagaattgaacttctcttagactgtttgccagtgatatgagcaactttaggctgattttcatccgagaatcaagaattaaatcatttgatatcctcattgtaggatagagaacatactatggtagctgtgttgggtaggatttttggtttgtgagcaaaagaaattcactcgtcagattgaacagaatcttatttgaacagcagaaaatcacgagggtagcccattagagttgaaatgactaaattattaatgatattgacattataaatgtaggaaaaattgttaactagaacagtttatgggtggataaaatgggaatgtagatttgtttaaatatttgcatctgttcatatacctgaatgtttcattgcccaaggccatttttccatgaaagagttctcattctttttcctaaggagaaaagctgctgagatgatatttcagagtagcacaaaactctttaacatgattattgcccctccaaaggtagaattcgtttccttgtcttgggtgttgtggctggccgcctgtcttccattatatgaataatatatagttgcatcttctgtgtgttctcgttttattatgatttagcttctatgtggcatcttgccttgttcatcggtgcaatatttgtaaagcattcttcttatacgatcctatcctatcctatcctattccacttttcttgtcaaccagagagtagttagcactctgcaattcaactctgagtttctttcatctgtgtaggcaaaagcatttgat

SEQ ID NO: 74051 - DNA, 821 bp, Carica papaya
  Intron number 1 from transcript evm.model.supercontig_114. 14 (locus evm.TU.supercontig_114.14) derived from phytozom e v7.0 (chr-ID supercontig_114; pos 260836 to 261656 rever se strand)
aagttagccaactggagacggtatatagactccacaaaaagtgattttttccctgaatttgcttcaaagcttttccattttcatgtgataatgatagtgatcccatgcttaaattgcatcactatactaagactatctttggaacaaatctaaaaattttatggaatttatttttcaagcaacatttagttcaactaggagttgtaacttgatgtaattcttctacaagaaccgaaaaagttgacctgtatagaattttatgtgaaactggaacactaaattttatattccatcaaactcactttgtaattagtttaggaaggggtttcattgtcttctagttaaaccaaatttggtttgcaaatcagttttacaaagtttctaattttattctgaagatcgaccaaataaagttaaatgaagcactaagaatttcggaactgtttctgctctttctttgtatttattccctatagatacctgtttgatgcaatgtgaaaaagaattccatttcgaattagctccctaattagattcctatgctagtttttacttttttttgcaatttttgtctaatacgtgctgtcattaaaatgatacttgctggattcaccaacctggtttagctgcaaaatccttcgtcctgaagaagtgaaaatttctacgtttctagctctggaattttacttttttcgtgctctttggttgagtgtaatacaaatgaatgatgactgatatactatttaactcaaactcagatcaaatctgtttctcttttttttccatttatttgatctctaggaataccaaaaataagtata

SEQ ID NO: 74052 - DNA, 886 bp, Carica papaya
  Intron number 1 from transcript evm.model.supercontig_12.3 01 (locus evm.TU.supercontig_12.301) derived from phytozom e v7.0 (chr-ID supercontig_12; pos 2768994 to 2769879)
gctacagtgggtatacttctttattttcctctttaggttgaaactggttgttttcataggcagttggtggtgatcagtgaatattttgttttctttgataagtggattggattggctgcggctgatttttgagagagtggttactgatgcttggaaagttttgttctgtcgttatatcatgccaatacattcgtttcttgtttttattagggctataattgtggaaatggaacataaactgttggaacttttaatgatcatttatgaatttgttgttgaatttcgatgtctttatgtggtggtaggaactttcttattggtgcagtttaaatgcttagatagttcatctatggttatgaaatagggcgtctagtcgtgtgcagaagtaatctaagatgatatacgatttacagtgtgaactgtgaagaggctttctggatgtaggttggttaatttgcggaatgaagagagagcttgaaattcttggtaggcttgttagtggcaagttgtgataaaatttctgctgtgctagagagaaaatctagaaaatggaggactagtgtttttttttttaatcctttaactattatgtttcctattcttgaattctaacactagtttatttggaagagatttcattttcctgtcgagaagatagaggaaaataaaccaaataattcttaatgatggcaaaaataagtaaaccgctcttcttttcttaatggaatcatctatgctatgaagaactgtatgatttttaaggcatgatggctacactgtaagatcattttcttccatatatatgtatggatgaatgggaattggattcaattaagattcactgtcactcatgactcatgacttctacactgtgcagctcctgaac

SEQ ID NO: 74053 - DNA, 611 bp, Carica papaya
  Intron number 1 from transcript evm.model.supercontig_1.25 0 (locus evm.TU.supercontig_1.250) derived from phytozome v7.0 (chr-ID supercontig_1; pos 3540784 to 3541394 reverse strand)
ttatcgattttctcacattgtgccatcgactcaaggtacgaaacgaaagtgccatcgattttctcacgttatcgattttcagcttgatacccgaaataacttggatgaagaacgcaaatgatttttttaaataattttattgatgctcgctgaagattgaaatgtacgatggattatcgtgtccaagtaaattagcttcattcgcgtgaaagtaggtttcaaacggtgagttaaatgcgcgtgctctctggttaagaattgaaattataagctgagcgttgtttcttcgataccaaacggagatttggtgtatatattaaactttttgtttttggaaaaaaaatttagctaattgacgcaaagcacttgcactgatactttgtttgcacgactaattgcttccattaattcgaacaacgaataaaaaaaattaagggatcatttgctgcttcttttctccggcttattttttgaaggaattttgaattgagcgtctgtaaaaaaattggggaatttactcttcttgtatgtagttaaagaaatggcctaatggttggtaacatcattaatttttttcttctatatctattgaagaccacgaaaaggaaggg

SEQ ID NO: 74054 - DNA, 646 bp, Carica papaya
  Intron number 1 from transcript evm.model.supercontig_1.1 (locus evm.TU.supercontig_1.1) derived from phytozome v7.0 (chr-ID supercontig_1; pos 683 to 1328 reverse strand)
taaactacttctacagtcaagttgggaggagagaggtaatttttgggtgcttttttcttcgaacccctcaaccctcttcctgactcttgagaaaatataaaatgagatagatgttcttataacttgagagttttcttattgtctcaatggggctcataaaattttgaacgcccatcctcatgataatgagggggaaaaataaacaactcaaccacagtaagttggtttataacttgagagtttaagatacaaggcttaatttgatttgattctatttcatcctcactcaattccaactttttgatctttatagtacttttgacatgagttagaacaaaaatttgtatgttaaacctcccctccaccttgacattgaacttttagagggtaggaattaaattcatatgaattaaaaaggagaattggacttctatttttaaagaattcaaagtgggggctagaggtaagatccaaaacgtaaaaatataacgtaatgccacagaatcaatgtcatttctcaaagtaggtgctgtatggttcagtttattgttggtaataataggaagaggatggaaaaaggtgcagaataaatttgaagctaataattccatttccatggtgtgtgcagaaggagaggcttggtgca

SEQ ID NO: 74055 - DNA, 705 bp, Carica papaya
  Intron number 2 from transcript evm.model.supercontig_100. 6 (locus evm.TU.supercontig_100.6) derived from phytozome v7.0 (chr-ID supercontig_100; pos 158257 to 158961 reverse strand)
tgatcaagttagcttcaattttatcacttccataaagaaaagttagcttcaatatattctaattgtccttttttgttttgtctttattaagttttacagtaaaatttaagcgttatttaactgtcacttaggagatacaaaggaaatagcgcctggctatatgcttatagtcgagaatacatgttgggcaactcgagtttaacattaggtggtttcatatttgattatttgtggtagtggtggtcccaagatagagtactgctgatcttatcaactttaaatccagaaaaagaccgtactgatcttttggtagaatttatgtagctgctcaaatcaggtaaaaattgattttcacttggcttgagaacttgctttagagaactgggactactaatgaacatgtggtagtttactgattgtttcttaattcttcatgagcacatgtttcattttgtatgtataagaagtagttgatcttgaagggctaagctatgttgaagtggtctaaaggggatgagaatgtgaacaaagttatcaatttatatgtagaatctaccttgggctttacaaaatcatctccctcaaaatagttagttcttaatgtgctctatttatgtgaagaaatcatgtagatgagttggtgacaccattattttgctatgtactgtaggtttctgttgcacctgggggccgctggagtagatt

SEQ ID NO: 74056 - DNA, 205 bp, Carica papaya
  Intron number 1 from transcript evm.model.supercontig_100. 6 (locus evm.TU.supercontig_100.6) derived from phytozome v7.0 (chr-ID supercontig_100; pos 158965 to 159169 reverse strand)
cctggtttaagcgaagcgcgcaagaagagttagaggtatcaattgtgatgccattgtttttgttgttctttgtttgttaaataatgttgcttcattatgttgtctagttggagtttgatttttctggaatttgaatttctagcgttcctagaatattctgtaatgggattgcactttcttctttaaatttgaaggtcgctgttct

SEQ ID NO: 74057 - DNA, 707 bp, Carica papaya
  Intron number 1 from transcript evm.model.supercontig_14.3 4 (locus evm.TU.supercontig_14.34) derived from phytozome v7.0 (chr-ID supercontig_14; pos 376470 to 377176 reverse strand)
ccctgagaatatccaacgcctgcgtgctgttctgggtaatgttttcattgcttttcctctgtttccttgcatgtgatttgaagtggaatgtgggtcggtttcattttttcagttgtgaaatatgtttttgttcttttttcttttaattttgttagctctcaagaatctgtatttgaaggttttagttgggttcgggatatagtttcgggctatgcattttgtttacgaggttgtgaaaactgagttttattttcacttattggttaaattaagatgatcatgtacgagtaattaaacgaatgtctcaggatctctttgtttttctgaaagttctcttactgattctcgctctttgattagtatgatgatgggtctctgtcctctataattgtttttagaaatgtattggctttcaacatattataaagatcagtgcaattagttgagtgcttttgtcaatttaattatcttctattccctgcttgtggggcatgtcttcttttgttatgtggttattatgaattttggattaattttaaatgttaaacttttaattataaaagataaaacttttttggtaccatgtgtttcttatgcttaatcaaatacttctgcattggcatgcttttgctttctctgttttgttattgattactaacaaattcacattgcgtattgacatgaaatttattttttctttggctcag

SEQ ID NO: 74058 - DNA, 829 bp, Carica papaya
  Intron number 2 from transcript evm.model.supercontig_104. 110 (locus evm.TU.supercontig_104.110) derived from phytoz ome v7.0 (chr-ID supercontig_104; pos 730904 to 731732 rev erse strand)
ggaagcatatcgatagggtttttacatttgataaggtaaatgtgtaacttttgaaatttattttaagtttctggttgatttcattgttttcctatcatattgcctttggtaatattaagttttgctcgttttaagttgataatagcgttttctggaaagtaatgtacaagatgaatagtgaacttatgaagttccaacgttatggggctttaatgtcattcccgcccaggggggagtttaccgctagacttgggtagtgttgctgctccgagtttgcaaacaattgtatgtcctagtttttagtttagctaattgtttaattttattcgagcttctcatagtaggtttcaatttgtgtgaaacattttttttacccaattgggtttctatttcctttttggtctgtcttcttttctcggtttttgaagtttactggagctgtgctcgagtaaaacttctaaaaacagaagtagcattttcttttcattatgctcattaagggatttgttttttattcttttcccaatttttgtgttataagcgtcagacttaatagtttgctcattaattagctatgtaagactgtatgttaaatgtttgcctttaacgtgttcccatcccggatgtctcaggctatagtctagaagctgtggtttttattttcaaaggaaaccctgcatttgctatcctgggctaagacgcagcgagtttcttgaagtgatgaaggattttatgtttgattctgatattttatcttgtgttagatcttagccttttgttcatgatgcacataggtttttggcccgtcagcccagcaaaaggatctcta

SEQ ID NO: 74059 - DNA, 847 bp, Carica papaya
  Intron number 1 from transcript evm.model.supercontig_1.24 6 (locus evm.TU.supercontig_1.246) derived from phytozome v7.0 (chr-ID supercontig_1; pos 3517238 to 3518084)
aagagggtgttgaagattggaggcggaagcagcaggtattgccatttgcttgcgtaattattaagcttcagttttgtttagtttccttttttagagtcacggttttgaattatctggtaggaactgagtcataccagtctaaggattccccttaaatgaatctcagcaatattttcttttttttgagttttcataatttatattctaaatcataatatgggaaaattgtggaggggcgtcttgaggcttgaaagtgaccccgagactaggacatttttctcatgtttttgcagcttagtgctttaaggagcctatctatggatgtgtatatatattggaaaggggtgttttaaaagaagcatgttgtcatcataactacaataaatacaaacaattttataagataattgcagtgatagatctccccattatggtgaaagcgaagggcgttaggatctctatagatcctatggttcactgtagttctatttgtctgcttgtttcatttatatagtggatgcaaatggatattttacctttgttagtacaatggagagaatgagtgatctttaattatctgttagctacttgtctgctgaaagttgaaaatgtttttagtcagaatacgcggtaatagaaagctatcaggtatttggtgctcctattttttatcgtttgtattagtatgatgctttgaattgtttctgtttgtatggtttagctgtatagcattattttgttatgttttcttcattcttgttggaggtattgaccagattctcactgttttaattaatgcggtaaatgttcaggatattgaggtcaataatagaaaggttaaagtgca

SEQ ID NO: 74060 - DNA, 545 bp, Carica papaya
  Intron number 2 from transcript evm.model.supercontig_124. 33 (locus evm.TU.supercontig_124.33) derived from phytozom e v7.0 (chr-ID supercontig_124; pos 586515 to 587059 rever se strand)
tcagcagctatcaaagcactccagaagcaaattgggtgagttattgttggccacacagtgatccttttagtttctgagaaaacgtgcatgaaagtggggaaagctgaaaaataatcagtggtagggtttctttcttttgaataaaaggatcatattacctaagaattctgtttaaaattttatctatctggtttagttgaaaagaaattcaaatttctgggaaagtagagtaacgtcaaattcctaaatggaaatgtaacaggtgaaattgtcgatgcatatatgcatctaacttacactggatgccagatcatctcctgttagcatgtaatgttcttctgtgttgtttcatgcctttaacaatgaaaactgtatacacatatgtgcatctaattattgagtagcatgacagagatgtagttcaatgtctttgctattgttccgtgcctatctattttgagaagaaaaagtataagagaggttttttattctatcttcctccttacttagctacgagtttgagagtgttggtcttctacgccgtg

SEQ ID NO: 74061 - DNA, 525 bp, Carica papaya
  Intron number 1 from transcript evm.model.supercontig_136. 29 (locus evm.TU.supercontig_136.29) derived from phytozom e v7.0 (chr-ID supercontig_136; pos 443761 to 444285 rever se strand)
gttcaatccaaaataatgttggaaaagctgttgcagggtcctagagaaaccacaacaattaaagatcattctcatttcaatttctgggggaggacagaatattggaagcaatcaaaataagcgaataggacataggcacttccagatgttgttaaactacaaacatttttctttcttttgaacatcatataatcaagtcaatcttttgatcctgtgttgggagtcttattcaccgagagtatgttactgatgtgactacttcccatgtatgtttgagctgctttagtgcaactgtttatcttcttctatttctagctatggatgtaaaatttagggtagattataataacatgatgacctttccatatatgtcttagcttgcttaagcgtacctgatctggccatgcgcatgatattagcatgttcttgataatgactttgctggaataatattatcagattagcattagagatttttttaataatcaagtacagctgaactcacaaataatgtgcatcacagga

SEQ ID NO: 74062 - DNA, 434 bp, Carica papaya
  Intron number 1 from transcript evm.model.supercontig_10.1 44 (locus evm.TU.supercontig_10.144) derived from phytozom e v7.0 (chr-ID supercontig_10; pos 1989744 to 1990177)
cgttattttccatatcagagtcttgtttatcagtggaaaacaaacgcaacaacacagtttcgatgagctacttttagttctgaaaatttgttttatagttccaccatttagacattatttacaatttatgttgaaatggaaacagagagagggagatagaagacaggaaattgaaaatgttttctgaattaaacaagtactcaacagttttggcgttcttgttgtctaaatgactgaagttaccaccaaaactgctcatcactctaattatttctcatttgattctctcccattctagatgttgtggtttgtgattttctcagttctgtgtttgtgtttctaatatatttgagtttttgatatatttatgatatataaaatttttaagattttgtatatataataattactgcttctggtatatgcagaacatc

SEQ ID NO: 74063 - DNA, 313 bp, Carica papaya
  Intron number 2 from transcript evm.model.supercontig_10.1 44 (locus evm.TU.supercontig_10.144) derived from phytozom e v7.0 (chr-ID supercontig_10; pos 1990235 to 1990547)
gcatagtttgtgaagggagcttagatcttgagaaggtttgctttaaatttttctgtttgtgcttttcatgattgccatggatttcggtgaatactgcagacatatcaatttgtctgatatagtctaaaaaaatgaatttataataaagctaaggaaatgaatgccttttgtaattttcttaaaaaaatttatgtaacgcgattcttctttagagctacttgaagcatgaattttgttttttggtggtttatttgcctactaactaccaaagtctgaaatttgtccaatttcctgtctgaattcaggcaaacat

SEQ ID NO: 74064 - DNA, 860 bp, Carica papaya
  Intron number 2 from transcript evm.model.supercontig_11.3 7 (locus evm.TU.supercontig_11.37) derived from phytozome v7.0 (chr-ID supercontig_11; pos 495861 to 496720)
gaaagttgatcgcggttcttgtaagttttcctttccgttccttaacgagattgttgatatcttaatttgttctactgtcgtaattactgctatgcaggtttcctcgtatacttcgtgcatgttatttctccttgttttgacgttatacaaagctgtataattatacctacgcgtttctgatttggattaatgttggcttggcatatttagtattactagcaaaatgtctcactttatgaaaatccagaaatggaattcgcttatgtggtattccttttttccctaatgcaagtgctactaccatttgcatttagaagtacaccagcatggaagcaagttcgtttgacgaattgagtttgccattgagaaaaaacaagactgcttgagtttgccatctcagaagtgcaatggctgtatgttgctatagcctataggtgtatacttgtgtatttgggaatgaaatttagatttattggaagagtgggctgatggcttatggcatctatcataatcaaagagaagaaagaaaagaaagaaaaaaagaagagaaagaagctgattattgttatcaggacaacatttgttgtttcatatgtatattttatttgctctcatttgttttatagccattaagtttttgaacgagaaacatgagttacggcttcaagtgtgttttatcgtgagaagaggcacaataggttgatgcgaaccaggctttttatttcacacaaaattttaattttctctggcgacatttagtttatggagtatgcatacacttgattccttattgcttacgtatttgtggttttgatttttttacagacatcatctttctttcttcatatttttaaagtcca

SEQ ID NO: 74065 - DNA, 795 bp, Carica papaya
  Intron number 2 from transcript evm.model.supercontig_12.4 4 (locus evm.TU.supercontig_12.44) derived from phytozome v7.0 (chr-ID supercontig_12; pos 286971 to 287765)
gaagacttgcctaggtaagttctcttagctcttgttattgctttgtggaaaagcttaggttatcaaactgaaagtgtgtttggttttcctttggtataagttcgagtgcttatactttacatcagaaactgaaagcataaaaatgcaaaaagtgaggttaccagtctttggttaaggaattattacgactttgctttgtggttgactcatttatttcagatgagactctggctttttggtgacggaaaatatatgatccttgttcttgtttgaatcaccagttaacttgtcaatttcaatgttccagtagttgtagtatgattttcggtttgtattggatgattgtagtagtcttgtagatttgtgactttcaatggaagagaagtatgatagaaccgtcgcattttttctgtgttattagatttagtggactctctcttttgcatgacctagaaattttaagatgaaatctgaatctttaaaagaatttcatacattttatcactttgaactgtttttagtactcattagtagaggaagccttccattaacattttagacaaggttttcacaatgagctgatgttgagacctaagtttccttggctcatgctgtatttcttcatacaaatacttttttatgtctgatgtgagcactttatacttgtcattcatataacaaggcctaggagatattatttttgttgatcatttgtaactgattatattgaaagcaatttcctaagtaaagaatacttcagtgaggatattagtgatacactccggatacttgttg

SEQ ID NO: 74066 - DNA, 665 bp, Carica papaya
  Intron number 3 from transcript evm.model.supercontig_110. 13 (locus evm.TU.supercontig_110.13) derived from phytozom e v7.0 (chr-ID supercontig_110; pos 274270 to 274934)
tgcttggcattcttgagttgctcaaggttcacagggtaatggttttgcttttttttcttaaaaaccacttaatctcgtttctaatattatgataacagtcagttaggaatctttactaataaatttgttatgttcaggaatctggagttagttttgttgcataagcattgtagtttagaagtgactaaacatgttatgatgttcttctattattttgaaatgtttttttttttcttttttaagattttgagaatgctttttgtttcttggctattcttgttttcttttgcgtagtttatttcagagtatatatttggttaattgtcaagattgcagacaatcgattttctacgtctaaatggaaatagattatgccagctaagaattgtattagactttcttaaaaaaagggagctgaaataatagaaaattgtaaattcaatattgtgttcaatatatgccacctattttggtttgatcacttcaatttggattttgcatcctgggtttctcttaagatggtatggtgcatttagttggaactccagtcttccattctcctgtccatttttcaaattggtgctttgaattgaatctgttgggtcaaatataatagatatattttctcactaatttttttgaattgttctggcagcgtgtgctct

SEQ ID NO: 74067 - DNA, 894 bp, Carica papaya
  Intron number 2 from transcript evm.model.supercontig_139. 49 (locus evm.TU.supercontig_139.49) derived from phytozom e v7.0 (chr-ID supercontig_139; pos 368247 to 369140)
ccgttatatcaaatttttccagtatttctttactagtaagtgtaaaataataaaattgaactaattatcacaaaattcaaattgacggaaaaatatctaatttgttatttatgcattaacttgtccctgaacttgcaagttcgttaggtctgatctaactcttaagtaagttaaaatgaatgaggcgtcaaacagaatgtattaatagacttccatttttaaaagaataagacattgtagagttggaattgattactctgaaaaatttaggccaataagaatgactcaattaattatttataacttaatagtaattatctcattcaactaatatggttaaatacatgattgtaatataagttttaagaaaaaaaactattagggtttttgtatagagctttatttcttgttattcagtaatcgtaagaaagaaggaaggatacgttggttgctaagtgtagatcgagaggaaaacagaaaatattgtggttgtcatttttctctgatcttttcttttacaaattaaggtctactacttatagcacgagaaaatcttagaaggaaattaattgcaccaggaatcttacaaatttttctagtcaattattctctattaattacagatcttcctagttagttgttacttatcagttatagagatattataagcatgaaattttctgcagatattattagaaactaaataataaataaatattaagaatttagacaaaatatttcaacactaaagaagtataggtaacaggttgatctcccagaaacacatttttgcttactaatttttctctgctgataatcatcatttttgctagaatgtttttacagacaattttccggatagtgaatctaactgtaaaatgaaacttgtagggc

SEQ ID NO: 74068 - DNA, 752 bp, Carica papaya
  Intron number 1 from transcript evm.model.supercontig_132. 56 (locus evm.TU.supercontig_132.56) derived from phytozom e v7.0 (chr-ID supercontig_132; pos 588754 to 589505)
caggtgattttttccgccagacgccttttcttttggttcacacttttgaggtagatcgtttatcatattaaaattcggtttgatgatacgagttgtagatgtggtgaaacttttgaccttgtaaattattttgttgtaaataacttacatattgtgatttggcagttccttctagtgttcttatgaattaattttttcttatagatgggaaagttgtttatataacctgctgtgaagccatctaaactgttcttgagaggaaaacccttttagtctatgttttttatatgaggaaagtatttttgcattagtgaactcaggagttcgaaggaatcaattaatttttttatgcgataatcttgtgatcaatgggcaaagacatgggaactatataaggggaaccatgcaaacaatttcctaggttgagattacagaatgaggtctcagatgcttgtatttggtacatataataatggatatgtcttgtgggaaaactgtttctcaaataaaattgatttatagaggattggatgtttgacaaaaagggaacaaggaaaacaaatgttattttcttcagttctgaggctattgctgccttggtggaaaattttggcagattattcgtggctcagccagtctctgctggcaaagaggtttgtagaattaggggcgataaaagtatttaaattgaactgagtcggaagagggttctctaatatattttattttcatgatatgcaggaggcaatcaa

SEQ ID NO: 74069 - DNA, 656 bp, Carica papaya
  Intron number 2 from transcript evm.model.supercontig_132. 56 (locus evm.TU.supercontig_132.56) derived from phytozom e v7.0 (chr-ID supercontig_132; pos 589577 to 590232)
ttgaggtaactcttgaaaacaacataacatgtgcatttcatatttatttgcttttttgaatttcttgtatttcatccctcagagagatttggcaatatcgtaagtggtcaaactcaactttgataagttattatggtggcataaggaacacaaggattaggctaatagtcattgtgtgatctaagtttatatgtttggatcttctatgttgcacgctagtgtaaggggaatatattttcaatataaactattaaggcaaatattccaatcaaatccaaagttttgcttacctaattttcttccggaaataggaattcccaataaatctgaagtttttatatcctaaccatggcttgtccttgtcttcttcatttcattgttcacccatatattgagaaattcaggattcacaaataatgtcctctcttatagcattagcactctaatttaagtcaaaagggactgaatctcaagttatataattgctggagagcagtgcttgtaatataaaaataagacttttgatgcatgtatcatgagacaacttttggaattaatatcgctttaacaacttctaaagtttgtttctccatcttcttctgttcctttaaattgcctcagcctatttacggattttcatccggaggtccattacg

SEQ ID NO: 74070 - DNA, 685 bp, Carica papaya
  Intron number 1 from transcript evm.model.supercontig_106. 97 (locus evm.TU.supercontig_106.97) derived from phytozom e v7.0 (chr-ID supercontig_106; pos 856363 to 857047)
cagacagatactcaggtactatagtttatgcatagcttatctgatttgggattggatatttaatatctcgaatacgtctatattctgctgtttttcagcatcggggtttctagtatttgaaatcgagtgttctgaggcttagttaactccctaatgcttgatgatttttggtctattatggaattggtaatctttcagtctgtcttcaattgctttctttgttggttaagtgtcgtcgttcagtagattcatgggccggtaattaatctgccatccgggacacttttctctgtcggctgttgggttttgcaccgtcctctctgtggttttgtttatctattttgggcttttgcatgtgtaaacattgtcatggtttggtttttcaatagtttttacatatgttgccttgtaaaaggaagctcgaagtggacttgattttgggaagttatgttaggtctaacgtaggttaaatgaagtcatagttttaatcttcttttggcagaaaatatctgaaatttaattaagattatagttttccttttctccgctcaaaatggctcttcttctcatgaatttcattggcaattttgtcttcatttatactttcttggttgagtaaatgattttaatcgtttgattttgttgtgaagggcactagctcagaaaattctgagctatctgaatc

SEQ ID NO: 74071 - DNA, 854 bp, Carica papaya
  Intron number 1 from transcript evm.model.supercontig_104. 58 (locus evm.TU.supercontig_104.58) derived from phytozom e v7.0 (chr-ID supercontig_104; pos 376225 to 377078)
aggctcagttccgccatagattggaggtatgttgtaactcttctatgccgttgaggacttctcctttgtcttgtacaaaaaactgtaatattgattttatatagaacgatttattgtatttctctctaatggaaattttttaaacaaacagaaattagtgttttgagtaaaaaattagtgcgtcagcacaaagttttgggtgatcacgagtttttcttcaatgaacgtctgctcctttttgctaggtgatgcattcttctgatgtcattggttccatgagatgagcatttggttctgcaatctgagaatttattttgaatcttataggtctgttaacagctttggatccctgaacaaacaagcacccaggagttggagacttttcttttagttaattactctcttaattttgtagtaatatggattttgaaactgaccaattgagaattttgagtaaaccatgtgggttcttgagatgaactaaaagtacagacacacaggcacccaggagttccaagacttttcttgtacttaattattctcttaattttgtagtaatattgatcctgaaactgaccgaattatgaattttgagtgaaccatgtgggttcttgagatgaactgaagtacagagacatacacacacaaatatatatttatatatatatatatattagcagttggtatgtattagagaataggaatgtttactacatagtctattacgaataggatccgtataaattttttctatgtaggcaatttcctttcctagtgcctataaatttccctcggtagttttccttttcttattcctagctatccctgataaatatcatacattgtctcttcaa

SEQ ID NO: 74072 - DNA, 813 bp, Carica papaya
  Intron number 2 from transcript evm.model.supercontig_1.28 1 (locus evm.TU.supercontig_1.281) derived from phytozome v7.0 (chr-ID supercontig_1; pos 3905579 to 3906391)
tctcttgtggtagaaagataaatgaggatgatctgaatggaaatataaagaaaccgattaaagatcaaaatataactattgattaaatgtaatggagttcaatatttgcagttgagttttgtaactaatttctcataccaatatgttccagctcatagaaaatggttgatctccattttctagcttcagtacttaattagccattgctttgtcatgaacttttgacaaccaaatgtagagtatgttttggatgtcagctataagtttgtccttgtgattactgataaatttctgctccaagaagttggaggtggctctagtgcaggtggatgttgtgaggaggattatcaaggattgattgccatgtaggataaagtctgtatgttgtagagatgaatcatttgatttaggttgaagattcctgtgggcagtaccacttaagtagtttggctgtagattgctgaagaataggtggtttcttatttgagaaaggttgtgaattttgacctgtaatatggctgaatggcaataagtttacctggttcagatggttggaatggtgaacttcatctaaatgagttgctttgccgcagtgtttcaacggattgtgcattttatattgaagttaaactgattcttgataataggttttgcttcattttctggtgattcctaaagcagggatgattaagttctttgcatcatgaaatactgttattgtcactaatggttattgtttttataagagttaaataatttccatccttatctaatgcagaatttatcccaaactcggggtactggaaggagagt

SEQ ID NO: 74073 - DNA, 622 bp, Carica papaya
  Intron number 1 from transcript evm.model.supercontig_127. 55 (locus evm.TU.supercontig_127.55) derived from phytozom e v7.0 (chr-ID supercontig_127; pos 692820 to 693441 rever se strand)
caactcctcaccaacggtaatattactccatatctcatccttctcttttaatttcattgcaaccataaatgttaagttgttttttcttcctttaacaaattatatgtatagctctcagaattttatgtcctgatgattttgcatcttcttcggattgtttgtagtaaacaaatattattattatgcgtggaatttataacccatgagagccagcagagaacagaagcatgcacattgagattcaaattggcataaaaataacaaaataaattgctactttacatgttgataatactgatggatattcatgtttaattctataaccttttttcccttttctttgtagttttttaagtttatttgtttctgggtttcattgaagtaagagatagctttctgtaagggtcataattaattcgcaattactttcttttttgactgatgagtcccatccgaccaatttatgtaattctggtctaaagaaaccaataaagcagtcatgggcttcattcatatacatatatacgcacacagagacatatatatatagtgaatgttagtgaccaattgttccttttgattttcagctgtggaggcatcaaggcagcaactacaggcgtac

SEQ ID NO: 74074 - DNA, 873 bp, Carica papaya
  Intron number 1 from transcript evm.model.supercontig_13.2 57 (locus evm.TU.supercontig_13.257) derived from phytozom e v7.0 (chr-ID supercontig_13; pos 2341273 to 2342145 reve rse strand)
accgcctcgtcattcgcgatactttgtcgttcaaggtacttcgagtcctttgaattttggtttagtcaagcatttttctctcatcgtcattctttggacactgaggagaaggagggaaccaaaaaggaaaaagccaaaagaagaattttatgcttttctcctctgtctactcggttcagatttgtagttttcttgtttcgaaaatgtgtaattatcaaaaaatatgaactgcaactctgattcttggagctgcagtactctcatttttattatttagctttaattagccagttagattgttaatccactttgtgagcaatttagctgaaaggatagacattcagaacatggattcaacatatagggcaatatcaacttgaatataatgaaaggaaaatctggtaccatagattaaggttgatattatatatgagattcaacatgaattttgatatctgcgttgctctatttggtatctgggaaaggatagagagcttagttttgacaagggagtgatggctgtaattatatagtatatacagtttggcagagtcaggggtatgggcaatttgatattctgcttaattctatagacagagtaacagatgcattgtggaaaatggcgaagagataatggatacaggccaagtttaggcgccatgcggaaaagggagatgcatgcttgaaggcattaaaacaaaatctgaagttggaaacttgtgccactttaactgtttctggaatttgggctgttttgtactctatccaataggttgtgcattatgtatatagagttgctactcaggacctttttgcagcctaatggggaatgtatcttttgctttgtctgatgcaggttgtgcagctgttctc

SEQ ID NO: 74075 - DNA, 641 bp, Carica papaya
  Intron number 2 from transcript evm.model.supercontig_130. 34 (locus evm.TU.supercontig_130.34) derived from phytozom e v7.0 (chr-ID supercontig_130; pos 407863 to 408503 rever se strand)
ctgttaacgatcctttcatcaccactgactacgtatactgttaatacaatcgcttactgatatcttaacgattatctcatgcatgtgcgtcaatcgtcttattggtggtggactgatgtgtttgcgtagtttctagtagagattatagtcgctatgatttttattcagtgtgtttgtatttaaatatgcacttgagatttgcaaccccccgtagatggttctaattgctcgagatctggagtgatccttgagttgttggccatctgttggcttttttgtgtatataatatcagattaatacagatccggatagggttttgtttttttgcaaaaattcttgatacactatattttacaaaaattacagaactaatatttggtttgcgatctaagattcttttccgtgtttcttcatatccagtttggataaacaaatagagatctgtgaatcttgtatccactttctactttatgtatggtagatgattagcaccttgttacaaataattatagatttcgttctcgtgttccaatgatggtttgttcatagccttgtgtttagatttcaaactgtgttttcaaattattttgatttctttttctgactctggtgttactacggtcattttgttcagacctac

SEQ ID NO: 74076 - DNA, 1029 bp, Carica papaya
  Intron number 2 from transcript evm.model.supercontig_115. 22 (locus evm.TU.supercontig_115.22) derived from phytozom e v7.0 (chr-ID supercontig_115; pos 431472 to 432500)
tggcagaagcagcctggcttgaacacagttcaagggtaagttgttttcatcaactttcaagttatttaaggaatccaataaaatgaatggctctcaggctcttaataggttctttcttctagattttttactttaaggtgttaagatttgttatatatttctgagataagtttagtttatttcttttaataatctaatatcaatttcccatgtgttggtacagacatttttttctgacgtcaaaggaatcagtcatatatctgatcatttaccatgccatggaaaatgctccatggttttttctttcggttttcaatgtgcaaatggtgttgctaaccagtaacatgagaaaattagcctgaaagaaaatgagcttgccaaaaacaaagattgacgaaattaaaataagtacacagcattctggcaaaggtcttctatttcgaagttctaagttgcatcgcttctccgtatgatataaacggatttgatatttttttttaatccatatgaattaaaagctcctcgttaccatatatatgaggtgaattatcaattgttatactgtctcttctcagacttacattgaacaattctgagaaatttgagtcaattggtgttgattgaacttaaagttttaaagaatcactctcaggggatgaatcaaacataaaccattaattggtttatgtgggtgtttgacactaatgagaagtcaacaaagaaataagatctagccaatagacatctagataaatattatgtattggcagagaattcctatctcttaaataaatgtattttcagtttccaaatatgatatagggaaaattgctttaaaacaaagtttaaactaaataatgattcaaagcagtagtgcaatgaatgtttgtatgacataaccatgaatcctgatatttttaaatttatcctgcattataactttttttttttaattttctttttcattttttcttctacttttgtttactttctacagtttagtagaaaaatatcttgggagttttgtcg

SEQ ID NO: 74077 - DNA, 949 bp, Carica papaya
  Intron number 2 from transcript evm.model.supercontig_119. 2 (locus evm.TU.supercontig_119.2) derived from phytozome v7.0 (chr-ID supercontig_119; pos 10057 to 11005)
cagcattctcactttcactggacagactccacaaggtactgtcaccttgtagatgtacacacatttctcaactatgttagaatgtcatgttttcaatttgatgtcagttttactttctgtgcacttttttgtggtctatcttgcttacaattttagatctatgattttactctgtatctagctgtgtatttccttatcttgtgccaaatccctgccagattcttctttagactacttctttcagtatttactttcagaaaactatcaattcccagcttgcatgtattgttgattagaaccttttgtataagttctaaccccaacaaaaaaaaagggggaaaaaaaagaaacaactacgaggaaacaaatattaagtttcaaaattttcttaaatagataatactcaaatgtcctaaaaagtcctgtttcctaattggaaaaacaaaagcaaatattttaagaaatattaaaatcagccttcttatttaggctttgagtgttctgcatcactgagtcaagcagtctagtgtagaaagaaatagcatcaaatcagtatcctcaaatgtcttatccctcaactagcatttcttgtccttttcaaatctctatattatgaatgataacataagctcgtaaagcggtgctgacaacattgggcaagatgaaacttgtaataatctactagctctcctccactttttgtttatctccacctttttttttgggagagagggaacagagtcacattcttgactccaacagatgcttctgaaagcaacaaggaaaaactaataaatctcaggtttctgtttctcaaatgttcatgttgaaattcacttttatctttatctaagaaagggaaatgaattgattttcttacaccttatgcttagttcattttgactttgatgcagggagttactagtttcaattcgtttcgaggaacctg

SEQ ID NO: 74078 - DNA, 525 bp, Carica papaya
  Intron number 2 from transcript evm.model.supercontig_135. 30 (locus evm.TU.supercontig_135.30) derived from phytozom e v7.0 (chr-ID supercontig_135; pos 471381 to 471905 rever se strand)
ccacgctattggtatttacctaaagatagtcaaaggtcaatcatcctctgtctttaatcttttctgtttgattaattaattgatttttttttttctaaattgaaaagtatttctttacagtaaatattatacacacatacatactcgttataaatgttcttgtgctgttcttttctcctaagtaagtgcggatttgtaagtaaatttaagatctaatcttttagaaggaagaataggagaatttttcttgttataaatctcgtatacctaacatataacatatagagtctgcgtttgaccaggtcagtgcataagaattgctccgaaaacacccaagtgttaaagaaattttaaagaagatgcaattagaaatttaaaaggggtatagtttgagatcatcataaaaacataatatatgtagatttgttgctttttaatgcacttaatcatctgacataaattttatacttataacgtgacacacacacacatatatatatatatatatatattgtagagtggtga

SEQ ID NO: 74079 - DNA, 455 bp, Carica papaya
  Intron number 1 from transcript evm.model.supercontig_53.1 57 (locus evm.TU.supercontig_53.157) derived from phytozom e v7.0 (chr-ID supercontig_53; pos 1281983 to 1282437)
ttggccagtttgatctcccacctgaaggtaatatgggtggtattgtatgtcttgactgaataacagtcttgtgttggttaagacgctgaaaggaaagatgtccatctcttgagaatttattctcaggaatatcaatatcaaatggtgatttcaatatggtactttctccttgaagatttcaagtggaagagcctaggctaataatagcactaaggaattcacgaatatcatgggcgagttgaacctcatacatccttccttaatggtggtaagtgaatgtgatccaatgacagaggaaatccttctttttcaattatatacaaatttttggtttttttgattattttcttaggatgatgcggtcgagacttccctggctcatctctaactatttaactattttttttgtggacttggatgttagtagggggccctccccattcagatttaaaaag

SEQ ID NO: 74080 - DNA, 927 bp, Carica papaya
  Intron number 1 from transcript evm.model.supercontig_33.1 79 (locus evm.TU.supercontig_33.179) derived from phytozom e v7.0 (chr-ID supercontig_33; pos 1802372 to 1803298)
gcggttcgtttctcttcataaatctatttaaagccgtactccattacttgatcttgcttttaggtttctgatttgtacagctgtttgatcttcttatctagtaacgaattatgaacgaattggattttgtcttcagctttttgttattttcaatcattcggattatattttgtgatagttgtaaaacttttatgtaaacgtttattgaggcaattgtttctgattattttttgctctgagaatgttgattaatggccgatgttatttactaggttttttagttgatgttcttctggaattaagaatatcaaattaaatttaagtcatactcgtgttattgggtttaagatctactcatgcttaccctttttgcgccactaaactcaccttggccttctgctctgcaggacctgtcttggtcctatctatttatgcgcagttatcgtcttcttcagccgatgctttttttttctccttttttccccccggaggattgtgttcattgtcgatcctttgctcattgaaggaaatccttgtagatttgattaatcttaggtttttctttttcagtctgacccatttttttgcttctgtattgatttgtttgggataacaataacataaatgttttgccagttctttaatcttacatttgctatattactatgttaactagtatttaccaatgtctcttgttgatacccactatctatttgccctactgttcttgaaacagcacttcttgctgttttatagcaatagaagcttccatcttcaatgttgaagggtgggggcagggtttcttaaagctacaggattaggctagttaattgcgatgattttacagcatgttgttgatatggaggttgaacagtaatcttgtaataatttgcaggttgcatcaccaccaaggagcttgggacagtg

SEQ ID NO: 74081 - DNA, 384 bp, Carica papaya
  Intron number 1 from transcript evm.model.supercontig_64.1 05 (locus evm.TU.supercontig_64.105) derived from phytozom e v7.0 (chr-ID supercontig_64; pos 739668 to 740051 revers e strand)
ttgaagaagtttctcaccaggcacgagttataaaatgttttccaatatatgcattattattttcatttgtatctttcttttggcatgattgtgttgttatgtctaaagttcataacaataatgaaaaaacccatatcaaatttcaagagtttctttgatgatgatgcattatcattaatttccattcctgatgatcctcgttaataagaatattatgtggttcttcgacgtcttcgtgtttttattgatgcgtacgtgcgtgcgtgcatgtttacgtacataatgtatgcataagacagaaattttgtggatcttgatcttgaacaccaatcaatattcatggtttcaggattcaggtggcaatatagaaatagaggaaagaag

SEQ ID NO: 74082 - DNA, 478 bp, Carica papaya
  Intron number 2 from transcript evm.model.supercontig_66.1 24 (locus evm.TU.supercontig_66.124) derived from phytozom e v7.0 (chr-ID supercontig_66; pos 1228297 to 1228774 reve rse strand)
gcagacaagtaaactcgataaatgaactctcatgtctttttgttccattacatttccaatcatttgctaatttcatgtctttgatatgtattatattatgaaattattgtgtttctaattacctcttcttccagcttgaattctttgggactagaggttaaattcactttgagaagtagaaattgaagtttgaattcaagctggattaagattaccagcttatgttgtgattgtgcatgttaacttgaaaattagaattaagaattcaatggaagatgaatctagccaaaattttatgatttggaaaccgtttttttagaaaaaaaatttccatttaattaaaccaaagttatttccattctgtttaaaagagtaggtttctctagaaacaagaaacatttttcgcaaatgaaactcctaatttttgtttttctcaattacagccagaggttgtggagaagcttgttggattgcgaga

SEQ ID NO: 74083 - DNA, 959 bp, Carica papaya
  Intron number 2 from transcript evm.model.supercontig_76.4 8 (locus evm.TU.supercontig_76.48) derived from phytozome v7.0 (chr-ID supercontig_76; pos 981830 to 982788)
cgacagctgcttctgctcgatctatatttacagaggtgaggcatgaagaaaacaggcaaaatgtgatgttgaagtaagtgaaaaggtcaaatactattgttggttggctaactgctgaaggagagttaaatgggcttgctggcctggaatttcagccctaagtagaaaagagacagttcctaaaacaggttttagacagcaaaagaatcggacctagtgtggatattgcaagaaaaagggacatgctaaggtaacctgttggaagatacatggaaaactagtagattataagcccaagtttagcaaccgggcccatggatgtaaccttctgtttaggaccagccgaaaagaatgaagaagaaaaaccaggaaataatttttccaccaaaaatgtcttcagtaccaagcaactggaacaaatctataaacttttctttcatttttttgttagactcttgcactataaaacgggggagagttgtacaattctgcaacaatagaaaaataatagattttaattcattttcgctttctttagaagggtgtctggattggcactgtagagggattttcctgctattttatctatgtgcatgttctttggtttgttgcttctatatttgctaattttttaattggagaatgctttatctttttgttcataatttacttctcccttcttaataatatctatttgtttatagtaaaatctatactttttctggaattccttgtttaaaaagtattggcggtaaaacgttctctgaagttgagaaataacttgtaattaactttgtgattgcaggtactggttatattataatataaataccttcctagttttcaattttgtttgcattggagaactcaaaatattgatatgtaccggatggattgtaatataaatatcttatctaattgcaattttttgattgcaggtctgttttatacttcattgc

SEQ ID NO: 74084 - DNA, 582 bp, Carica papaya
  Intron number 1 from transcript evm.model.supercontig_78.5 8 (locus evm.TU.supercontig_78.58) derived from phytozome v7.0 (chr-ID supercontig_78; pos 694930 to 695511)
gagacgtgcttcaccttcgttccagaactaacacggtaaggttttcatttttgggtttaagttttaaacttttggaattagtggggactgctcgtgttaattgagatttggcattttggaaacgcgaataacaggttgtaaagtctgtaatttattttgtgttgcttggttggttttattgatgatagaaaatacaatttggggcaggttacgtccttcctcttgatactatgccatttatgatcaactgagtatgcgtctatgctatatggatgggttaaatgggaaatgccttctttcttaatattagtcgggaaggaactttatctggcaaactctgacgatctttttgtgtttctttctgaagtcgaaggagaaaatatgtaactttgaccaaaattttgtctgacccatctatctcagcttcaagcagaaaaagttttcatcttttgctagattgaaagtaccagtttttctcgtttatctttacgtatgtgatacaatcttagcagtatgttagttttagaagaatgtttgattgctgtgtatggtatcagatttctgcagttgctcggattcgaa

SEQ ID NO: 74085 - DNA, 901 bp, Carica papaya
  Intron number 1 from transcript evm.TU.contig_31672.1 (loc us evm.TU.contig_31672) derived from phytozome v7.0 (chr-I D contig_31672; pos 4245 to 5145 reverse strand)
gctatttctgagtctcccaagaacccaggtaataaatttgagttacccatattttcgatggacattttttgctcggccagttgacccacacactttttatgtctggaattttgctattcgcatgtttgtatcagtattcgatgctcttggtgttcgataatttgtgtacatgactttaaagggtacgaatctgctattaaaatattaaggttgtattaacttcaatatacttgaaatagttaaaatgttcgtttgtctgctgaaagtaaattggtttttagttgatccagtattctttcattagacttgttattctagatttatggtgttcaaccgagttgttttaattgttgatggaattcattgttaggcaatttgatctatttaaattctatagcaagcgtccggatgattgtctgtttgtaccaaaattttcctcttcatgcggttcccaagtcagtgatgaactggatgctgttaactttgctctgttattatgattgattaattgcaccaaattcttggcccttgtctgcattgttagatagatggttggaaatctctttgattatcctatatgagcttgtagatcagttgttacatctatagattactatggaattttttcagttttctctagagaaaatgctaaaactagctagatggagttctacctcctatctgctttaattaactgaaaaattaaaaggaaaattttctgtttctctaaatgtgcttcctgaaatatatgtgtgtgtacatgtgtgtgcagtttcatcaaaaattgatacatattttctgctttttctttttgccatttaacatgctatagcactttaactctcatttgaattgtatggtttcagtgcttcatcaggagaaagttatagttcaaaacaaa

SEQ ID NO: 74086 - DNA, 935 bp, Carica papaya
  Intron number 2 from transcript evm.model.supercontig_60.9 3 (locus evm.TU.supercontig_60.93) derived from phytozome v7.0 (chr-ID supercontig_60; pos 1443604 to 1444538)
tggactctgcacctgttgcagcccctgacccacaggtaaataggcctttatttcttttactctgtaatcaacacaattatgttgtcttaaagaagataggagtattatgtctttgtgtgggtttgcagtccacctttgttatgattcttttgccttctgcttacataatctctttagcctgcatgctctcaccatttaatgttggtagtcttgagtatccatcaaatataacaattctggcttctgtcaaatatttgccaatcctccatatgccaaattagtccccacaagttgaaagttctagtagaaactgttgctgtcatttttctcccttttcccattttattcttctaggttgggttcattgaaaggtaagttaggtgatttcttcttcagatgatcgtttgggtttctttctttttagaagagttggactgatattgcacccctatctgcatatagtatttgtgtgagaacattgaactccgttacttctattattaattctattggtattttctctggcttcaactttctcttgttttgccttcactatactaagaacaaaagggtatgttttatctggaaaccctcgattctccaccatttttatcactttgatgtgttaattttgcaccattttatcactataggtttctattgttaattctattcaatagtggaagacatgtacctggaaatcaattatccacccttgattttgtagaatatgatctgttggtactattagcaagttgggaggattacccatgtattgaaaggttatagggtgtttggatactcattttggttctgtttttccccagcttttttagtcactcatttgctattttctacaaaagaggtttgggatagagaaaatctatgttggactattccttgtctgattcttttgaaatcatttgtgaataggt

SEQ ID NO: 74087 - DNA, 1057 bp, Carica papaya
  Intron number 2 from transcript evm.model.supercontig_54.9 (locus evm.TU.supercontig_54.9) derived from phytozome v7 .0 (chr-ID supercontig_54; pos 257453 to 258509 reverse st rand)
agagtgctgacaaggtgttgctcttcgtccctaatgtaatacctttttattatttttattattgttatctcatgcttatttgattgtggaacaaaagatgctttatgtgcttagctaaaagttcacttatctgcccattcaactactatttgtccttaggattcaacttacaatatgggttttaggcaattggtttcttggaactaaaatctatatgtatctcatgggtggcaaattggaagtgtatcaggcatctcatagaaaaattcatccaactcgtaattcaattcccgagcaagttcaacctatttaagagaatcaatgtccttttaaattttggtttaaagaaatcacgttacaagccatgatgatgtgagcaatgtccatcagcaaaatattttaacaaatttttcatccttgcaatcaccacatgaacaagaaccttaaacccatgagtgattttcaagttgttttatccacttcaaaaatgctaaaaagggtggggacgatgttatatattgagatccaacttgttggtaagctactttagtaaatgtttgaatttcgatgaaagctagtgaacttctagtcatcattttctaccatgctagcatcgaggcatctcacatcattacaataagaagtattctcttagtctagcttacattaaagtcaagcttaccccttaagtcagggccatcaacatattgaatatcatcctcaaatggatcacttgtctccttctccataagtaaggcacgataaggacgacaagcagctattctgtttacacctatgttatctggtggagttaatagagagcttcactaataaagctgttagattagtaaatgaaaagaggaagatcgttgatctaattcctaattgagcgtcaacgagtaaactacctctctgcttctaaggctacatgtaatgctacctctaagttaggttgggacgtaactacttgacttcttaattccagttgtaaatgaatgaacctcccaacttcatgttggcaggggggtggagatcaccttgaagttgaagaggctgt

SEQ ID NO: 74088 - DNA, 724 bp, Carica papaya
  Intron number 1 from transcript evm.model.supercontig_54.9 (locus evm.TU.supercontig_54.9) derived from phytozome v7 .0 (chr-ID supercontig_54; pos 258571 to 259294 reverse st rand)
aagaggagcgagccgctgagaacgtttacatccaggtttttgtttatctcttgtagttgatttgtatcagatcgtttagctttcagtttgattctgagaaaactagttatctgaaagataaagacaaaagaactgaaatcaaattaaataaagaaaacgaagaaatgaagaaagaagatggaatcggtccaatttgttctctcttatagtcgatatactagaagaagacattcagtataccatctggttagcgtactggtggaataattttgcgcagtttgtgagatttgaagttgatttaaatttgatcttcgatttttattttctttttcatggcgttgtcagctagaaccagagttttctctttaggtcttatgtagctctttttggctgctttattgttattcgattgttgaggttattttacatcatattagccgatatttttgataaaaaaatgtttctggtgaattaatggcgcggttcatagttatgtggagatgttacttctatctttaacatacacgagacaactaggtctcgtcatattcttttcctcaagttattcagaaaactgaacttgctgtctttttttctttttttgaagtcgttttaccttgttctagagcttttataaccagttgattctgtttcttaatcctacatgcttcctgtgcttccctgttaacttccttaacggctcttgattgtttctttgaagaaa

SEQ ID NO: 74089 - DNA, 676 bp, Carica papaya
  Intron number 1 from transcript evm.model.supercontig_2.9 (locus evm.TU.supercontig_2.9) derived from phytozome v7.0 (chr-ID supercontig_2; pos 40416 to 41091 reverse strand)
cttttggtaccaaaggcgacgtttatcctatcgctgtaagtatgacctccgtctctcttttgtttggtttctctgaaaacgtcagaaaatagaaatcctgaagaaatttccgacaagaacgctgtcttaataccagataattaatttaaaacgatgattgatgtttatacaatcgaaatgtttggtcgtcgcttttgtattaggatttacagtgttgatgttgctccttgtttgaaaccttccaaaatgagttaatgcattagaaatttggttcttctatgtttcttgtaatgatttgctttaagcagaagaatgatgattcccggagtttcaatattttaattagaattaaaactttcagttactagtacttttaagttctcagaggttcctgtatgcaggtaagtcatgttatcttaaaatcatgaatgttctttttgtttcttttgggattatttgaactagtggttgctgtctacatttatatctaggagatacaatgctcattgtccttttcaaaagaatggctttgcctttccttttgagttcatttgcagaacaatttagagggcttctgtcagcaagaaaaataaaagagtaactaagacggcaagtaatgaacttttttgtcatcctttcaggccattactgcttcttttgctcgtgatcagaaaca

SEQ ID NO: 74090 - DNA, 300 bp, Carica papaya
  Intron number 1 from transcript evm.model.supercontig_161. 31 (locus evm.TU.supercontig_161.31) derived from phytozom e v7.0 (chr-ID supercontig_161; pos 429058 to 429357 rever se strand)
ggaagacatactgcaattaggtaccttaagaattatgtagagaatcctagttggtggttttctgtttcctttaattaccaaagttttagtaaacataatgtagataaattgtgtttattcattggtgaaaaaattgaggacgggattttgatttgtatgattaagaggttatttgactgtggcatgctaagaattgatttaggtgggtgttacttggggaaggggtttcctcaagaatgtggtctgtcttcaattttgattaatatttattttgataggtttgataaagaaattcaggaa

SEQ ID NO: 74091 - DNA, 801 bp, Carica papaya
  Intron number 2 from transcript evm.model.supercontig_64.3 6 (locus evm.TU.supercontig_64.36) derived from phytozome v7.0 (chr-ID supercontig_64; pos 251493 to 252293 reverse strand)
tacattatttcatacactggtcaagcagattgcaggtaatatgactatgaggattattttgaattgggctgatgcaccgaaaaaaacaagttttatgaaaattttggtctctgatttaagtatttgattcttccagagctttgtttctgtagcagtcttttgttcgtttgtcatatcgattagtaatgcaaagggatggattttgtgattcctgtaatatagatattttattcaatgagtcttcatgttttgttaggcattcaggagaaaaatgatgaatctaaagtttttgatgtacataatagtttcctatttctttactcgcttctaaattaggttttttttggaaaaaaagtaggtaaatgccattgtaaatgctggagactgggtctctccaataagaagtctgacaataatcagctcagcttaccaccatggccctatctcaggattgttaatagagttttttgggttggaaattttacttgattaactccagttgatcaatctaagtgtatgagaggttctggcttattatcttttttttttttctttttacattttggctatattgctattactggtctcttgttagtcttctactagttgttgtacttctgcaggtaatttttctcggctttcatctttttatgatgctgggtagtgtgggtgtcggtgctgcatggcccagctagtctcctgcaacttcatgagcagttgttaattaaataaaagatttttagggtagcagtcttgccttactgttgatttggtttggtttcaggtgcagtgcactgcaaa

SEQ ID NO: 74092 - DNA, 1049 bp, Carica papaya
  Intron number 1 from transcript evm.model.supercontig_34.9 4 (locus evm.TU.supercontig_34.94) derived from phytozome v7.0 (chr-ID supercontig_34; pos 746805 to 747853)
aaagcctccttacatctcctcaactcattcgcaacgtaatatcttctctctctcctccatgggctgcatgtacgtgcgcgcgaagatatgtgcatatatattattgtgtttttacatttgtttgcgtatgtttctagaggagctgagtttcttaattagttattggacattctaattctggaacggcggccatatatttcaatttgcttaatttctctttttgtttcgagggaaactattgaaggcgtatagatgattagagtcgacaatcaagcagatggttgttaatatgtatgctaaatgcgtaactattagcaatttttgcatctagaaaagtatagtatcatcagtggttgaattttaattaaaaaaattgaatgaagttacggaatgagaatggtgatggtgttgaaaatttattcggttatgagggtatttgggaatcactggtctgactggctctggcagcttaattgtatgtacaaacaagcttatggacacagtgtgagcttgtgtttagttgtcagaggaccagccttgtatgtcttttgcccacagctcaaatacaaagttagattaagctactgacttatttgattatgaaagatttttatttggaccactggatgggcatggtttctgactcttgtccctccctacctgtacaatctttgttttgttcgtaacttctcactaaaagagtataaactttatggaaaaattttaatttggaaaactatatcgaaattgttctttttcaatctagttgtatttttaatggacttttaaattcttcagcggatggaatgagtttcatgcatgaagcaaacatattttattactgtacaacaatttgatttttaaaatcttgcatgttggtctacaactcaatgttgtaagaattgctactagcttaatagtttgttgtttttgcaattatcctgaattgttgtgctgctgcatctagaaagaaggtttcttcacataattcactgacttcctcaactaaaacaggtgcatcttgattacctcgaagctggtgcagacat

SEQ ID NO: 74093 - DNA, 761 bp, Carica papaya
  Intron number 1 from transcript evm.model.supercontig_7.48 (locus evm.TU.supercontig_7.48) derived from phytozome v7 .0 (chr-ID supercontig_7; pos 513352 to 514112 reverse str and)
gtgtaactcttcgcagaatttgaatttctcttctggtaatttctgttttcttttgcttcttgatgtcttgttgattggattgtaaacttgattggtgtatctaattggttttcgtgatagattaagaattcgatttccttattagaatctttaggcgtgtaactgacgttgagatttttttttttttttttttttttttataatcaattttgtaaatgaatgcatagttgaaataagaagacaagggttttttcgcgctcaccctgtttctgggaagaaaatggaatacaaacttttaggaggagaggtttcgagaatcattatatgtgcaataatgcactcaaccgtgattggttctcagctacgtgttgctaaagaatatattttgagattttcctcccttttttttggggtcaggaggaggggggagtaggtggagtaatatacggtttatcttctcttacaaggcaaatattacctgttattggcatattaccatggaaagcaatgaaaaactaactaggcttgttgagggccaaaattcagagctttatcatcaacttggaatgcgtgcttttgacttttagctcgggttgtctagggaccgatatttgcttttttctgaaggctttgcctatttgctttgcatggtgaatatcttcagtttatctattgaatgtttgattttttccccttcttcctttctttggcttgagtcttgtgcaggtacaactaataattggaaaaatcaaagccttata

SEQ ID NO: 74094 - DNA, 690 bp, Carica papaya
  Intron number 2 from transcript evm.model.supercontig_194. 5 (locus evm.TU.supercontig_194.5) derived from phytozome v7.0 (chr-ID supercontig_194; pos 85795 to 86484)
tggctcagaaaccaacgaggtaataatatctaatcgcccaaaaaaagaaaagttctatactagctgatttttttcttaacatctgtctcatttcccattgatttcatttttaacaaatacttagctgttgcatggttcatatcaactgactttaagatggttagccgtgaacattgtacaaaataacttcaatatgtattttctcacattttttcggtaacagtttctcttttgctttttcttattaaaataggcactggtcagtatcttcgaatcatgaaataaattatttttttttcatataggaaaacatgcaagccttgtggtaatatttgtataaggaaaactctgagaatgggtctctcttattatgcgcatatcaacatattgtgtcacctaaaattctaaatacttttgatatcctgctctcatttatggttggagtggataaacccatatgtggtagccatatctagaaattttcccaagaagaatttaactgattattctacaaagaaattttccataaattgattttcatcgctaacatatgcttcctctgaattgcttagaattttgtttcttcctttattatgttcttgcttctgtcatgtttactcattaagttctaactatctcaacatgtattcccacacccgccaggtttacagttattatagatctttgcca

SEQ ID NO: 74095 - DNA, 652 bp, Carica papaya
  Intron number 1 from transcript evm.model.supercontig_184. 24 (locus evm.TU.supercontig_184.24) derived from phytozom e v7.0 (chr-ID supercontig_184; pos 210365 to 211016)
ccgacgcgatcttgttttcgtcgttaatcctcgaggttttcttctttattctcttcctctctttcgttctttttctgtttggttattgagaaaatgttagccgattaacatgtcgggagggagggattcgaggagaggaaaggacgacaaggatgtcagggtggagaagcctctacatttgttttttttttttttgaggaataaagcatacttcatataaaaaggtcaatccctctcaagagcaagaagggaaaccaaaaactcaggaaccttctgaaaatataattgagagctgatagggatagggcttgcctagataagccatgcgtcacccagttgcaacttctaggcttccaaactaattgaaaataaataaaattctagacaagtctctccatttcatgtggagagaaagagagccggtttcagactacccgctattttaaggaactatagaatgtactcttgaataaataaaccaaaaagtcccgtaatcaagaagaaagtgtttcaataaataaaactaatgggaaggatggtggattttcctttttgttttctctttcctttgattttttcccttcaatatgctcgcctaattcaatcaatagtgatttttgttgcttaataatttaaactggtgcaggtgcta

SEQ ID NO: 74096 - DNA, 745 bp, Carica papaya
  Intron number 1 from transcript evm.model.supercontig_59.1 27 (locus evm.TU.supercontig_59.127) derived from phytozom e v7.0 (chr-ID supercontig_59; pos 1148721 to 1149465 reve rse strand)
ttacaaagccagctgtttgttctccagtatcatttgtatgtttatttacttcccttgtgtattttcaattcagaagtaaatgcccttttatgattacttttgtatgcaattagcacagagtggagcttgtaattgacttatatccagaggcttctcggggacaaaatcacaaaatcatatgtgattttcttctgcactatgtttgagagcttggagggtaatgtagaatggggatattttaagtaaaataaataagctttatttaaaaaaaaaagtaaaataaataagctagggaatgtaattaatctttatttggtagttaattacaataaagggagtaggggaggtttctggctcacctttttctggttgaacagggtaaagtaaagttgcggtttggtgagaaaataattcctcattagaaaatatatgctgcaaattataacaaaaagggtagagatattatggaactgtcccaaccctccagttttgggtgttggataattgaggatatagaggggtgataagtggtttagagaacctcagctttgtccagtattatccaagcttgtaaacagggttcgtaatagtttgattttctcattagaagaaaataatatgatcttatcatttcttttttattttgctcagttttggatcaactagttttctgcatttatgtttgatgattttctactgaataaatttttgtgtggtatttggcaattatttcagcagacaaaat

SEQ ID NO: 74097 - DNA, 239 bp, Carica papaya
  Intron number 1 from transcript evm.model.supercontig_79.6 2 (locus evm.TU.supercontig_79.62) derived from phytozome v7.0 (chr-ID supercontig_79; pos 1193993 to 1194231 revers e strand)
catctcaaaattcaaggttcattttgatttttgtttttctcttttgctgccttttcattgatgtgcgaggaacttcaaaacttcactcaatttgaattgtatctggtcaaatttggattatttgttctctctgtctagaaattggagatgtactagtgtttacctttctaagcaatttttcctttgattttcggatttcttttttaatcttcgttattgagttattgttattcaggtaa

SEQ ID NO: 74098 - DNA, 580 bp, Carica papaya
  Intron number 2 from transcript evm.model.supercontig_793. 1 (locus evm.TU.supercontig_793.1) derived from phytozome v7.0 (chr-ID supercontig_793; pos 16695 to 17274 reverse s trand)
atccctcagaatttttagaggtacaaaatgacttaaattttactgcaaacattttatatgtcaagcacttttatatttgtgtattacaagtactagttaaaacttctaacttgatcatattctttggatattaataaagaaatgtagcttcatcccagtgatccaataattcaggacaagttacaatttgaactcatatggtttggcctggttgcaattcaaactttttgtgacagtttcggacttgtttagttttttgacattttatataaaatgaatagttttttggactatccttttatatttttttaagttttttcctctaatatggacttagctttaaagtttcctgtttagaaatccaggcaggtatagatttactgagatgtaaaagaacagaaactaaaccaaactactaaattgtcaaaaaaaaaaccacaagatttgaattgtaatcaagctcaaccacatgaggggaagatgtaccttgcccaatttttatgctagaaaatcccatgtccaaggatttaagctttgggtgtagagatgatgatcgattatctgttgtttcaggtatacc

SEQ ID NO: 74099 - DNA, 820 bp, Carica papaya
  Intron number 3 from transcript evm.model.supercontig_86.6 (locus evm.TU.supercontig_86.6) derived from phytozome v7 .0 (chr-ID supercontig_86; pos 143369 to 144188 reverse st rand)
gactgatagctgctctgggggtaacaattagacaggtaatctttcagttatattaaaacaaaaagtacatttctcgcgttggctactattggctactggatcatgaatgtctataaattagcagccccagtatgaagaaaatgcatcaattttttgggtaaaattcagcttcacttagtaaatgattttatatattcttttttgcattattatccagatattatatatgtctatatacatatgatataatgattttcatgccaaaggatgtggagtaggataaattggtagtatttaagagtaaacaaagcatgagaatgggggaggaattgaaatggagaaaataaaggatgagatagaatcataagaatccagaggaaagttcgttcataggtggtggcaagtccttgcttcaccaataatgaaatacgatcctatttactattaggaatttagggagaaacctagattagagttcttgggtatcatgtctaaaatttgattgaatcacacaattaagtaatgggaaatgcttaaagaaattcatatcgactggatagtgctctcagaggagattacaaagatttttatggagtgcctaataatctcttcctatatagaattctactaagaacactaaccaggaaatgctactactatcagaagtaagaaaatgaaaaatagataataaactgcaattcattgttcggatcctttttccttttcttatttcctctttgtaataatatgtcttttttcatgaaaattttttgcttaggcttcatatttgtagctcaatttgaagaaaagaggtgagaac

SEQ ID NO: 74100 - DNA, 1021 bp, Carica papaya
  Intron number 2 from transcript evm.model.supercontig_2.17 2 (locus evm.TU.supercontig_2.172) derived from phytozome v7.0 (chr-ID supercontig_2; pos 2459329 to 2460349)
gttccttctacctgggatcctcgtgctttggcaaggtaactttcatctctctttaattccttcttcatttttaattttctaaaataatttttaaaagtaattttactaaatgttaataatttttccatgcattatagtataatttacaaatataaatgtacagaattaatgtatgtatagataaggttctggtttgtttggaaaattacaaaaaataaaaaaaaacgtagctaattgatgtaggatgaaaacaatgggtttgactttgtatttaatagtaatattattattattttatattgattaatccttttcacatttttaaattaagaccaaccgtaaagagtaggtaaccagtaggtttccaattcctgccaaccattttgctcattaataccaatttttggccaattggaaaatataattaggtcaaaaatatcagctgttttaattcggatttcatctgtttctataatattaaaatacatgcatgtacctcaaatattcattaaaaataatatgttcgttattttccatattttagggttaaaattattataattcgctggatttttaaaaagagaagatagatataattacttatttaatcataattaattaattataatccatcattgggtaaggtcaaatattgactttagatcatgcaaattaaaatgcacatctgttccatttcaatggtatacgtgttgttttttcagtcaaagaagctggtttttagtcacagtaacaagctttatttttttaagtcaaaaaagaaaaattctccgcctccatttcatttcaacctattaataataataaaaaaaaaaggataaaattgaagaatctcaagaattcctggtttctcacgcggttttttttttttggcgtaattattacttcatttaaatttaaaattaaaagaaaaatgttctagcagatgactcaactcaaagtcgtaaccatgttgtgatcgtaatattgacgtcagcgaaatttgacagattcatagagaaat

SEQ ID NO: 74101 - DNA, 696 bp, Carica papaya
  Intron number 2 from transcript evm.model.supercontig_84.6 3 (locus evm.TU.supercontig_84.63) derived from phytozome v7.0 (chr-ID supercontig_84; pos 500691 to 501386)
ggaaggatagacggcgtaagggtacaactaaaaatgttagtgactttttctttgatcattttcatacctcattggcaagaattaatgatttcctatttcttgttagttcatcactctttgttcttttttctttgattaatatgtaaataactttgtgcatgggtctgcagcccttggtgcttgtgaatgaataatactatactatttttattgaaaaaaattactctctgtttttttctcttccattcaatcctatttgacaaacagatttacttttcataatcattctatcatcttgttttcctgaacatttatgtagttgtctcagcaaaggtgaaattagttttcagttttactccgttgttcattcttttgacagcctggtaaactttttcctcagctgcaactcattgatgctagaaatggataagaaaaaccctattcctttttaatttttcaaagtcccaaatgcatttacatcttgtattcagtttatctgggatatatgctagactttgtcttgacatcagattaaaactgtgctcgttgtgtatatcatctagaggaatgaggagatgattagaaaggaaaacatggagtacaatatgacctttttaatagcgtttctgttactaacaccatctccaaattacgcctgtagatccctgatcatcttcttccaaaagttgcgattgt

SEQ ID NO: 74102 - DNA, 573 bp, Carica papaya
  Intron number 1 from transcript evm.model.supercontig_170. 28 (locus evm.TU.supercontig_170.28) derived from phytozom e v7.0 (chr-ID supercontig_170; pos 141876 to 142448)
tagaagccaagacgaagagaagtctgttttatgtactaggcttttacctcatttgacttcgtctgcttcttatttttggctatcagatagttgctctcttggttctagtttttattgtacatgaatcatgaatgtaaattgaacttcaaggaggatttagcttgaaagaaagttgaatttggaagtgacaactaagaagcaaacttcacatgtaatagtttgagttatctattatctctttgtttgtattcatgaagtaattgcaggaagaagatgagaggacatgatctttaagtaaaatgactgtaatattacgattatctttaaaaaaaattaagtgtaatgtatgagttctcttgtcaaataatgaactcaagtaccttttttatagttcttcaaatggtagaatcctttctgttagttgtttttggtcctaaataatataagaagaaaatttgtgcgtggttattcttctcaatggaatgcatttacataactgcattctgtcaaaaatttgcttaaacttctctgctgttaggtcgaagttggaaagcttcagaattgcgtttgaag

SEQ ID NO: 74103 - DNA, 645 bp, Carica papaya
  Intron number 4 from transcript evm.model.supercontig_187. 9 (locus evm.TU.supercontig_187.9) derived from phytozome v7.0 (chr-ID supercontig_187; pos 62732 to 63376 reverse s trand)
agaggttcaagactgcgactgttgattaatcagaggtaaaatactaccaataaacgatgaagagcatactttttctcttgtgctttgattgggtttgttatgccactgcaatgtgtccagttgtgtcaaaaataagagtatatgccgaaagttagagtagccaattacaatgacgttaatgcataaatagtatacggattcttttttaaccatcttaagctttgccgaaagttagagtagccaattacaatgacgttaatgcataaatagtatacggattcttttttaaccatcttaagcttttgtgtgattgatcataatgacttatttcatattgtaataaagttacaactgtactgtccaaatatcagtagttcaatttctatttcatcgtgaagagattctgtcctcgacttatcacttcagcctaaagaagcctattaggcttgatatggtaaatgaaatcacaagactttgaaatgttgttcttagtgtttttaaaaaactatctcattcataaataatttaatcgacagatatgcaactctcgtacttaatatttttcctggtgatcatattgtactgatgatttgttgtataaatttggcagcttgaactggcagcattcgctctgtgcaaatccga

SEQ ID NO: 74104 - DNA, 941 bp, Carica papaya
  Intron number 1 from transcript evm.model.supercontig_25.1 38 (locus evm.TU.supercontig_25.138) derived from phytozom e v7.0 (chr-ID supercontig_25; pos 1440442 to 1441382)
gcgattgctgcattgcggtgccattgggagagaaggtatacagagactttgaccgtcatagcatttaagcagcaatgaaaatgaattttcttggcgtcttttcttcctttttcttttgccgctctgaaaacttctgattgattaattttttcttcttctaatttatctttagtccttaggccgaaacggaaatccactagtttcaagcgaaggcagatttgatgtcaatttccttcaaaattttaactgctaatttgtatagttaacccatttgattggtagaattctttgaccagtttatttgttgataaaacaagttttgcatatgatgcaaatataattagagtggttacgctagctagtccgtttttcttttctttttttgttagcctataagggtacttcaacaacaactaaattcatgtcgtcgtcatctagaacttatttagaattgttggtaattccaccactctcctcggggtgtatgttcgactctggactgtgcgtcccttgtcagatggaaagaaaaaatgatgcgtactttgggctaccaagacatcgacgtttgcagaatatcaaagttttttcggttctattttcctcgtctggggcctagcagtattttttggaagggaaatatttcaatttctttttactacttctgagaaatatttgcttcgtcggttctcataaagaagatctgcaatcagttgtctttcttctttttgcataaaaaacgttgtggaagacacgcaatatcttgtcgttattccatggcagtacgctcatggaaaccttttatttgataattgaatacaattgttttacatgttattttccttttttggttgtaatcatttaaggccaactgtcttaaagttctcaagaaaaataatcatgtggctaacagggttcacttctaggtgttgaggttgatattc

SEQ ID NO: 74105 - DNA, 766 bp, Carica papaya
  Intron number 4 from transcript evm.model.supercontig_4.69 (locus evm.TU.supercontig_4.69) derived from phytozome v7 .0 (chr-ID supercontig_4; pos 1595023 to 1595788 reverse s trand)
attttgacaacagacactacaatcttctgaacattgtatgtggactctggttccttgtctcggtttgaaatttgaagcttcctgttctttcattgtagcatgaaaaacttgaattttttttgggcatatggtggtttgcttcattcaaaaccatgtcttttggtaccaattcgaaattttgtcttctgtcttggatttttaggcattttctttatatactacctgtgttaaaataaaaattaactgaagtagcacttatttgaattttttggacaggtatctgtagtttctttttagtgattttctcatattactttatcactgcacaatttggttgaataaggatatcctttcaaaatgtgaattaagattgagcatcaccatctattttgtgtttttccttttatttactgaagtcttggttagcaagttaaaatagttatggtaaatatctatatgtatatatatatatatatatataaatcacaagatcacttgttgagctaatgttgcttgttcttgttttcttttttcaattcttttaaacttagtttgtttctcaatttcgtgatggcatacttttatccttaatttgagtagaaaacgcccaatagaaggactgcagttctttacaaactccttacaagatattattatctcgataacaacttgatccatcctcttttcttttggttaaaaagaggcttgtgttgatgtataacaaaagttaatgaattcagactcattccaagtgcttggccgactt

SEQ ID NO: 74106 - DNA, 334 bp, Carica papaya
  Intron number 1 from transcript evm.model.supercontig_7.11 3 (locus evm.TU.supercontig_7.113) derived from phytozome v7.0 (chr-ID supercontig_7; pos 1024908 to 1025241)
gaaaggtttacaagcatttttacacacagggaacagaagaatgacaaagtcaaagggtgaaaccagttcagacatatactttcacaaaaaaaaaaaggttcagataggcttccttgtaatagttctaggttgtctttattctgtcctattcttatgctgtcctgctgggcttctttggaataattctagtttgtttttgtttagtgtcctagtcttatgctattcatagttttctttatgttcagttttacccagtggtttatttcagttttttatctttttagtttatgtaattgtagaattactgcttagaggcagttaattctgtaattga

SEQ ID NO: 74107 - DNA, 1007 bp, Carica papaya
  Intron number 1 from transcript evm.model.supercontig_55.1 14 (locus evm.TU.supercontig_55.114) derived from phytozom e v7.0 (chr-ID supercontig_55; pos 682546 to 683552 revers e strand)
ctactagtgctaccttgacggcaaattccgtttcggttagtttcctgttatcttatcggcttatcgtctcctcctttcatttgtagtcttattatttttgttattttttttttcctgaacaagtttagtggcttgttcatagatatgaagtttgtcctgttgctaatttagggtttaacgtgctctgggaaacagagaaagttcacctttagtggcatccattacagattcatgtctataatttgataaattgtgacgaagtgctgactgtagggggtcttatttgattggattggaatttttaaatttattgatttagacacaagtcagttgtattattaaaaatcacaaacgtctatcgtgaatttttatcgaaaaatccagtggccagtgtttacgtgacgctgaagctgttcgtttaacagtttttaatcaaaataattttctctatttatgcttttatatatggatgtgtatattataagcaattttttggcgaggcaaagtctctttcagagcaaaggaaagcagtagaccatccgactggtctaatagggagatattttattttgagaaagttgtgtgtcaaatgatgtttttcagcataggtgttgccgaaagactgtttttataatatgtcatgaggaattagaaagtacagaaaccatagcatttgaaaaagtgaagagagttctgctgaatttcaacttggtcggtctgcattttctttccctgcatgcttttgcttcttaggtccgtctatagcggctttaagtgataggtacatttcctctattgccgtgtttcattatttgcataatgaatttcatttcgaatactctgccttatgcattttggaaaaattatgcatttattatatctaccaattaggcaaatgtcatatcagcaatcgtaactgatattacttaaaatgactcagacatgggcttattacatttgtttcctttgcagccaagaagtggaatatatacagttggcgagttcat

SEQ ID NO: 74108 - DNA, 963 bp, Carica papaya
  Intron number 1 from transcript evm.model.supercontig_152. 23 (locus evm.TU.supercontig_152.23) derived from phytozom e v7.0 (chr-ID supercontig_152; pos 174645 to 175607 rever se strand)
aagttccgaaaagtcccaccataagaaaacaaaacgtgagctcctttttaaatctatattggtttcctgaaggaatttgatatggtcccctggaagctgaagtgtatgaagcatattgtttttgaagtttgtatcttagaaagatgatgtctacaatcttgagaacaaaatgaattattctcgtctaatggtctaataacactttgttaccattccaaaagaaactcgtaatcatgctaacaactaaaagtatatgttcatgtatgcacatatacacacatgtacatgtatacagacatatatatgtacacagatattcatctatttttacatgcacatatatagacacatacatatatctgcttatgttatatatacataccattaatttagtatctgcacacctttttctagaacgtatccttatatctatttacctcttccatatttgccattgtcctgtctggcagtgaaccttgattagtttttactactaatagtaaactagcgtctgattactacatatacaaacgaatacatacacataactatagagttagtttttagtaacttactttttatgtgaatttttttttttggttaaactacaaggaaagcgagttaaatcaaattgcaatctttagtgactgttttgtttgtgtcagagaagtattggaattttagttgagatattcatgcatcttgtaaatttatcaaatatgagaatataatgttgataggaattttgtatggctcgcgatgcaaattagatatatcaatcttggactgataacatttgcatcactcttatgttctatggaaatgttgtatctttgaaccataggcaactgtgtggatgtaaatctgaagtttgacaggacttggtgcttgtcatttgatggaaaatttttatctatattatgaaagactggatgctgctttttctgatatctttaggtagac

SEQ ID NO: 74109 - DNA, 917 bp, Carica papaya
  Intron number 2 from transcript evm.model.supercontig_33.8 5 (locus evm.TU.supercontig_33.85) derived from phytozome v7.0 (chr-ID supercontig_33; pos 804495 to 805411)
tgctagcacttgcagctgggtacacgacatccaaggtaggtgttcaagttacgaatttaactctttgcctgggttcattagaggatgacaggaactagttttggaagtcatgtgttaatttgtgatttttgaaatgatttattctcaattatgtttaaagactttggattttttggtttacttttggattgcatttatttcatactgccgtttaatggtctgggtttactcatatatagcaataggaaattatcaggatgatttggcctcccttcattacatgaaaatgactttcagtttttattttctatatttatatgatttttttttttgcaaaatcatgcaaggtcattaataatatagataataattgtgaaaatgacaatggaaatagaaaagttttaaaaaattaaatttttgtgttttctagaaaactattttatttgtgttttgattactccacaaatatgtaactgttacatactaccatgaaaaaaaacatgcctaaatttttgtaaacttaaaaagtaaaatttaggagatattttcatgtaccggactgagccttaattcgtattaatattaactagttattggttgctaccttagtataagggaagagacaaaataaacatgtaatttccctttcttagtgcatgtgactagattcattgccattcctgaaaaaagataaaaggttcttgcgtctttaattctatcttcctatgttattaaccctttttttctctttaaaaaattattgggttgtaagacttcttttactgctcttttaaacgaccgacattagcattgggtgtttcctttagcggatgtcaactgattatttttttttctttaatgttctatatttattaatcctttccttttagattgacctatagtctccttagtgtgag

SEQ ID NO: 74110 - DNA, 980 bp, Carica papaya
  Intron number 1 from transcript evm.model.supercontig_82.6 6 (locus evm.TU.supercontig_82.66) derived from phytozome v7.0 (chr-ID supercontig_82; pos 1112189 to 1113168 revers e strand)
ttggccctggttaagtgggttattagtgaatttatgtaagtgacgaactttgtctacaagcatagataagagaaagagagggagggaaattcataggaacttggatcgacctatttgagctcgcgtctattctcatacaattgagagcagtccatgcaatttagcaactacatccatctctctctactctctctcatagagggagtgtgagagatagaaagaattgtagaaattaatcaacctacttgaggtcacttcagcaatttatgaaattaagcgactacatccatctccaagagagccctgttgtacttattcatgattttattctgcatgtgtgatcaaacttggtattatgcatatatgtaaaataatgaaattggatggccaattatctcataaacttaaaatcatttgaccatcttattggagatggtaatagaaccaaaggtatcaaacattaggaaccttgtgcctttgacccatggagaatccttaatcttgctttggcttgcatccttgttgcttacttattgggtctttatgcatttcttagggctgactccatgtgtagttggagatacatattagaacgtaacataaattataagttgaaccactttctattgttttcccaacacttacttcacaggatcaagcatggcattttagagagagagagagagcaaagttcctatttgtgtttttttcagttttcctttcctttgagcgaggaagagggaagactgtgctaaaacaaatatcaatcaagtagttaactaacattcatggaacagaagtgttgttttgtaatatattgggccttagctgcttggttgtgtgtgttttgtttccataaaattttattgtaatttatttcccagaaagtttaagactgtagagttataccattatttgagtaatgattttgtggtaattatctagtatactcgtccaggtcttggctgccattgatcaag

SEQ ID NO: 74111 - DNA, 510 bp, Carica papaya
  Intron number 2 from transcript evm.model.supercontig_28.1 48 (locus evm.TU.supercontig_28.148) derived from phytozom e v7.0 (chr-ID supercontig_28; pos 2160478 to 2160987)
actacaggcaaacatcctactattggaagcaagaggtaagaaaaaattgaattccaaacctcgagtctgagactcgaacatttgattcttgcaatagatgtgatgtatgtttcactaggagttaaagtaaaccctggataaattgaagattgaactggtgtaggctaggagttttccattacaagttgaatagatcatagcctgatcctgatcaatagaatcaggatgagcgagtgataagaaatgaacagggaggtcaaagagaatagaggttgagagaatcaggaatgctagttagagttagaagaattttaaactggtgaaagtaagttgaggtgagggagcaaaaataaacaaataggagagcgcatacagataatgatagattgaaggagttgaggagaggaaagaggaatgcccaggagaatcgtaggggttttgtgtgagagatgtgtgggaattgctaaactgtcaggtaaaaccaagacaggaggacgaaaagaggaagag

SEQ ID NO: 74112 - DNA, 642 bp, Carica papaya
  Intron number 2 from transcript evm.model.supercontig_275. 2 (locus evm.TU.supercontig_275.2) derived from phytozome v7.0 (chr-ID supercontig_275; pos 49726 to 50367 reverse s trand)
ttctctgattgacacagcatttattggacatatcggtactcatctatcttctaaactctttttggttaacttaacattatatatatttcaactattagcaaacaagtgtcacttgtaagttaagtcagagttcactgcattcatataaagttacaagaattttgcttgtgaatctccttatcctataatatttttatacttcactatactgagaataaaatgtaattgaaattgtatatagttcaaaaataataatatcagtcaagatgttagtacatttgttagcaaacattacttataagttaatgttcaattacctcaaatgagtttatgagaattttttcttgtgaattttcttactctaatatatgtgtaatactttattatacgtgagataggaatgtgattaaaaaccatataaatcaaaaaccgtcaatctattagtagggtttaatttctttatatgaagttatacaagaatttttcttgtgaatcttcggattctaacatatataacactttattacacgtgagacagaaatgtgattagtatgaggttcaataatgtgtaacaatattattaatctgattttacaactgtatttagggccagtggagcttgctgctgtaggagtttccatt

SEQ ID NO: 74113 - DNA, 502 bp, Carica papaya
  Intron number 1 from transcript evm.model.supercontig_84.1 13 (locus evm.TU.supercontig_84.113) derived from phytozom e v7.0 (chr-ID supercontig_84; pos 851177 to 851678)
attttgcttttggcactgctacatcggcttttcaggtaaaaatttataaaaaaaaatttaaattaaatatatattaaaaatattcttgaataaaaaccttgaaatgcatgccaatttttgcacgaggagtttgcacaattacatttttttttttgggcatttctaatgatagcttgaaataatgtgggttccttaattgttttttaagttattatcttattatttgttatattttcttcttaattttggttttcttcaatttcaacattatttgtacttgtctgtatataaaatttaaatacataataaactttttaaaagaaaaatatagttctataataaattgttaagaaattataaaatacaagtaatgtgtatatatgaaacgcactagaatattatgattataattattgtagattatttttgtttcatgttttatattaaattttataaaaataaattttcagattgagggtgtgacacatcgaggatttaacat

SEQ ID NO: 74114 - DNA, 499 bp, Carica papaya
  Intron number 1 from transcript evm.model.supercontig_74.8 (locus evm.TU.supercontig_74.8) derived from phytozome v7 .0 (chr-ID supercontig_74; pos 80402 to 80900 reverse stra nd)
gcttgctagcagcacctcctctgaagataatcgtaatgaagatgaaaccctcgcttgtgaagccttctttttctaatttcttcagtatatatgcgtttatttttttctttttcctttgctttttgggcgggtcggtattggagtgaaaatgacgagaatacggaaaggatgaacggtgaaaagagaagcatatatttctttcatgtttcgtttaaaagatcattaggacaaagccaaatggtagatttaagaatggattgttggtgtttaggtggaatatactgttcgactcattatgtcgcccaagtgtttgattaaaattctgagtgatactcttcaaaaagaactaatggtttttttttttttttgtgtgccggataaggatgtttcttttctgggtttatcaatagctgagttgttgcttctcttctgataaatatttatgcatttccttgagagcttttctagacactataaaactgaggctgttgatctacag

SEQ ID NO: 74115 - DNA, 679 bp, Carica papaya
  Intron number 1 from transcript evm.model.supercontig_19.1 71 (locus evm.TU.supercontig_19.171) derived from phytozom e v7.0 (chr-ID supercontig_19; pos 1212582 to 1213260)
acgtcggcgacgaagaccgcatcgagaaactcacggtactcatatccttctctctgcttccttttcaaataaacgaaaaaccaaaaacgaaaaggatatctctcggattatggattggtgtttgatgatttgatcgagttttagtgaagcagaacagttagggatttcggattcggtacctgggtttttcttgttctgtgaattattccattaaattggttcctttcatgtacttgattggattagagaagtgaattttgtaggttttctagaggtgagttaagatttaggttaaaacggtttaagatttgaagacacatatttacaactgtttaatcaagttttctgataggagtagttgtacttctacagttctactacttgtgaatcagttgggaaatgtgctgagttgtgagaggtggtttgagaagatgaaatttagaggtggaaatgaaagaggattttcgggaagcagtagtaaagatagtcccagaattcaaaattgctaattagtcttctttgtttggcaaccctaaagagttttgccttttgccttagctttttgctgctttggtttagggttttctcttgaaataatcttcctctttttgtttctagtacaattgcttgtgaatatactgagtttgagtcacacacttgcaggtagttcttgatttgg

SEQ ID NO: 74116 - DNA, 929 bp, Carica papaya
  Intron number 1 from transcript evm.model.supercontig_73.3 4 (locus evm.TU.supercontig_73.34) derived from phytozome v7.0 (chr-ID supercontig_73; pos 471598 to 472526 reverse strand)
acccctttttgaagcccttcaaaaggttaaagaaggtcagatcatttccttcgtctcttttttccataaatagttttcttcatatatatatatatatatatttccttgtatgcatatgtgggtgcacatatacaaggaacttaatcttttatctagattcccggagaagtggaaaaggagacatttgtgagttattattcagtttcttctcaccattaagtggatgtaatgataattctcatgggtaaagttcatgtatatatggatttgagaggaaatgaaactacttgaggaaattgaatgttagatgctcgttatgattttccttttttatatcatgcattttctctcaacaaactcttcaatctcaccatgcatcaactgtctttatgtttatgtataatgttgaacaaggtctccttctcaatttctccattgtctttttaaaagtctctccttttcctttagttttttgggatgtcaaagaagggaactttgcgcctctgtaaaattacggagatttagacagagggttttccgcttttctttcagagagaatgcacacttaagaaagagagagtactttgaagaatatacatacatgggtatacatgtatgtttttcccagatggatattgtaaacagaagtgtgcttaggcctatatttgttataatgggcttttagtgaccaggtgatcaatgatgtacaatttgaaaagtgttccatagaaagagttaccttctttattcaagccttgataagcacactgatttttctaatattaagtgaaatatatgtacttttgcttgtgcaccaaactttgaaggtttgatgtcacttcttcccctttgttttctatttattgccaactaagaggactcaaattgtgatgattgatgtgaagttggtggtttgttgaacagaactt

SEQ ID NO: 74117 - DNA, 378 bp, Carica papaya
  Intron number 1 from transcript evm.model.supercontig_55.1 4 (locus evm.TU.supercontig_55.14) derived from phytozome v7.0 (chr-ID supercontig_55; pos 83784 to 84161)
gctgtggaaggtaagcttattattatttctgttacttttatgtttagctctttatgtgctgtttggtttctgagaaaaactgggctattgcaaatttgaataactctgtttctaaaacgaattcgttttgttttttgtttttcttttttctagtatcaatattttgtttgattgctgagaaaaagcaggaggggaaaggaagtttgggttatttgaataaacttggatttgaattttttttactacactttctcgggaaaccgaagagaacaccatggttttccattgtatggttattgttttttttttttttatctttgacgttttcttcttcggttttgtgcagagacggaaaaggagaggcaagaaaatccaaag

SEQ ID NO: 74118 - DNA, 901 bp, Carica papaya
  Intron number 2 from transcript evm.model.supercontig_55.1 4 (locus evm.TU.supercontig_55.14) derived from phytozome v7.0 (chr-ID supercontig_55; pos 84545 to 85445)
agaacttgctgccgctactgataatttctctcccggtaccattccaaattttggctatcgccttctgcaacttctttttctctctgtttttctcggttaccaatcattttttttttcgcttgagcatgctataaaatctaaagtcttaacatttcagccccatcaagagaatttttcgtcttccaaacctacgaaagtgcgacttagttcatgaaatccatttttattctataaatttatctctatttttacaaaatcaagtttagattacacatgttttatatatatataaatttccagttttcagctccatccgtttaactttacatctttgaaacatatgcattccaattgcaactggtacaagagcagtcaaagtaaaccacttaagagaatctgcatggaagactgctttttgctttttcaatttcctctgcgcatgtatacataaagatacatatatgtattatatgtgcgcatgtaaagagagaaaaggaagcaagtagtgaaggtaggaccaactgggttgacccatggaatgtgaaaatcttaaaggaggttggcaatctgggatttggtcattggtgacttaaagatacgtgtaactacccattgcccattcaagtatggaagaaactcaaatttggtattctttgacttttatatatgcaggacatatactaataaataaacaaacaacttcaaaaagatttaacaattttatgtgaaataatagaaaaagttaaactacagatactaaattgaggtaaaagaaattataaatactgaaagtaaaaggaggcaattttatgtgaaaatcttctggtttatttttcttctcttttttttttttttttttttgacttgttcctttaactctgggcattatttggtagagaac

SEQ ID NO: 74119 - DNA, 1031 bp, Carica papaya
  Intron number 3 from transcript evm.model.supercontig_92.1 1 (locus evm.TU.supercontig_92.11) derived from phytozome v7.0 (chr-ID supercontig_92; pos 136429 to 137459 reverse strand)
aagaagtcgtcaaaattccttccggtactttaatgaaaattaatttggttagcatatagagtcaatcttcaatttcaaattaatgtttttaccattaacattgctgttgtcagttgcaacgcgagattgaaatcttctcatttttattctctttttctaactttggaagtaggatggaacattaaatttcacaatgaatactagcatcatttgaacccttgagaagttgattctttggttattatcctctgggcaatacctagggtcggtttttttttctttgcttgggaagtggtgacagagcggatactagcactggataagctgataaaaaggggaaagatcttggtgaatgagtgctacttgtgcaagggcgatgcaaagtcttgtagtcctattctcctttggtattcatctgcttattggttatggtatttgacatatgatctagtgggtttaaattgggagatagctggttcagtaagggaggaattgccagcttggaaatatcaaaagtgataatcgtttgctaaggcttattttttcggtgaccttttgggttatttggaggagagaaacataagagcttctgaggctagagggcctaattttgatagatctaaagatgtttggttaaataccctaagctttctaattatgtgctatccattttattctagtgaggatctgggggacctatagtcattttgctagagctgtaaatacttttgtttacaggttgcatccctttgatgttgttgaatattttgttttctactataataaaaaaagtatcatctgggcttctgtttacagttattcataatattataacttcttagttaaacatggtgatcagcatccccgttcttagatcttaaattatcaaagcttggaggttagtttacttcgctgtaaaatatgcaggaaaggttgctgtcttgttgtatttgtttatattcatttcttcccttttactagttgttcttgttagaaaacattttgtacgtctgtaggtcataggctggtca

SEQ ID NO: 74120 - DNA, 950 bp, Carica papaya
  Intron number 1 from transcript evm.model.supercontig_42.6 4 (locus evm.TU.supercontig_42.64) derived from phytozome v7.0 (chr-ID supercontig_42; pos 588275 to 589224 reverse strand)
cctctcttagcgccgaacaagtccgaaccatcaaggtccgtcttcttttaggctgtacattcgtctgccgctctaccttgtcttacttaaacgatttgatcttgcctaatttgtttctaattttaggctgtgcttctttacttgttattggttttgttgctaatttgctgaacctgctacttgaattccgattcctaatgtcttcgttcatttaaattcttatagatgtgcttgatttctacttgtctgttctataaatgattacgcagattgagctatttgggtcgtgcatttatctcttttcacttttggattttataattaatgttctttattttgtaaacaatttttttttttttggccggaagcggtgttgatgcatttccctctaatttgttcattgtattgcatagttagttaattatagtcaattaactagtatcaccttttctttagtccgtaacgatcttctaatttctggtgaaatgatccttttccctttttgttgtaaatacgataccagtcttataaagaaaacgtatctgaagattgcgttatcacaaaattgatgggtctgctgttagttaaacatccaatttaaaagttttgggagataagtgcagacagtgaaaatttgaaggatgtttagtacaatttacccaaaatgattatggagagagttgatagacttaacgagaatgctagcaggactatgcaagtgctagtgtgtgcatttatacactattacttgcatattctacattcagaatccattcatcatatcgagatatatttattatctcaatacaaaatttggcagcacctttttgctcatattgttacttgcttgtagttcatatgtagatgctactgaagtacttggatggtgacatttcaggatatttttgtgcctaggttcttgaacaaagggttgagactctggagaggga

SEQ ID NO: 74121 - DNA, 840 bp, Carica papaya
  Intron number 1 from transcript evm.model.supercontig_25.9 5 (locus evm.TU.supercontig_25.95) derived from phytozome v7.0 (chr-ID supercontig_25; pos 994413 to 995252 reverse strand)
atcaaagctctcaccacaggtttttgtttctgttctctccccttttattgaaagtttaaataatgggaaggaaaaaagctaaggggactgtttttgtttgttcgtttttcgaattttggtttttatgctgttttgtgcctggggagaatggggtctagtgcttcgtctccgctttgtttccactgcacgagtcccgtttttggttccgtcttagaagtgatgaagattttgagttatgatgttattctttttcctactgttttcttcttttcagtggaaatcttaggtagcgtgttttcctttcgttttgtttggttaaacaacgtccggttattttgttttccgcaacttgaattcatgtggtaaggagaactgaaaatatcgaattctgttgggtttacttgaaccagagatttgaatttgcagttaattgttgagctttttattctttatatcttcgatttttctgaaatcgaatgagacgcaatgtggcttcttgttgtctactaattagtattttggttttggtttttaatacttcttcttctttttttttttttgagagaatggagaacttattgaacctgttcgttctaattttttttgtgttttattttttcacaattctactgccagtaattttgtttacctggagcttacaatttttggggtaggagtaaacatttaaacgttaatttattgaatgttggaggctagtttaggatccctgtccgcaaatttacacaaggaagctttttttttcttttaaacagatgaattttgaagataggttttaagtttttttagtgcttatcagcttttggttttgttgtcttgtag

SEQ ID NO: 74122 - DNA, 938 bp, Carica papaya
  Intron number 2 from transcript evm.model.supercontig_23.1 59 (locus evm.TU.supercontig_23.159) derived from phytozom e v7.0 (chr-ID supercontig_23; pos 2374972 to 2375909)
tcagcaattgttcacttgcaccattcccaccaccggtgattactctatatatatatatatatatatatatatatatatatatacacaattattttcaattttcaaattttattaagattttttctgtttgtttcatttttcttcattcagttaaatataataaaaaagtcagtcagtatgtgtgtgtacatggacgatctgtagagtcatgattcggatttgagtagtttacgggcctgtctggttcagttgggttgaattgggctggacctttcaaacttaatgcatgattggtttatttagtatttagttccaagtaatgttagtttaattttgtattaaataattttcaaaaaagaaaaaactttgtactaaatattaattttaatgtatacaattagaatatatatattttttttaggttttcctatacctgtaaaaaattaaggtaaaataagaattattaaatataaaaaaatataattataaatatgtataattaatattaatagggggcaaatatgtcattttacgggaggtaattataagggcatatgcgtcgtcatccactcttttgaaaaatctaaagatggcgaaaagttttgggacgatcaaacttggttgtgaagaaaacaagattccaacttttaaattattttaaaacttcattagatcagattcttagtaagtaaatgtcaatttttaaattaatttcaggatttgattattttaaaataaactcatgagagtcttattcaattaaataaatatgtatttaattaaaaatatataaagtcagagaaaattctacaagtttatttttgggtagtagaaaaaatttataatttgaaataaagccataagcttttttttttttttggttgagatttttaataaaattaaggtagttggtaattgaaatgcaggtgagttagggg

SEQ ID NO: 74123 - DNA, 591 bp, Carica papaya
  Intron number 2 from transcript evm.model.supercontig_3.49 9 (locus evm.TU.supercontig_3.499) derived from phytozome v7.0 (chr-ID supercontig_3; pos 3552450 to 3553040)
tggctacggccgcttctgtaaggtagttgtgtagaattactatacgtgaagttagaaaaatcaagtggctactagttttaagcatcaacatttggagatgctcgtatttttgtggttcgtgtcggttaggaatctaattcctaatctaacctccattgattagaaaagaagaagatgaaaaaacaaacagtaggaagcacgagaaggatatcatgtgaagaatagagagatttttaggatttgagaaaaattattccgtaattttgtgttaaataattttcaattaaaagatatagtgtcaattttctagttacaagaagaaatgactaattaatcaaacttcttggtttacatcgtccaaatgttgttagatgatagggatggaaatggtagcagaaaactgatttgcaaaatttgtcctgctatttattgcaattatggaaattaatgtttctaatgtaattatataagcaagaacaaatatgaagaagccagaaatttttattttgtttaaacataataatcataaacgaaaatctgtaaaaaaaattttataaagctttcgcttatgcatgattttagtagggattg

SEQ ID NO: 74124 - DNA, 679 bp, Carica papaya
  Intron number 1 from transcript evm.model.supercontig_39.7 9 (locus evm.TU.supercontig_39.79) derived from phytozome v7.0 (chr-ID supercontig_39; pos 1629256 to 1629934)
cagaaagacttctcgtattgcttaaatcttggcctttaattcaattactccatggcttttgctttaatattttgcaagaaactcattttaactctggatgctaagattttgatgggaaaatgattttccttgtcagtataggcatgtttaatttctttcaatttagttatagagttggtatattgttacacaatgaggtagcactccttagagttttatttcatatatggtgtcttcattgctcttaaagttgctaatccaatttatttttgaacttcactgtgctagtattcgttagaagttcttaatggttgcagaaagttcccaattttgtaaatttctgctggacaagaatgcatgtgctgtaaagcttgtcgtttggggaatgctgttttttctttttttactaataggctgttacatattcatgaatcttatcaaattgtgaaaaaatgctaattatcttgaataataacatgctttccttctaaatagacaataaaaaagtttgtgtaaattttcttgattgtactgagaaatcttttcctttcctagatattaaattcagagaaaaaaagcaattttttgatgttctattgatcttaagctgtttatcttcatatttctttggtgttttcttccaggtcacgtggagtatctaagtttttaaagatccaaa

SEQ ID NO: 74125 - DNA, 347 bp, Carica papaya
  Intron number 2 from transcript evm.model.supercontig_167. 27 (locus evm.TU.supercontig_167.27) derived from phytozom e v7.0 (chr-ID supercontig_167; pos 409009 to 409355 rever se strand)
caaagaccgaaagttatcattcttgccctaataaggtatgtgttttttttcttatgtcaaagatacagcaaaggaggactgtatataatttgtacatgaacttaatttagaagaaactaatcgcactaatttaagcaaaatacaagaatgatttaaaacaaataaaactaacttggtaattataatattttgtgattcctataattgcttcttcaataattattttatgatttttataattgttttatcaataattattctttgtgattcttataatcactccaaatctcacgtcaataatatatacatatatgtatatatatattaacatttgattaagtagtaat

SEQ ID NO: 74126 - DNA, 988 bp, Carica papaya
  Intron number 3 from transcript evm.TU.contig_37838.1 (loc us evm.TU.contig_37838) derived from phytozome v7.0 (chr-I D contig_37838; pos 104 to 1091 reverse strand)
atagaaaggtttccctattgagtggtggagagaaggtacactagactagcacatatagactttctattattttcttcttttgaattattattcaagtttttggttcttatgggcttattcttcaagggggaaaaatacttctactgcctcttgcttatccacttcatgtattccccaagattatgaattaccataagtgcaatctggtgaatcttcttagaaattatatcttaattacagtgagttcctgagtttgttgcaatctcaaaactgagctatcatcttccactccagtctctgtatatttgggtttgtcctttatgtgtgtatgctccttatttatgccatagtttgtaggtaggtatcaatttagagtttgattcaagatgcagttatcatgtaggttggcgtgattaccttttctttataaaaccagagatgaatggttccagactttttttttctaaaaaaaatttgttattgttatcttctatgtgatggagaaaatcttggatcttttttgatattctctcttctttgatgtaaaattctttatccatgtatggcactcccttggtgccttgtgaatggtaatttttgttttccttttgtaaaaaaaagaagagttggaattagcacatgaattctgttattggtcaaatattctgaaccaatactgttgtgcaaccaggtggatttatacatcaaagtgtacttatctgatcactgatgcatgtatcgaagcatgagcatgagcgccagattttatttgtgcttgggctaaaccccgtgcttgggctaaacccctgacacttaattggcatgctctttttatcagaagcatacattttgctttgtcatacagaatattcttcatatacaaccattttaatcatgttgtcatgtatactactaatgttgtatatatgtcataaatttggattttacattttctgtcatataggcacgtcttgctttctgcaaattc

SEQ ID NO: 74127 - DNA, 160 bp, Carica papaya
  Intron number 1 from transcript evm.model.supercontig_52.5 6 (locus evm.TU.supercontig_52.56) derived from phytozome v7.0 (chr-ID supercontig_52; pos 510421 to 510580)
ggatctctgccattgcagtgccaaggtagttagttcatttctctcttgatttttctcttcttgtataaaaaaattataataaacagccattaatggtgttttctgaattcaattttgatttgcagcctctgcaactcctctaccagcaccaggtaccaca

SEQ ID NO: 74128 - DNA, 965 bp, Carica papaya
  Intron number 1 from transcript evm.model.supercontig_74.6 0 (locus evm.TU.supercontig_74.60) derived from phytozome v7.0 (chr-ID supercontig_74; pos 573013 to 573977)
cgaatagcctggtgcgaccagagtagattgatcgggtaggtcggagatgatcaccggaatagggcgacagactgccagtgaggctgggactccgtttgggtgggtgttgagaatattctagggtttgaaagaagccctaaaattgaaaaactctaaaatacccttattttgctttaatactatgtagaaattttggaaaaaatactttctatatttcctttatatatttgttataacaaacaactcatatatatacaaaattttccagtactaatagggaaattccccttatagtagtgatactgaataattacaatattataggagaaattaacaataagaactatattgggaaaatatcacaaatatttagaaaacaaaatattcatgtcaacaattcgtaatatctttagagattgatggtttgtctcttttattgatgctttgtactcggataacttgattctttttattgaagtcaaaagatgaagttagtcatattcttccctagctttacactatgatctttactcaggtaacctttgaataggattgatgaagtgagtcccaaatgtcctttgtaatagtcaagaacatgcacatgtcacaaatcttgaatagcatagagttttatgaccaggtcatagtcatggagtcttcctcttcccatgtttcagactgaggatctcttgattttagtcctgtgcctgtgaggttttaatttccaattttcctttcagtataatccgaacaagttaggaccagttcaggtagttcttttcatccaatctatatgcttgcttgaatggtctgcaattccctagattgttgggatttactactctcctttgtttgagcagggtgattggtttttgtaatttcaaacgtattgtattctaggttactttgtgttggaagaaaaataactagatgaaggctgatcaagaaagggagtcacaaaccaa

SEQ ID NO: 74129 - DNA, 643 bp, Carica papaya
  Intron number 1 from transcript evm.TU.contig_34860.1 (loc us evm.TU.contig_34860) derived from phytozome v7.0 (chr-I D contig_34860; pos 1062 to 1704 reverse strand)
ctgcagttctgggcactcctctgttgttaattcaagtaagtataatctctttattttctttaaataataatttttttttttaatttttaaactttttttgttcattttttataaaactaaattatataaatactataatgatttttaattgttaatttaaaaattacatttaattgttaattcaattattaaaaagaagataattattaattcaagtaagtataatcttgggttttttattatatattcaaatataaaaagattttaaataaatattcatgaaaaaaatagtcatgctaacaatatattctccaccttataaaaaagattttaaactatgaaacttaaaaaaaaatctaagtattaaaaagtatatcaattgattaattatgcataaattaagtaatttatatatatatacatatatatttaaaaaaaataacaagattcatgtaatggatggtatcctgttagagtcatgccaacttcgcatgtagttggccttttagcacaagttactcagtaattttgatttatatatatgtatgtaaagtattcaactatatacaattgaattttaatttttgatttctttaaaaatacaataggttacacgcctgaagtgtggcggctttatcttcgc

SEQ ID NO: 74130 - DNA, 444 bp, Carica papaya
  Intron number 1 from transcript evm.model.supercontig_170. 47 (locus evm.TU.supercontig_170.47) derived from phytozom e v7.0 (chr-ID supercontig_170; pos 248391 to 248834)
tcagggcttatcatccattcaccacaaagattgcggtctgaacattgacttttccattctacatgagttatatatatatattacatatatatcaaaatgaagtattccaagtcaactgaaagatctaacatttcaaagtcttccttcctacgtccatttccattaatgagttttttacaataatttcaagtaatcacctaacacctttcggaccatttacttccctagacccaaactcatcaccttactgcaaaaacagtcttgttactaagctcctacagcggctgtgtgccttttgcaggagatgaattccagtcgtttcttatcatcacagttttgtttttctctgcttctggttttcttacgtgtgtccaagtccagtcctttgtctgaatttacaactaactctgatgtacagagaacttgtcgtgataatcagtacag

SEQ ID NO: 74131 - DNA, 541 bp, Carica papaya
  Intron number 1 from transcript evm.model.supercontig_40.3 4 (locus evm.TU.supercontig_40.34) derived from phytozome v7.0 (chr-ID supercontig_40; pos 640341 to 640881 reverse strand)
ggtattacatttttggattctatctttgctttatttatttggttttgactagattttcataccatcgattcacactttgctaattgattgtgcttgttgattttgttgggaattgaagagtaactgaatgtgggtatgtgcttcttctgataagttgatgagcagttctttcttgattttcttatggtattgaaatgacggtctgatatgggtttgcctcagttctattatagtgctatcaatatctcttcactgttggtttaatcaaatgtctttatgttctattttttaagcatttgtttgcctaagttcaaggattcagtgtcaacaaaagttctattgctgcttttttaagcatatcttgctgcaagtccatccaaagctagtgtgtaacatgggactgcatgatgaacctttggcaagtgaaaataatagaattaaagatagtagaaagtggaaatagtactccttttattagggttgaggagaggagaggatgaaagatgaaacttattatcttctttgcttttatcaggtagag

SEQ ID NO: 74132 - DNA, 736 bp, Carica papaya
  Intron number 1 from transcript evm.model.supercontig_36.6 1 (locus evm.TU.supercontig_36.61) derived from phytozome v7.0 (chr-ID supercontig_36; pos 491179 to 491914)
gccctaacaaggatctgcttctaagatcgctccgcgtaagtgaaaaataaaagacggagttgaatgtagttttgcgtaaatgtttctctcacgatatttttcttttaatctttgcttcactgcagtttggttaaatgatttttctatcggtatttccttttttctttttcctttaaaattatgagggttaatctcgaaatgtttatggaattttgatgttctcttgcgtaataatgacaatcgttggcccatctcctttggactgcactttaccttcgacgctgttgtgtttcattagatggttctattgggtaaaatgcgaatacattcatcggatactgctgggcattttcacatttagctgttacagttcaaggaggttaaggaggcagaatttaagccgaagttgtatgggtggttttagttgtaactattgatttatggatagaagaatctctcttgcgttttaaagtttatgatggaaatcaggtaggatgcgcgacaagaaattctaggtgttgtaattttagaatcgtcttataaatttactgtagtttttcttttgtttttgtttttgttttttccgtgaagttggccagttgaccggaggtttccattacatgtttgttatgccaatctgctggaagctgtgtatctatctttccagcaaatatttctgccgtttcttatatttcatacattttctttgcagcaagctgccagtgcattgtcacaa

SEQ ID NO: 74133 - DNA, 638 bp, Carica papaya
  Intron number 1 from transcript evm.model.supercontig_34.2 4 (locus evm.TU.supercontig_34.24) derived from phytozome v7.0 (chr-ID supercontig_34; pos 164481 to 165118)
actgcttcattcaggtatttaaataccgtattataatgtgcttcttcttttccatcgtctggattatgatttcttacttttctcttgttttattttatgataatggttttttattttcctgaaaattcctgtggttactgacatttcaggggtctgcaatttcctgttttcgatatttctttagttttcatgttagattttctcaggcttcttcttgtctatactttctttaaaacgatgttcttacagttttctgattctcatctcgatgttgagttgtttttacttcaaatttgatgaggtcaatcgcttatttttgccatttgatttcagcgtctttgtttgtctctttttgttaagtgactcattttcatgcttagcatcaggcctataataattggtggatcttttttccaaatattttgttaatttggataccggtactatctagtcgattccaaatttgacattcttggtttaagtttttctggtatttaattaatttaatctgatagatttggtagacataaatctgaaaatttccggggtttagaattactgatgattgaatgatacccctacttcagcttgcatattaacattgttttcctttctgggttccatctatcagggctgtg

SEQ ID NO: 74134 - DNA, 644 bp, Carica papaya
  Intron number 1 from transcript evm.model.supercontig_17.5 3 (locus evm.TU.supercontig_17.53) derived from phytozome v7.0 (chr-ID supercontig_17; pos 619890 to 620533 reverse strand)
ctcttcagctggtttcaatccacaagctcaagaaggtagcaaactaactattttctccaagacttactatttgttttctaagtttgttgttctccccatttccctacccctctctcttcctctcattctgagaattcagttgtgggaatggattgtttgagttttaattctgtagctttcctggactgttgagagaatatgtgccaaaattgcagatatggtaaaatcttgaaagtccaaatctttggtttttctatttttttgctttttggctaataagtggagtggctaggctcctgaaaaaaaaattgcttttagaaacaaaattactatttttacgtttccccactttctttgtgaacaaagtgttaatttgactgaatcttgctattttcatgtcccttttccatctttaggtaactgggtgtatgtatgcttttttatggtttccaccattgtttaatattattcctttatttaacatgcataaatgaaatttatctctgctgctatattgcagccttctgcttttagcaattggtggccgtacaataatttctttagggtaaaagtgctgctcttttacattattgcgcttgaattctgcaggggaaaaacgggtactgaactctgaactttggcat

SEQ ID NO: 74135 - DNA, 557 bp, Carica papaya
  Intron number 1 from transcript evm.model.supercontig_2.22 3 (locus evm.TU.supercontig_2.223) derived from phytozome v7.0 (chr-ID supercontig_2; pos 3011764 to 3012320 reverse strand)
gacgtgttgctgaaactaaccctcttatcaacaaggtatcaatttctataaaattttaccataaatatataaattttcttgaatttaatttgcttgcgaatccattaaagaatcttatcggtatataatatcaaagggtttttgaatttatttggggatgggattaattggataagattttctcggtggaaattgcatcctatcttgaagaacagtgctttactccccttcttttgactttctttttattttctcctgttatttatttctctattctaataaacaattatgaagatgatttgcatgatcaggaaattaacactatttatgtttaacactattcttttcatcaaaataagggcctagctcatgatttttaattccagtaatcaacctggaaaaaaaaaagttcaataactttgtcttacatgcatgcagaaagagttcaaaaagtctgatatattttgattattcagcaaaaataagaagtcccccttagaaatttgtactaattatgcaagaaatggcatgctttttattcagctttgcttaacagg

SEQ ID NO: 74136 - DNA, 351 bp, Carica papaya
  Intron number 2 from transcript evm.model.supercontig_95.7 5 (locus evm.TU.supercontig_95.75) derived from phytozome v7.0 (chr-ID supercontig_95; pos 1275502 to 1275852)
aggtaaatagggctattttcaataatgatcttctttcgtcctggtgcaaagtgtcgtagatttgattaattttgatctaaactcgcataccaatagagcaaaagaagattttttttgtgaaaactttattggttttttccccttcctctctgttggttttacttgatagtacttgttggaaggtattgtcttaagccagtcgattctattacttgggcatattgttaggggacattgtttttgttttcttttttcatctttgtattatgatatctgcttaagtttgcaaaaatctcgtgaatttctaatttgatttcagggtcctactagcaagaatccacttgcattcaa

SEQ ID NO: 74137 - DNA, 370 bp, Carica papaya
  Intron number 1 from transcript evm.model.supercontig_8.55 (locus evm.TU.supercontig_8.55) derived from phytozome v7 .0 (chr-ID supercontig_8; pos 376842 to 377211 reverse str and)
ctgtagaagaaacaattctgtttaagttgagaaaggttaggctgttataaagcatttgatttatactgtgctttaatccattagagtttaccctatgtcccttagaagaaaaagctatggaactcttaaacatgacagactgtttttaaaattctcctgcagtataacataatgatgcattgatgctttgttttttccatgattctgttaactcttatttgtttctctttgttatttggaatttaacactgttgctaattatttttaaaatgattattgtattttctttctctaactactatcttcacatatgtgctgctcatcctttttcccaggctaggaagaaagaggaaagacttgttgaatcttt

SEQ ID NO: 74138 - DNA, 777 bp, Carica papaya
  Intron number 1 from transcript evm.model.supercontig_88.8 (locus evm.TU.supercontig_88.8) derived from phytozome v7 .0 (chr-ID supercontig_88; pos 150183 to 150959 reverse st rand)
attgtcgtggtgtcctctggcgtatagcgtacggagtatgttgcatggtctcttagggattgattgggtgatggctgggtcagttagagaggaaatttgggtttggggtggtttgtatgtgaagggcaacattgctaaccttattcctttgaccgttttctggattatatggaaagaaaggaatggtaaaacttttgagcgtgttgagagtagtatgtacaaaataaatgataggtggatttgttattttgggtctattttgttcgatcatgatataattagtgatgagaattttgagagtgtcataaatgtgctaacactacggtaaagttcttgtaaatgggcggtatctcttttttggtaccatgtttatatatacttcactttttatttttaaaaaaagaatgtatgtggtgtgatctcttggcaaaattagcttttagcggcacttctctaaaaagtattagccaagatatccataatacatcatatgtaattagaaaaaggcaaataaatgggataacaagtttttgatatgactatattaacttgttaatttctccaaagcgttggacgcaagatgacaagagcgttgttaggtacataggagggtgtgggagccattgggaaggagtttgagtctatagttaggaagaagttggtttctttaaggaactaataagagtaaaaattctatgtctagatggttttaagatgcagtttctttaggaattttggtatgttattaaaggtgacttgctgttttgaaggaattat

SEQ ID NO: 74139 - DNA, 687 bp, Carica papaya
  Intron number 1 from transcript evm.model.supercontig_2186 .1 (locus evm.TU.supercontig_2186.1) derived from phytozom e v7.0 (chr-ID supercontig_2186; pos 612 to 1298 reverse s trand)
attgctttgttagggtttgtaaattctaatctttgtttaaatggagaagtgataattagtttgtttttaaatatttttcaaaattaaaaaataaaatttaaaatatattaatcacaatgtagttttgaagcaccaaatagtttttgtgtgaacccatattttgttcagagtagactagtagttgggttaatggcaactttttcttttattatcagttttctatactcgagtgaaaaagtaattgctaccatcaatttggttcaattcttccttaagttttcattttattttattttttgttattatcaggttaaaatatcattagcatgtagaattttaattagaaagtttatacttgaatcaattttcctagtatatttaaatgagatttgaaatccctctctaagagattaaaacaaaaatacaattagcccaaagataaaaagattttgattctacttacaactggtattctatttaattattaaattctaaaatcaataagttgagtgattttctgtaagtttaagaaaacagatagaatatgtaaattgtcctaaatagaccaaatactgaatgtatgattcccattcctggggttagtaaatttcctaagactagatcatctatctatctatctttctttctttttgaagatatattattcaataaattatcagggctgtg

SEQ ID NO: 74140 - DNA, 1012 bp, Carica papaya
  Intron number 1 from transcript evm.model.supercontig_170. 40 (locus evm.TU.supercontig_170.40) derived from phytozom e v7.0 (chr-ID supercontig_170; pos 225816 to 226827)
cttgtttctgtgaaaatcaaatctgtgatcaagtaaacgaaagtataccaaaaggtatctatcttctctttcttcttctctccctgttagaaaagttttgaagagtaggaaaaccagagcaaaaatgaagtaacgatttgtgaagctagaattttgattggaaacttcagagaaacccaagattagtttctttttaaaaccagctttctatgttcttaactgtgttcaaatcaggccttgttctaatttaaccagatttctatgtctaaagaagctcaaacttgttctaaaatacaccaaatttgaacccatccgagagaagatttcaaccacaaaccaagttttcttgttcttgaaatcccatttacttcaaattcataaatcaaatcgtttcaaaattcaaatcgagtttgatttcgaaccaattcaatttgattttttttttgttttgttttagacgtcgtgaaaacaagagttgattaaaaacattacgtgtttcttgtgacattaaaatattgttagcaagcttttagggttttctgactttcttcgatcaaattgtattgaaaattccgaacttcgttttcatttcgccctcggcgttttactatttcatattctccgacaataattgacccaacaaaaattcatttcctttgaaaatttaatcctcgcgtcgaatatattttttatttttttatattatatagtataagtatattaattattaaattataatttctagaattataatttttaagtgctaaaattagaaaaaaattaatgaattaattataaattacaccttcatggaccctctctcacccaaaagtctaaatacatcaaaactcccaactaactcttaattagcatattaatttccaattaatgttttttaaaggtgaaattaccaaaaagcccctccaatttatttcttaatttaaattaaaatgtaaatcccacttctttatccacaggcgttgtttgtcggcttcgttaaccccagcacgcc

SEQ ID NO: 74141 - DNA, 582 bp, Carica papaya
  Intron number 1 from transcript evm.model.supercontig_179. 22 (locus evm.TU.supercontig_179.22) derived from phytozom e v7.0 (chr-ID supercontig_179; pos 125849 to 126430)
gattctctatcgctaaggtatcgtttttggtttttgtcttctatttgtcgattttagaattattctctgttgataatatggtcacggtgctctatgtatgttttggaatataagcggcttccttttttttttttcttcatggaattcattgatggaaatcctattatagtactctaataattcaggatggaaatcctattataagaggattaaaattgatcttgaagtagaattggaacaatatctccatcaaaactaaaaagaatttgtggtgtattattctagttttgcttaactgcgattctacttgaagttctactggggttaaaattttatctcattttcagctgtattgtacggaaatagttcgattgttccaaatatagccttagttttttgttttgattttctttttgctttccttttggacttacttaatatagtatctattgattccaggaagtacgaaatcgaaagaacattgctcaacagcattgcacatgaattaggaaattttacattattagtttattaccagatgcccacatttgatatttcatgtttagtggctactaggcaatc

SEQ ID NO: 74142 - DNA, 242 bp, Carica papaya
  Intron number 2 from transcript evm.TU.contig_28770.2 (loc us evm.TU.contig_28770.2) derived from phytozome v7.0 (chr -ID contig_28770; pos 7397 to 7638)
aactggcggttgggtacctgctgcacttagcttaggtaccatagcctcaactcttttgttgttctcaagcttttttataactaatgatgcttttgacaggatgaagaatcaaacaacatgacatcgtttctttggaaatctctgcttatatgcacaaacaaaattaagaacttattaaccatgtcttgaatcaagtattttctgctgaatgcaaaaattttctttgtgccaggcattgagat

SEQ ID NO: 74143 - DNA, 714 bp, Carica papaya
  Intron number 2 from transcript evm.TU.contig_26744.1 (loc us evm.TU.contig_26744) derived from phytozome v7.0 (chr-I D contig_26744; pos 6500 to 7213 reverse strand)
tgttgagcttgcactttgtcatttagcccaaagtgacttctcagtcgatattaaagattgtgattatcatgttgatgtcatccatattagagtattactgtcaatacaataatacaattatacaactgtacttaggtttcttttgaataatttcccattcaattctcaattttaatttttatatatgcataattggcgtgtttcagttaccacctctctactttgagttccttcattgtgggaacaattcgagttgggtgctaagttcccccactaagaaattaaaagtaagagtgatgggaacttgagcacaacaaattgcatttcaattaagatgaatataagaattaaaaataggaatttattaggaattaaatggaaaatgaactaaaagcaatgttggttcccaacctatataaactaatctcttcttcaagttatatggccagccaccatagatcccatgtttgaaaaccatgcctttgtggcatcaatacgttgattgatgatatcctttgagtcatcattctgtcatataaaaatctgatattatattaagattttcatcaaagttgctttattttgtagtcaaggttaatttttgttgcaatcaccctattagatattcttccccgtcttcattatcgaggatgcctttaggttctatcctgataatcttgacctattttagttgatcttgcattacagaggata

SEQ ID NO: 74144 - DNA, 464 bp, Carica papaya
  Intron number 2 from transcript evm.model.supercontig_810. 3 (locus evm.TU.supercontig_810.3) derived from phytozome v7.0 (chr-ID supercontig_810; pos 84054 to 84517)
cttacgggagggtaatttttcttctattttttctattgtaaattttatcaatctaagtttgtctgtcatccgttcccttcttttggattctatttgtttttttttttaatttgccatttcgttttttccttttggtttatcagaaaaagtggcaagagtaaaataatggcagtttttcaactttgaattttgaattggaatttttactcattttgatttatgtagtttttttgttctagaaagatcatctcaagaaaatgaatcaagattttaaaccgaagcagaatacatagctttgttctgtcaagattccgatcttcacagattctagcaattcagttttgttcttcttgtgtcttttccttctcttgtttctgtgtcttaaataagcattgcaaacggctgttgttttgcgagttggtgaaacaggctggaggacttctagacgaattgaggctttcgtg

SEQ ID NO: 74145 - DNA, 709 bp, Carica papaya
  Intron number 3 from transcript evm.model.supercontig_810. 3 (locus evm.TU.supercontig_810.3) derived from phytozome v7.0 (chr-ID supercontig_810; pos 84576 to 85284)
caaaaacagaagtaaggatttctctccggatccatcaagaaattgttgtttctcacacactaggactgtaagatgcccaaaacaaactagtagttaaggctatatatttgcttatggtgttaaacagaaatatatgagtattgttttcttgagctcttaagctcatctatgtccattgctatcgtgatatattggtagaatatcattattgtacaaaatggatgatagaagggagagaggttagtcaacaatgaaacaattttctgtcctctggactaccttcttcaatgcattgcgaattctgtggcatcagatgccatgctcaaatattcagtatttagaaaggaagttatctattgtgttctctaatttcttatgaaatttgtgcttaaatcttatattgttcatatgtttactttatacctgcaatatgtgctattaatataccatcacttaactcacggataaacaagaaatatggattctttttccttggaaagttgccttaacagtaataataaagatgcatgcttccaagctatgcatttcagtgagttagttgcagttgtttggagtatcagcagtttttttactgtaaattggcacgactctggcttgattattctctttattgaaaataaaactaattgattcgtctattaattatatccttatattctctctaaaagaactgtcatctttgtagtga

SEQ ID NO: 74146 - DNA, 682 bp, Carica papaya
  Intron number 1 from transcript evm.model.supercontig_85.1 06 (locus evm.TU.supercontig_85.106) derived from phytozom e v7.0 (chr-ID supercontig_85; pos 684927 to 685608)
aactgacaagagaaaatattaaggcccttattgtaaaagaaaatctttcatgcacacacatgaattacggacttagatgccatttggtttattttctattttgtttctaacatattaatttcaacaagtacaagatgatttttatctttgaattattcagaatttgaaatcttcacataaaaattcaaactgaaggtaggaataactcaaacataagtaatcatcatgtaataacacgtgctaaaactaaaattaaaaaattagaactaggaactagttaggagtaaaatggaaaatgaactaaacagatcagaatcctaatacatgtgcactataagtgattctcctacttaaaacgaagcggtaaaacatcatattctttacataacgaaaccacagatttgaatctgtgtacagtagtaatccatgtttccaaattatcatgggaataaaatagttttgcttgcattttggtaaatgcagtgaccgactctgccctctatcacaagttattacaggagaaagaagtaaactagttggatccctcgaatgtatccaatttttattgcaaatatacctgtaattttacattaggaagctctaacatctaactcatcatgcttaattaatacttttgaatttcacagaacatatttggggctgggacagactcaacttccat

SEQ ID NO: 74147 - DNA, 225 bp, Carica papaya
  Intron number 3 from transcript evm.model.supercontig_166. 5 (locus evm.TU.supercontig_166.5) derived from phytozome v7.0 (chr-ID supercontig_166; pos 38161 to 38385 reverse s trand)
gccatagttctgacgttcgcttgtatctttacagggtccgtttacattttataaagctgtttcagtttatggatttatattaataatcaaaaagaaaattaaggaattgaagaagaattataattttagtaaactgattatagggaatatatctgtaaatagataatttaacttttaaaaatattgactttatacattgcattaccgcaggccattatatacacc

SEQ ID NO: 74148 - DNA, 466 bp, Carica papaya
  Intron number 2 from transcript evm.model.supercontig_17.3 2 (locus evm.TU.supercontig_17.32) derived from phytozome v7.0 (chr-ID supercontig_17; pos 380416 to 380881)
atattgttaaaaccccattttttcgctacttcaaggtttgcttgtgattcattgcctggaagtagaatattagagaacatgcgtgtctgtgttttctcatctcactcttattatagaatttttttttttttccattctctttcaatgtcgatttaactccaattatgagcttgtttattagatctagaaatgctatttaacagaaggcatacgtaaaaccatcttgaattattgctatgatgttgtgaaacttcttgctctcacttgtgaaagaatgtataaacattttcttttttttgaaataggaagaatgtgtaacattacttgatagaatttatgatgcctaatcttatgggtaattatttcttttcataaggttttgatgatatttgttttctcactgaatccttgtttgttctttttggcaataggttaagttgtggtgtgactgccctttctggccaga

SEQ ID NO: 74149 - DNA, 481 bp, Carica papaya
  Intron number 1 from transcript evm.model.supercontig_41.2 9 (locus evm.TU.supercontig_41.29) derived from phytozome v7.0 (chr-ID supercontig_41; pos 592975 to 593455 reverse strand)
gagttgataaggtgattcaatcaaacctagttgaggtaagtgtggaagagcaaggtaagaaaaatactaactctacgattctcaattcaaactttaatgtagatgttgataagttccttactcagatagaattatgaaggataagaatgatgttaagtttgctagatttttaaagatttataagaaattacatattaacattctatttattgaggctttgatgcagatgctacaatatataaaatttcttaaggatatcctttttaataagagaaagattgaggaatatgacatggtaatgcttactaaagagtgtagttccattatacaaaataagttacctataaagcttaaggatccagggagttttttaatacgttattagctaggctaatttaaatttaaagatgcactatatgattttggttatagtattaacctaataccattatctgtttgtaggagactcaaccttggggag

SEQ ID NO: 74150 - DNA, 403 bp, Carica papaya
  Intron number 1 from transcript evm.model.supercontig_62.9 9 (locus evm.TU.supercontig_62.99) derived from phytozome v7.0 (chr-ID supercontig_62; pos 641831 to 642233 reverse strand)
gaaccaagagcttcaacacagaagcgctctaacaggtacctgccttttgatgaaccttttgtgggttttatgtttggattcattatgtattctgtatctgagcatgagaatggtattggagaaacaccacgtttgaatcctttaacatgtttctcccgtggaagagaaacctataatgtgtttgataatttgccactgtggaaatcttggctaatgatcctgaaagtagtgacagagaatctctgaactgggttttctgggtaatcagaatctatgcattttcgtagtgaaaaagagattttaatgaggaactacggttgattttaatgttcttgtcatgacttctgtttttctttttcttaccacagctatcaatttcaacgaaatttccagaaagctaaga

SEQ ID NO: 74151 - DNA, 508 bp, Carica papaya
  Intron number 1 from transcript evm.model.supercontig_69.8 0 (locus evm.TU.supercontig_69.80) derived from phytozome v7.0 (chr-ID supercontig_69; pos 926661 to 927168)
ctcgtttgctccgtgcgtacatcgattgtcagaaggtgattaacccatatacgcggctccctctttttgttttctggctacaaacacagctgagctggaacgaaagggatcacttccttttttcttttgaaaaacaattttttttttcctttttggttcttaaatggtctaccgcagttttgagctttgaggtgcaacgtgaggagggttatcggacctgactcttgaccttctaattgcatgtttttatgagggaaaatttttcttttgtttctaaagatccgggactcttggtatggttgtcgttttgagacaaaacttgtcaacgtgatcttctttgttgacttgttaattatgtcgaaaatctccataatttcatgggaaagcatgtaaagatattggcaaagttaattaatttgtttggttctttttttctttttctgggtactaaaagctccttgatttcttggcttcttggttcaaaggttggagcgcctccggagatacc

SEQ ID NO: 74152 - DNA, 328 bp, Carica papaya
  Intron number 1 from transcript evm.model.supercontig_78.7 9 (locus evm.TU.supercontig_78.79) derived from phytozome v7.0 (chr-ID supercontig_78; pos 930585 to 930912 reverse strand)
tttggcctgtaagttttattcttccatccatgcttttgacttgacttagacatgtaaataattgccttctgagcatgcttttcattaatagtcgtcgtaattatactgttatggattttgttttgcttcttccatgtgaagataaatgattatgcagcaaaatttctcacaagctcttactgtgtaattctcaatgcaatgggacccatttgtcagtaaccaacaatagtattagttttttttttttttttttttttttttatgtgcattcttttgggatcctgatgaatttttgagttaagtctaaatttggagtttcctgcaggat

SEQ ID NO: 74153 - DNA, 629 bp, Carica papaya
  Intron number 1 from transcript evm.model.supercontig_146. 48 (locus evm.TU.supercontig_146.48) derived from phytozom e v7.0 (chr-ID supercontig_146; pos 252930 to 253558)
gccttctgtacggtgaaatgacttgttttagcaagtttagaactcaaaaattcctaccaagtactttgtttaatttgcttaagaatcattgataaaagtaagagcgcgggtggtaactgtagtatttattcatctctagtccacacaaaaaaaaaacatatgtgatctctaggtgatccataaatgacttattgatcaagctttcagtcaggatggaaggtaacagtgctcttcacttttatagaatcctagacagttcattaagatctcatagttcttagtaggcttattatagccataggatgtaccgcgaagaaaatatttcttactcttcgtaagaaatattttgcatgcttcatgctcttaattttccctctatttgtttttttttgttcattttaaatgttctagtgacattgttaacatgtgtgttcctgtatatgaggctattgaaggataaatgcttcttgtatgtttatttccatctgtggatttttgttcatttgaatttgtctattcttgaagctaatgagtttcaagatagttataaaatctccttgagtatactgaactgtatgattatgtgtaagttttattgtaaatttgtacaggagagctgcagttttgga

SEQ ID NO: 74154 - DNA, 410 bp, Carica papaya
  Intron number 1 from transcript evm.model.supercontig_34.2 09 (locus evm.TU.supercontig_34.209) derived from phytozom e v7.0 (chr-ID supercontig_34; pos 1948463 to 1948872)
cgttgatactcaggggcaggggtgcaaaaagctctgtaagtattcatgttttcgtctctagcaagaagacaaagttgacaagaaaaaattgtcaagagccagttttggtttactgacataattacaattgatggaaaagctttgcccttacgataatatgttcagaaaaaaacgtgactaatgagctatatgtaaagttcagaaaaaatttgactaaagagatatatgtaaagtttcaagtaatttactaccaataatttgatgtgagttttcgagggccaaatgtttggttagcaaagttactgaactatagatccaagatgttactttttattcgtcaattattcacattgtgttttttcctcccttgtgtagtgggatataagaaaaaagtagactcaagctctcca

SEQ ID NO: 74155 - DNA, 591 bp, Carica papaya
  Intron number 1 from transcript evm.model.supercontig_161. 38 (locus evm.TU.supercontig_161.38) derived from phytozom e v7.0 (chr-ID supercontig_161; pos 564196 to 564786)
caaccctaggattttttccccaaggaaacactgaggtaataaaaggccaaacaagaacctcgcagcccacagaatcagctaaatccctcatgttttgattctgaatgttgatatccgccagcacacttttcctgaggttaatccatagtcctaaatagccttgagaaggtgcaagatggtaaaatctaactggataattgttttagtttgtaacatacttttcagaaattcatcagaaataagtatcaggaaacattctgttctataattcagaatcttcaggtgactaacttaaattggcatgtgataactttttgcttgttgagtatataatatttgttgacgctgtggaatagtgggagttccagtactcggtttacttggacctgttgtgcgtgtgcatttatcttggcatgcatgacgaaaacattatgaagttatttgaaatcttcaaaaattattctcttgaagaataaaatctaactggatgattgtttttgttcataccatactggcttaatgtatggatattagtacccacacttgaagggtgtattttgatgtcacaggctgaatcaggttcagcaaggg

SEQ ID NO: 74156 - DNA, 614 bp, Carica papaya
  Intron number 2 from transcript evm.TU.contig_41750.1 (loc us evm.TU.contig_41750) derived from phytozome v7.0 (chr-I D contig_41750; pos 790 to 1403 reverse strand)
ttattgacactgtatgtttcctcctactttctctttatgcagctgctgaactaaacgttgttattttctcctttttttttattttctgttaacgggttttgctgaaattagctgtttgataagtttttataggctattccattgaattttaatggagaaagtttattacttttgaatcagttctggtttttctttggtgttctgtatgggtatgctagttggtgcatttctctttcagtttcgaattgaaaattatactaaactcgcataaagtacaaaactttcgtgctgggtgatttaccatttttgtacatattataatatttcgttcctctattctattcccctaatcaagtttgagatattttgaagaaagaatgcggagaaaagtaagttttatatataaagtgttgtgcttgatgttaatatgtcataattggaagttcatcaggctctgctaattttcattgtagtcatcatgcgtgcagttaaatgtgttgatctccttcttgttgattccttttatgtttctctccatgataagtatgttgcttttgaatttaaataccagaaactagtcaactagtatgtaaatcagatagcattaccttacc

SEQ ID NO: 74157 - DNA, 762 bp, Carica papaya
  Intron number 1 from transcript evm.model.supercontig_78.5 0 (locus evm.TU.supercontig_78.50) derived from phytozome v7.0 (chr-ID supercontig_78; pos 566117 to 566878 reverse strand)
tctggtggcagcatttatatcaaggctcaaagaatgtaaactcttctaaatccactagtcggctaattgacttagtcggatatgtacttttcaattctgcatatatagcgcacatttttatatttatgcttctgtttcatgccatcaaatcattaactgagatgcttttagttggcttttttggatttctatccatcttcttgcggttggatgaaacagcagcggtggataccacctgccatatgcatcttcctcaacgcataaaatcttttttgggtatatatattgcataaagttgcttagttttttgtttgcaagacttcttagtgacatattatataatcttttgagtggagaagcagaggtcaaagtttgaaatcaaaggcaaattttattcaatggttagtaatgtcttggtagggaattttatagcctcttggacataagagagtcagcatcaatatttatgaaaggctaggacattttcaagaagaatgatagagaatttgtcactagtcttagataccccacttgttcagttcactcactaaaaatatgtatgtgtttttcattaggatatgttgcacttgttattctgtatttaggtagcctcacttgtcttgttaagaaaaatctgttgccaacaaggtaggttttaatggtaggcttaagttcttccttatggagcaatatatggctactgcctgaaaactactatgaactccaggactggacgtggacaaataagtgctgctggaggaa

SEQ ID NO: 74158 - DNA, 470 bp, Carica papaya
  Intron number 1 from transcript evm.model.supercontig_86.1 3 (locus evm.TU.supercontig_86.13) derived from phytozome v7.0 (chr-ID supercontig_86; pos 197326 to 197795 reverse strand)
gtcttggaggccgatatacaccttgccaattcactgtcagttctcttcttttgctctttactgaatgaattgttcttgcttttgtaagacatttatgtgtttggtgattcttagtcatcgtcgtcgtgatcaccatccagttgatagtggctactctcagaaatttctgcagttttggagggtttttttccctatattttgtcgattttaaaatttgaggatcaaaggctaatttactagagccgttaatccatgatataagtagctgagtgggttgagagaatctaaagagcatattctgttctgaatgctctttcatattgtttcagtgttattttctgctaattctccatgtctaatattgggtttcttttttcattttaattattcagataaacggtcataattttgattttggttgttggggttttctaggtctgcgtcaattccaagagggaagggtggaagcc

SEQ ID NO: 74159 - DNA, 599 bp, Carica papaya
  Intron number 2 from transcript evm.model.supercontig_95.3 1 (locus evm.TU.supercontig_95.31) derived from phytozome v7.0 (chr-ID supercontig_95; pos 561373 to 561971)
gagttcccagattgcttctcgatattggtacacttctctctcgagcgcgtctatcaatgactcaatcgtccttaaatgaatggaaaaagaagttgtttttttggcatcaataatgcgattgtttgaaaaacatgataatgtgttttctcatagtgtgatttatgaacttacatgaagaagaatgagatacttaaactctatgttgcttctgttaagagaaacatcttttgcttctatatgacaaactgttcttgggatctttcatgttgaaataatgaaggatcaaaattttgttaacattttctcaactactagccatttgttaatgaacattataaataatgatcttctttaggtgttatctcaaagagaaaagatcttctttaggtggacttcattgtcagtctttttgcattatttctttagcacttcaagtgttaaggtttcaattggttatgttattgacttcaattttgatattagtagctttggctcatgctttccctaaatcattattttcaaatttatgatgataggttttcttttctcttattctttttccaggctgtggatcagggcttagtggggagacgctatct

SEQ ID NO: 74160 - DNA, 397 bp, Carica papaya
  Intron number 3 from transcript evm.model.supercontig_19.1 41 (locus evm.TU.supercontig_19.141) derived from phytozom e v7.0 (chr-ID supercontig_19; pos 903108 to 903504)
cctaccattcttcctcagggaagaacccaagccaagtgcgcatctcctcttgtttttctcccctccagtctaaccatattttaatttcgaaacactgtggccgtacaattcgtacttaagaaaaactaaatgatttttcacggaagaattttttagcattagctttaattttgagaagagcatataacactaataattcttgagttggtctaaagcatctgtgatctttgttttacaactgggcagatgaactatgttaatttctctgcaccatctgacaaaagagaaacaaaaaacaaaaaaaaaatggtagaatggtagttaaaatagaattggcttttgtgggatcttcatgtttgcaggaaagaagcagttaccctctctgacgtccgagagc

SEQ ID NO: 74161 - DNA, 719 bp, Carica papaya
  Intron number 2 from transcript evm.model.supercontig_1467 .2 (locus evm.TU.supercontig_1467.2) derived from phytozom e v7.0 (chr-ID supercontig_1467; pos 4259 to 4977 reverse strand)
caagcaagccaccttcagcatctctgcaaattcaggtatgtataaatcactttcacctctctttacctcaatttttggatttagccgtatgtatactcggataatttatggtactttgaagctaaatcaaatgagagcttattcacctcgaaatgaaagaatttatgaggaaaatattttaatctttataacctcaaccttcaccagcatcaactaatttggttatttacttcggattgtatggatttttatgacttgatcacaatgctgtaaagttcaagaaaccgattgggattttttagtgtgaagtagtttaattttattataattcaaatattctgtttctttgttgtggcaattcggttttttatttgaatttttcttcattttatatgacgttatagtttttgtttagtttttcttttaaatttgatttatttatacttaaatcaaacatgcgcgggtgttatatggaaatcttatcaattttatttaaaaagtcaagcaactgaaccacgagaacagaaggaaattagagtatatgaattgcaacaaagaaaaaattacaaagagtcacactgtgttttcacccctcttttttaactttggagatactggtaattgggttatgctgcaattacactttaaatggtgtttgtgaatcccttctatgctaatatgcagatcgagcaatctcaggtgggaaattagtgatagaa

SEQ ID NO: 74162 - DNA, 703 bp, Carica papaya
  Intron number 4 from transcript evm.model.supercontig_161. 19 (locus evm.TU.supercontig_161.19) derived from phytozom e v7.0 (chr-ID supercontig_161; pos 264393 to 265095)
ttgctcaacaactaaaagaggaacgtgaagaaacagtaagacctataaacataatctattagttggcatactagtaatatagatcaatttctgctggatggttcttttcatcttgtcaatcgttttggttgatctggctataactatctctaagttgatctaaataaaaagttcatttatacccttgaagggtatcttaccttatgattagttccatcatggctactaaagataggtggtttgttgtttttagtttttgtttcgctcctagatttagaggaccgggaagttttatagttttgcttttgaattttaaattgctttacatattttatacggttcgtaagggagatttcctttgccattactgaaagtcttggttgccaagcattaattgatagacttgtggatttagtagggcgggctttgattgggaaaagttgcttttggattttggccatgtaggttccctctgaaagttcttctatttaattactcttcagttggtttttctgctgcttaaaattatcaaaaaagttaattaatctgtgagttggccaagaaggttttgggaattgtggaggatggattttagtctcacctttctttttcttttctacagtgaaattctgttttacaattattattattaggtaacagaaacttacattataggcatcagaagaaaaaaaagaggcaggtg

SEQ ID NO: 74163 - DNA, 487 bp, Carica papaya
  Intron number 1 from transcript evm.model.supercontig_17.1 7 (locus evm.TU.supercontig_17.17) derived from phytozome v7.0 (chr-ID supercontig_17; pos 247510 to 247996 reverse strand)
gcttgttaggaatctggtgggtacaggctggttcgattggggaggagatttgggccttggggggggggggggcgcacaaagactcattcccttgtctgttttttgagttatttggaaggaaaaaaatttaagagcttttgaggggattgtgaataatactagtaaactaagagagaaatggtttaattacttcggttgccttgtgttggggtatgatatcattaaggttgaggattttggggatgtcattgactcactaacaaatttgtgaatcttttgtaaaaaagtggtactccctcttctttggtaccttgctaatacaaatatcatactttttctttcaaaaaaaaagtagatttagtatgtgaagttttatatatccaaatgctatgaaaatggaaagaaatccacgcattgaacttatattacttttttttagtttcatcctgcagttaacttcttggtggaaacttggtgtttgattaaa

SEQ ID NO: 74164 - DNA, 639 bp, Carica papaya
  Intron number 2 from transcript evm.TU.contig_44847.1 (loc us evm.TU.contig_44847) derived from phytozome v7.0 (chr-I D contig_44847; pos 463 to 1101)
gtgactttcttttcctgggaagcagtgagggtaagtattttgactctggacaagttgattatgagggaaaaaacttttagtaatggatgttatgcaagcacattctcctgcgggggccatatgtctaccagatctggatgttagcatatggctttttgggtctgagttgagtgatagctggttcagtaaggaagaaattatgagcttggaaaggtatcccaggtgataagagactaaggcttatccttttgctacctttgagctatttggaaggagaggaattgaagatcttttaaggggatataataatcgaattttgttaagtttaaagatttttttcgccagaccctaagcattttatttatgagttacccactgtattctagcgagggcttaggagacctaattgatatcctggtcgatttataaatactttttcatacaggttttgcacgctcttggggcatttgaatatttaatatctttcttttaaaaaataaaaacgaagttcaaaagattttgttcaactagctgatagcaaagtgagtatcggctgttttttctgctaacaaaaatgcaacatcgtcttttctcttttttttctatttgtctttatgctacagatagtgcctcacatcc

SEQ ID NO: 74165 - DNA, 654 bp, Carica papaya
  Intron number 1 from transcript evm.model.supercontig_21.2 18 (locus evm.TU.supercontig_21.218) derived from phytozom e v7.0 (chr-ID supercontig_21; pos 2239717 to 2240370 reve rse strand)
ccaaaatccccttctctattgttttcctccttcgggtatacgtcctaggggttggtctatcctaaactcctctcatctctcgctgctttacccaaaatccaatttgttccatgaggttagatggggattcctgattagaacttacctttattggcttaatgacagtgacatttcctcagttctcctagacatgtaattcatgtgaacacttcgtgtgcagttatgtcacgatttatttggtgagagttttaattatcaaatcaataacaaaaaacatgaatgaccaattggttctcagtaacaagtaatgtgattgcagctgaggcacctgtacatgtgacttgtgaaatgttgtctagatatatcatgattgagtaaatgagaaggttgttttgatttagttaaaatacagggttgaaactgtgaagtaaaaatacagagttgtactctagtgaaatgcatttcttttcctataattggtgcccttttcatgctttcttccgttaatgatttttttcataatcatatggaattttttctgataaaaatatatgttggctaacaacatttttatggttttgcaggaacaaatcatgccatttgtatcttctattttcttacgcaggctttttcttccaggagtttataataata

SEQ ID NO: 74166 - DNA, 494 bp, Carica papaya
  Intron number 1 from transcript evm.model.supercontig_7.15 1 (locus evm.TU.supercontig_7.151) derived from phytozome v7.0 (chr-ID supercontig_7; pos 1474668 to 1475161)
cttgagaggtggtaaagtattttaccttgtaaccttttctatttttttgatggtatggaaggagagattaaaggactatgagtgagaggttggaaattattcaaggataaccagcttcgtgcttggaaccacgaaaatctgtggacttctaatgcagttttgtattataactatgtaatttgttatttgaggtagcaactccctggggccctccttttactgaatttttcttcactgcaaagaaacatttgatgaaattggttgtttgtaaatgcaccaatcaagtgaattaatctactggtaggcactccctttgatttgcttaagttttcttaataagttttttgtttgtactcaaaatttgaaccttctctgtggatgactctacctctgaagtttctctatatttgcaagttagactcttttagttttaagaatctagaatgcaagaagattatatttgaaccctagcaggtcaaatactgaaggcattg

SEQ ID NO: 74167 - DNA, 400 bp, Carica papaya
  Intron number 1 from transcript evm.model.supercontig_74.2 1 (locus evm.TU.supercontig_74.21) derived from phytozome v7.0 (chr-ID supercontig_74; pos 209948 to 210347)
atttcgctgttaaggttcgttcatatgctttaagatgatgttcatcagatttcgccactgtattcatccgttgttgttcagttgttctcttttagatatatatgtataatatttgtcgtgagcttttgtttgagacgagatggttctccgttgtttgtgattttccacgagaaaaatagtatccttcttacttaactcattgatttttcatttaagaaccactcgtggtgaatgatgtaaactagctttaagattttgcatcatgtgatattgtattttgatctttctattagtatttgttggtgatattgacgaaattttatcattaccagaaagatttgtaaattgttttgtcacgattgttggaaatcttagaggtatttcttttcttatttgcagg

SEQ ID NO: 74168 - DNA, 451 bp, Carica papaya
  Intron number 1 from transcript evm.model.supercontig_26.7 (locus evm.TU.supercontig_26.7) derived from phytozome v7 .0 (chr-ID supercontig_26; pos 29995 to 30445 reverse stra nd)
gacaatttggatacgctgtctgtcgtttttaacaggtaaggttagcttcactttatttatttttatttttatttttgtgtattgccttacttttcttatttgatctggaaaagaattttcgatttcttttgatttgtttgttatctgtttttctttgtatgagttggacgtttatcttatttgattttgaaatttggatgacgttgatgtaaacttactctctgaaaacacctgttatggcggttggtgacggggaattttccaatgtgggtgggcggaggaccggaaccagagtgatgacacgaaaaatattagcacaaaatcaaaattttgatttgaaagaaagggaaagaggttcagaataattaataggagtcagaatttctggtgttttgactgcgtatgttgtgttgcaggtcgagcagatttgcgaggctgcaaggtattcaat

SEQ ID NO: 74169 - DNA, 492 bp, Carica papaya
  Intron number 1 from transcript evm.model.supercontig_92.5 5 (locus evm.TU.supercontig_92.55) derived from phytozome v7.0 (chr-ID supercontig_92; pos 491415 to 491906)
gtaaataacctttttctaactgtttatcttcaatgccatttttcttgtgtatttactccagacttgaataacctttttctttcgagcatcgtacttctttctgtggcctaggatgacacgcggtacacgagatgttgttaataaaattataatgatgccaggatacccattgaggttgggagttcgtaggacttgattaggaaggccttaagttgtcagccgtgcaactgaagcaaatatcttgcatttgttatacatgggctttagtggtatctatggcttgagattgtcatgagagaaaataataatgtactagcactataataatgtatattcttctctgtatggtgaatgtgttgcattttagctagtgtacttggaatactttttatcttcttttgtttccttgcctgttgcaggtgatttttgttttccaaaaatgaattctttgagtttctaacttactgttgtccttgttttcccaggcaacaa

SEQ ID NO: 74170 - DNA, 445 bp, Carica papaya
  Intron number 5 from transcript evm.model.supercontig_173. 13 (locus evm.TU.supercontig_173.13) derived from phytozom e v7.0 (chr-ID supercontig_173; pos 149315 to 149759)
gttaaggtaacttcagagacttttcgagcctcgagaaaatttaaatgatgctgatgctatagttgctggtactgtttggttctcatctggttgccattgccagtttaacgatcttatttcttgatgcccttggaacttttcttgcatctcttatatttagactgtatttttgattttgactggcattacctaatggaaccataaaatcagtttcctctctcttgtagttttttctctttcatttttgcttctatcagattatattagccacttttatttgtttatgttattcttttccaaaatgagtttggttttgattttgtatagcctttaaactgtctattatttgcatccttcaattaatttttttaatcttactttttccaattctatgtttgggcattttgcagcaagaattgatcagaacagttgatcttggtccctt

SEQ ID NO: 74171 - DNA, 765 bp, Carica papaya
  Intron number 2 from transcript evm.model.supercontig_44.1 28 (locus evm.TU.supercontig_44.128) derived from phytozom e v7.0 (chr-ID supercontig_44; pos 1579234 to 1579998 reve rse strand)
tgacgaagacgacttttttgaagccattgacaaatgtaacctctgcgactcttcaattctcgccttgtttcctttataactctcaatctctacatattctttttctaaagcgttcaatgaatattgaagttgttcgctcgttttaacgattttattagtaatgttgaaatttaagtacgatttctctctttgtttactgttatcgtgattaatgctgagagtagatttgatttttttcctgactttatcttgttatgtttgtcaataggatcataattttttttaaatgttgaatgaatctgtctaggtttggaatgtatccaataaatttatcgttgtttcagttcgttttgacatctttcgaataacatgtttattacgtatttattttatttgctccaattttgcgcatccggtgtggattttcgtttcgggtaccgagccatgaattttgagtactttccctctaactgtcgagcatcttctgcttctgtttcacatccaagcactgccagcgaacttcacttcattgttgatgatgttcacctcatatttgaaatttgcgttacactttggtacatttacaccagaagtcttcattcagtaccattttacgctgatgttgaatactgccttcctgtttgccatgcatctaggaatttcactttgattaatcggatagacgttcatttcacgttttaagttgtttcttgatcgacttgtttgcgttattcatatcttttccagtgatctcgcaaggaatca

SEQ ID NO: 74172 - DNA, 480 bp, Carica papaya
  Intron number 1 from transcript evm.model.supercontig_9.23 4 (locus evm.TU.supercontig_9.234) derived from phytozome v7.0 (chr-ID supercontig_9; pos 1555256 to 1555735 reverse strand)
ccggccacaaagaaggtggttatcttgtctctttaacatgtagaagtttataaaacaagttgattgcatcattttgaatgaaacacttctctgtatgtaaaaaacaaattcttctctaaatactggatttatttgtttctttgaaatatttcaacacttttacacaaaagaaagcattcacagtgtttgctgcttggaattatttgattttcgaaaaccttgtctgggaaaaattatgtacatagcatgggtccatgatgtggtggacgccagaaacttgattggtccattcaaatttttgtcatgattccattctgccaatcaaatagtcctggtcaaccatgtaaccatggaccgagattctgaaataagttatcattctacgcatatggatttctaactaggttgattaaaggttggcattttccttttctttatactctaagtgactgtgatttctattgttcatcagaattctga

SEQ ID NO: 74173 - DNA, 881 bp, Carica papaya
  Intron number 2 from transcript evm.model.supercontig_151. 43 (locus evm.TU.supercontig_151.43) derived from phytozom e v7.0 (chr-ID supercontig_151; pos 372866 to 373746)
tacaggtatgattctaatatttcgtttattctgagtagcgaggacttaatggatattgctttagctgtaatgtttcattcctcaggatttcttgagatttgtttagttttatcgatcttgttgagtattttctggttctaatgtttctttggttttctttgttttttatgtgatttttctttagtagaggttggttgaaatctgaattcaatggaataggaacaaaaatacaatatacatttaagagaaaataacattctaactctgaaatataggaattgaataggagtagaatagtggtgaatcaaatgtaatgttgtgattttctatctttttcctctataaaaaattgtttcagcagcgtggttcttttaattaacctgccattaggtttgtaaaattggtttcacattggcatgattcctgcctcaattttagactttgttgcaaatttagagcacgtgatgttttacacttgatctctgaacttcaggtaagttcacttgttgacaagttcatccactgatgctcttctatttgcaccttctgttgaagttttaaaggttactcttttgggtgcttttagctgatcttacggcattaattgatcatttcaatgctttcggttattgatgctatcctttgctactgcattctgttacattttgtctcatactgtcatagttcagtttcatgcttgcatacttagtgtggttttttaattgtttttcttagctgttatgtcattaggttatgcaattttcctaaccataatgtttcttcctatgtatttgacgggcttttccaatggatttgacctagttatgtatatacttttcttgacagcgttctcttgcaacagatcttcaaaacctttctat

SEQ ID NO: 74174 - DNA, 432 bp, Carica papaya
  Intron number 1 from transcript evm.model.supercontig_2304 .1 (locus evm.TU.supercontig_2304.1) derived from phytozom e v7.0 (chr-ID supercontig_2304; pos 8070 to 8501 reverse strand)
ggcctcccaaacgccgactaaccaccccaaccgtaatataacatttcgtcttcttccatttcgtcttcttcttcgtcttattcttttttttccgccttttctgcatctggctgctgactgattttcgctttttttgatgtccttgcatggatttaacatctcggtctggattttttttcaaattattcctctcgctgtttttgttcttactgatggggtttaaatccgattaatgtgattgatttaatgatatttttcttgcatgattcatacgatgatcagattgagttcgagtttctatttgaattttgagattttcacagagaagtttttgttaatttagttttgggtgtgattactttttccgagaaaaagtttctgatgctttcttaaaaagagaaaagaacttctgacttcacttggggattcgca

SEQ ID NO: 74175 - DNA, 506 bp, Carica papaya
  Intron number 1 from transcript evm.model.supercontig_39.2 4 (locus evm.TU.supercontig_39.24) derived from phytozome v7.0 (chr-ID supercontig_39; pos 477454 to 477959)
gagaagatttggtcttctcacttcgatccgggctagtactggggttcggagcctttatcttctcttttttttttttgttaattttctttctctagttttaaaatttttgttgagtgtggcttgcttgcaaataattaaaaggaaacgtttctcgatatcttttgtgatttgttatggttttaatcatgaaaatatttattattgacttggttcagggagtgttggatttaacgaatcagctaggttgtatttttttgagttttttcagtaaccaaatgtataaaatttgtttccgtactaaaaacactgatatgaagtcagcgcatgctgattttagaataaatttatcaattcctttgaatttcatagtattaagttttctaagttatgctttggaaagatgtgatggaaagcctattgaagttgaaggagagccggaaaatatagtttgactttatacttccgtttcaggaagtggatttgcaatcaaaagtaacccacaaagt

SEQ ID NO: 74176 - DNA, 749 bp, Carica papaya
  Intron number 2 from transcript evm.model.supercontig_37.1 48 (locus evm.TU.supercontig_37.148) derived from phytozom e v7.0 (chr-ID supercontig_37; pos 1221927 to 1222675)
caacagcggcttgaaaatcgctcttgatttttgtggtgtgcttacttgtttcttgctttcttttcattttcgtcccttttgtcacatcgaaatgtttgtcatttcactttcttatactttaatttacagataggtgatgctcagatataggccatttttcggtttcttttgtgataaaaaaattgactaaataatattttggcatttcgaggttgcagtttgcttccgagcggatacgataaataactgcttcttagcaatattgatgcttactaaaaattagattctgttctctcggtgaatcgaatggatagcatctattaaagattggtatctcgttataaaatgtctattttagtcatcatttgggttcctagttctttatattttcttcagttttcattattgcaagaaaatgattgtatttgttaccttggtaagtaaatgaggggttgatatccaaataacgttcaccttgtcttagcttggtagtgaaatctctctgttaacatgattaaaagttccatggtctaagaactaagcaaggtaagagaggctggtaatgttagatgattagtttggttattttgtatcttggaccatcatgcttgtggtgttgaatgaatgtcctatggaattttgtattaatttgcaatgtctatgattaatttgatttgaatttgtaattaaatggtgctttttctcaatatgcagagcaagtgaaagctaaacatcctaagattacatat

SEQ ID NO: 74177 - DNA, 987 bp, Carica papaya
  Intron number 2 from transcript evm.model.supercontig_49.1 2 (locus evm.TU.supercontig_49.12) derived from phytozome v7.0 (chr-ID supercontig_49; pos 59350 to 60336)
atcttgcaacttggctctacccttgtggggacaaggtttgtttccttttttcatttctattaatttttactttcctacaggtttcttcttacctcaaattttaataattttctttaaataaaaattttatatattaacaaataaataatatataacactacttataatacaataaaaaatagttttttaaacaaaaatacacgaaatataattaaactcaagaattataccaattatttaaataaataattattaataaatattaaaaaaaattatttctcaaaaattaatgataaattgcttttaaccagggattattatgcattaaatatttggagaatacaattaatatggtctccattaattgactttttgaatttttttataataattttttttaagaatactcttgaataacaaaataatttttttctgtagatatattgttatagtattaaaaatgaagaaactatagtaatatattgttataatataaggtttggttgtgtttgatgatgtgaaaatcataagtcgtctcaaataaaggaaagaatattaatcaagaaaatatgcgggttacaattattaggtactaacaaatcttcacattcacacaatttaatctttaatcatcataggcatattttctgtgcgtattatttagaaagttattatatatatatatatatatatatatatatagtctatgtttggtgatcacaacataccttattattatattggattgtattgatcaatacaaacccatttctatatattgctgtatatcatctttcaagctaaatcaaaatgatgaactataaataattatttacttaagacattattgtagcataattctttctgaaaatttcagaactttggttcttaccttggtctatgagaattaagaagaaattaattaaattaatcaagttataattaattacaggtatccacgaagtctacgacacttccaagatcgaa

SEQ ID NO: 74178 - DNA, 382 bp, Carica papaya
  Intron number 1 from transcript evm.model.supercontig_23.7 2 (locus evm.TU.supercontig_23.72) derived from phytozome v7.0 (chr-ID supercontig_23; pos 999045 to 999426)
tgcttatttgttatacaagcaacaagttccccactgtaagtttcttaatccaagacccaccatacacgaggcagaggaaatacatttctttctttctttctttttctcttttcttttaatgcagtgtccttgtttttgcaacatttattattatggcctcttttttggtatttctatttgggtttttcatcaatcgaaattggttctccaaaataatttgttttcttgtttgttttttattctttggtttctaattttgaaccatattgggataatgcattttgaagattcgttatcttctgccgtgctttactgtcaatgatgttatgtgcctctttgttttgcaggattacataccaacggtgttcgataatttcagtgc

SEQ ID NO: 74179 - DNA, 449 bp, Carica papaya
  Intron number 3 from transcript evm.model.supercontig_182. 8 (locus evm.TU.supercontig_182.8) derived from phytozome v7.0 (chr-ID supercontig_182; pos 84010 to 84458 reverse s trand)
aacttgcgcgtgatctaaaatcctttgagttgaaggtaacaatctctatgttctcttggatatttgataacctatattaatttgcttcaaacttttgaaactttgaggttttgacttattctccatgctgttttttggatgaaacctgtaattagagggctgagcaaaataatatctgaaaagataaaaatgcaattctttttgtagcactagttatacgtgttggtcagtttctctttattttctcattagagattaatagccatgctcccttaataagtatattctgcttcttttacactcatcgtaaggacactgttcagttgattataatatttcattgagatatcctttgcttgtgttttgtaattttattttctccctttgcttagtgggaagatatatattttattaacagttttcatttcttttgaagacaacgttcgagg

SEQ ID NO: 74180 - DNA, 235 bp, Carica papaya
  Intron number 2 from transcript evm.model.supercontig_182. 8 (locus evm.TU.supercontig_182.8) derived from phytozome v7.0 (chr-ID supercontig_182; pos 84468 to 84702 reverse s trand)
gcagaagctccttcccagtctattgcagccacaaggtacttgtgtagttcctttctggagttttcactatgattattatccaaaattgatgtatggattttttttgtttttccacatcttcttgaactcaaattggcattgtatttaaaactatgttcaggggataattaaaatggttgttatcaatattttttactctgtaccgtttgtaggctacttgcaagggagggaataa

SEQ ID NO: 74181 - DNA, 559 bp, Carica papaya
  Intron number 1 from transcript evm.model.supercontig_182. 8 (locus evm.TU.supercontig_182.8) derived from phytozome v7.0 (chr-ID supercontig_182; pos 84725 to 85283 reverse s trand)
aagctgctccttcggctcagtttcctcctcttcaggtttccttttctactcattttctccgacgcatattagttagtttcctgaactactggaaaatgaagagaaattcaaattaagttttgaaatcttcctttttatgttttttggtagcagacctcagcctacttcccacttgtctttcttatgaattgaaagaaaaatgctgtaaattacttaaagatgtcgtgctattatttgtggtagtgtttttttctaataccttttaagtggagaaatttctttggaggaagtttaagttgagaatcttaggttattcaccaatattctgttagagaagtagaaaaagacgagaaaatatatttcttaggtctggggaagagaacatctgaggtccagaaagtgtctgtctatatatttcttagcatttttattcctggaaaatgatttactgagttgaagaaagcttagttatagtgtcatgcatctggttattgatctaagtccactattcacatgggtttcagaggaacctagatcagttagaagcattatcaaagaa

SEQ ID NO: 74182 - DNA, 988 bp, Carica papaya
  Intron number 2 from transcript evm.model.supercontig_89.6 (locus evm.TU.supercontig_89.6) derived from phytozome v7 .0 (chr-ID supercontig_89; pos 33485 to 34472 reverse stra nd)
ggggtaatcctttgattttgttcggtttaattatgtcaatgctttcttggctgcttttagcgaagggaagagttcgaatttccctgcgtttagaagtaaatacaagtttttttcctggacctagaagttgctctgttcgtctttacttaggctatgtttggaacaactcatgattttttgccaatctatttggcaataaatactttttaaagcagcggatgttgaacttctattttaaattagaaaaatcgatctcttaggatgtgttttagaacaaattcagattctactaggaattcatttgtacattcacacttcacttttgttaggagaactgcaaagtctattagaatcagctagattttcatgtgccactctaacaatacatttcaatttccatcaaattacaaaatttggaattcattgtttcaattacttgtgaaatttatcaactgaattttggtcattatcatcaattttccagttgaaataagtataaatttgcaattgagttccacacaagtcttgtattgttctaaatatatactttaaagtagaattagaaactgcattctaaattttataaaaaaattgttttgttccaaatacaccgttggtaacttcaatctcgaggattcctgtggttgctatcaaaagttggggaggagtgtcatccgggataataatatcaaaacttccattttaggaagcctaatataactttatgttttgtttggaaacaattgaaagcatgacagttgggtaatttgcattttgtttcttttgtattgtattctctgatgaatgaggttgtggtatgcgatacatcagtagaagtagatttaggtgcatagtaattttcatctgcttttgtttacaagtatgaatatcttagatggatgttgacctcatgtatttattctgaggacaaacatttgctgttgattgagtagatattgaacaaaagagcaattgaggcatcagagag

SEQ ID NO: 74183 - DNA, 490 bp, Carica papaya
  Intron number 1 from transcript evm.model.supercontig_187. 16 (locus evm.TU.supercontig_187.16) derived from phytozom e v7.0 (chr-ID supercontig_187; pos 222151 to 222640 rever se strand)
cggagcctctcgcttcctccctccacttcctgcaggtacttctccttacatactaatgtcagacttttttgttttctgtttgtttccctcgaaaatctagcagagtggagaaagaaacttctcattattttagttttaaaacccgagtagtggattttagtttttgagccttatttctctctcacagacagacaagctccgttcttgttcttttgttcttcatactttatctgttttccaaaatgtatcagaaagaaaaaaaaatcaacaaactatttcatctttaaatgttaaatactgggtttaacttttcatcaaaaagttcaaaatttaatcttgtgattatcttaatctttctgttactctccaaattggctatcaaaagtctattttgcttaccttttttaaacaaaaggaaattaagggccctgtttggcattttcctgctgattttctgtttcgttttcagggggagaaaataaagcaaggt

SEQ ID NO: 74184 - DNA, 657 bp, Carica papaya
  Intron number 1 from transcript evm.model.supercontig_87.9 4 (locus evm.TU.supercontig_87.94) derived from phytozome v7.0 (chr-ID supercontig_87; pos 608854 to 609510)
tcctcgaaaaagaatcgccaaacccccgattgaaggtaattcttcttgttatttattcttttcgatttcgtgctttcttttacgactatgtgaaggtttccttgattatttcggagaaaatgggggaaaacgaggaagaaaattatctatcagatatcttttttgttttgcgtggaattgggcaaaactcctgtttgttcttcgttgatcggcttctttgttggtttttattttgcgattaaatgcgactttttctcgtgataatggaagttctgctacgggactctgggtggtttggtgacagaaattcttcatttttctgttgccacccttctttttctctttctatagtatttatatttattaattaatatgctctccaggaaataagcactaatttcctgacaattaaattgtacttgggattttcgttgtttgacaagcaagaagaattgtttgctcgcctttttctgtcttcctttatctttttggcgttaatgtagctgctctgttctcattagtttttgatcagtgcttattgaagcagattctggtctaattgctcgagagccaaactgagtgtttgtattgttgtttttgaatcttgttgtcccaatgttgaaacaggctctgtggaagagcgcagtgatagttctg

SEQ ID NO: 74185 - DNA, 561 bp, Carica papaya
  Intron number 1 from transcript evm.TU.contig_29045.1 (loc us evm.TU.contig_29045.1) derived from phytozome v7.0 (chr -ID contig_29045; pos 1582 to 2142)
tggcggctgcggtgctgttcttcgaggtacggttgcgtccattttcttgtcagattggtttagaaagtcaggaagagatgaggaagtatactgacggtttctttactgttgtagcctatgaaattttcttgtcaaaaactgttacctattttaatcactgttatgaatccgaaataaaaggtgcaattttttttttaattcgatatttagttttcttcatttgtagtttcgagttaaaagtctatggcttccacttattttttgcttctgccctaacttgactgcataagaaaacatgtaggagggattggatccagatatttttcgggtgctattgatttttttatcacgaaccagttgtcttacttcagctagcttttgttttctaggaaatttctcatgatttccttgtttttttctgcaatcaaattggcagtttcttaattaattttcgtttttcttaaagtaggtttcttttttctatattcaaacgttaagaatggattattgtttgcttaatttacagccaaaaacaaaaatcagcagatagatactctgtcg

SEQ ID NO: 74186 - DNA, 883 bp, Carica papaya
  Intron number 1 from transcript evm.model.supercontig_3.11 5 (locus evm.TU.supercontig_3.115) derived from phytozome v7.0 (chr-ID supercontig_3; pos 902735 to 903617)
gaaagcggtactgctcagtggccacaggtaattaattattttattctatttttatttttatttttctgctgatcatgaaatcgtgaatattgatgttctttttctcttcctttttctcttgggtgtgatgggattttctgggaaatagctatagttaattagtattagaatatatatatatatatattctctttgggttttgagaaattttctttattgaaattgatgtaaatatcactatagcctttgttctaaagttaattttctctttttaactttttgtttgttgagttgagcccccactaatctttgaatttatgtttctgtcttttgagagatcgagagagcttttatgatttgttcttgaaagtgttgcacttttttttttttttttatcttttaaattccacccatctgatcagaagaaatatcttcaaagtgtaaaagtagctctcttttttctcctatatctctatatatgtatgtaaaacgcatatatatgtatatataaataacatatcttggtctttctgtcttgggtcgtcggtcttttgtcttcaatctttatccataattcttgttgtgggataaaaacttctgttttgatcattgatttttccaatctcttttacagctttttttggtttctttttttcaatttggttttttccccagattctttctgtgtcaacaaaaagcttctgtcttgatcatggagtcatgcgtttttccagtcgtttcatagctttttttttttttttcttcttcttcttcaaaaatttctctattttttctgagacaaaagctttgttatgatcatgaactccagctgggttaatagctttttgtttttgggtttcaggggattggtgtggttaaaaca

SEQ ID NO: 74187 - DNA, 644 bp, Carica papaya
  Intron number 1 from transcript evm.model.supercontig_177. 5 (locus evm.TU.supercontig_177.5) derived from phytozome v7.0 (chr-ID supercontig_177; pos 222002 to 222645 reverse strand)
gaaaacaactctttacttttcttgccccagaaaaggtatatcttcttttgcaatttgattagtgtttctttattcttcaaccagttcattatatgaaacatgctagttcactgatttactagacaaaacattttatatattgtacaatcattctcgctctaaagtcaatgttatttttggaacaaatattatagttcaaaatttcaaaactagtgtaattgaaatgtatttttctcacccggaaaaaaaaaagaaatctattgtcatattttcacttaaaactatctataagatcaaattttagcaggtcatgagttattttcacctagtgagaaaaacaaatgattttcaataatttccagaatgaagttcatgattacatacctttaccctttctaaaattgttattgataacacccaagtttagaatcaggttgctttgcaaatctttttttttttttggttgaatggaaccaccgaatttttaaatttcataaacataaaaacatatctctctgagttttttttgtttcttaaaaaagaattcccaatctaattagctaaatcactttaaatttttcttcttctccaactatatacaataatcagtcgacaacattggtgtctcagagcccaggcctctc

SEQ ID NO: 74188 - DNA, 722 bp, Carica papaya
  Intron number 1 from transcript evm.model.supercontig_64.6 1 (locus evm.TU.supercontig_64.61) derived from phytozome v7.0 (chr-ID supercontig_64; pos 376431 to 377152 reverse strand)
ggtaaatagactggcaaaaataggtattgttcctcaaataaaaatttgcatttgaattctctctttttctttggaaaactgaagccattaaactttctaagcatatacttcttttaccaatcttttaacacgtgagatcctttctcaattagaaacagaaattcaatgtcaggagactatttgccattacttgctctcaggtcttccagtcagattgccatgatagtggacttctaagtcttaggaacaggaattctttttaatgttaaacttgatcttctggattatgcatgtattgaagatagaaaaactgtgataaaaaaattggttccctggaagaatttgcacaactaatttttctgcaggtcataaaatactgtcaactcgcagttgcagctattactatttctcacggacctggttaaaaccttgtaaatattgtgaactttttggcagtgcctaaaaatgtgggtttgaaaattttacagttttgatggtgaaataacatattcattttggtgactgatgctggcacagatgtcttaaattttagttactaggataactttttttgaaaaaagaaaacaataagattgctggtgctattatttattgttatgctgcattgcgtcacccctctccataaactggtttttccatttatgatttgttcactgtgtctggcaggttcaatctgcaattgcattctcccagaagccctc

SEQ ID NO: 74189 - DNA, 373 bp, Carica papaya
  Intron number 1 from transcript evm.model.supercontig_81.8 6 (locus evm.TU.supercontig_81.86) derived from phytozome v7.0 (chr-ID supercontig_81; pos 367529 to 367901 reverse strand)
tatagagctcgagcttgtgggtaagaaatggaaaccaagtagccaaggaataaaggagtgcataaatgaattctttttcacagttcaaaataattgtgtatgtataaattccaaaaaacaaaacctagaaaatgaagaatccaaatgcacgtactctctattgcacacattgccaacacatcaagtgaacatttatcagaaaatgcactgaaccttggttgacatgacccagcttaccagattttccagacaagaaaacccacatttcataccaaaaatcacaccataagagagagcttgcaaagaaaataggtcaaagtgatctccctatctcattgcatacaccagaaacaaagtcaattgaacaactgaa

SEQ ID NO: 74190 - DNA, 523 bp, Carica papaya
  Intron number 1 from transcript evm.model.supercontig_147. 1 (locus evm.TU.supercontig_147.1) derived from phytozome v7.0 (chr-ID supercontig_147; pos 11553 to 12075)
ccaaagatccttgtcattgaaggcttgcatccaatgtaagttcatctccaaaaccccatactttttcaaattgaaattcttgacatatatgctcttatgattattctaagtagtaattataagtcactcatgaattcatgagttattgaatttgaaagttcattgaacttgaaagttcaatgtagtcttattttttgctaacaagcttattcatatatgtcaagattgaataactactaattgactcagtaataacagatcaaaatctatttttagcaaaaattcttgctaactaaccgcacccttttgagtagacttaagtattttcagagccaaaaaccataattttggctactgatggattcatctaagaaaataaaaaagactgggataatgtgtttggccctaccgtatggttattgtgtattatttaaaaaagttagagactttattgttgtttctttccaatcttcgtgtgatggagagtatttcttaaatagtgtattgcaaatatttaggtttg

SEQ ID NO: 74191 - DNA, 941 bp, Carica papaya
  Intron number 2 from transcript evm.model.supercontig_19.2 32 (locus evm.TU.supercontig_19.232) derived from phytozom e v7.0 (chr-ID supercontig_19; pos 1756003 to 1756943 reve rse strand)
ctctacgtcagaggaaccatcctcgggtacaagaggtaaggggcatgtgttaccaccgtcttattttctaattttcttcagtttcgtgtgtatatgtttctgatgagtttctagtgtgtgcttggttcctgagaaaatactttggttgttggttagagcaaactgttttaattacttgtcttattggaagtttttaatttgacgttcctggtgtgtttgtttggaatgtgggggctattgtcattttctccttttagtttagtatttcatttttcattggttttagcttctggttttgtgggtttggggggctagtgccgcgcgcttctcgtcttgtgcatgattagaaaatgtaatggaggagagagattatcattcttttactgatctcgtggttggcccctgattttgcctcatcatatattagctgagcggatttttggctgcccatttgtccatggtagggaattagtgaggttcaggaaaatgccggctttattttagatgaggacagacgccaatagagctagaggctcttggctaagtattcgaggttaggttcgtctttaatagaagaatcggtcattaacattttctttagttgaccaattacagactgaaattgttatagcatgtaaataaccttctgagccgattctttaatgaaattgtgggcgttctatcttttttaaaagttatctgatatggtaacatttcatagctggacaagcaagggaatttaaagatttattttcaagagcactctgatttgtattttttatctgttgagttctaataatgaaatgttacagaacactagtcatctcagctaaccctgtttttctttcagtaaaatttggtttttttggccttaaatttgaatgtgaacttctaattggttattaggtcaaagtcaaatcagtaccccaacacttcactta

SEQ ID NO: 74192 - DNA, 549 bp, Carica papaya
  Intron number 2 from transcript evm.model.supercontig_18.1 11 (locus evm.TU.supercontig_18.111) derived from phytozom e v7.0 (chr-ID supercontig_18; pos 927470 to 928018)
gaaggagcttggctactggtaagaagttcttttttttttatcttttcctcttctattaaaatgcacaaataatagtttctgcagctcaagtttcttctctagctgtaactgtagaaatgatttgttcgttgacggagacttctgactggttaaacctgttttctttctttactatgctctgtgatcgagtcaccattttgagttctacaatttttaaatgaagcacaataaccagatccgttgaatggcttagtttccatcagtttaatgagagattggaacatgttagttaaatggctagccgtagtttgtaacacgggcttcttccaaatgatcagactttgaggttgcataataagcctaatcacatttacattatgcatttatgtaatctcaatattaatcagctaataccttcttcccactttaaaagcagctcttacatggagcatacatctagtaatttttggtgatttatttattatgatgtgagtttatttctaccctacctgattatgattttttaatgtttgtcaacagcttgtgctg

SEQ ID NO: 74193 - DNA, 733 bp, Carica papaya
  Intron number 2 from transcript evm.model.supercontig_8.12 5 (locus evm.TU.supercontig_8.125) derived from phytozome v7.0 (chr-ID supercontig_8; pos 904173 to 904905 reverse s trand)
tcgtggcagagctactgtagttgatctagattcgggtaattgaattttcagttatcgttcctagtatatgtcttttggtaatgttgtggctattctcgtatatgtttccatatctttttgttatcttctttttggcagtcttcatcttttatcattctgtcgcttctagaatgaaaggatcccatattcgtggattaccttgttttggtcattttaactacttgttcctgaacaataggtaatgcattgagttgtagaaaaaaaatcttctgacatttctggatatgagaggataagaacaatgcccaattgttatatcaaattactgcctctgaaagcttgtcatatcacatcatgtgacaatcatgtgttttcttttctcctttttcttatttgatagtcaaaagaagaaagcgtccagctggaaagaaaataaactagctttggacaatttcataacaatccaaatctaaatcttagagaaactaaaaaattaatgaacagtacctgctttctaattgctgttctaggcaggtaagtcatcaaatgctttataagaaaatcaggggaaagtaaattaaaaaaactatattgtgcaaatgatatctcttgtacctggttttgatctttgtcataccttctgcattgacaaattgatcgcacctcagagctgtctaactgagctctgatcattgcagggcgagtggctgggttgcctaataataaccgtagc

SEQ ID NO: 74194 - DNA, 533 bp, Carica papaya
  Intron number 1 from transcript evm.model.supercontig_508. 3 (locus evm.TU.supercontig_508.3) derived from phytozome v7.0 (chr-ID supercontig_508; pos 14013 to 14545)
acattggaatttcaggtttcttctcttttattatcggatgtgattaaactgattatcagactgtattgttaattaacttatcgttttatgaaaattaaaatagtaaaaaaccaggtttacattgttttaaagttgaaattatttgttaagtttttgcataaattcatgcatgaatccattttgtaatgtggtaatagagatactatttagactaaggttttatttgaaataaacaaaggaattttgttgttaaattttgttcttcaatcaaattatacctacttaatatatgagatcgtattttcatctctaatcaaattatctcgtgcattcttattaattgattgtaatgtaattgatattcgttaaaaaattatattatgatccatgtgtatttattacttaatgaaatttttatggaaaaaaaaaattttgaaaatgattgcaaacattttccttcctatctggatcaataacagtggaagttctcttatgattcattacatgtgatgagtacaggaggggtaaccgcc

SEQ ID NO: 74195 - DNA, 538 bp, Carica papaya
  Intron number 1 from transcript evm.model.supercontig_33.1 22 (locus evm.TU.supercontig_33.122) derived from phytozom e v7.0 (chr-ID supercontig_33; pos 1224683 to 1225220)
aatcgactttggattatctatattctttaaaccaggtatgttattgattgaatccaggtatagatatttctctttttggatatcttttcaattttcagtttttgcaagcctcttaaattacagactagataaacactatcttgtgctagaaaaagtatgttgagaaaacaccttaaaagtaaaagaacgaaagtcatgtatgcaacagctcccacatcaaatacacagtgcagaacttaaccttattagatttatccatatttaacttcacagtagtcttcagttgatggtttaacggtgctatcatgctcttccaattcttgcatgtgtttttgtactgcatattttatggttaattatgggtctcgtcaattaatcatatccaaaagaatcaagcatttctgaaatccatagttttgttgcttttgtagttcgccttttcttttttttgcttattcgacatgtcatgggtccgactttacatgtttgattatactcaaaactaactttattatcttgccaggtgaaagatttactg

SEQ ID NO: 74196 - DNA, 779 bp, Carica papaya
  Intron number 1 from transcript evm.model.supercontig_252. 17 (locus evm.TU.supercontig_252.17) derived from phytozom e v7.0 (chr-ID supercontig_252; pos 135133 to 135911 rever se strand)
ttcttcaaggtgaagatttaacgattccttttttttttttttccaaatgttattttctagatttgttttgatcttctaagtccctttgtttgatccgttttacttgttttttggtagatcgagtatatcctgtttctgtagaatttgatgttcgtttatttctggtttattacttgtaattgtagcctgtatgagatattcgttggatatacatacacatattcgctggatatacagactcatatgtgtttatatgtatttgttattatgtagtatatgtcaacttgaaaggagtaggtggagttactgaattttttcgaataggaaatagagatcacgttttggacatggaggaacaaattgcagtttttttttttcattaaattattttaagagcattttgtgcctttttcttaagtttttcttttttcttcttccatgtgaattaatgacctgcagggatgcgattcttttttccttttgatacgattgactttgttttgggaaaaaccagaagtgatccttagagcactttagttgtatcaggggaaattcatggcaattatccttatagtgtatatagttaagggttgagacttgaatattttggacttaacttgctagtcacctgtgatttggtgccctggattattggatctaaatttcaattgttttgctattgttcttcagaacttgatctggagattaagaattttaactgtaactttttctgttgtataaaaggaagtggtgtggctggcataatcctccctgaaaaa

SEQ ID NO: 74197 - DNA, 677 bp, Carica papaya
  Intron number 2 from transcript evm.model.supercontig_70.9 7 (locus evm.TU.supercontig_70.97) derived from phytozome v7.0 (chr-ID supercontig_70; pos 692110 to 692786)
ctataaaagctcaaacgctgatactttccaggtgcttcaacatctgttttttgatgtgattattaatcttactgatagcacatttagttttggctgttacttttgcaccttgatgattgcttctgcagtagtaaacactagaatcctggtgaatataattcacatcacagtaagtgttcctctactagttgaaattatagcaatggactctttggtcattctgcttgcatcaataaaacaagagagagggtacttctgatcgatatctatctgtctcaaatcactgatccagaacaaataaattaataatcaagtgatattatcttccctgatcatgcagttctcgttctatagagttgttgatggaattaatttaatatatttatgaggttttcctcattatccttcttttcctcttcttctctatcgctaaattgaagtttagggctttaacagaaacactatgtataaaccgttcattagtgttactgttatcactaattaataaaaactttttctttaagctccttaatcactctgtgaaaaccctgtatttcatatgttatgtagtcctgctactccatttattccttatttttttattagaatgatcagttgaatttagtgtttgtatctctctagtggaaaggatcagtggctgccaagtcaggaagaag

SEQ ID NO: 74198 - DNA, 616 bp, Carica papaya
  Intron number 1 from transcript evm.model.supercontig_189. 17 (locus evm.TU.supercontig_189.17) derived from phytozom e v7.0 (chr-ID supercontig_189; pos 144151 to 144766 rever se strand)
tctatctgttttctctggttggaatattgtttaccgtatgcatgacctcatttagcatgcaatctaaaagattttaagttcaaagactagctctttatgttagcatcagtgataagggagaaagaataagatgttaggaagttcatagtttgttaacctcaacacagcaatgttagtttgactgagcttggtcaaatatgcaaaatacagttcattatgttggccttcttgattcctctcaagcctgcatatatcactcccagccaaaaagaaggaaattcagtgcagaaatgtaaatttgttaaagttgaaatatgatttttattggagttatatagctcgtatctatcttgttatggtactcgaagcttttcagttaccatttgatctagactaaagcattctgaggattttacttttttattcttaattatacggagactttcttagcatatctgtatgcatcctatttagctgcatcttctgtgtcaaagatttgtagcttgtggaacttgaaaacaatcttggtttctgatttcttctatttcatttgctcaaaattttgaatttcctttgtttaggtagcttcactaccatcttcagttcctgacggtaa

SEQ ID NO: 74199 - DNA, 542 bp, Carica papaya
  Intron number 1 from transcript evm.model.supercontig_35.1 1 (locus evm.TU.supercontig_35.11) derived from phytozome v7.0 (chr-ID supercontig_35; pos 289713 to 290254)
acactcaaaggtgggaaggtgttagaggagccaaagtaaaagtaagagctgatatggtgattcaatcaaacccaattgaggtaagtgtggaagagcaaggtaaagaaaatactaactctataattttcaattcaaactctagtgtagatgttaatgagtttccttatcctgatataattaaaaaggataagaatgatgctaactttgctagatttttagagatctttaagaaaatacaaattgacattccatttgttgaggctttgatacaaatcccacaatatgcaaaatttcttaaggatatcctttataataagaaaaaaattaaggaatatggcacggtaatgcttattaaagagtgtagtgccattatacaaaaaaagttgcctgtaaagcttaaggatctagggagtttttctataccttatgaactaggcaatttaaatttaaagaggcactatgtgatttgggttctagtgttaacctaatgccattatctgtttgtaggagactcaaccttggggagataaaccagacaagag

SEQ ID NO: 74200 - DNA, 420 bp, Carica papaya
  Intron number 2 from transcript evm.model.supercontig_530. 5 (locus evm.TU.supercontig_530.5) derived from phytozome v7.0 (chr-ID supercontig_530; pos 17726 to 18145 reverse s trand)
ctccctggttcaccaaggccacatttgagaggtaaaccgacttttcttttcataaagatttgttattagtttatggattgcaccaattaatcttaactcacaattgggtatgattccttggatttgtaaaattcggatgtaattgaataatatagatggtttttggatcataaaattcttgtgaattttgaagttgatatgttcttggagctagttaatatttggtttgatctcaagtgctagttttatcagaacttgcttaaataaacttgtgttgtcaaaatttgttcattcttgtagcttcttaaatgccaaatgttaatcaatgtttaccattgacgctggagtgacttctattcaggcctaatatatatttttttctcagatttgttcgatttgttagcacaccagcagttcttg

SEQ ID NO: 74201 - DNA, 600 bp, Carica papaya
  Intron number 1 from transcript evm.model.supercontig_15.1 1 (locus evm.TU.supercontig_15.11) derived from phytozome v7.0 (chr-ID supercontig_15; pos 266786 to 267385 reverse strand)
gatcatttcttggagctcgacacagttactcattcgtgagtttcaccgctttcatattctgttcttcttcttttgaattagaattttgtttttatgctttttggtgggcgtcgacttagttcaatggtttcgatatttcacaatcacattgtttagtctttacgagaaattgagcgctaaaattcgcgatcagcatatctcttatgttgccgattttaaaaacgaacgcttattcttgttggattaatagggtctcattaattgagaggaagcactgacagtttagttgaactgtattttctttttccttttccaaatggtggtcgttaatttttgaactgattaaaacttggtcaaattaaattttggttaaaagttggattgttgatctacagtaattacctacaagtgtagaaactggggcacaaaacgaaatggtggaatttgacatcgtttttacttgtatttcgtagtgatcttttggaatgtcctccaattttatgtaaaatgggacattaagaaatactgcttatattaattttaactgcctgcagcctggtgatgggttctaatttcatgtatactttggaaagcttgcag

SEQ ID NO: 74202 - DNA, 862 bp, Carica papaya
  Intron number 1 from transcript evm.model.supercontig_35.2 8 (locus evm.TU.supercontig_35.28) derived from phytozome v7.0 (chr-ID supercontig_35; pos 602167 to 603028)
actattcccggttgattgaaggctacgacaaggtgagcttaattctgttatctcaatccttcattccttaaatttccatttgattttctacgtacttttttttggtgcttgtgccattaagctgctcgttgaaagatctaatctagagtcaattatgctgttttagcctctatagaacttcatattcaactatttttcaaatgttcttcacttagaatttatgaattttctgaggacgttccatgtggcaagttactggaaccttgaattataacacgcactttcattgacagaccaattctcagttgtatgaggtgatgaaatataatatgaggatatctgtgcacgtcatttcatatttcccatatatgattttctagtaaaatcaccagataaaacagtgtgaataagtaacgtgtatgaatggaaatggggtggagagtggactccatattattgggctattcaactacatacgtgtttgttctgaacttttgtatgattcttatcatattcattgatgggatgccagtcacattatttgtgctttatgaatcatttgggtcttcctaaatttctgttgatatcaagttatctaagtccagcttttgcctcttcctctcaagtattgatctccagatgcatatttcttaatctggattttgaaataatctgttcgttttagagtatgtcaacaattgtttcaagcattagatcattgcatttgccaataacaaaataggacttaattgtatcatcagtcatttagactgcattctttgtccttctttgctgtctcttgctgctgaactatgcttttgtctcttttcaacagtcagctgctgagagagtgaaggccaag

SEQ ID NO: 74203 - DNA, 471 bp, Carica papaya
  Intron number 1 from transcript evm.model.supercontig_200. 24 (locus evm.TU.supercontig_200.24) derived from phytozom e v7.0 (chr-ID supercontig_200; pos 220540 to 221010)
ttaactacagcaacccacaaggtaaattgctcttgactccggttgctgctcttcttatatcaagtttgattgatataataattaattaatatattttcttgattaactcgaacagctaatttcatgtgctcagtacttcataaatttatttgttattaagatttagggtttatattgtgcttggatgttttggaattgtacaatgtggaatatgggttattgatggaaattatttggtagtaattagggttcaaagcagaggctcagttgcctttaaccgtggtatgaaaaggattcaataaataacgaagcgttttacagctgactttttctgatgaattttcctctcccttagaaaagctttattttctatttgcatcttctaacttgtgttctctgttaattctttctctaaaagtcttgttttttgacatcttttattgcaactgttggcagctgcaagggcactgg

SEQ ID NO: 74204 - DNA, 1009 bp, Carica papaya
  Intron number 1 from transcript evm.model.supercontig_731. 2 (locus evm.TU.supercontig_731.2) derived from phytozome v7.0 (chr-ID supercontig_731; pos 20638 to 21646 reverse s trand)
ggcagttgcgctcctggcctcacttagctcttgaggtgcttccgtttaccttttttattagaaacaaacacgcagacatatatatatatatatgatttaaagctgtgaactttgctttcttgtttggtatttgttatgccattttagagatcttgtgtagcttttatctggattgttgcttattttgcttgctgatcagtgttatttttcatgccatgaaagttgagtgggtgcagcagtgcaccttattttgctaagcattctagatggtcaatgtttttctgaaagcgtgaagtgagtacggatctacgagtttctctgcatgttttttagaatttcttctatgttgatatgaattagcttagttgattttgagttagcattcacaattaaagactgtgtctattattttgtataacaatcaaacagtggtcttttgagccttaccactattaatccataaatatggaagcacatttgaagaattgggcattgttttctcgcacctcaaatgactttggcttaaggctttgtttggaataaatcaataaagtttgtggtaagtataaagtgatgaaaattatatgagaaaattagaaaaagtagccacctagaaaattcgtagttgaattgcgtaagagtttaatttttatcattttaggtgagatgtttgccttattatagttaaactagatggaaattttttaaatatacaaaaattattaaattgttccaaagattgattaagtattttatgatattatttgaaacaaaatggagttcttttctttccatggaaaattttgaatgccgcctaatctatgtagtttggcgtgtaacagtgaattgaaacttaataattttttagggaagaaaatgcgggacgttagttttgtggaaaacttatttgcatgcatgttatctttcctaatgatagttttttaatgtgtttgcttttttttccctcatcctataagtaggttttcaattggaggaaaaagcaggcaag

SEQ ID NO: 74205 - DNA, 820 bp, Carica papaya
  Intron number 3 from transcript evm.model.supercontig_65.6 3 (locus evm.TU.supercontig_65.63) derived from phytozome v7.0 (chr-ID supercontig_65; pos 669882 to 670701)
gagctttgcaagagttgatacccaactgtaacaaggtgaccagtaactacatatatgcagtacatgtcttcatatacatatgttcttatgttggctttgttatatacacacacacatattgatatcaatgtacgtttagtacgtccaataagttgattaattcgcaacccctggtgctgcactcccgttccggctttccctaccttctttaaactgaacaaatcaatagaaccgcataatacatgatagagttgtagttgctgtatattcaagattaaaacttttgattattcattatatgaaattttattaatcttcctaatcttttgaacaatggccttgttttcttcttgtttaattcactatactctgtcttgcaacagttgctatgcttgttaatgtggtattccgtaaggtaattgttagatcattcagtgggcagacttttaaatgcaattgcaagaatgaaaaaaattgacacgaaagtagttctatttgagagaatacttagtcattgcttttgctttccatccactttttatttgacaatatgtcaatttttgtgagctatttattctgtaatttcatggcataatctctatcatttaactgttactttgaaatattttctttaatgtttttcacactttagctctctcctagctaaaaaaaacggaatgaccgcctcacttccgtatatgcatgactttatttcaatgcaagtcatgctgttggcaaacaaacgttctttgggcgacatttctttgattgaacacaactaagtataatatttatctaactgcagttggatagagcttcc

SEQ ID NO: 74206 - DNA, 785 bp, Carica papaya
  Intron number 1 from transcript evm.model.supercontig_34.1 52 (locus evm.TU.supercontig_34.152) derived from phytozom e v7.0 (chr-ID supercontig_34; pos 1325878 to 1326662)
tccggaaatttaatcgtcccaaacacgcccttgaggtaccattttcccctatatctacacctatacatacacatggatgcatgtagttatacaatggaaatatatgcatatgtctgtagactggattgtccgttagttgtcaattgattaagttgttatggagaagtggaagtgggttttcgttacttgctttgaagaattgtttttgtcaaaaatggacagataaggagaagaaaataaagggttatctcgttgatgaagagtgaatgtaggacgagaaagtaaaaccttatgttggaaaataagtagcagaagaagaccattttctattttagccgatttgtaaaccaattgattttttgggttgacatcaaaattgagatcttttttttttggaaaaaagaaactattagatgttatatatgaaatatcctgaatttattttataatttttggaaaagatttaaaaggaataaattgtatttgcaaagtttttaactttttttgctctggttcatttgctcctggaatatctattattttatcctgttctggttcatgttttaagctacttatcctacctagcctttccaataaactcccaacagattatgaactcccttgattaagctgtctagtttctttgggagttccattatgttatttttgagaaaagaacctttctttttctaaacaaaggaagttgatggagttgaatatgaatttgtgatttttatggtttagtttcatgttgtctccctcaatttttaatggtagatatcaga

SEQ ID NO: 74207 - DNA, 668 bp, Carica papaya
  Intron number 1 from transcript evm.model.supercontig_69.6 2 (locus evm.TU.supercontig_69.62) derived from phytozome v7.0 (chr-ID supercontig_69; pos 738906 to 739573 reverse strand)
gaatgtaagtatatacatattatcattaccccatatatatgtactattcatgtattgcaactccctaagaacgtccatcctcatcagatcccacatatgttcatatagacttgaatagcgtgtgtgcccgtcctatatatgtgtaacgctttgtataatattaatcttgtaaactaattgaattcaattatagaaaaaattaaaaatactgcttatgcagaacgtaacaacacaatattttacacgaagaactttaagtacacatggaaaaaaaaaaaatcacataataaactctcaatcaaatttactaatagaaaaaatagtgattaggatcaatcccattttaattataaacttcgattttctaataagaaatatctaaattttttccctaataaacattctataaatcacatagtttgcagataaatattgaaaaaaataattttcaaatatttttaaatagtaaatggttactagctcttaacaatattcaaatatctaatgaaagaagaaaaattaaacattttttttttaattttctcgtacattaattttgatgtatgtatgtattgttttgtttgtttgtttgtttttttttaatgtaatagatatatatatatatatatatattgtgacatggatgacagttcttggagtatagtaag

SEQ ID NO: 74208 - DNA, 318 bp, Carica papaya
  Intron number 2 from transcript evm.model.supercontig_68.1 (locus evm.TU.supercontig_68.1) derived from phytozome v7 .0 (chr-ID supercontig_68; pos 104205 to 104522)
gtaacagagaggggaaacttcttcttctcgccgaggtaagttgtttcttcttcttgtgaattattttgtttatctctttaatgtcttacggtcagttctatacaaaaatccagctctcaattcgtaatgtgaattggtgatgccgcatatatttagttaatgtgtgtgtgtgtcatgaaatatggtttttacaaattaagatgatatgttttatgcatgaatgaatagagtaaatgggtgttggtgattgatgcttagaaaacaaagaaagtagaaaaaatttttgaaggaactaaattgaatgattctgtcacaggc

SEQ ID NO: 74209 - DNA, 483 bp, Carica papaya
  Intron number 1 from transcript evm.model.supercontig_77.1 3 (locus evm.TU.supercontig_77.13) derived from phytozome v7.0 (chr-ID supercontig_77; pos 121912 to 122394 reverse strand)
ggcgatctcggcgacctttccccggcccagttcaggtgaagattgactttttcaacacatttcatgcatgttatgtttaaacaactaaatttatgaagaaccaatgtaatgattggaacctacctgtaatctttcatgcggactgtgttttcttgccttaaaaagattgttttttttggtgtgacaatcgttgatgtcatatattactgatcaatctatgagtttttactaaaaaaataaattttgaaagaaaaaatgtgaggtgttgttctgtttttgggggttcatttgttcaacacatttcattcatcttatgtttaaacaactaaatttcaaagaacacatgtaatgataggaaccttcctgcatatattactcatcaatttatgaacttgtactaaaaatattaaattttaaaagaaaattgtgagattttgttgggttttgggggggtttctggtgcaggagagtgagcgagctgca

SEQ ID NO: 74210 - DNA, 916 bp, Carica papaya
  Intron number 1 from transcript evm.model.supercontig_25.2 6 (locus evm.TU.supercontig_25.26) derived from phytozome v7.0 (chr-ID supercontig_25; pos 406727 to 407642 reverse strand)
agaaggtatggttttttgccttctcattgttgttactgccattactattattgatttgttctttgaggactgagtttttagctggtcttgcatttattctgcacttttgtggtttttgcatattgatcaatgtggtaacttgtaaaaccttattattatttttgttgtgatttttggatttaaatttactttgttttttcttcattttattattattattattattattattattattattattattattatcattattatacggagcttgttgatttatctgtggtagagatgttagtttatgtggtcttggtgttgccttatcatgtcgtgcctatgtgcatttggtttttgatgaaacatctacctgagcttactgttcttgtgccttgtatgaatcaattttgacaagtagctaagacaattttcaattggaaatatggattttgcttaaagttataagcatccatgttatgtttctgtgtgattttatatggttgcatctacaatgcagtaacctgatgttgtagatagcattatgacaagtatttgcacttttgagctgaatgttatttggcaatgagtgtcatatgtcagacccaaaaagtaggcttaagattttggagtggacatttatatgtcagtgcttcttgctctaaacgttgttactgggaatgcgtgaaccttatttgaatctagccctgaaaagtattgatgttttcttgtttttaatatttcataagggtcaagtgaactttgactttttttattggttggtttaaaatgaagaagttggtcacgtatgtgattaatataaagacctggttgatcttcaagaaaattaagtttctagaccctgattgtctgatctgcagcctcttgacaggttgaccaggcctacaaggtttttgaagac

SEQ ID NO: 74211 - DNA, 592 bp, Carica papaya
  Intron number 1 from transcript evm.model.supercontig_7.11 7 (locus evm.TU.supercontig_7.117) derived from phytozome v7.0 (chr-ID supercontig_7; pos 1066945 to 1067536)
ccaccaaatcttgcgctggtaacctcatttttgtttgctccaggagaatataatctcgttgcttttttctttttttttttctctctcctttttttcttccctaattgtggttttcgatgtttactgaagttaaaggctgttttttagactctgagtgaatttcacgtcctctttttttatttcggattttcctttttatgacgcctaacatttgattgattttaagaattgaactgtttgcctgattttgtttatgttcttgcatgttttgttcgctaccaaatggaacattagggttgttcttgtttgttaatgacaaatgagcagaagaatatagcttgaggttcataaaaactcaagttggctcatttgagtgagtgattttcgttttcggggtgtaattcgcataataaaaattccttacatctctccttttatctttcaattattaacgaaacaagcagaataattatgtttctagcaaagcttctttaagttctaaatgtttatatttgacatatagacagcattttttattgttgttttttttccttcaattggatagggatttctctgaagactcaggagcttt

SEQ ID NO: 74212 - DNA, 823 bp, Carica papaya
  Intron number 5 from transcript evm.model.supercontig_7.23 6 (locus evm.TU.supercontig_7.236) derived from phytozome v7.0 (chr-ID supercontig_7; pos 2338753 to 2339575 reverse strand)
gagtggaaactgatcattcgtaattgtcccttctccttttccccaagctccctcctacccgcggacaaaatcacccatgtttttgacgtaggacgaagagagtatgaacacaatatttcaagaattttttaagaaccggaagtggagatcttgaatcttaatagtcagatgaataactatataaatagtctaccaaataattcagttaggataccctatttgtagttattagattacagtcaaagtaagaattcttaaatctatctaggaatcctactaaatagaaaactaagctaattaattggaataatctataatagaaaataactaaatgagatcctaaataaatagtaaataaccaacttatgccatttgtaagtttatagatatttattcctaaataaactaaataccttaataataataaccatcgcaattacttaaatatatcttattaccgaatatttatccacttttgcatcagttatcttgtgagatgatgcatgtgagtgccacctggtgtttctttgattctattgttggtgttctgtgattgtgaaaatttaatcaagggtatgtttcattcttgttaccatgttgaggcacattggactaacacgtgattgaactaaatattgcattaaaccttaagacacattggttgttgcatatgataaaaccaggtatcacctagaaatattattcagttttggcaattaggagaacatgcaaagtatgtttatatgttctatatggtttacatatatgccttatatggagtttaatgtggttttctttgtctttggctaatagtgtcaaaaac

SEQ ID NO: 74213 - DNA, 755 bp, Carica papaya
  Intron number 2 from transcript evm.model.supercontig_55.7 2 (locus evm.TU.supercontig_55.72) derived from phytozome v7.0 (chr-ID supercontig_55; pos 460781 to 461535)
cggaattgcagagaagaggcatagttccattcaaggtaattcatcttcttcctggaattttttccttttacagaaatgtgtcactgtaaattatattctacttctttcagaatctatacacacacacacacatatatataaatatatatatgatatcgatcaattcatagaattgttctgttgattaacatgaaatctttaagttcaattttgtagtaaacaagcatagacttttaatttcttaatcattttaattactatatacaaaatatattttattgaataaataacttaatttatacaaattaaaccaactttattcataattcaaaatccataatggtagatttattagtgtttattgccaatagagaaattattagaacctactttaaattggcacttgaatttaagatattatatttatcaaattcttaatctcatttgtatttttattttatgatattaattttcggattacattcaccatgtgtatattgtaatatattttatatattattttaagtccaaaaaccgagctaactatagtgagttgactatccaaccctaattgagttttaattttgttcaattttctcgttacaaaacgtgtttcgtgtagtaaattaattatacatcatgtgtatattaaattataaaccttatgatatatgcatatatctcatatataatatgataatagatggtacgtaaattttggggattgattatatgtttgatcagatccaaacttc

SEQ ID NO: 74214 - DNA, 321 bp, Carica papaya
  Intron number 1 from transcript evm.model.supercontig_32.1 08 (locus evm.TU.supercontig_32.108) derived from phytozom e v7.0 (chr-ID supercontig_32; pos 1309650 to 1309970 reve rse strand)
caagtaccaaggtacaaataagacattgtttgtttgtacctgcaactttgttgacttgtaatgttattccgtttgagttatcaagtttataataatagtgttaattcgtctgaattaaatgttcttaacccatttaggacttagttatgatttgtatatttaatacacaactaaatcaacctattgattttgtacttttacacgttaatgaagaaatcacaaaaacacaaaacttgaagcaaattttcttttatggtttcgaatatttttatacttccgttataattactctcaattgctctgcagcattacattgtttac

SEQ ID NO: 74215 - DNA, 857 bp, Carica papaya
  Intron number 1 from transcript evm.model.supercontig_2.18 6 (locus evm.TU.supercontig_2.186) derived from phytozome v7.0 (chr-ID supercontig_2; pos 2561450 to 2562306 reverse strand)
cttcgccgttgccagtattgttagtcaccgcattctcagcctttatttattcatctttttttttttcttatcattgatacagtgggttttccgccgaaatggagtgaactccttggggttgaagtagtattttcagaatggacgaattatgaattatccaattaataaagggccctaattacttttattatgtgcttcttgtgaagcgtgtgaattgcggcaattgttagcagtggtcattttgaaggcataaatcacgtctttatatatatttttttgttttgttggttggattgtgtgtgtttcgtgtccgtgagatgttcctagaagacctagacaccgttgacttgttaccgctttctttttaaattattagaaagaagtattattaacggcttcgattcatactggattgttgttcatgagatttagtttttaagttcctatcgacatcctttttctacattctgcgttgcttcaagagtaatgaaccatttcttacttttaactaaccagacaaggtgttcagacaaggcgttcacagtgttgtgtaaaataattgatgtttaaccttaacatcctaaagtattattctgtgattaaaaaaaggaaaaagcttaaggatgaaaagcaaattcaagtgatagctttactttctgaaagcttgaatttgtaatgacttttccttccaagtaacttgcgtgatatttgattttttttccctacttttgacgagagacgaaacataagtgtaaaaatgtaaaagcaatgagcttacctgttgctcgtatctcttgacatggttgccttcattggctgcagttaccactagctcacaggctaaggttgccttgacc

SEQ ID NO: 74216 - DNA, 942 bp, Carica papaya
  Intron number 1 from transcript evm.model.supercontig_37.1 8 (locus evm.TU.supercontig_37.18) derived from phytozome v7.0 (chr-ID supercontig_37; pos 142474 to 143415 reverse strand)
aaggatactactgactacctctggtatacaacaaggttggtttctctttgtagaaacttaatataaacaattgtggtttcttttatttagtccgtaaaaattttgtggtttacgatattcattagcgtgattagaaagttcataacatgataaacgaagaaaaggcaccccagagacgtgcatgtagactcgcaaatgcacctcatattaggaaagtagaaccatctgttatttctttgtatttgggtcaataatttttgttctaacatgcatctggacgagtgctcttactcctagtgacttgtcaacatagtaaaatttaagaaatgagaactccagtttaaagattttattttgctattgaataggtttatctctctactggacttgatccgtcttagcatcgacgttactgcgtatgaattgttcttcaattttgaatcctatgctagctgttggtgaaggtcaaatatttttatgatggcatgcagaaagttacaaatttacaatattgaaaaatatttttgatgataattaaggttcatctcattgcaggaaaacaataatattgcaaaaaagtaagggcatgttgttagtgtcttcagggacatttatagacagtaatgactctttagcttctatgtaaaccaggttgaattctttgttgattgtctgttttagtgccatacacaagttccatatcctaaatcactggcaaagcacgttagtcataacacttatttgttgtgttttttatgttcagtttgttgtatcttgctattccttaaaaataatctgatgggttctataatctcgcaacaaagatggagccaactgttgttcgcatttgcttttttttcagttttcattattaaaaaggatatacatggtgtagcgtgagacagcttttgtaagtaattcaatccttcaattgcagtttac

SEQ ID NO: 74217 - DNA, 678 bp, Carica papaya
  Intron number 1 from transcript evm.model.supercontig_8.17 2 (locus evm.TU.supercontig_8.172) derived from phytozome v7.0 (chr-ID supercontig_8; pos 1201194 to 1201871 reverse strand)
gcgaattattcagcgagtaatgatttttaaccttccttgaatttctcttcacttgaattgatgtgaggaacactggagtaggatcagaatgggatatagcttttttagcaacgcagagaagccaacatctaccgaaatcccttttgcaaattttgattgttagtacacggtagcataacgtttaatattattcttgtctttcctcttgtttaggtgctaaaaataacatatttttatggaataagtatgattttcttgggtttgaaataaaaatggaggaattatgaattgttctgataaaaatatttttattgaaaactctgatggatcatacaaaactactagcttattagaaaaaacataaaagaattggaacattctacaaattcaagatacaaaactccgaattcagtaaggtacttctgttccctagttagttttctgtatttcagttttcagctcacacattttattttaagaggtagggtcggacctgttttcgttcctttgtttggccaaattgaatatgctttctttctactccagctttaagcctgatatgagtcacatggtgtttaatcactacctatatacaaacacatagtgcatcatgatgatttactctcctttgaatttggaacaggttcaagatcttgattttcctattgaagtgatagg

SEQ ID NO: 74218 - DNA, 754 bp, Carica papaya
  Intron number 1 from transcript evm.model.supercontig_494. 2 (locus evm.TU.supercontig_494.2) derived from phytozome v7.0 (chr-ID supercontig_494; pos 16017 to 16770)
ggttaactattttaacatttttagttaggaagtgaaaggaaactagacatttaaacaaatggaaaacatcatgaaccaaattgcaacaaaaaaaaatattagagatcaaattgtagtaaacactatactttgggaactaatttgataatttacccaatggcttataaccaaacattttagcagcttattttacaaaaatgtatcagttttatacgttgttggagagcttaagcttatagcttataaatctttatgagataaagttaagtctcatggtttgttttgaagttcacattttcttctgtaaaacatggataggctgctctcttgctttgaaggatgttctttgcttcttctttttttttctttcttgttatgtaagaggatatcttatcctctatctcttgtacttttctctttctctctaataatatttttccttttatattttgaaaaaaaatgggtttctccttttatataaatagaagaccataaaatgataaatccgtccaccctagtaatgttttctacaacgctctttggatgtgtatctattgactatgagaaatttcttatgctgctgcatctgtttcttttccaggccaagtaatatcctatttgatcctagaacttgtttttgtatctgagcttgtgtatttttgtctcaatatctgtttataatttatctggcaccaagatttagagcaaattgatttcaggatcaggacaagctcaaccacaaacttcccagtca

SEQ ID NO: 74219 - DNA, 696 bp, Carica papaya
  Intron number 2 from transcript evm.model.supercontig_494. 2 (locus evm.TU.supercontig_494.2) derived from phytozome v7.0 (chr-ID supercontig_494; pos 16829 to 17524)
aggttcacattggagtgggttgtgattcttgcggggtaatgtcattacttgctgtcatactactgtaatttccagagtagattatagtttttaatagtgaaaatgttggttttatttatcgtttgtgtactcccttttttggtcctgtccctagcataaagcatgtgattctcatattggaagacactttcggtttagtttggaagacatgatacatccaaatgatttcctgcaaattgatcaatgtgccaaattttgtaacatttttctctgaatcttgagaatttttgggacagagaagattgctgacagtctgaaatctagataaagtttaggtatcctagactagaatttttaattgggagctagactgaaatattattatcttgtttacatgtcgcaggcccttttacacaatccactgaatgagtaaaagtgtcttaaaataattttgacactagagaactaaaaaattttccgtcagaaatatggctttctcggcaagctagtataatagattttttacattatcagttgcaatggctatgaaatattcattagttttggtttctgactgttaaaagttcttgtctgtaccagctattatcatttacagtcaaacattttatcatgattttgtgttctctgattggagaataaattgaacagattccagcatcttaagattttttgcag

SEQ ID NO: 74220 - DNA, 541 bp, Carica papaya
  Intron number 1 from transcript evm.model.supercontig_29.1 79 (locus evm.TU.supercontig_29.179) derived from phytozom e v7.0 (chr-ID supercontig_29; pos 1993957 to 1994497)
ttgaattagctcactcctttgattggccgcttaaggtactcatctttttgttttagctccctcgtgtttatttctgatgcttgggttatcatatattccacatttgacttgttttgagatgctgtttacttcattttacctaaatttccattttagtaacaagcaggggaagttttgatgtagaacttgagcttaaacaagaatttttctatacccatgttaatttttttttttggtttgatcttcgtgatttttggttgtaatcttgggcgttgagcaggtgaaagcattttcttttaaatcaaagagctaatttttatcattttgatccaaaagaattgacttagacatgctttttactgtacttgggttttttgtttcaaaaagttggagctgtagttgaataaatcgaagtctactgtaggtctattagttcccagcttctgtgcaatttgagtataactatatcttaagaaggaagctttgtgacattaagaagtttaaaggtattttcagggcatcaggaattattagaaagtgg

SEQ ID NO: 74221 - DNA, 730 bp, Carica papaya
  Intron number 2 from transcript evm.model.supercontig_27.2 06 (locus evm.TU.supercontig_27.206) derived from phytozom e v7.0 (chr-ID supercontig_27; pos 2027285 to 2028014 reve rse strand)
tacgaattaataatattagttatcttctgcacaaggtatgagtttgtacaaaaaacttcccagttattttcttcattgatgcatactttcgacaatatgatttttgttaatgcgatttgattttggaaatattctgagtgtattttgagaatatttccatgaaaattctagtagtttgtttatataagggcctacaactctatcaatgatgtactttcaattttcatcataatagaaagtttcttcttggtcttacccagtgatgtacacatctctgctgaatcacgttaaattttatgttttttctcattttgctctttattatgtgtgattgtgtgtatgttggatatttatcttctcaatagttttatttcgattagttgatagtaagtttttcgaagtggataacagtaaggacatgatgagaaaagaaatgaagagaaaatgatagaatcatgtcttatggaacaggttgatatagccatacttcgcgttgaaggtgcttagtagaaaagtcctataagaagtaacctgtcttgttccttctgaaaaatgagaattatatctgtgacaactagatttgaaatcatggttctgcaatggctaattcagagggaaaatagcataatcattgtgcagatagctttttatcagtcaaaggaaacttaaactcttgttaattttgctgctcttagctgcagtttccacttcttccgaagtgtggcctcct

SEQ ID NO: 74222 - DNA, 410 bp, Carica papaya
  Intron number 1 from transcript evm.model.supercontig_25.3 (locus evm.TU.supercontig_25.3) derived from phytozome v7 .0 (chr-ID supercontig_25; pos 65342 to 65751)
cattcattgacgcttctcgatcgacaactcaacaggttctctttttcatcttccagtaaacaaaatataacaaattagcttaatttgttacaagcaaatattaaaaagaaaaacacagttccgaactgaataatgcagttattcaccaataaagagaaaaacaattctttaattaatcaaacatgagactattatttagtttaattcagtgttcttaacgggtattaaccattaagctctggattttggggttctggttcgttcttggatgtaccaaagccggtgattttcgttcaaaactatcagctcagtgttttatgattctatacaaggttaatttatatacttatgtgccaggattaatttggatgtactgtttgtatttgtaattcaacaggctgcaagtttag

SEQ ID NO: 74223 - DNA, 527 bp, Carica papaya
  Intron number 1 from transcript evm.model.supercontig_522. 2 (locus evm.TU.supercontig_522.2) derived from phytozome v7.0 (chr-ID supercontig_522; pos 18885 to 19411 reverse s trand)
tcaaatctgtttcgactgtgacaataaaaactgaggtaactttttcttcattcatgttcacctttcgatttcttctccttaaaatgataattttttgtttggttttttgttacttggggtgatttgggtagtgggggtttttattttccttttcagactcttaaattgattaggttggggatcctgctgtgttaatttctattatttgttcgatatatatcaggaaaacttagttatgtattggaattttggaagacgaggtgatttagataaagtcataactgaactgaactgaactgaactgaattgaataatctatcataaattgctcatctgggtgcattaaatttgaataatctcaagcgaattgtgagatcctttctgatggattttagttgttggaatagcaaatattttcttaaggatcataacaactgtgaaattatcatatttatagcgagactctctaatatgttttatgcaagtgtgaaggtaaagtcaaagacaacgccaagttcatccaagac

SEQ ID NO: 74224 - DNA, 393 bp, Carica papaya
  Intron number 3 from transcript evm.model.supercontig_153. 10 (locus evm.TU.supercontig_153.10) derived from phytozom e v7.0 (chr-ID supercontig_153; pos 322845 to 323237)
aggtttgttactcaattttctctcttttttctgggtttcctctgttttcttcttaatttttttttttaaatttccaaatttagaacccattaccattttaagaaaaaaaaaatatcactggtttcttcttctcccctaggaaaaaacaaatattagaatcaaacagtgaattattaagaaagagagaggcaaatgcaatggagagatattgttattgaaattggttttccaaacaaaacgccctgccatgtctgaaaaacaccttgtcctttcaaattcctaatataacattagaattccaagttgttaaaaaaaaaaagaatcaagataaacatgttttaggttgtcaacttgtttgaatttgtcatgtaatgaattttgattttatgcagc

SEQ ID NO: 74225 - DNA, 605 bp, Carica papaya
  Intron number 3 from transcript evm.model.supercontig_36.9 (locus evm.TU.supercontig_36.9) derived from phytozome v7 .0 (chr-ID supercontig_36; pos 81260 to 81864 reverse stra nd)
tctgtaacataaatgtaggtttcttttttttctgtgtcactgcatttttctttgtgcatagaagttggtgataacacccttctttgtgtagcaaatgcctaatgcttgcacaaacaatgcctttaaattataatttttcttatccaattaaaatcaaagtcaatgtgaatgatggaaattgttaggagagataattagttgaacaattaaattaaatttaaccttccaaaaagtatatgtaggtttaggggtttgcttattattgtcataggtattatgtgctatattggaggatgaaatttttcacatgaaaatggttactttgttatggtcaaattaggaggctacagctttagctatgtccatgggacccacaagaagaagaagaaaagttgctacttagatttatataggtttaggtttctacttaggcttaattaggaaataaaagtatccaagaatttgtaacaagaaaaaaaagaggttttaggatacctaggcattggcactatttaattgcttgattgcaaattatctgccaccgtcattccactatctgataattatatgatcatgttatctatttcagggtttaccattccttg

SEQ ID NO: 74226 - DNA, 980 bp, Carica papaya
  Intron number 2 from transcript evm.model.supercontig_27.8 0 (locus evm.TU.supercontig_27.80) derived from phytozome v7.0 (chr-ID supercontig_27; pos 913664 to 914643)
gtgcaatataaacgaggagactgtgaagagtacaggtatccccttctccatggcttgttacacgtgcatatactgtctgtatatatgtatacaagtgttaatatatatgtatctacaagctgggttattaaagaatttctcttattatctgaattgggtgttaccttacttgctacttaaaatgtgatgaggaattctgttatttattcttttttaattcatgtggttgaattattggcaatggaactcttataagttaagtttaaaagtcttactggaatattttattttcttgtagtgaattgataattaaaagaatcaatcttgatttcttctagctctgtttgacttgttttttctcaatatgatatatggattcttgttaatttaattagtaaaattaataagtttctaacaccaaaaagaaaaaaagactacatatatacctctgtcactcttatgtaggagatgagagaaaattaattaaattcttttgttttgaacaggtccaaatctgaaaccgtttacttagatgcatgtatgatgcctatatatcctatttcatgggttgtctttgaactatagaattcaagcttgaagactgccttgttgattttctgattgaatttgaaacttgaatgagtcagacctgcttttaagactcagaaactgagttaggaattcccagatccaattttctgcttccaattagccggacaagtcgtattctaggaattcaagtactgaagggtcttggtcatcaccaaaatgttcttaatttgagattattacataacagttttttagttatatctttctctttacattggtattgtcagaatcacatgatccaataagcctaaaaagaattatgttatatgggtagtatcggaatcacatgattcagaatctttggtcttaaatatattatgttccgccattaaacctcttcacttctctttaatttcaaagaacagcag

SEQ ID NO: 74227 - DNA, 500 bp, Carica papaya
  Intron number 2 from transcript evm.model.supercontig_53.1 32 (locus evm.TU.supercontig_53.132) derived from phytozom e v7.0 (chr-ID supercontig_53; pos 1120500 to 1120999 reve rse strand)
tggcagattcaattcaaaggtaagttctgcagcatcagttttatacttgacttccttgtcgttttctccttgaaggttcactcttgaaaaggtggaaacatatataaagaaaacacgaggtagttgtatgaccaaaaatgtgaagcctccttttgcatattcccagcattcatatgaaaattcaaaaaatttatgtccactagtgagttatattaggtttaaacttgtggggttactaaatacttagtgtgactgcattcttatcatttttaatgaaaaagtcgacacgttcttccctttccaagttgcacatatcaaactgccttaaatttgcaagaattcccatcttgcatttaatgtggaatcgactctcaacaggtccatgatgataggagatttatgcttcttaaaaatttccattagtgaagtattgagatagctataaacaaaagaatgttaatttgatttcaggcttggacaaattaatctgagagcagcga

SEQ ID NO: 74228 - DNA, 941 bp, Carica papaya
  Intron number 1 from transcript evm.model.supercontig_9.67 (locus evm.TU.supercontig_9.67) derived from phytozome v7 .0 (chr-ID supercontig_9; pos 341608 to 342548)
cagctctgggaagccaccggctctcgtgattttcttttcactatttctctcggctgttactttctgttcgattttagggaaaaaatgagttttgctttttgaggataaaaagacaaaagagatgttttcctcttttttaaacaataatctttccagattctgaatcaattgaaatatacatgttgattcttttggatttttcatgagtttgacctttttgagctatggttatctgatttttctttggaattctggcctatttgttggtttgatcactattcataatcgcctttggttataatatttagtgattttcttttctgttcattcctgtttttgatctccactttgaactgtttcaatttcactttaggatatcttatatgacttttttagtagccaagcaacttaggttttggcttggtgcttggaaagtaaatgttagcaactttagggagccaataattgaaggattggttgagtaattaaaatcttcaatcctctctctctctctctgagtagacaatcatttcatattaatatatgctaaaaagatttatttatacagtcaccaaaataggttttgctcaataatttcataaccgataatgatttaattaacacagacgtgatagggtgtaataatgaatattagaagtgtaattaaaattataaaatcccaattatcaatcactgaatagttggtacatttgtaggttcaagtcgagtttggctcctgcatgtgttttcgtttcgagattatctttattgtattataattagtgtatgtgtatgactttattcgaaaagaattataaaatccgaatttgaaacattgattgagaaacacaatgtaaaattcaccttagttcttagtttgaccttcctcaaatgtcatatgtgcagctttaattcctctaagtgagttctctgatcctgtt

SEQ ID NO: 74229 - DNA, 1043 bp, Carica papaya
  Intron number 2 from transcript evm.model.supercontig_409. 1 (locus evm.TU.supercontig_409.1) derived from phytozome v7.0 (chr-ID supercontig_409; pos 23838 to 24880 reverse s trand)
gagggccttcgcctacttttctggaaagtttacaagtaagtcgatacattcctacatcatctggatcacattaaagattgtgatgcacgagttcatgccttcaacttctcaaataatcctaagaaacttgggtcaaaactttctctcttatgttgaacatattttgggtttggttcaaattctaatttcatataatataagtatgtaaatttgaatgaaaatagtagtctacttgtaagtgattctatgtataattcaaattagatatttttgtgatttgcagttggaaatacaaaacaaacgaccgaaaaaatgttacattaatttactttagtatcaaatatctaatattttttaaatattaaatagttaaggtttagagattgattgagagtggaataagttttaatcagccgcaatgtcaggatagatgtttggttcaaatataataattacacaattggaatatgaaatctggagaaaaagttgaaatgagaacaatattataatttcatgttaaatttgagttaggtggatttgaatttctacctagtgagggaaaaaaataatctctgttgcattcattgtaggagttgaatcggctcagttgcaaattgaacatgaaattatatccaattctctatatcaagtaacgaagtgaaaaaatagattaggaattgaaccaaatttttcaatctagaattggttcaattgtgaattgaatatgaatttacatccaattctctatctcaagtaaccaaagtgaagaaatagaagaggaattgaaccgaacttactgttattgtcaatctaagttctgtctctcaagtgttttttggctagtttatttttatttatttttcatatgttttacctttattacttctttgctttttatgagattcagtaggggagttttgtattttttatttggatccctctagagattatgttttcaaaatttttgaattgtatggcaatttaagggtgttctttgacatgtcttctgctggagttatgtaggaagctggaagatatcctgg

SEQ ID NO: 74230 - DNA, 398 bp, Carica papaya
  Intron number 1 from transcript evm.model.supercontig_2293 .2 (locus evm.TU.supercontig_2293.2) derived from phytozom e v7.0 (chr-ID supercontig_2293; pos 6697 to 7094)
ctcgcggcaagtacgtcagagaagactatcttgtggtatgtttctttattttccgccttcagctcttccttttgattttttccccgggaaatgccatgaacttttttcttgttcgcagagtacccattaaatgtggtttgcgttatcctctacgttctacttattgctttttgtttttgtggtaaaaatgttgttttccgtgaaatttgtgagcattagtacagtgagtttgtccccagactgagaaaggaaaaattttgtttgggattctaagaggggctttggctattagctaatcgtctgttctgtttttctcctgaaatgtgaggttttaatacgtcttatgctgtttggtttgaccagaaaaagttgtcagcacaagaagtgcaggatctggt

SEQ ID NO: 74231 - DNA, 527 bp, Carica papaya
  Intron number 3 from transcript evm.model.supercontig_87.4 2 (locus evm.TU.supercontig_87.42) derived from phytozome v7.0 (chr-ID supercontig_87; pos 252712 to 253238 reverse strand)
attacttaagctacctgaagatttccattcaacaggtaagcttttccttatttacatttaatgaaaccgcatttgcctgcagctgaacacttaagtaagaaagaagaaaggtatcttggccagtctgattgtggatgctgcaagtagttgatgcatataaagatgccaatgattttgagaaaatcaaccctagtaaaggctagtgtgatttaacatctaaattgttctgtaatgttcttagtaactaaaaggaaactgcaggcctaaaaacaaaaaagaacaggggaaaagcactgtaaagcttttgaaatagcatacaatgtttctaaataagaagtaattcttagtgtgaggaatacactacttggaggtttgtagaagttaaaaggaatctgatgaatgttcacgtgaagctaaaaaaaggcaaatgtagctcatagtagaagcaatacttttttctctcttatctactttctgatgagccgtgagagaaaattctcaaggcttaaaaaatcatattgcaggaa

SEQ ID NO: 74232 - DNA, 408 bp, Carica papaya
  Intron number 1 from transcript evm.model.supercontig_3.32 9 (locus evm.TU.supercontig_3.329) derived from phytozome v7.0 (chr-ID supercontig_3; pos 2267448 to 2267855)
tccgcaagtgagcatcatttcttcttctgtatatatctcttttgtcgtgcatgcatatcagtacaagtgtttctttttactctccatgatgatggtttcttggataagtatgatttcaatatcgccttctgttggctttgttaagatatttgatctaaacttgggaaagcaaaaaccaggatttccaaattaatgcactttgtgggatttttctctttggaacatagaaataattagtaataagagatataatatactatgatgtggttgcttttacttttatttgaactttcttgcggagtaagaacacaacaatttcagggaaaatacgggtgatagtctttactattatgacttttgagtttttggtttacgtgtggatgtggtttctaaatggcagggaagttg

SEQ ID NO: 74233 - DNA, 414 bp, Carica papaya
  Intron number 3 from transcript evm.model.supercontig_46.7 9 (locus evm.TU.supercontig_46.79) derived from phytozome v7.0 (chr-ID supercontig_46; pos 749155 to 749568)
atactgggagtggtggtactgggtttgatttcagggtaaatctaaacttcgacttccacaactcaaaacatttattttttatggttgagcttttagggtagtttattgtctagtaatagatgaaaatctctttcttccactcttggatgctcatagcacaaattattgtgaagacaccattggaaaaaaattatctaaaatacaagcttataaaggcaaaccacattgagccatatgagttcactgaaggagaagttggcagtttccgtagatctttacattttttgatcatcttttatccttctgaaaatcaacatatttataattcgatgcttgtgttaaccaacagaaaagcataaatgtctttcattttttaacttacatattggggatggttgtggaaatgtaaggaac

SEQ ID NO: 74234 - DNA, 669 bp, Carica papaya
  Intron number 2 from transcript evm.model.supercontig_83.9 6 (locus evm.TU.supercontig_83.96) derived from phytozome v7.0 (chr-ID supercontig_83; pos 918288 to 918956 reverse strand)
aagaacaagttatttccatggttttgaaggaactaaattcttcctcaaattataacttctttttactaatttactcaaattattacttcttgttactaatttactttttatatcaccaaaaatatgattggacttttttgttttgtcctgttctgttattgttgtgaaagttctggtccagttctgcaatttggtagcaccaaacactacctacctaactaaatcttttgtgcagcaatgtttttatccatttgatatgtttttcttcttaatatacttgtactatgctccatctatcatgtgcatcttagcaatgtgaatgatgagtgtcatagccatgtgactgctgctgtactaataaggaacagaaataaagaaagggaacatgtcgattatgtagagccagtcaatttctaatgttctctcaagtgcactctgcacatgtgcacctttaggcttaatggtgtgtttttccttcaacagcttggttcatctttgttaaaggatagagacatgtttgcataacctggactcgttcgttattgaaggactttgttgataattgtagactggcaatttttaacatggttatggatttttctttacgagatctgagttttagctttgatttgacattataggtttggaggttcttaattgtcttcgcag

SEQ ID NO: 74235 - DNA, 519 bp, Carica papaya
  Intron number 1 from transcript evm.model.supercontig_6.31 0 (locus evm.TU.supercontig_6.310) derived from phytozome v7.0 (chr-ID supercontig_6; pos 2278082 to 2278600 reverse strand)
cttctccgcgatcttaaccttcttttttgcattaggttcgtttttttcttattctttttgattgttaaagaagattatatttggagtcctcaaaaactccaattttctcttcctgcaacgtttctttcgtctggttggtaatgatttggttcctccatgttattgcctttctgggcggcgtttgtttctcgatctgccgatgttatttgatcttttttctctcaataatctggattttggttctatagagagcatgaatttttgtttttctgtataatgaagagcgtaggttacatgtatgtttgcgacaaaagtattttgttgggtggcattgccattgatgtgaaggatttaagatatagacaaaatgatggctcatttttaacataggtcatgaaccctgagttgtttgtttccatagaaaatgtgttgcaaaaagacagtttgatttcacgcctgacaagtgtttgttgtttgtccccagtgggcactttgttaggggcattgacaggagcgtta

SEQ ID NO: 74236 - DNA, 497 bp, Carica papaya
  Intron number 3 from transcript evm.model.supercontig_42.1 18 (locus evm.TU.supercontig_42.118) derived from phytozom e v7.0 (chr-ID supercontig_42; pos 1066210 to 1066706)
tgaaacacgagcgtatcgaaacgactgttgcaaaggtttatgcttttctttatgtacatttcagggttttaactgggtttaaaccctttttgagaaatatatgttacctatttctgggattggaaattctactgttatggtttggcatggttgggactatcttagttcaaattaatttcggagattgagttctgtgttttaaatacttaatttcgggttttatatagttaagctgcaaattagtttcggtttctattttctttttagtctgcttgtgtaaaattaaatagactgttttgctcatcatatggcttttaacactcagtttccgttttggttatatggctgccgattgattcctctattattgttttgattttgttttctcttctcctttgatatgtattaactgataaaaggatgtactgaagatatatgcttgtttttctgtaatgttgcacgtgcaggcaaaagaaattcgaagacttgcagataat

SEQ ID NO: 74237 - DNA, 455 bp, Carica papaya
  Intron number 1 from transcript evm.model.supercontig_58.4 (locus evm.TU.supercontig_58.4) derived from phytozome v7 .0 (chr-ID supercontig_58; pos 21497 to 21951 reverse stra nd)
ttatttctatagatctggtaaaggatcttttacaggtttgtgattattatttatataatagatacatctcgttattatattgcattctcacattaactattcatatataaggtagaatattataaattttttattgatattatctcaaatattataattaacctctaatagaatacaacaatagtgatatgaaatctaataattaaactcgaatggaatagatagaaagaatgtttattattagtgaatatatttatatttgatctttcataaatttaattgctttttggagtttttttcttttcttacctagagaaacacattgtaattgtaaccaaaactaaattgtcatccattcttattaggggaaaataaaggtgagttaattaattacttgtatagattaaatttagttttcatatttgattgttggttacaggcacaccccaattcct

SEQ ID NO: 74238 - DNA, 981 bp, Carica papaya
  Intron number 1 from transcript evm.model.supercontig_152. 67 (locus evm.TU.supercontig_152.67) derived from phytozom e v7.0 (chr-ID supercontig_152; pos 703684 to 704664)
gaatcaccccgcaggacccaaaaccagtgagttgactcggtttattacgtcactcgcatatcgttatgctctagtacatgtcatttttctttttccgctttacatttctatgttgtgcaaatacctccaaatgatccatctatcttcagcgattttgaaaacaaaaatacccgtttggagattcagctcggtttgtccttagaatcgttgtttgtggattgccgtaaggttgtatttttgactttttgattctccgatttcggatttgtggcattgaattttatagtccaggtttctatgaaattattcaaatctcaaaatccttcatttttaatcaattaaagagataaaacattttagaaaaaaccatgatagtcaaagtgggtaagttgggttattttgtttgtttgtgttactgtttcggaaaattcggtttaaatgatttgatctttgattaaatctacgaatattttgtacgcttagttaattgcaggttattagcaagcaattgaatctattcggaaaaaatgctctttctaaaaggttaaagaaattatttttcaattagtattaggaagaaccaaacatgttctatcctacatgggcaattggcaattgggtagaataatcaccaaaatagtggaagttgtgataaagatttcaaatttttaaaaagttaaaattaagtgttgaagagtagtttattcaaggtttttatgatttcttgtttaaaagtatgatttctcactgaagattggtattgatctcattgttaacattctacaatgtgcttagttcatttctcgttaatttttattcaattcctagttttagtactcatacttggcttaatatgcataattgcaatgtaattcgtactgtgaattcttcggtgctgaaaactcagcttccatcttgaaaggaagggtgtaagtgtgatttcatttgtcatgcagttcacttttgggcaccgacatttaa

SEQ ID NO: 74239 - DNA, 419 bp, Carica papaya
  Intron number 2 from transcript evm.TU.contig_36967.1 (loc us evm.TU.contig_36967) derived from phytozome v7.0 (chr-I D contig_36967; pos 542 to 960)
ttaaatatttaattcgccatactcgtaggccagaggtaacaactgtgttttgtctttttggttcaattcctgttctattttctcacttaatatctaatttatttatttagaattgcgttataatgtttgaatcaattccatctagtttgaatttgttgaatatagatttctgatttctacctggttggaagaattaaaaattcattttcaaggcattcaaactagtagtggagttgattcaaagtttaaaattatgttgaagatggttgagtaataaagtcaaagaatattataggaattgaacgagaatttatccaaacattccttaaatatttttggatcttgtttctgcattatgcttttaattaattattcttataaatgattcacttaggtcggtgacaaatttagtagtagac

SEQ ID NO: 74240 - DNA, 615 bp, Carica papaya
  Intron number 1 from transcript evm.model.supercontig_845. 2 (locus evm.TU.supercontig_845.2) derived from phytozome v7.0 (chr-ID supercontig_845; pos 13714 to 14328)
gcttcttgaacgctttttagcttgtcgaccaacaggtttgtcttactaaatatttgattctaaacatttcaaagtttttcaagtctaaatcaaaatttcgattgaatcttttttgagtatttacaaatacaacaataaacacaatagaaataaattttagacgaacacatacaagaaaaaatagtttgaatcaaatatatgaccttttatagaaaagaaaatataataaccgttcagctaacatacagttgctaatcaaaattctatttttaattcgagggagaaatgataattttcaaacgtgaccgtggttctcttacatgtgcctatatatatatatatatatatatatatttaccatttattgtttagaactgttgggctttttcttcttccataagaagtggaagaaaaaattgtggtttggaactatatcttttcatgtacttctgatacaaagttattttatagaaagttacgtcatgattaatgtatgtattacttaatttttaattaataaatatatatattaatttaataaatgtatacgtagagtacatgctgatattgggttgaacaggttgtgcgaagaacaatagggtggtgattgtggct

SEQ ID NO: 74241 - DNA, 920 bp, Carica papaya
  Intron number 2 from transcript evm.model.supercontig_435. 1 (locus evm.TU.supercontig_435.1) derived from phytozome v7.0 (chr-ID supercontig_435; pos 8785 to 9704)
agagtaagtaggtatcactgtgctaaaagtacagtggttattctttcctgatacttaaaagtattagaaaagcctaatctctcaccaaaaaaaaaaaaaatatgtaagtttttccattagactacacagcctgctgcagatcgaaacaaggcaaccatgcagcaacgttcttttattagtttgattttcttaacagatagtctctaaacaccaacactgtagttatttcattttctatttattcatatcttagttataagatcatgtttgaatcaattccaattatgtcttgaacttcccgggagagaaatttataattcacactttggttagataggagtaagaaatccatgtccgggcaattcctactaggagtgaaattgattgaaacaaaaaaactctgatccaattcttcatactacgaatagtttaataataaaataaggaataggataaaattgaataaatgtaccaaacacgatgcatgtggtaacacaaacttctcattttaaccatttagtctagatttagtaaaagttttgtttttgcatttttaacaatggcttacaaggcaatcctaatcagcccaaaaattaaaggacatgtaaggtttcacattctagtatattttgatattaaagtgcaggatatgtctttagacttctcaacaaaaacaggatataggtcatagagctagtgaactgctatattgcattagggttgcaccctgatggttggcactggagttcttaagaaggtaaattaggcaagttagtgcatataaaatgccttgaattttttccaataactttagccttcaaattttttgtgttatgtgagtcatgtttagcatctcatgtacatctttactgaatctgttaagaacaatgaaacaatttgtcttttgttatcacagttgg

SEQ ID NO: 74242 - DNA, 646 bp, Carica papaya
  Intron number 1 from transcript evm.model.supercontig_29.1 01 (locus evm.TU.supercontig_29.101) derived from phytozom e v7.0 (chr-ID supercontig_29; pos 925461 to 926106 revers e strand)
cactttcgaccacccatattaaggctttgctcgtaagtctttctctagcataaaccaaattgattaaatatgaatgtctatatacgagtcaaaaagattgacggattactttaaacgtgtatttgggaaagaatataattttaactagatacaaattaaaaaataaaaatgaataaatgatcaaaagtttataaaatgcagtcaactaaaaatttaaaaagaataatatatataattaaataaaaataaaaattttatttttttaaaaaaaagataactaaacagtaattaaataatatgccttaattttaatatttaaaatttaaaactatttataaagcttcttatcatcattataatttttttttattattaattattaaaataattaaaattaacacggatgatttttgcttctagcgacttgcactcgcatggattttactgcgatacaaattctttacatatgtctacatcttaaaacatgaacacattgaagtaaataaaacaaaattacaatatatatatatatatatatatgaaaaaagatgatatctgaagattataatttcatgtcaaaacatttttaaatttaaccccaagaaagagattaaactgaatataacttgtgaaaatccaacaggat

SEQ ID NO: 74243 - DNA, 619 bp, Carica papaya
  Intron number 1 from transcript evm.model.supercontig_162. 39 (locus evm.TU.supercontig_162.39) derived from phytozom e v7.0 (chr-ID supercontig_162; pos 277362 to 277980)
ttctcaaattataagttaccatcttcatttctcaggtaatcttacttctcgtgaataatattcttttgatttctgtaatgtgtctggttgtgtgtttggctgcaagagaagaaaggaaaagggaaataaaatttggaaccgaagtgtatttggttttcccaggtttgtgagtaagctgatacagacgatgtcctgttgttttccgctgttaaatttaggagctaatgcttgttgttacatttttactactcgtagtattagtaatctgagctgaaatttattgctgtttaatacttttctgaagctctgtgggggagctgttgctgattgttttattgaatcgtaaggaaatgaaaaatccatatcaagtagaacagataactcattctaccttccgacggctagtttttctcttccaccctccccttatgtgtcttgagaacttgggcttgatatatttgataggttgagaatgaatcataaatgtgataacttcattgtttatttggaaaaactttgttgtagccatttgggcattttaattttttcacatctaacggtggcaatggtgttgaacctgccagatttcctaagagaattccacagaatagaggggtta

SEQ ID NO: 74244 - DNA, 621 bp, Carica papaya
  Intron number 1 from transcript evm.model.supercontig_26.2 60 (locus evm.TU.supercontig_26.260) derived from phytozom e v7.0 (chr-ID supercontig_26; pos 1784654 to 1785274 reve rse strand)
atactgagaatgtaagtgcttcaggtagcagctacttcatatttactaaattaatatgatgtcttaagtatatttagaggatcaaaattgatggctatgtgtttgtgtttgggaaatatcaagcattgtttgggaaatatggctacttcatatttactaaatttctctggattctgctgtccttgttgaaataaggtatcttttctgattgtgcatgcatgtggtggggggagggaaccttaattccattttatagcttttgccaaagttggcagcattcctcatcctggccggcttcacatgttgaaaatgtgagagaaaattatatgctctttagttttgacgttatcccttcgccattcatgttgattaacacaaacctttgattcattaatgttttttctcttatcatcatatttgcttcatttaataatgttttctttattcttgtcaacaaatttgctgaggtatttgttttcatgatgattatatttgctcatgaagcatgttttgaagaatttctggttatcatttccatacttgaacttttctttgaggtatccatgagcctcttcttgtgcttggcttacaaatgttttatctgaatttgttagtttaggc

SEQ ID NO: 74245 - DNA, 365 bp, Carica papaya
  Intron number 2 from transcript evm.model.supercontig_3.37 (locus evm.TU.supercontig_3.37) derived from phytozome v7 .0 (chr-ID supercontig_3; pos 222273 to 222637 reverse str and)
tggttttgaaaccagagtatcggatcactcctccggtatgatttgagtaattagattgtcggatttctagctttgatatggagaattatatactagttgttgttttgcaaattatcattattattattattatttatttatttatttattatggtattcaatcttttcttgagtagtaaagcaggtaatcaggccttgtatgagattttcaggcctatttttgcaggaaaagaagcgataattttccttttggttctgttttagtttatgttgtttattaggtttgtgcttattaccgctttgcacttataaaggcttgccattatgcagcctcagttgtcaccgctagtgggagatatcccgcg

SEQ ID NO: 74246 - DNA, 550 bp, Carica papaya
  Intron number 1 from transcript evm.model.supercontig_92.2 2 (locus evm.TU.supercontig_92.22) derived from phytozome v7.0 (chr-ID supercontig_92; pos 215005 to 215554)
ggatttgctcctgtggtgactattggtgaatgaattgcaatatccttcacttttttttttccattgtttatagagataattagtcttgagaagatttattaattgtattatattgtaatctaatcgtgattacacatcattttactgaaccagataagtatcagtaatgttttcaaaaaagaaaactttattgaaaaggcagttaaacttgagttttcttcttcatcttctctgaagtccattaatataatatactaatcatacacactacaatattttgttttttttttagtcagcatttgtcttagtgggggtggttcaggcggtatctaggggtgaagttcttggtcatggaatggacttcttttttcttggaaaatcaatggaaatatgcattacccaatttaatttatatcaatcttcacatttctccatattttatttctgggctgccatcttgcttcttttgaggttttctgcttttagtttctctatttttggactctgtttttcagtccagttcctctctgttctcctgtgtcagagataa

SEQ ID NO: 74247 - DNA, 587 bp, Carica papaya
  Intron number 1 from transcript evm.model.supercontig_82.5 (locus evm.TU.supercontig_82.5) derived from phytozome v7 .0 (chr-ID supercontig_82; pos 91860 to 92446)
gatcaaatgtgctttattaacacaatttcaactttcttggttacttaatagattttcttacggcatttttacatgatctgcttcctttcttagcttttgctagaaaaactgtgggtttgagtcatttaatataagattgaaacaattattctaataatttgggtgctggctatggagaactttttctcatgccttcttttgatgaggaagatctagcttccatagagttgtgacaggactgtgtgcagtcttagtcttatgtgtcgcctcctgttttaagacatcttcacctggcatggggaataatgattctatgtggtatcttcttccttcaacatataatgacgaccaaattctgttatcggtgtcttagctgtattctatgtttatctttgttttttgagttttgaagtatcattttcctgaagcattgatacttttaaggcttctttttctctgttctatggatcttgattttctctgatctctatgtatgtcatgatatcgttcctattagggcatttccttaatgcattttgttttcatatgtagcttcaagttgactgcggtttcaatcagaatctaaa

SEQ ID NO: 74248 - DNA, 403 bp, Carica papaya
  Intron number 2 from transcript evm.model.supercontig_27.2 39 (locus evm.TU.supercontig_27.239) derived from phytozom e v7.0 (chr-ID supercontig_27; pos 2188019 to 2188421 reve rse strand)
gaggaaagttgcaagagccttgaaaggatttgaaggtttcaattttgcttaacccctcttttcttttattaaaattcaaagctttaatctcttgcatcattagttgatgaacattttttatttgtcttggaaactgtgggggtctgtaaactgattattataaccatatagttacctatataaaaagattatatatgaggtgatgcctttgaaaagctaatgtttattcatattcatatctattttggggggaaggaaaaatgaatactttgtaatgaaacatgaatgaagtcttcaaacctcagtcctcacctaccatgaaaagaatgggattttgtttagttgattaattaattaagatatgtattaacttggcttgtttgatatttaacaggagttgaag

SEQ ID NO: 74249 - DNA, 744 bp, Carica papaya
  Intron number 1 from transcript evm.model.supercontig_14.4 2 (locus evm.TU.supercontig_14.42) derived from phytozome v7.0 (chr-ID supercontig_14; pos 467873 to 468616)
agtggcgcaaccacccatcattgtggtactctttttcttcttcttctctctatctctctgcaaagattgactatgttcataagtacaaaagatgcctttctttggaagagcagaaaccatccgctgaaaaaattcttcaaatcattgttgtatctgtgtgctttatctataagaaaattatcaacttttggggtgaagggactgtttggtttctttctattattgttgggccgaatttttttagggtgacgactttgttgaagcttcgatttttccttctgagatcgtctggggtgctccccagctgagaatttccttcttaacttgcaaaaagaaaaaaaagaaacttccgaagagaagcaagtcggttgtctttatttttggatatatgaagaacgtcatgtgtctaaataagtggtttaatcattcattaccatcaggaatttgattatgtcgtttcaggcagatgggataaattatttgaggtaggtaatatggctcattttagttaaaaagcaattaaagaaaaaagaacatggtgcctttaaggaaaacttccatttattgactaatcaccaaccattttggtgatcatatctagaaagtttgttctgcagtgcgaaacatattcatattaagggtttctaatgattacctggtttctgcatttgttacgattcctatcatggtttctcatatttctgtcttttaatctttttattctatacatagcagaaggtaaaa

SEQ ID NO: 74250 - DNA, 562 bp, Carica papaya
  Intron number 1 from transcript evm.model.supercontig_62.1 38 (locus evm.TU.supercontig_62.138) derived from phytozom e v7.0 (chr-ID supercontig_62; pos 867427 to 867988 revers e strand)
acccttttgaaggtcatcatcctcggcgacagcgggtaacctacctgttccactcttttctctttatctgtgtttaggaatttgagtttttggatgctagggttttccgtatgaatcgggcagatcttttgagatctcaatattccgatgtgtgtgaatacagctttttacatcagaatttagaagaatatgatttaatcagatatgattcagattaggtgactataggcgttatgttaattgtgttgactactcaagcctctggctacttcatttttgttagcctgattttaaatctacggagcaggtggttaattcgactctgtagtctaaggttaatatgcactgttttgactctcaaattgatggctgtttgagatttttttctaggtgcaattcatcagagaatgaaatgtccgtatgttgatataaattctgttatttctggaatcaagatatcgttgtattgttgtcattttatacttgtttgcatatgactatttaatgcggtgatcaatattattgaatttatgtgatttgcagggtggggaagacctctttg

SEQ ID NO: 74251 - DNA, 921 bp, Carica papaya
  Intron number 1 from transcript evm.model.supercontig_78.3 4 (locus evm.TU.supercontig_78.34) derived from phytozome v7.0 (chr-ID supercontig_78; pos 431899 to 432819 reverse strand)
gtagcgtctgggctcagagcgccaacttccctcaggttttctttttatcaactttctactccattttatctgcttttcttcttttacttgtattttttgatccttcctcgaatcaatcaacttcgtacgataatgattttgtttctgtccatcgctgacaccgcaatgtgattctcgaatgatcggatttttcttttacttttttttttttttttggttctccacaatgcgattcgattaggactgttatgttgaatcgctgttatttgccaagcgtaatagaacgaatgatgataatgacctgtgtgtttatgtcattgtacgttaaattttcatttcttttgaacgacttttctcttttcttaatcctagttttgagatttggtgtgtgcatcacgtgtctatggttttggatctgttgattatgtgtttgaatataatatgtattgcgaatagattaacgactccatcagcatagtgattaatattgctggtcatcgacttgtaactgatttttttggattttctgttcagaaatcaacacctaatggtcactgcaaattttgctttgatttattttggatttaatatgatagccaagcggcatgtttaaaacagtattaaattcaaacgtatttgttgaactgaggcatggttttctttgatgcatgcatgtcctcaatttaagctctgcatcagtaatcacaccatatgacttttctcctcgaatatcgatcccgtctaattgcacttttgtttgtgcaccttgtataagctttctgagatggtttggcacaggatggtccatttaattgggcattaattgctttccctatcaattaaatttccaaattcaaggatttctgacttgtatagctatatatttttttccagtgcaagcccggggagatcactgacatc

SEQ ID NO: 74252 - DNA, 455 bp, Carica papaya
  Intron number 2 from transcript evm.model.supercontig_152. 42 (locus evm.TU.supercontig_152.42) derived from phytozom e v7.0 (chr-ID supercontig_152; pos 333401 to 333855 rever se strand)
gttgtttgtcacaagtgatacaaacaaatgaagaattgagaaattttactgtttaatccgagaaagtcgatgtttttctaagtttattttgttaatttgttttattttcacccatttgactccataaacatctctacaattatcaagactgttcgtttttttctattaaaagaatcaaacttatttgacagcgatggtagttttaattttgatcattttaataattaaaaaaataatatcttttcgacgaacaagatgaattccgattcaaagaaatcgacctacgatcatgacgtgcgatagatatcttaaaatttgttgcttcaagacagtgattctcgcaagaatatgtgtgtgaatgttattcttttatagcgatcttacttaataaattccacaatataattattattaataaagtcggttacgtttgagcgcggaagcagtctatttaa

SEQ ID NO: 74253 - DNA, 705 bp, Carica papaya
  Intron number 1 from transcript evm.TU.contig_28922.1 (loc us evm.TU.contig_28922) derived from phytozome v7.0 (chr-I D contig_28922; pos 3025 to 3729 reverse strand)
tttaaacggccctttggttcttctcgtggagaatcgtaagtttctcccttccgtgtgtatgcgctcatctctttcgagttggttttgctttgcttttttccccaccttgaattcggtttctgtcgctgattttggtgcacatcactgtaattttttgaaatgctgttatttgttgttttcttcttggtgatcacgagtagaagcatagttgatcgtgttactagtcatgttctgtctcgtcaccttcaatttggtctgttaggttttatcaggaactcctgggtttgagtttgtgggggatttcttatttgtgtgacttgaattagccaatggcgtataaggtagtagtttcagaaatatgctagttatgtcatgcttgaagctgatttaaaatcttgtaaggaatcttatgataagttggttattttaatttggttttgtattgctctgtggacagcatttcttagatctttgttcagtttcgaactcaaacctcattgatgggtttgataaaaaatttctccattatttaaggtaatctggtttttgaaataggatatctttaaccttcttgatgtagaagctgaaggtaattcaggtttagatacatctcaaaaaggtttttgatgtcataaaagacctatgcataacgagaaaaattgtacattgtagtctccaattttatgagctttcctccctgcagtt

SEQ ID NO: 74254 - DNA, 747 bp, Carica papaya
  Intron number 2 from transcript evm.model.supercontig_3.20 3 (locus evm.TU.supercontig_3.203) derived from phytozome v7.0 (chr-ID supercontig_3; pos 1508379 to 1509125)
aattcgaagacacgtgttagatttcaagaagtcaggtatctttttaaagcatgacgttttgcttcaacggtacttggaaactatcaaaatgtatggcagaacaatatgggattttcctaataattttgggttttaagttgagttcgcttaaattcaattttataaaatgggacattaaaaaaatataaaggagatagaatctgaacaaaataatattttaattttaagtaaattttatgtctaacttaatttagactgtttgtgattcctgaccaacaagtagcaatataaatatattattgtgcaattgaattattaagagtcgatttaattatgtatgactagagatagtgctttcgtggaaagacatatattattatgaaattaaatatatgagcatcaaatatataaaatagttaaattgtgtataaaatagttaaatatatgagcatcaaagaaaattgacttaaaaccatatgttttgcttggcaacatgcatagagcgtgtcatttatcgtcttcttttaccaattttactgaagttatatcatttggaattgtgaggctcctttcattttatcttataagaatctgaaatgtctctatttcattctgttatgctcgcgagtctgcgggtggcattagatgttattttgtgttatgcactaaatgaatagcattgtagtttcttaaaacattatgaaatgtgcaggtaaattcatcgtcagctatcttcctgtttgtgga

SEQ ID NO: 74255 - DNA, 601 bp, Carica papaya
  Intron number 1 from transcript evm.model.supercontig_7.24 4 (locus evm.TU.supercontig_7.244) derived from phytozome v7.0 (chr-ID supercontig_7; pos 2388299 to 2388899 reverse strand)
agctttactctactctgccctggactgctcttgtagtctgttctctctcactcttaccttgcattaacattttcaattttgcctaattcgttcatcatgttcatttagtttttgttctatttttacttttagttctcgttttagttttgagtagcgtaaatacaaactgatttgctgattttgtttgagttatgtcaagtcatcattcaacacaatgaaatttcaagtttaatttctaatcatgtatgtcaagactgtaaggaaattacaagtagtaattgattggcaattgaaggagaaggagaaatgaaatcaagaaaatctaaatagttctctcgcttgctctccttttttttttttgcttgtttgttgattagaaatcgtgggtatgtttataggttaatgactgaaaaggggtttctacatgagtttattacaacgctatatttaatagttaatgggttttatttcagttaaacttctcatcttatttttactttttttcttggcgtgttaaaaaaggttttgcatatgaaattattcaaataagtaattggatttttgcttgatgtttttcccccttaaatttctgaaggatagg

SEQ ID NO: 74256 - DNA, 858 bp, Carica papaya
  Intron number 1 from transcript evm.model.supercontig_150. 18 (locus evm.TU.supercontig_150.18) derived from phytozom e v7.0 (chr-ID supercontig_150; pos 202177 to 203034 rever se strand)
ggaaggatcattgtttccatccacctattcattcggtaagcaaatattcttatttcttttttctgctcatctggtacggaatttgatctcagatcattgtctaacatgtacctagtcttatttctagaaaaatttgacggggttaagttgatttttaggcggttcttaaattccgtcagaaaagaataaagactcaacgagagtaaatagccaaagagagcttttgattttcttcattatgatcgctaatcagattcttgggttatgaattatgattgatttatctgcatacggggttttgtgactgatttatctgcatgtgtacttgattgtatcttatattctgagcctgggagtttgattttgtaagttacttcaaatgggcagttttccgcaaaactatatttgatggttcaatttactttcagtcttttaagttaatgaggtcctaaatcgaactattaattaaatgtcccatccctctgacaatcttttagtataatggaaaagaaacataaaaaagcttgtagggtggaggttgctttgcgtagattaaagatacgcggcttctagcctggtttttggaataaaactttttttttttaaattttgggtgaatgcgcaaggatcatattaatagaagttgcctatatctttggtttttgatttgtaaagaatcaatattatatataggtggtgcctccttcagtcttggtgcttatattaatagaagttgcctgtcccatccagaagaaaattgttcttcaaagttttattcttatttattttactgtttgtctttggtctcttcttctggtggtagacagagtatttcgtggtgattgctccacaaagcaa

SEQ ID NO: 74257 - DNA, 630 bp, Carica papaya
  Intron number 1 from transcript evm.model.supercontig_52.7 0 (locus evm.TU.supercontig_52.70) derived from phytozome v7.0 (chr-ID supercontig_52; pos 642310 to 642939)
cagtctctcttgctcaaaccagctacttctaattggtaagttcttctctggtgtgttccactttttatcttcttttttttggtaattcagttctgttgtgtttgattgctgagaaaaaaatttccctaagggaagaagaagtgatgggattacgacattttatctgttctttgaagttgagatattttctggctataggtcttttctttacatgggttttacttgtaattgcatttttgtgtgttgggaaaaattaagttatgaagtactactctaaatttgcttatgttgataatggcattgctctaaagctgaatatatgtctgttgtgtgtgtggtagttcaaagcttaaattttattgaatcattctgtgaggtgatatcaacccacccttttgaaccaattttagttttgaagctcgaattgggtctatgtttctcaagtttttgccaaacgatatacaaaaatcagttaaaagcacaaaactgagtatatgaacttgtgaagtgtgtccactcaagtgacctcttccctcatagctgtattttgcccgggcttgacatatggataggtctgatattattgtgcctgcaggtggctaggaatagttgggcagttccgtcctaaga

SEQ ID NO: 74258 - DNA, 629 bp, Carica papaya
  Intron number 1 from transcript evm.model.supercontig_4.57 (locus evm.TU.supercontig_4.57) derived from phytozome v7 .0 (chr-ID supercontig_4; pos 1431846 to 1432474 reverse s trand)
tgggaaaggaagagaagagaagcttgaagaggagggtgaactgagtcttcttgactagttatacatgggtactccgttcatatttgggttccctttcttgtgtcaggtctcttgtgatgaaaaaccaacaaaagatggggcatgttaaattcatcatgataagaataggtgttcacacccatttttgcatggttatggattttatggcttgcacagaattggaggagttatgatgattgttactcaccaactcagtatgtatgggacgcttttgtctattttatgagccaaggctcatggagattattctgacatgccttccctgaggttcatcggaattgggatgctagtatttggtccctcaaaggatgacatcttttcatatatgtacttcttttgcttctttttggattgtctttgatttttgtggaggtccttattctctgtgaatatattcttctattatgagtgggaccacatccaaattcaacctttttacttgtctgtttgatagagaaagtgttcctttaaaagaaaagggaaagaagtgtcatataaagacaattagtatatatggatacaaaaatgatggggtagccaaccgtccctttaccatacggtgtccttct

SEQ ID NO: 74259 - DNA, 852 bp, Carica papaya
  Intron number 2 from transcript evm.model.supercontig_3.68 (locus evm.TU.supercontig_3.68) derived from phytozome v7 .0 (chr-ID supercontig_3; pos 499601 to 500452)
cgtgggttaggagtgtatgtcctcatcttttttcttttttttttttgagaatttcgcctccctgagaagcaaggttctgttatcactgaaagaatcttgagttcatagcaaaggatttggatccatctgttctgaattgtaaacgaaacattacgtttactttcagtgtagttcctttccatcacatttcagtattcaactagttattggcacgttttgaaactcttttgaggattgagacaaggtgttctgttctgttatgttctttgcatccactcgttatgccaaccaaaacttatgctgaattttggtgaaaatttattggaaagtgtatagtttttttcttttaaaaatgctaaataccatatatttttcatatgatatttcatatttaaattttcttataaaatatttgttattgttttacattattatggtttattataatgtattaagatttttctatgttgatggaaaaacttctttgtaaacttatatggttagtaacgtatatttgaatatacacatactttttcataatttaacaatgttttttcattattttatggttttaatattttattgtaatcattgtacatattaatttagtaatatataacatctctttattgaattagtaattcaaaattaaaaaaaaaaacttaaatataccctaatttccaaattaatttttatatcaattaatattttttcagaaatactttgaatttattaattaatattattattgttattattattcgaaatagtaatatatatatctatataatccaagtcgtacttaatccaatttcagcagcccattttcagattaggtccaacttcggccca

SEQ ID NO: 74260 - DNA, 879 bp, Carica papaya
  Intron number 3 from transcript evm.model.supercontig_16.2 4 (locus evm.TU.supercontig_16.24) derived from phytozome v7.0 (chr-ID supercontig_16; pos 663666 to 664544 reverse strand)
cagttgcaattgcaataaaaagatctggttttaaggtttgtgttcatattcgatattttttaaatgactggatgctcgcaatttgtccttcgatttcttctacgtgttacatttgccgaccttttcttataatagtaagagggagtgactgcagaactatgagactgacaatgaagcaatgagcagatgtaactatttgcacctgatggatatgaagtgaattggtgaatcttagaattaaatctacttttagttttagtttgaatttgtgattatttttttagtacaatgtaatatatattttaatgttacacgagatagaagtcgaaagtaagtttgtaacatagttagggacttggctaactgccgggccaaggctgttgattgttgagggttgtgattaagccagtgaaaagttcactgggctaaaaaccaatggcatgaacaatggatatctggaagagtacaagttgtgctttaaatgtgtattatacctatgttttgattgttcaaccggtccatgaatttgtgagaatttcaaactagatgcctgtattcctgattgtttggtttggcaccaaggagatgctaattatgcgtttcaagattaatacaaatttgcaattttaacattggaagtttgcatatgaagatagtcaagactaaaattctcataatcatgcatttgtgcactgaaaaattcttatatagcattcttgcatatctcttggacttttcacaaagaagaaatgtgactatgactgcaaaaattgtagtttctattgactaatttcttaatttggtttttaaaacttttttcggttaattattttcttgatgacagattgtgttgctgcttcgacttgttccattgctccc

SEQ ID NO: 74261 - DNA, 751 bp, Carica papaya
  Intron number 2 from transcript evm.model.supercontig_50.1 04 (locus evm.TU.supercontig_50.104) derived from phytozom e v7.0 (chr-ID supercontig_50; pos 979868 to 980618)
ggagcaactcacttccactacctctgtgattggtaagtagtcttatttttattattattattattattatttttattttggagattgattgtaagtaagctatcactttctttacagaatcgatggtaagtaatcttcattctcacctgaatgttgtagtggataggacttagagatatgaatttatctagcatatcagtacttaaaaacttgtgtatttgaattttttaatatctttattgttatcttattacacgtacggcacatatattcctatgtaaactttcgaatgaaaagaggaaactccccttctctgaatctgttcattagtaccgtttctcaatcatatcctcttggccaataatggaaaaataaaggaaagtggttaatattatactttctcgaatgagatgatagaatgtcttagttttcctggggaaatcagacaaaggatttgcttggaacaaacaaaaaaattttgtaaagttcatttgtaaacctgtacttggtttaactagaaatttgtgaaaatcgtccttaaaatgatagaaactaatttgaatcattaatttttactatcttctaaaagatttgcatttcacttacgattaaactaagaacaaattgatatatgaattccataaaatatctgaggtcattccggacatagactaaaagagcgaaacactattgtgcataccagccatgttgccgcatattcattcaaattaaaatactggatgaacaggtt

SEQ ID NO: 74262 - DNA, 969 bp, Carica papaya
  Intron number 1 from transcript evm.model.supercontig_146. 27 (locus evm.TU.supercontig_146.27) derived from phytozom e v7.0 (chr-ID supercontig_146; pos 120468 to 121436 rever se strand)
catacggcttatctgcaaaacctgctgtccttaaggtacactcctttcttttttttatctttcccaatttcaattctgggattttggttttattttttttttatcggagttgctgctgtgaaatcgagcttggtttgtcttggatttatttattaattattttttaataattttcgtttcacccatgagtaaaaaagcagaactggtaaatgtttgaccaaagcttctttttataagatttttggcgctgagttttctatcaagtaatctgttttagttcaagcgttctgattttcttaaacatatgcgttccataactgtgttaacttttcttagacctgttgcttggaatctttcctgtagcaattggatatccatgtgtaaagccaactgtgctgcagattcttttaagctcttttggttactgagaaaactcttatacgttatcttcattcttttttaaccataaaaagtaatgatttgttcgaatcgcgggatgcatgtagggaaaccactgttcctaagcaaccttaagtgctaaaacctcttttattttgctcattctttggtttttcaggggcaattgaagtgctttcttacatatgtctgtcgaattatatctataactgggtgtgataagcttcttttatacatatatgtataatatacatatatttttcctttcctaagtctcttcattaggttagcatttatctcttgcgtgtttctatttcatttctttcacgtgtcatgtatttgaaaatgggtagtgggatcagtttatttgagtaagttgattttagcttattttgttctttctgaaaagttgttttgatttatttgcttgtttcttcacatgatgaattcatggctgaatctttcaagcttttgcagcgtatgctcatgttacatcaatttttttttgcattcttaggtcagaaactggtacttggattcgttccgtgacct

SEQ ID NO: 74263 - DNA, 543 bp, Carica papaya
  Intron number 1 from transcript evm.model.supercontig_30.1 64 (locus evm.TU.supercontig_30.164) derived from phytozom e v7.0 (chr-ID supercontig_30; pos 2108416 to 2108958 reve rse strand)
ttgggttgaacggggaacaggcagagatgatggtgccattcacatatcaaaactaccagaataatggattggtatggtccagtgtgtttaattacccctagaaatttagaattatgatatttgattttgaatttttttgggtgttattggggatgtactttaaataacaaattaaattccaccatagagatatgttgttagtttcttagtcgtcacagtcatcgtctaaatagttgtagtcatcataatagttgtagctgtcatcctcgcagacatagtcgttgggtcacatacattcatgtacttagattactttgtgttatgattttctttaaattaatcttcacctcaatattttaaattttctgtgctagtgctactcttcattctttaatttctcccttttcgcggcttgacttggctgtattactatttgttaaaatatatgcgtgcttaatataaatttatgctatcagaatgcccttttttcttctttcttttcttttttttatactcaattcagagagtacagaaacattgttg

SEQ ID NO: 74264 - DNA, 755 bp, Carica papaya
  Intron number 1 from transcript evm.model.supercontig_192. 6 (locus evm.TU.supercontig_192.6) derived from phytozome v7.0 (chr-ID supercontig_192; pos 53652 to 54406 reverse s trand)
cttcaggtaattttgtgattttttttttttcttctttcttcaaatttaagtttacattcttgttcttttccataagttattacttccatttttactttctccgtgcctactgatatatatatatatatatatatattatttgtatatttataacccatctcagtcgttgcatacagttcttcttccctgtgatgcctcctttttccttttacatttcaattggaattatggggacgatgatcgctaaacctgatatatcacccactcagtaaaaacagagatctagagataaaattattttcttggtgatttgtaaagttattaaactgcagatgcaaataaatgaatattgtccaaattacaagattatatgccaagtattcacccacatacacatagatatatacacagacaacctaatctgtgttgtatcacattttattattctattttgcacgtgagccccccaaaattattttgcttctttgtttttttgttttcttttccctttctttcaatttcattgatttttttttttttttctaatataataactaggattaactttagagcaatggtaataaattacaagtaaatattatttattttttaaaaaaaaaagttttaaagtcattaaatgatgtcaccctgatgtataccaaaaaaattgggccaataaatattgggccctggcaatcgttcaatgggcctaatttactgaattttacaggagttgccagagcaccagcggggag

SEQ ID NO: 74265 - DNA, 906 bp, Carica papaya
  Intron number 2 from transcript evm.model.supercontig_197. 4 (locus evm.TU.supercontig_197.4) derived from phytozome v7.0 (chr-ID supercontig_197; pos 189981 to 190886)
gagtttttccaagaccgagcaacatctccaagacggtatgtgaccattatttcaagattagacttggtatttctttgcccatgttggtgattatgttatttgattaatctggttgacaggggagagttgttttcattggttgcccttagttgtttttaccaagttgaatggacaggttagaaaaaattattatcttaggttacaagaggaaaccaagtaattttgtcaaatactagttgttatggtgctaatattaatgtactgaaagtaccatttggaaacaaatggaaaaaactgagaaataattcatttataacttggaaaaaagtcaacaatgaaacaaaaggactaccagtatgcagttattatgttttatacactatcaacaccctttttatttttctattttttctgtatatctggtgcctatgtaaaagctacattcactattatgattactattggtacattattgagaatttaagttgattattaagattcaaatccagatctttatattccgtctttaactttttcatttagtgaagaattacctttaattttctgtgagactgtttcatattttttgggtttctatctatttgttgcctttcaaggatctgtggagtgcttcctctgcttttgttgtataaggtataggttttccttaagctttatttcaagctctctgtgtccttcccaggttgggatcaaaggtggttgataaaagaaaatgctggctagtctaaaaaaattctcaagttctcttgcttttgcaataagaaaagccaccttttattcgcctcgatcttcttttactttatttgtaattgagctactcgtaacatgtttctattcttcatctatttagtttggtggtgggagggttatccaaccaggtgattc

SEQ ID NO: 74266 - DNA, 401 bp, Carica papaya
  Intron number 1 from transcript evm.model.supercontig_192. 23 (locus evm.TU.supercontig_192.23) derived from phytozom e v7.0 (chr-ID supercontig_192; pos 343208 to 343608)
tgcttttcatcattttgttgggtaagtcataaatcaaatgatccagttagaatgcatattgattgtgcattcacacccacaaactgtttacttttgacagcaacaagtataattttaaatattttgtgttacatatttttgcaagaaccgatttttcaaacatttctttagtttgtcccttgtgctttcttttctgcaaagaattgccttttatttctgaaatgtcattatgctatataattcgttctgatgttgattttagtcaaatagtaaagtagttgcaagatttgttcatttatgattatagatctcattaattctttttctttaccctctcttttgctttttatgttgtgatttgaacagcacgttgaagatcatcacttgtattcactgaacta

SEQ ID NO: 74267 - DNA, 695 bp, Carica papaya
  Intron number 2 from transcript evm.model.supercontig_192. 23 (locus evm.TU.supercontig_192.23) derived from phytozom e v7.0 (chr-ID supercontig_192; pos 343731 to 344425)
aactggtgaggagaagattcatttttaatctattatgattagacacaaataagcaatttgtactgcttttttaacttgcttattcatggatgatattaatttgttttcagatacattctatgccataaaatggtaagaggttagtacgttagagatttagataatgaagataaagtatcaccgtaatatgcaatctgctgggagcttgagtcccaaagttgtccatagtatttaggagatcatgaaacaaaaaggattatataactcagaagaggagatataggtagtgtatcagcacctggccaatggatgttacatgtcgtctaaactcttttttaggagtgaatatgcttttttgatatcttgcatcagtttcactagttcaggcttatgatatttaatagtggcattttaaatcatgaaacttcataatctagttggttcttcagatctacctggtcctacattctaataaagtccttacaatttttttgttctatctcttttactcttggaaacatgttcttgaattatgctatcaattcacttttccatcaactcacccattgcaggtcacatcttattcttttcttcctgatctttgcttctgcattttgttaaataattgttagaatataaagcttatccttctcttttggtccaggtcactcagttatctccttcagttctgaaag

SEQ ID NO: 74268 - DNA, 944 bp, Carica papaya
  Intron number 1 from transcript evm.model.supercontig_743. 4 (locus evm.TU.supercontig_743.4) derived from phytozome v7.0 (chr-ID supercontig_743; pos 23866 to 24809 reverse s trand)
aacttttccccgtcgtccgatctcgtgattactgtgtaaatcttctccccctcgctctctttctatcgctttctgttgatctttttcctctttccttcgttttctatttcttgtttgcttccgatgaactttacttagtgctatgatgctatcattcctctacaggtttgggattttctgagaaatgaattttgtctgcatgtttgtggatatatgaataaagatatactacaaacatatatgtttatatgatgaaaggggactatcaatcttgtcttcattttactttaattaggtctttgattaaatccagttaatctttgtttggcagagagagtttggtgtttgtattatgtgctaagtctattagctcgattgcgtgtgagagagcattttagaattcaaatgataagattgatcttttcccaattaggttatgtttggaatgaagaactaatttcttgtgaaatttatttgggaattgatacataatttagttttttagtaagattttgaaatttgttgtttcaatttcacttggaagtctcgttgaggtcaattttcatgctcctagttgagctgacaatagattttcaaatgaattgggaaaagaatagttcatttggtccggaaatagtgtctatgtttttttataattggttaccccactaattatccaacaatgattttgaatatttctggtaaaagaatattttcttctggagattttgatgttgttattgttaatgacaataatttggagactttcaacctaatggagctgtttacctgcttctgtatttctaatagtcttttgctttctttttttacagcatacttcaaatttgatgattggttttcaaatttttttcttgatggtttttgtatcatccaaccattttctttcaggtcgaatcagattcgcaaaggcaatcaacttcacg

SEQ ID NO: 74269 - DNA, 852 bp, Carica papaya
  Intron number 1 from transcript evm.model.supercontig_48.1 32 (locus evm.TU.supercontig_48.132) derived from phytozom e v7.0 (chr-ID supercontig_48; pos 788428 to 789279 revers e strand)
ttaattgcagcctccagctacacacaaacacggctgtaagtattttttttttttctaatggagaacttatgaaggcaaatatttattggtaaatgaagtagttttttggaaatgatgttaataagtatgccatgttttagtggctatcagcataaatggttttcgagtggaagattcatttctctaacaattaatttttatttcttttatttcaaaaaaaaaatttctgtaacaattaaatttgattttctttaatcttccgtgattcattcttttaaaactattgatgtttaattataggtgatatatgtttctttaaaaaaaaaaaatggaggtgctatagtgcccatgtaagaactctgcattctttcgtgcacttagtcaatctggtggagagttacttaaatgttgtaacgaaactgaatctagcattcctaggcttaagttgcaccatctggaatttaagtaatttatctgctttgacctttctcttattttatgtctctgtttgattgtctaatgagggtttctctgaatggtcagtcaaatgattgatgaactacaaaatactttggtggaatatttgattgaatttttctgttccacttcatttgcttatctgttttcctaatctacaagtcttttgctgtttgacttgcattgttcttcattcctatcttgttttccaactgcttttgagacctgcttggttctgcatattagttgaatctgcatcagcatgttcaccagacttctattgaccatactttgatcagcaacttcctcatcataaatatatttacagatgcactaagttgtgctcataggcaatcaatatgtgttttctgtagg

SEQ ID NO: 74270 - DNA, 430 bp, Carica papaya
  Intron number 3 from transcript evm.model.supercontig_370. 8 (locus evm.TU.supercontig_370.8) derived from phytozome v7.0 (chr-ID supercontig_370; pos 29379 to 29808 reverse s trand)
tccactacacatcctcaggttaatatatatatatatttttataattattccaataccatttacgtgcttaagttataagataaattttgacttatgtcagttttgattttctttctggcccttttcataagatgagtaggaagattttttctttgtcccactgttgttgcctgtttggagcgtgaagagttccacaaattcgtattttgttcttgatcagtgacttctagagattttaataaatgatataaactaaatctcacttaaaagttaaaacttgggattgttaagatgacatgtgtaatgccgttggaaagaaacataagtaccagcgttaccgttttgaaatgtctctttgccctaatcatttttggatatagagataactcagattctaccgagtttgactcaattctttttgtacgagcag

SEQ ID NO: 74271 - DNA, 653 bp, Carica papaya
  Intron number 1 from transcript evm.model.supercontig_79.3 3 (locus evm.TU.supercontig_79.33) derived from phytozome v7.0 (chr-ID supercontig_79; pos 618642 to 619294 reverse strand)
gaattgcaaacccacgggtttccatacacgaaaaggttccatgacttgccgtcaactttacttttaattgtatttcttatgttttggtgtttattatcaatcatacttgtagttgtcataccttggaattctggatatcgaggaatcatttttcaacaaactttttaactgtagctgattgacactgtatgagctttagatatatgtttgctgttgcatgttggcatatgttgttaatattattgaacctgtggtggatgttaaattaagtttttcttctttttgcttgtgtggttatctcatagatcgtttagtgtgaagttagttacaattttgaatattcttattcgtgaatagtggcataagaagctaatcaacataggaaaattttaaagtcttcgaattgtatttacaagctttgcagatttaacactttacttgtttgaggtgatgacaactaaatctcttcaaagacaagcctatgattttttttttatttcttttactttggatcaatttgaaaataagtagaacatcctgacatggaagttacaagttcaatggctaaaggcacttacatgcttatcttcttatcttaaaaaataaaggatttatcttctaacacttattggaaaatgttggtgcaggtgggt

SEQ ID NO: 74272 - DNA, 907 bp, Carica papaya
  Intron number 1 from transcript evm.model.supercontig_62.1 04 (locus evm.TU.supercontig_62.104) derived from phytozom e v7.0 (chr-ID supercontig_62; pos 666894 to 667800)
aaccaagagtacaccagtgagttctcttgattctttcacagctaaactacggatttgattggatgtgggaggagttatttgattaagtttattagttgactcgaactaccaggaattgcgatttgatagctgtttggtgtccgataaaatgaagaaacgatgcttgttgtagataagtttttttttaatttgagttgactaagtttgactgtttttgttgtttggttgcgaggaaaataatgagaaatggaattgcaattgaatggatatattttattttgggggagaagttcttcaatgtttggaactaaaatttgagaaaatgtgaaagatcagacttttggatttggtgctgttttgtttacagaaaaaagatataatccggggctgttaagtaggagactcattaaaatttgagtggatattagctctggattcttagagcatttatcgggactagttgcggaagatttaaaggtctttgattttcttgctactactcaaggaacgggcttttttccttccattagttacgagctcggatatcagatgcatatgttgcctatgatcgttaagtattttcaaaatttgctttggtaaatgattactttacctgttgcctccattacttgtgggaagcagttttttccgtgcctgatatcctagattggtgggtttttaattgctaactagtgcctgggttgtctagccaaacttttttcatttgtagggtggcagaacttttgactcgctttagcgcaaagtacaggtttattttgaatttactatattaaaagcctgttgccacttgcgaattgtaaattttttcttgcttgattggatttttacttagtttagctaatcattttttggaatgcaggtgatataataacaactttgaaagata

SEQ ID NO: 74273 - DNA, 506 bp, Carica papaya
  Intron number 1 from transcript evm.model.supercontig_30.4 5 (locus evm.TU.supercontig_30.45) derived from phytozome v7.0 (chr-ID supercontig_30; pos 662634 to 663139 reverse strand)
gctgctgatactcttgatcttcttaaggtattttgctcttatttctgtttggttgccgcggaaatgaatggaagtctaaggaaaatcgcgatcttatatttggattttcttttcctttcggaaaatttatttgactcggaaaatagagacattatttgtgcaattctgtctttgtttgaattcatgataacttcttgttccttttttgttgaactgctgcgtttctttttaagtgtttcgcgttatttcctgatttttttttcaattggtataatatatctcaaggcaaattcgtcaattgaactacgaactaggtagctgagaaatgatttcaaatatatcttctctattttgtttctttattccagcacttatcttggtaatggcgcggaaacttgagcctcgtatgaactacttactacttgctattctcagctctgacgccatactttaatttgttcttttgagaaggattgccaattatctgtgaggcaggttaatcctcg

SEQ ID NO: 74274 - DNA, 634 bp, Carica papaya
  Intron number 1 from transcript evm.model.supercontig_95.6 3 (locus evm.TU.supercontig_95.63) derived from phytozome v7.0 (chr-ID supercontig_95; pos 1178339 to 1178972 revers e strand)
cagcagcctgagcgaaagcggcctgctctggctaggtagttcttgtgtgtctttgttaaaactttgatgtttgtttctttatatgcattctttgtttatttaatcagttcaatttgagtaaaggagattatgactagttctgtgatttaactgatgcgaccgaaaaggaaataaagaaagttgtttaggtcaataaacttccgtttggtatcatgatcagtcactggaagttgaaaataatagtttatttgtgcaatacattttgcttctggggcaatggtcctaaatgcttgctccctggctcttggttaattctgccgatgatggttgccatggaaatgtttgttgtacctggcatatggtttcatctttgcccgttctcaaatttccatttactgttcttttctttttaattttcatttttgctttcttttgatgttatgataacaggccaatgatttattattccatgttgcaaattgtcaaattcagtgttagtttcctaataagtaattttgttagagctcaatgtaattaagtattggactgaactaaatgagtatgagcataagaatcttttgccaaaactgtgttttcagtgtcattgtagaagctctcaaggtggatagtttac

SEQ ID NO: 74275 - DNA, 575 bp, Carica papaya
  Intron number 1 from transcript evm.TU.contig_28125.3 (loc us evm.TU.contig_28125.3) derived from phytozome v7.0 (chr -ID contig_28125; pos 7016 to 7590)
actcccgttcaggttaattttacttctaattaactaattgatttcgttgaatccatatatgttcctgatctgttctgcgttcaattccttcgatttcaaaattttaacaaacctctccattaatttcctacttgttcttgattactttctgattttctggtttttgataaaagttcaaagaacaatttttcatatttatgttgaaaagtttactgagaaacgctaaatattttgttaaaatagaagaaattcattagtagttgttgctaaaaacttttaaatacataaatatatataatactaatacaattcttaacatttcaaatatatgaatatgaactataattgcgaagaaagactcagaagatttctattgaagtttaattcataaaacataacttataaaaatttagaaaacacatatttatgttcttaattttacataagattaaagttcttcaattattattttaaactctttaattaagtcttcaaattattatctctaacaatttaatctaaaaattgtttgaattacagtcgggttgttgtaagccgccaacgtcgtgcacata

SEQ ID NO: 74276 - DNA, 403 bp, Carica papaya
  Intron number 2 from transcript evm.model.supercontig_29.1 47 (locus evm.TU.supercontig_29.147) derived from phytozom e v7.0 (chr-ID supercontig_29; pos 1545762 to 1546164 reve rse strand)
tagctttcaaggtaccattatcaatttttcttttcaacatttgtaactttcaatcctgttttatttttcaaatcttcaattattcctctgtttggtttctgagaaaataaattagtataaataatataggaatccagaaaacatttaagtgattctgtttcatagggccgcatggcgcataacggacgtgaacaatttagtcgttctttaatcaaatgatatcaatataagattcgaatatcaaattcaaaatgtagattcgaatatcatcatttccccagtaaccattgaagggtaaaatgtattttgcatatttaaattctgtttatttgggattttttttaaaatctttagttgattgcattcaggtgaaaacaacaaatccaaagaagtattgcgttcg

SEQ ID NO: 74277 - DNA, 1023 bp, Carica papaya
  Intron number 2 from transcript evm.model.supercontig_187. 7 (locus evm.TU.supercontig_187.7) derived from phytozome v7.0 (chr-ID supercontig_187; pos 37335 to 38357)
gttcccccgagcagttcctttctcaggtatataacacatctctatgtccattgcttcttgttttcaatgtgttttcccaaggatttaagcataggtctatggattacccataattataaggtaatatttggaataaattcataaatttattttatatttatacttgtatcaactaataaatcatataaattcttactattttcgacattcaggttagtcttgacatgtagaattaacatataatttcattgtttaatctcacttctctggaaggtgagaattcatattcctgtgaattaaagtgggaattgaatatttgagttcatggcgaaagatgaaatgaaacataaatgtgtactaaatcaaatatcgcatgtgatattaacattagagagaaaattaagtgggaaaaaatgaaaattgaaccaaatgcaagacaaaaaccaagttaataaaaaatagctttatttattgttaacacttcttttcatccatttattgcaagcaaattatatgatttaaaaaatttgatagtattgtttgttttttgactaaatggttgatattttttttatcttttataaaaatttgtgtatttaaatcggattgtatgttgttgtgtgttcttattaaaaaattgtgatatacttgaacgtgtatgtatcatctaattaataaattttataaatttttactaagaaaaaagattcaacggcaaatattgagaaaataaattgaaaaaaagagtttaaaagactttgtgtattttaaatgcataataataaataaagtgtgagtaaattagtaactacttgttagtggcgagatttgagaaaccaaggatatcttggctctaacatcatagttactgttttaagacagtttatatacacatatacatgtgtacattatatatacacatacatatacatatacatatacatgttagtaggcatgacattaagctgactgatctgcttctctgcaggtggacttcttactggggaaacagtcattttttgg

SEQ ID NO: 74278 - DNA, 1022 bp, Carica papaya
  Intron number 1 from transcript evm.model.supercontig_84.4 0 (locus evm.TU.supercontig_84.40) derived from phytozome v7.0 (chr-ID supercontig_84; pos 372029 to 373050)
taccagtgctgcagcagttttaagcttaattaaaggtaatgttttttggatgttgtaaccaaagcttttacatttagttcaagaggattaatgtttatgtcctgctctctcaccatttatcgacttcctctaaagctataaatataccttacacattataaggagtgagaaatgttaaactatttgttattaggatagttcatcttattatgatgtaaatgtcaattaaaattttgcttatgttagtagattctaactggactagtctatattggcatcttatgctcctctaagcaaaatcctcttattagtagatttaagaatgaccaaatccttctcatcttgaatctctaatgcactagttaaagcatcccaaatattttgttaagaattgtctgaaccaaaagaaacacaatagaggtgtttgttttgacttatttttatgtcaaaccgatataaataagtttcatgggttttttagggaactgttgccttatgcttataaactaaaaagtaagttcccaagaagtactttcttctgtaaactaaatgtaaaagctaatatttctattataatttttttctgaaatgcccctattataaattatcaaatttttatttgtgttttgtttttattcattttcataaccttttagcttataaacatcttttaccaaagaatcagtgttcatgtagaggttatgattaaaataaaaatgcactaaattaaacatattgtttacttttttttcaagagcttatttgcttcattgccctataagcatggcctaattataaaataaaagtaaattatttaaaccaacagcccaatatatgtcaaggtgatcgtgattgaatatatttccaaacatatgatctcttgtttgtttggagaaaggtccttaatttttttttaacaaaacaactattaatctagttttttgtgtctttttttagcgaatatataataataggatctattttaatctcttctaatgatgcaggagcacataccttcccga

SEQ ID NO: 74279 - DNA, 358 bp, Carica papaya
  Intron number 1 from transcript evm.model.supercontig_65.7 (locus evm.TU.supercontig_65.7) derived from phytozome v7 .0 (chr-ID supercontig_65; pos 166911 to 167268 reverse st rand)
ccgacctgcttgtacgctcttttcctccttttcctcttcgagcaatacgttatttttgatatttatatggttgaatctcgatacatgaagttactaccagtagcgattttctggttctctgccttgttatgatttcatgttatgttttgtgttgaatctttatgaactttattctgttcgcgctgaatttatttgctttgataaatggtgatcggctttgaacttggttgcatgtaaatattcttgtggaatttttagggttcatcgcttttttttagatcctcttttagttttttatgcatgctggtttagtcactgaactgttaatgaaatgcagtttttcgaactggtgctgcaa

SEQ ID NO: 74280 - DNA, 827 bp, Carica papaya
  Intron number 2 from transcript evm.model.supercontig_49.5 7 (locus evm.TU.supercontig_49.57) derived from phytozome v7.0 (chr-ID supercontig_49; pos 406913 to 407739)
aggtattgcatatacatttgcaaaatccttttttttaaaaaaagaaaattacgtaagttgttgcaactaaggaatacattaaaaaactgttcaagggagctattgtaaatttgatttcaactgctgaacataatttgtcttgctgtattgcttttattgtagaaaaaggttgcttagtttagttagcatggcagtggaagtttcctaacaaatattgagagagtgatgtctgtaggatgatatttttctcaaatgctcttctgtatagagagaggaataagggagtatttgatggcactgtatctaatgttgctagcattgtttcattctgtaagaattttgtttgaaattcactaccctcgatgaaatctcatgggaatgctccctcatttaggctgagggccttatgcaatttcttatttttctatttgtatagcttttttatatgggttgcaaccccgatgattttaaatgttatcttttcattttcctctagaaaaatatgttttatctcgagaaacttaaattaaccaatcatacacaagaaaagaaaaagaaattcatagatttttgtgtcaaatagtgctgagtttattttttgtttacatccgatgacaacatgttgtggaaaatagtcgtcaaccaaaaaggatgcaatttcatttcagctatttctatgcatgactccatatttagtgttactttctagcaagagataataatagccgagtaaattcccaatgacagttgacaagaaaaagtgtggcgcaagtgcaagtgcaagtctttacattcaattttgcaggctgtgacgaatcttttaaata

SEQ ID NO: 74281 - DNA, 735 bp, Carica papaya
  Intron number 2 from transcript evm.model.supercontig_71.2 6 (locus evm.TU.supercontig_71.26) derived from phytozome v7.0 (chr-ID supercontig_71; pos 378372 to 379106)
ccaggtacagttgcatatttcttaatctattttttttgtttttcctgttgactgaaataaatatccttagtctagttttttttgtattaattttttctctccttaccatatggtaaattcttatttgaggcagtgcaggactttagggggattacataggccaatcagatcttcatacttttatttaaaaaaaaagtaaaaaaacataagccaatcagatacatagtttttcagcttctttgtctccacaatatagttggcatctcaccttaatctgaacaaattattaacaattaatttcttgttccgttggtgtgtattgagataccattttttgttccgttcgtctgtatcgagataaaatttcttggctgcatgtccatttgtttcggagaagttggaatacttgagatgtagacacagtatttaactgaaaaaaagttatattgtatgtttgagttccattgagaaggagctcaaaatgagatgtagacacggtatttaactgaaaaaaagttatattgtatgtttgagttccatcgagaaggagctcaaaatgtttatgtatgcccatgtttgtgtaatttgctcttcttgaggacttaatcttcttaatagtagtgtttgcatggagcttcccacactttctctttatgtgcattagtgtaaattattgttgctaactttggtaattctgcaggctaggcatcaaaaagttggagagaaacctcttct

SEQ ID NO: 74282 - DNA, 773 bp, Carica papaya
  Intron number 1 from transcript evm.model.supercontig_15.2 5 (locus evm.TU.supercontig_15.25) derived from phytozome v7.0 (chr-ID supercontig_15; pos 444545 to 445317 reverse strand)
gaataaggttatgatgttctaggacaacactgataagtggatcacggatgctgagggccttaagtagatggcctttgacttctttcgtaatctgtatacggacgaccattaggggggcaaagcctcacgacgaggggtagattcctagtcttgtcgttatatatgcttattatttttcgtgctcctatcaccagtgccaatatacgcacgattctttttgatatgtaagggcccaaggacggatgggctccatgcgaccttcttttaacatcactaggaccttgttgaagagtctgtatgcgagatgatgaagagtatttttcacaatgacgacttggatagaggcctcaattgcacattaattaccttaatccccaaaatggctaaacccacgaacattaaagaattctaaccaattagccttctaaacattgtttataagattatcaccaaaatcattgccaacaagcttaagggtatcatgtctaggttaatcaatgaaaaccaagctagttttgttgaggggcgtagtattttttataacatcatcattgctcaggaggtcatccattccataaggcagaagaaaggccataatggttggatggctatcaaagttgaccttgaaaataaatgtcataggattaataagatgaagactcgtattttcttttcccataatgtggccacaggaagaaacgcaatattagtgctgagtttggtttccaaacctcttagaatcttgataagtatttgggggtccctcttctcca

SEQ ID NO: 74283 - DNA, 856 bp, Carica papaya
  Intron number 2 from transcript evm.model.supercontig_169. 52 (locus evm.TU.supercontig_169.52) derived from phytozom e v7.0 (chr-ID supercontig_169; pos 569226 to 570081)
agggtctgctctctttctctctaaacattaagaaagtagatgactttgattttgttaaaatggctaatttgatgaaagatttcagtttttccttttttgttttctctccatcattctgtttttcttttgttattcttcttttcttgtaatatgcctgtttattgtttgatagtattcccaagtgtgtaagaaactttgaatcaaaattctacaagtaatgatcaaagtgaattgggtttattcgctttcttactgcaaatcttcttcttcctcgtcatctttatcttaaacttgtttcaagttggttttatagagtaaaatcaatacatattgtcaagaaactctgaatcaaagttcttcaagtaatgatcaaattgagttgggtttatttgtattcttacggcaaaacttcttcctcttccttttgatcttaaactttcaaggtttctacaagtaatgatcaaattgagttgggttttttttgctttcttactgcaaaacttattcttccccttcctttttatcttaaacttgcaaggtttctacaagtaacaatcaaactgagttgggtttgtttactttcttactgcaaaacttcttcttcctcttcctctttatcttaaagttccaaagtttctacaagtaatgatcaaaatgagtcgggtttatttacttccttactgcaaaacttcttcttcctcttcctcttaatcttaaactttaaaagtttctacaagtaatgatcaaagtgagttgggtttattactttcttactgcaaaatttcttcctcctcttcctctttatcttaaacttgtttcaggttggttttgtagagtcaaatcaatacatattctt

SEQ ID NO: 74284 - DNA, 690 bp, Carica papaya
  Intron number 1 from transcript evm.model.supercontig_16.3 4 (locus evm.TU.supercontig_16.34) derived from phytozome v7.0 (chr-ID supercontig_16; pos 776459 to 777148 reverse strand)
cctccgttgcttgttcttgctcttctctctgataggttcgtgttttttgattttgattttctttttgtggtgtctgagatgtttatgccggtgtttgttgggagaactgtcacaatttgttttgaagtattttgctttcttggttttatgttagctgttggattttctacaaattgcgtttttgaatattttgattttggaaaactcttaattgtgatttcgagattgatgtgaggagctgtttctttttctcactgaaacctattcttctgttttattaattttttttactgtttggcatctgagatattccgtttgtttgtttgtttgttttttttttcttttaaaattttgatgttcttcatttcatttgatcgaaataaagaagcaaaacagagaaaggtaagatggacttattagattgggttttgtcgtaagggtccttgatgttgctctctagtgttcttgagtttaattcctctacgatgttttaagtcttgatggccagtgtgatctgatgttattctctagtgttttggaccttcggactctctataccaccttttgatctgtaaagtactattagtattatcgatttaagtgtaaatataggcttgcttgttaatgtctgaccatggcatcatcatttttgcagagtcattacgtgtagacgagttcgtccgggagcat

SEQ ID NO: 74285 - DNA, 732 bp, Carica papaya
  Intron number 1 from transcript evm.model.supercontig_608. 2 (locus evm.TU.supercontig_608.2) derived from phytozome v7.0 (chr-ID supercontig_608; pos 15961 to 16692 reverse s trand)
acactcaggtatggaacatctatatcctctatttggacatgtatatgcctacataataggacttggatataggtgggagattttgatttttaaggttgcatggaccttgtatgtttgtttcaagtgagttcttgttgaaatgattttcttaaactggtgctgtttctaagtgagatcgaagacttttaatgatcttgtaggctgtgttcggaacaaatacaaaatcctgtgaaatccatatgcaaatttaattgaattggaagatgatgaaagtactacataaaataataaaaaccgagctcatatgaaattgaaacaatacatccttgtataatttacacattctcctagttgaaatttttgtggatttgcaaatgagttctacctcatttctagatttgttccaagtatgattgttgtaactttttcatttggttatgccatattcctttctcatgtagtttttctggagtatacctagagctgggagaggtgttaaggaaggttacttgtttgtgatggtatttctagtgtggttgctacataataggatcaagccagtgtttggcatccttttaatttctacttcaccagaaaaagaaatattaattcatcttctctctttctatctcatgctcactcgtaaatgctatttcatgtacctgacgttaaatcacgttggctttaactcgtgcagattaatatctggagctattctggtcggaagctttt

SEQ ID NO: 74286 - DNA, 538 bp, Carica papaya
  Intron number 1 from transcript evm.model.supercontig_53.1 65 (locus evm.TU.supercontig_53.165) derived from phytozom e v7.0 (chr-ID supercontig_53; pos 1341618 to 1342155)
gacctgcacaggtgtgcctataactaattattatggctggttcttgtgtgttaacctcttgtttggttgcagggaggaattcagtaactccaggcaactcctctctcttcatgcaataaattttgatattattgttttggtagtgataaaaaattcacttgattttaactgagattttatatgccaagagcatttgtcaattgaagaacaaaatatttgtttttatgtagtagagtcagtagtttctgcttcttctgatatgaagcaacgaatgaagagaaaagaagagtccaactccatattttatgtatactgctgttataatgacattgcaacgattctctatctttgagtttaattctcgtcaactggtaacttaacaatttgttttttttttctgtaaaaataatttagatatttaattctttcccattcccaatatttgttgtcaagcaaacagcagtcttgtttagttctgacagctagaaacttacgacaaatttatttattttcttacttttgttttggatggagaagg

SEQ ID NO: 74287 - DNA, 533 bp, Carica papaya
  Intron number 1 from transcript evm.model.supercontig_97.5 0 (locus evm.TU.supercontig_97.50) derived from phytozome v7.0 (chr-ID supercontig_97; pos 304483 to 305015 reverse strand)
agaaagaaaccgattccacatcggagactctctccgtaagtttttcttccactgtttcttaattcttctctctctgttaactacaacacaagttcttataaacttatttaataccatatttatagttttaaattttgatatagtggagatctgcaatacctgtataaaaaattgtaactactaaaattttggacagatttttattttgtgcatcagacaaaatatagtataaatattttaatgtatcattgtaagcgatatatacaaagatttctctcaaaatcctcaccaaaatgtcaagatctgcgttttcccggcgcttagaactgccgagaaagacttactgatggttttctgattcaaaaacggtgcatcatgtgtgtgtgtataaatatatgtatatgggtccttaagaaccaattcctagaaatcacataagtctttttcccattgattcgaactagattttgaattcaagttaaaactgcgtgcatacagtattcgtctacccagaaggccaagactcagttctc

SEQ ID NO: 74288 - DNA, 611 bp, Carica papaya
  Intron number 2 from transcript evm.TU.contig_30743.1 (loc us evm.TU.contig_30743.1) derived from phytozome v7.0 (chr -ID contig_30743; pos 1843 to 2453)
gtggaggtttgttgattcgattttattctctttcgggttttctccctttcccacagttgagtccatcacgcacatgtaaaggtactactttacttgtgctcaagttcccaatttcttaatactatagaatttacttgcacaaatgccttgattaaaaaccttggagctcttggattgtgatttttcttttttccctttgaagtgatagcttatgcttggaggatcttcatcaaattaatattcttcaagttagcctagattttgaggaaaccgaaaatttatgcaaagtttatttttgaaattacatttgtggtaactaggaaatgcaataaaaattagatttacatgaaactccaaatggaattagaataacacaatctaaattccatcaatggaatttggagtactgttcccaattcccatagaattctatataatttttattgtaatacaacttacggattctccactcaaaaacaaagtgtgcatttgtaaatggatttttttttatcatttatggagttattccaaacatagcattttcaaacttcgatgcagttagtttttatgatttttatatctttttgctgtagagcctgacaaatctatcc

SEQ ID NO: 74289 - DNA, 1018 bp, Carica papaya
  Intron number 2 from transcript evm.model.supercontig_37.7 (locus evm.TU.supercontig_37.7) derived from phytozome v7 .0 (chr-ID supercontig_37; pos 39061 to 40078)
ggaaagtcaatcatctcctaagaaggtaactaaagagatttgagatgttgttcgactgaaggttgtgatgcagcccaactgtgtgaggtcaaagttaaaactagtatgatggaaaagagaaagagaaggaagtattgagaagatgcctagtcaaggaatttgagatagaaggaactgagagaaaaattaacatgtaaacctgtctccacccaaattgagcaaaatcacaaactatgaaagacaaatgaagatctagatgtagatagagagatctatcagagacttgtaggaaatttatatatcttgttcgtataaaactagacattgcatgtgccatgagcatggttagccaatttgtgcataatcaaagagaggctcgtcttcatgcagtttacaggatactatattacctaaatgctaatcatggaaaaggaattccagttaaaaggaacaccagattagtccttgaggcatacattgatgcaacttatgcaggcttactagttgatagatgctattatgggttattatatttttcttgaaggcaattctgtgatctagtggagtaagaaacctaatttagtcagtccatcaaatgaaaaggtaaagttcaaggctttgccagagggagtttgtgagttattattgtccaagattatttttgaagaattaaggatcctaagagaaaagccaatgaaattatttgcaaaaacaagtctgccattggctaacttgtgtaacatgatagaacaaaacatattagaatggatagtcatttcataaaggaaaagctagattgttatttgatttgtatttcatatgtctcggctattggtcaacttgcaaatgtaatggttctacagcatcaaccaaatgggatttttcataaaggaaaagaatcaaaagaataggccaaatgggctttttcttattctgcatcaaccaagttttcagtttaattggggttaggtaatggttcaactgcttttagagagcatttgtgaacttgaagaccctt

SEQ ID NO: 74290 - DNA, 460 bp, Carica papaya
  Intron number 1 from transcript evm.model.supercontig_179. 30 (locus evm.TU.supercontig_179.30) derived from phytozom e v7.0 (chr-ID supercontig_179; pos 206006 to 206465)
ttggatctcaccctctcgaatctgcttaccaaactgtattctctctctctctctctctatatatatatatatatacatgtgtatctacagcggcaccgttcgttctgtttggttattggagaagtgcgaggagatgaggcagaaaataactttaggatttttgttactgttttagttgaatcctcgccatttctccttccttttggataattagaggccataaacgcaaaaatccagggtttagtcggatattgtctttggtttcttcttgtattgctgggaatttttcgtacgaccttagcctattatttttctttttgctttaagctttcagctttcttggcaattaaacttagggtttctgttttttttcccatatgttaatatgtgcacatatatgtatgaatactatttttcaattcttttctggggtttttaggcaagagcaacacaagaagag

SEQ ID NO: 74291 - DNA, 884 bp, Carica papaya
  Intron number 2 from transcript evm.model.supercontig_36.3 4 (locus evm.TU.supercontig_36.34) derived from phytozome v7.0 (chr-ID supercontig_36; pos 300809 to 301692)
ttaccatttcaggtatatttctctaaagttcgatgctctttctttacgcattgctttggagttagaactctgaatctcgcgcattatctcgtgatttgattggtttcttatgtgaattactgttttttgctgatggggattagtaacctacagctgaattttctgacgggaacttttgtttggtttctttgaactttcggcttatccgtcttttgttttctcctgttactccacatgatcgaattctgcttttgggttgttcttggttgataaccagctgcgattagccagcttcttatttcaagtcttcttgtattctttaaaaaatcgtggtttttatggagttttttggtcgacgaaaatatcttcttttctattggattgaatgtttgatttaattgattgtttgaagtggtatctactatttctcaactgttcattgttaatccaataataaatattgttgtttctttgaaatcagtcgctggaatactcatttatacataagaattctatggtttgctttatgttaatggtttcttgaaactcaatttatccagcttttcttgaattttacaagaattcgtgatgaataggccaggcctccctccattaatttcaaagacataatgagaaatgggttcttgaatttcataaggtgcaatcagttctattgcattatggtcgtatctgatgaatctatactttcattattttatctatttgattcctgctttacttcacacattcttcctttatcttttgaattaggacacaggcggtgtgtataatataatagtttttgggttaggtaaaaaaaattgttccttcataaaggaacctaataattgatgtttaagtttgatttttcttttggggtagaa

SEQ ID NO: 74292 - DNA, 638 bp, Carica papaya
  Intron number 3 from transcript evm.model.supercontig_37.1 59 (locus evm.TU.supercontig_37.159) derived from phytozom e v7.0 (chr-ID supercontig_37; pos 1308802 to 1309439 reve rse strand)
cgtatgccgtaattttcatttcctatttatttctttggtttacccttgtgtttggcatgttaccttcacagcctgtttaggcggcaattacaagtatggtttaatcattttgattctccagtctgtgtaggttgcaattacaagtatggtttaatcatgttgtctgttttatgattaaagggtttttggctatgaaagattaagcaatttgttacccttctgttgagggttagcaggaatttgcttctcgagtctattaacaaaagatacggttgttgacagcattgactatcttagttttggtgctggagtagtattaagtaattaactattgatgacattggcaaatgagtgctgtcccatctgttagaaatttgtttttaccacccatgtggcacattgaaacaagtaccggtgctgtcttgaactcaaaaaggtaagaactataaggtttttggtttgaaacattttggtttttcagttaaacagatatgccttgcaaatttcagcagttcttttattcgtgtcttcagaaggcaatagaaaatcaaagtccgttcattgtcagtttttttatattgacatgcaaataactgtctatacacaaaatttcccccctcatttttgtaggtcttgac

SEQ ID NO: 74293 - DNA, 698 bp, Carica papaya
  Intron number 1 from transcript evm.model.supercontig_69.6 3 (locus evm.TU.supercontig_69.63) derived from phytozome v7.0 (chr-ID supercontig_69; pos 751120 to 751817 reverse strand)
aggaactttgcctcctacaaaaactaccgagacaggtatggtttttttcccgaaatcttttgacctatttgagtctttggttgccaagaataggggagaagaataattttgagattaactaaatacttagttcaaattttgagttggtggaagctaagttatcacgcacctatgctagattggagtttgattcagttggaaattagagccctatgttctacaattttgattggcagccccgtattcaaaattttgaagcgaaaaacggtgatcattgaggaagttttaggccttttaagtaactgatgtcgtgattattcggtagtaaaccatcttaaatttgtgggttttcattaaagcgtcgagtaatacaatttccgaaaatgattaaaattctctgttaattggctaaaatttctattttcagtaattcaacataatgatattaatatggctgtatatctggaaggaagtgtatgtatatacatacacattctttggaagccttaaaatggattgactgccactagattccagttttgccatgttgtatgttttccctctctgtatgtttttgtttgaaataatcttttttaacattatgacttaccatgatgcatctacctccttctcattattgtggtccttccattttccacgcaggaattgattcaactacagaggagagaagagtggag

SEQ ID NO: 74294 - DNA, 494 bp, Carica papaya
  Intron number 2 from transcript evm.model.supercontig_94.4 8 (locus evm.TU.supercontig_94.48) derived from phytozome v7.0 (chr-ID supercontig_94; pos 695184 to 695677 reverse strand)
cagccaaatctggtggagggaagcagaagaagaaggtaaagttcgatgcaaattttattttctatctctgttaatggaagaatttatagcgtcttgcataactgggttagccacttcttatgattctctgtatatataatatttgtaataaacatgtgattttgatattacattataatatcttgaggttgggtagttgattgtctcttttgttttgctttattttatgcaattttatatgttaaattcatctgcgaaagttgtattttcccgtggaatttgggttgctatccaatagattaagcaatttttctccgttgctaaatatacttaaattttctttagtccgttaatagcttcaaatgacacgagagtttaatatttcttgtttcttcttggtactcttttaatattttacgtgtctttaacggggatgttaactgagtgattggtgtgcagaagtggagcaagggaaaacaaaaggagaaggtgaa

SEQ ID NO: 74295 - DNA, 1005 bp, Carica papaya
  Intron number 1 from transcript evm.model.supercontig_3.18 6 (locus evm.TU.supercontig_3.186) derived from phytozome v7.0 (chr-ID supercontig_3; pos 1313536 to 1314540 reverse strand)
gggagcaatctccggattggttgcacgctttccaggttttctccattttgttcttcggttcttctgcatgatttattaattgtacgtttatatacctagggctagaatcattcttctgcttcttcgtatttttttgttattaatttctgactttaaatccgagtttgcatttttatcaatgcatcctcatcttctaatttatagtgattaactcattttctaatgcaaggcgtaatggcagttataccatatccaagctaaaattacttggtttgatttatgacagtaacttaatattatattaaagtatatagagggttcatctaaatcactgttttctttcttctgtattcagggttacatcagttggctgatcccaaaccagccaatcttctagtaattgaattgtttttcttggatatattctttgcttgttgcggttttgtagcaattaggttacctttgtttcttttctttggaaatgtttggaacaagttcactaaatttgtggaggtcatatgtaaattactactttaggatttaattcggttaaaaaatgatacaaattgaacttatatgaaatatttcatttccttttcttatttttaatactatgttagggatttgggttttctaattttttaaatcaaattattcaaaataattgaatacttagattattttgaatcagaactaaaagaaagtgccatgtcatgcacaacaagtgcataagctaacggcattaataaaaactaaacgaatgccaaattctctgttgataaagtggtttatttgaatataataaaaaatttatttatgtaactagatgtaaatttcttgctttttaagtggaagtttacttttaatcgatgtccctcattggaatttgcaacaaatatttggtctttttatgaatagtcttaatattgtctgtgagctgctaagtggtggaagttattttgttgaataggcaccaacttgttctacgctgtcaataccctcaga

SEQ ID NO: 74296 - DNA, 879 bp, Carica papaya
  Intron number 1 from transcript evm.model.supercontig_19.2 29 (locus evm.TU.supercontig_19.229) derived from phytozom e v7.0 (chr-ID supercontig_19; pos 1748862 to 1749740 reve rse strand)
ttcctgtcgtcaccggagttattatcgccagtggggtaagtgggcttcattttctcgcattttattgctctggggttttaagattctaatttttgcttcataattttggggttttgatttgattctggagttgggtcttcttttaattgttccaattgagtatgttggagctttgaactgataatttgaaaggaaaattgttcgtgaaaattagagcaataggaaaataattaagagttatgagaaatgagttatgaaatctaaaccattgatttaatttgatctatttggaaaatgtatgtattcaaatgtatactatatatgcatgcataccattgtttaaggagctgcaactggttcaaatactgggttcagattctttcgttggggtctactttcgatttgactgtttgcttagtctgtttagctggtgaagctgctgtaaatgtcacaggcttccaaatccaccttagaaatttcattttagtacaagattgactattaattcagcagtaaatttcaaaagaaaagttcatttttagctttgtagataagaaactcatattatttgattaattatcaactaatccccttgttgcaaatggagttttctgttattgagggaaagaaccaggtcaattgagttgttagctgtttcactttcagttttgctttagatttgtggaggtttcacaaattcttgaaggcatcttaaattgatttaagaacctagagatatactttttgtttttaattcaaatcatgtctaaccatcatttcattgactgcaaaccgtttatcagttgttgggttgagtattgtttttcttttattgtggccatagggtgaaccaagcttccatctatttggattcataat

SEQ ID NO: 74297 - DNA, 752 bp, Carica papaya
  Intron number 2 from transcript evm.model.supercontig_78.3 (locus evm.TU.supercontig_78.3) derived from phytozome v7 .0 (chr-ID supercontig_78; pos 12032 to 12783 reverse stra nd)
tgccgctggtgcttatcatagtgttgctttagcaggttctttcgccatgtacagtgcgcatagatgttttgttttattccgatatcttcgaagccttcttataatatttgctctcttgccatttacttgctagttagctagcaaaaatagaataggaaattttcctacaagtactcaccatttcttttaattgaaattcatcctgtttcttggagttgctctggattctggttcttccattttgtgtttgtgacaaacacatgatttttgggctagtacctcgtgttacggagagtttgtaagcaagagagaaaacttgggttggtttatagggttgtttagcagcttaagatatagtggtagcgcaactggatttcttttcattatgtgacaaaaacataggctctcttggggaattttctttttggttaatcttcgtttgctacacgcgcacacacagacacacgcacgcgcacacacagacacacacacctttcagttgaaattgaaaacaatatttggaaaaataatgtgaagatgtgattagtttcaggagaataaaatttgttaggaatatttatagaattaggtgcttatttatatttgactacaatacatacaggcacgatatacatgttgttatctctgagttcaggaaataaaattgtgaaatatttttatttaccaaatggagccatcatgtccagtgggtttgttagtgttcctgtgattgattcctcttacattggcag

SEQ ID NO: 74298 - DNA, 633 bp, Carica papaya
  Intron number 1 from transcript evm.model.supercontig_84.2 0 (locus evm.TU.supercontig_84.20) derived from phytozome v7.0 (chr-ID supercontig_84; pos 233361 to 233993)
ttgctcacttttgttgataaactaccaaacgggtatcgtttcaaatctgaatgttaatattttttctgggaataagtcatgtttttcttcccctcgtttgatttttttggttttttgtctacattatctttcatgggttaatcgaatattatacgacggtggatgcagatttttggttaatgcagtcatgggttcccattttttagtaatgactaatgtggcttgttggttttgatcgttggtggcttttaaataatatgtgaaatctcaaaatgctcattagattgagtggctacccggtctctttaacgggaatgcgttatgaacgttttggtcatggtggttgcatttgttgatttgaatggattttgttccaatttcaaatgggtgactactaggcatttgtttagtctcaaagctgaatagaatggtagccaattaaaatgatgtttgctagttgtttcactcctttttatgggtttaagaatttgtgcaagtgtcatttgatttgagttttgatgtcttatactcctcagtttattcttatgttgtttattaatgttagacattgatttatttttttgctactatacttgactatctttcttatcaggagtgagagaggaacttatt

SEQ ID NO: 74299 - DNA, 944 bp, Carica papaya
  Intron number 2 from transcript evm.TU.contig_32101.1 (loc us evm.TU.contig_32101.1) derived from phytozome v7.0 (chr -ID contig_32101; pos 352 to 1295)
gaagaagagaagcgagtaagtcttatttttaaacacactcatagcacataaatatacaccagtgaataaaaatggacaaatgtaaacaattccctgcagaaaattataattttaacctgaatctaatttcttcctctttcagcaaatgaaagcagcgtaaggccagaagcattgaaggtggaggaaatcttgggtgtaaaaagtttttatgtctttcctcctggagataaaattaaaaactccagcatatcctgctgtctttctttccttttattatgggatgaattttatttatttcaacctaaaaacaatttgctgatttgtaattagttcgtgttgactaaaataatgtatcatttgctttgtatttggaacaaagcttatgcaattagaagctcctcatgaacctaaaggagccaatgagtcaaaaataaatagtagattgcctccaaaattgatcagtcgtaggtcattaatggactctttcaaaaaattcaggtgttatttgaaatcaaattattaagcgaaaagctcataatgtttaaataagcactcgactttttataacataaaaaagttacaactcaaacagtagattccattgttgcataataaaattccttgaaggagcattataagcctctcttgtggctagcaatggtcaaaacaacagaggaagattgtcggttccttgatgcaagaaacattttatgagaaattaaaacaaaacaccatgaacacaatggcaaaaaaggtgtaattttcttaaatgacaaaatgtttgaacaagtagagtatgccgtatataagtggtgattgattagtgatgttggtgatgacaataaagcagataaccacttaaacgctcatgcttcgctggtaagtttttgtactttttgtcattcacagctaaagaaagcaccccctcaagtaccattacaaga

SEQ ID NO: 74300 - DNA, 529 bp, Carica papaya
  Intron number 1 from transcript evm.model.supercontig_37.9 8 (locus evm.TU.supercontig_37.98) derived from phytozome v7.0 (chr-ID supercontig_37; pos 754809 to 755337 reverse strand)
tccacgattctccttattttccaatcagcaaccaggtttttttattcttctatatactctttcttattttcgttcgcgctcctgtttctgagtgctcgtgattgcagattcgattatgagttttttcttttccaaaatgtaactttggatctagacgccgctctctgtcatgtatccaccgttttttggtgttaattaccccgaaaatttcatttaaaacataatttattgatacagccagttacggtttttcgtcctcgaaatctggtgaacatgggaatttcccctaaattccatctcacgtgatttcttttaaagcaggattttgcatttcaatgcaaacgaatattagacccaatgcatattctagggctaattactctgtaaactttaatcggtgattggaattcgggaaaagaaaaagttctttttgttttgtctgtctctttaattgtcgtaaatttttgactttttaatcttcatcgtgtcggtgttgtttttaattaggggttttctcattcaacgaaga

SEQ ID NO: 74301 - DNA, 914 bp, Carica papaya
  Intron number 1 from transcript evm.model.supercontig_43.1 1 (locus evm.TU.supercontig_43.11) derived from phytozome v7.0 (chr-ID supercontig_43; pos 154907 to 155820)
attcttgcctcaacaggtttgttctattatcatgctttcagttcaaggcatcaaaattttatgttctgttaatacaaaaatcacagttagttgggactacaaatttggataaattatcttcttgttacttagattagaaatttaataatattttatcttctggtggaaaaagtaggtcatttgattattcaaccttttaggtttagagaaagaatgatctatttgctggctggaagatttctttaccaatgatgaattgcactggtgccattttataagaatctataactgaggagcctgggacacatcaatgtaaataggttcccattaaaatgacatccttgataccaagtaattatagagttagccattttacagtggaatcgtatctgaaaaatatcctaggtcagaattagccatctggaattgtctgtctagttcatggcagttgttccaagtttgttttcttttttcagcgaccaattcttttttcttttttctcttcataccaagtaattatagaattttgtagaataatagcaattcagtgtttgaagtttgaaacttactacagtttggctcctaatttttttttctttataatttgatttccgatattttaaacgccaaattttcttccattttttaacataaaaaaataaaatgattagatcatatttggatgcttaaaaaaacaattcaaatgaatgactttaactaattaatttagttaataaattaatgacaataatagtctgaacagagtgaagccagggcatttttgaaggacattcttagattgtgtgttacattagtgatacattctttgcacttttcaatgttgatttctttaattttgctgtagagtgttaacttattgtttgtacccctacagctggagcaaattagcagat

SEQ ID NO: 74302 - DNA, 875 bp, Carica papaya
  Intron number 1 from transcript evm.model.supercontig_182. 13 (locus evm.TU.supercontig_182.13) derived from phytozom e v7.0 (chr-ID supercontig_182; pos 192198 to 193072 rever se strand)
atcaacagcgcaagtaagaattatcctatgttacttccagccatttttgtgttcttttagctttgtctttgccaaggataaatgaagttgaaaacatctccaggtttctttccacctaatagggccaaggataaattcaactccaggtttctttccaactaataggttctcgtatctcatcttgctagcagcatttttgaagattaacagaattctgaaacaaatgaccccattgaacttttttattgttaattacagttatttgttcttcaatcattgtgtagtcagtccataatgggagcaggatataaatttgtaaggtagaatgaaagaattgaacacgacccctaaagattggccaagatcaaacttttgaatatggtcctactaactgcaaattgaccttaacctccagacttggatgtctaatatttatctgggcatttttgcaatttcatcatgaagaattcactgcttctaaccaacattgatttagtcatattttgctcttatgatgagataatgacaacactgatatttaattcctagcagcttatctgtgatttggaactaacaaggatcttgttatttttctgttggatatggacagaggttttgataaactcaatccttattcaagaaagaattccaactctgcctttaaaacgtattaacaagtatttgtttcctatttctgctgctattttgtttgatctatgtagtttcaagtcccactccttttcacctgcttaattatctgtctcttctcatagtatcttttcctaacttgagaacctcttaacttccttcattaagctttgtagtatttgtgcctggcagctggcttacctatagaaaatatactttaccttggt

SEQ ID NO: 74303 - DNA, 369 bp, Carica papaya
  Intron number 1 from transcript evm.TU.contig_36787.2 (loc us evm.TU.contig_36787.2) derived from phytozome v7.0 (chr -ID contig_36787; pos 854 to 1222)
acatcattcctattccatgtgactcataggaatactgcagttgtactaatgaaccaaggaatcagatgatgcttgaaaaaatcagtaaaaccaataatgaaaaattctgaaatcaggaattttaatgctctcataaagagttttgtattctcctccatgttattgacagcaaggctctttcatatgtttttcttcctcgtaaatttccagtaaaagaaagcaaaacaaatatctttctttgaataatctagaacctaaatataaaatataaaatttaattacctgatgccttttaagtgatagatatgattttttccttttttttccttgattttgtttttgaacatctgtttatatttaggtgcttta

SEQ ID NO: 74304 - DNA, 443 bp, Carica papaya
  Intron number 1 from transcript evm.model.supercontig_81.9 9 (locus evm.TU.supercontig_81.99) derived from phytozome v7.0 (chr-ID supercontig_81; pos 449547 to 449989)
caagaggaattttcttggttttctgtggttttgccgtaagtatggcttttatcttgttgcaatggttcttctgtaatcttgttttgactaatcggtagttctatttttgtttaatttggtgtatggttgtaattgaaatttgtggttttttacgtgtttgacaaaatgtccttaggccttttcaggggttagcatcccttgacattgttgtaaaagatcaaaccctctctgtaatttgattctagaagagaagactgcttgcaagttcctagctaaatctgcctaattatgctaatgaagaaagttgatcaattatgaacactagttgagcatatttgtgacatatatttcattaggtggttaacaaatttatggcgcttctgtgattttagagtaactgaatttcaggtttctgtttccggctttgggaggtttgttattcg

SEQ ID NO: 74305 - DNA, 596 bp, Carica papaya
  Intron number 2 from transcript evm.model.supercontig_6.34 5 (locus evm.TU.supercontig_6.345) derived from phytozome v7.0 (chr-ID supercontig_6; pos 2603834 to 2604429 reverse strand)
gcaggtaattttttttgttttttttttataattttcaactgtatttttctccttatccgccatgattgaacttgttaaactcttaattccattaagacaaacagaattgaattcaacgctgttgtgtaaccgtcaatgatggacttgtttaacatttaatttttgtctgtttgtttatgaagtaggcagatcccaaagaccaaaaaattatatgtaaggtataaaataattttgaaaattgagaatggtaagaataaagataaaataattttcaacttgtggattcaatcatttggattttcaaattgttgattggagcatgctatgggtcccaaattgcaataattgactttcttttcattttgaccagaagtattggcaaaaagttttttttttttatccaatctgaataaaataacaagattatttattgaatatggttaatgactggaattggcaatttggcagcatcccaagatgtaggaaaccaaaaattacagaaatggttgtgagtttaggctgtgaaaaatggtcttgaaatgatttggtttgtttttgcagtcagaggtgaactttttaggaaggctttcccatcc

SEQ ID NO: 74306 - DNA, 648 bp, Carica papaya
  Intron number 1 from transcript evm.model.supercontig_27.2 41 (locus evm.TU.supercontig_27.241) derived from phytozom e v7.0 (chr-ID supercontig_27; pos 2198811 to 2199458)
aaggtgcattttatgtgcatatgtaaagtttttattcttatacgagaaaagatatataaagttaagcgatagtagtggtgcctgcatcgcttattatactaaattatattaaaaattaaaggtaagtagatagtatcgtatagtaattcaatacaggatttgataatattttgttcttttaaaatttggtacctggttaatagccagatgtttgtcgcttttcatacatgttgaattttgaattttatttatttcattcgtgggtaaaattgtttcaacatgacatcaattgtagtattaaatttagaatttaaattcttaattataataattgataatttataaaagttagataacttataagttgtgaaacttttatacgatagtagtgaactacattgaaaatatactattctaagtacgaaactgacgagaaaaatataatcaatagagaaaaatgaaatataagaactttttttataattctcgaagaatgtcaactagaactctttgttgaagagctagatttcttagaaccatcgctatagatcaaactattgaattgcttttagaacgattcaacaaagctaatgcaattgttattgttaacaaagttgggaagatgacagatatagattttgcaggcaa

SEQ ID NO: 74307 - DNA, 1068 bp, Carica papaya
  Intron number 1 from transcript evm.model.supercontig_17.6 2 (locus evm.TU.supercontig_17.62) derived from phytozome v7.0 (chr-ID supercontig_17; pos 727862 to 728929 reverse strand)
ggatacggctgtctactttgtgttcttgagcactggtttgttctggaaatacccttttttgttctttatatcttgtcttttagtgcttaatgtcggtgctgcataccctttttggtttacttgaaaatagatttgttcttgtgtttctattttaaggaactgtaattgcagggagtttttatggaagtttttgacctgggattttctgtttgtggataatttactgatttctctttattattttataacaaatttgtggattcacttccaaaactcatgtttctctccttctaatcttctgtttattcaatttagtctgcttgcacttgagcttaccagttgttggaacaaaagtatgcttgttttcccataaaaatatgataccaatgatttatgaaatccaccatatttatatgaaaattttgattaactataataaatgaattgagagccttaagagttgtaaactaaaggaagacagaaacatgagagtgtttttgttttctatacaccaatttgttaacattataaagagatgtgtttcagttggtcattctctgccaataagttctagaggtagaagatggttcgctatgcttcaagtaattatttatttaagaatcatagcaaatggtgggtgctatgtaagcaataggaagaaaaacccagttcaagctactgaattctctgactttgcttccaaaaataaaaaataaaaaataaaaaaagaaaaaaccagaggacagatggtctaagaagacaattttactaatctggtgttctgtctacttgtagcttctcgtgtgtatacggtattacttatccccattactggaagcaaatttgtactcttcaatatctgttcataacttcgtgttgtttgtggtttttatgcattacataaacttgtatagaatattgttctggcctgattgacgcattcattgtcgaaaatttccttaactagagcacttgaacctgaaacataaagttttaggaaaaatgtctttaacattttcgatgggtatggcagtgttggggatattggttttgtctgggattattctc

SEQ ID NO: 74308 - DNA, 692 bp, Carica papaya
  Intron number 2 from transcript evm.model.supercontig_199. 8 (locus evm.TU.supercontig_199.8) derived from phytozome v7.0 (chr-ID supercontig_199; pos 121651 to 122342 reverse strand)
cagttgcagggacaaagatagaggtcagttttattctgctttgttaatgttgttgcttgacagatacgaagtggacctatatttttgcagctgcttctaggaacatgtataatttttcttatttttgggaaagagaaggtgaattttcatttagaaaaagtgataagtatgacgcatttttgaattgatatctccactggctcactgatgattaatcagagtgtgcgcaaagatagcagctaatgcccctggcacacacttgagcctatgtgaccattgacacaatggaggcttagtgcttagaggcttatatatctagagactattcctgactttggatagaatgaagagaaaatactggatagtcacatatcaacttcaaatttgaatgtctcttctagttgctaaaatacatactatatctcagttttaagtcttagaggtgaaacaaggactatcacaagcttttctaataattaagatgccacgggaaaatcacactgaacaagagagaatactacgaaggtgcatgcgcatattatgtgccagggcagattagaaggcatgattgtgttttgcatcatgtattatcaatttactatgacatctgtttatcaattactttattcaatgagctaattcttgcctttgcttgatctcctaggaagtattttgccaattgcctctaccat

SEQ ID NO: 74309 - DNA, 812 bp, Carica papaya
  Intron number 1 from transcript evm.model.supercontig_19.1 88 (locus evm.TU.supercontig_19.188) derived from phytozom e v7.0 (chr-ID supercontig_19; pos 1385473 to 1386284 reve rse strand)
ttgttcctcgactgataaatccagtatcttacgaggtctgttcattccaaaaagattcctcaatttttatgttcattgatgaaacgcactgatcctgatttatctaaccttctaaatttcttttgattcgtcgattttatggcattgttatatttagttagtgatttgatcatatgagtgacaagaatttggctgaaaaggtgacattcttttgctaattcaatttcacgtttagttgatcgaaagtgagttggactctgtgaggtgttttaaggtgattcttatccgttttgtttaattgggcaattctgttttcctcgggtttgatttcaatgctgagaaatttatgaatgtgtagcttttttattcttcttgaattgaagcaagtagaagttggcgtttgatttagtaatggaataagtattagattttccaaatgcgtagtattgataggaaaggtacgaaagaagagaacacaaagtgcgaagattcattcaagtaaactgactgaaaaagtagaaacttcatttatggatctggctggttgtttgatttagtaatgtgagatggattaggatttttcaaatgcatggtattgatagaaaagatttaaaagaagagaacacaaagcacaaagatgtatgagagtaaattgcttgaaaaggaagaaactttatttatgggtctctctttttcgccttctcgtgcatgattaaatgctttgattcttattccttatttcggaagaatataattaataatttttcatttgcttgttagtgcaggtttttctgcaaacttcattactgttg

SEQ ID NO: 74310 - DNA, 378 bp, Carica papaya
  Intron number 2 from transcript evm.model.supercontig_77.8 1 (locus evm.TU.supercontig_77.81) derived from phytozome v7.0 (chr-ID supercontig_77; pos 994053 to 994430 reverse strand)
tcattaatcaagcgtttctactagagaagctcaaggttttcttctactgctttcttttcactatttgtttgcttatttatctgctcaatttggtactagaagagggttttatcttttctttttcaccaaatcaaatgctcaaggttcttggtgtatttctacatattgttgctggtaaaaaagttatcataatcactagttagataccagtacagacatcaaatcattaagaattttagtgcttaagttataacagggaggttcttggtgtatttctacttattgttgcttcatattgctttctttttgtgtgttaactgattctcgtctgattgttttttcccttcaatcgtctgtctcaaataaatttgacagaat

SEQ ID NO: 74311 - DNA, 635 bp, Carica papaya
  Intron number 2 from transcript evm.model.supercontig_50.3 5 (locus evm.TU.supercontig_50.35) derived from phytozome v7.0 (chr-ID supercontig_50; pos 445209 to 445843)
tatattccctgggagaagggtatgaatcttttcactttcagatatcttataatgcttaattctaacgtatgatcaatcaatgaaactcaagaattggttagtgataatgtcatttttgaatatggattcatgttaaatttgatagtttgaatgtttaatgtttttcatcttgtgtctacgtattgtaatatatgtagggatgagccaaaaccaaaccaaaactgaaccaattaggaagaagaattgggtttgtcttgtttttctgaaaaaaaaatttatttttcttaaattaatgattatatatattaaattgataattatatatatacctgtttagaatatgtatataaatgtttagttattatttttaattaatatgttcataatttttttttaaaaaaatagattttattaatttatttttggttaatgattcggttttaatttcagtcgtttcagctgatcattacgttttagtcgttttctttctctgatttttttttttttacccgaatcaatcaaatactctctacctaaaaacaggagattaattatatttactcgtctcaattttagtttgctttatgttttattctacagaattgttggacaagtagctgttactgggaagtata

SEQ ID NO: 74312 - DNA, 600 bp, Carica papaya
  Intron number 1 from transcript evm.model.supercontig_286. 14 (locus evm.TU.supercontig_286.14) derived from phytozom e v7.0 (chr-ID supercontig_286; pos 104547 to 105146)
tcgagttgtgttgtctggcgtacgtaaggatcaaagtaaggttcccatcttctgttgtttttaagccattggtgcatgacaacttttctggctgcaaacaatagaagtattgatgagaacaaatatttgcaatccagagcaacagaatactgtagaagaaacctgaaagtgaaattgctggagaaaatgaatttagaaagatttaggctttgtttggaacaagttcagacgcatatttgcaaattcacgctccactcaactacacgatgatgtatccattagaaaaaagataaaaatttgatctcatatagaattttacctagatttggaacaatatattataagtttcatcaattatcaaatatttgatgtgcattactctaatttcgcattaaatttcgtatgagatttttttatcatttaaaaaacactttcatcgtctttatttgaacttgtgtgaacttgcaaacgaatttaacaaagtttatgaacttattccaaggatggccttattgtggcataaaatccaattcctcattacacctataaaaaatgtatataaggtgcctacacaatgcttgtccgtgcaggtaatttaaa

SEQ ID NO: 74313 - DNA, 849 bp, Carica papaya
  Intron number 1 from transcript evm.model.supercontig_197. 16 (locus evm.TU.supercontig_197.16) derived from phytozom e v7.0 (chr-ID supercontig_197; pos 308544 to 309392)
ggaagtttggtttggaggctaatttaaggcccaaggtacgattttctcatccaattcttggtttccttgttgatctggtgtctttttattgccttttagtgcttggcttttgttgggtgttgcgtctttctgtcgtttctgttcgcattttcaatctattttgttctgggatctgcttttggtgactttgttttttgttgggtgctgcttattgtttccttaggtcgatatttggattttgggttgatctgattctggatcctgctttactttattaatccctgtgggtgaatttgctttctggtttggttgcttttggctttgtgcactggttctgtttgaatatagattttaatcacgatctcgaggagagagttggtgactacagttgtgtgaattgcttcataatttgcatgttcttagttgatttggatgattgcttttttattttctttcgtgtgcaatatttctgtattttattagttgcatattgatttctgaatcttgttattgtctctagacttaagtgttgcatataacataagggggtgattaaaattaaaatcttttggtttcaaaacttgattcccctgaagaacttaatgatctaagtttttaacttcccattttcctgccaaggaggtgtcatttcccatttgttagactgatgtactgggcccaacattgtgaagatgctaagcagttatttctagacattcaggcaatccacattacagttcttgtagctccgaagtttaaaatatatttgagatacaaattatggccttcttttgccatggatctttatttgcagatctgtgtaacaacaagtacatcagctggtttgga

SEQ ID NO: 74314 - DNA, 504 bp, Carica papaya
  Intron number 1 from transcript evm.model.supercontig_19.2 17 (locus evm.TU.supercontig_19.217) derived from phytozom e v7.0 (chr-ID supercontig_19; pos 1682753 to 1683256 reve rse strand)
aacatatgtaaagtttccattaataaaaatcttatcttttttgtgggtaaacataatttcttttttcatcagaattccatcttctgcaaatcatgtgtagaatttcacagaattcagacccctattgttgctaatacataacagttctcttagcaagtctagctgtagttcatttagagtgatattggatttatcaattacttcataactgaatgatcagtacgttctttactagagttcatgggttcaagtcgaatctgtgtttttctatgtctcctctcttgaaggttattcttattgtctaattgatctatgtatattgtttaattaataaacgaattactcaaagaaaaccctattagattctgggagttacggaagtcagcatgttatttagagctgataattttgggaatgtctgtaaatttatcatggagattagctgctaatttctgtgatttgatgtatgagtttataggagatttttattgggacttctaaaat

SEQ ID NO: 74315 - DNA, 493 bp, Carica papaya
  Intron number 3 from transcript evm.model.supercontig_4.16 8 (locus evm.TU.supercontig_4.168) derived from phytozome v7.0 (chr-ID supercontig_4; pos 3019779 to 3020271 reverse strand)
aaaggcatggttctttctttttttttttttttcttgtttggttaaattgatgaatctcgtctatatatattcttggtttttctttttgggtgaggatcataggattctgattcaattccttttcgtttcagtcttttgaaatcattacacaagtgatctaacgacttttattttttatttttagctgaatttcatattttataaaaactaatgttattacctttcagaatctccttaaaaaaggagtttattttctctctctcaataaattattcaattcaaataaaattcccttcaaattatagtcaaatacttgagtaactcttaaaataatggaaactctgaatcaaatcccactaaccccgcatcaaaattcttcacatctaacattgaagagaccattcttcttgttgggtcatatcgaaagctgatggcatgttagtgtattgctgttttaggagtggaatctgcagacccagatctgaaaaactcc

SEQ ID NO: 74316 - DNA, 190 bp, Carica papaya
  Intron number 1 from transcript evm.model.supercontig_4.22 3 (locus evm.TU.supercontig_4.223) derived from phytozome v7.0 (chr-ID supercontig_4; pos 3864898 to 3865087 reverse strand)
tctcattgttgacccagctcgaaggccacaagaaggtgataattttgttcttcaattctcattaattctgtgtttttggtgctttttaagtgatttgatgagtttgattcttttctgctgcgtttatttttatttttattttcgttttaaaacagcttgttagtgggatttctttgccgtctggctcgga

SEQ ID NO: 74317 - DNA, 641 bp, Carica papaya
  Intron number 1 from transcript evm.model.supercontig_4006 .1 (locus evm.TU.supercontig_4006.1) derived from phytozom e v7.0 (chr-ID supercontig_4006; pos 790 to 1430 reverse s trand)
gggagtaagtgtattagtttttctgattggtgatgtgtaacctaatattttctagtccagatgcttaagaaggcaatagatgggctgcagaaatttgtgaattattttgatctccttcattttgttatttttgatttattctctttggttgtttttgaaagtaatcaagccactctgatggagatcatttcatgagttctggaattggtgatgattaaactggatctggactgcatgatatatgtcgcatgaccatattattttctttgttccgtgtttaatctgtggagcttccttttaagggaacaatttatcaccatttgacccgattcttttgaccacttctgtaaacgaactctagtttctgatatttttattagctcttcttttctgtgcttctttcacatgtcttgtgcactagacatgtcttcatgattttgactaccaatcatttgctaggctgtccactaattataattggttaattctaaacataaaatgatgatttatttaaaaaatgatgatttatttaaaaaatgatgatttatttaatcctattacctattttcaaatacattttcatattaaatgtgggatcatgtgcagcaaggagagaactggtgttgatcgtttttcactga

SEQ ID NO: 74318 - DNA, 947 bp, Carica papaya
  Intron number 1 from transcript evm.model.supercontig_78.8 7 (locus evm.TU.supercontig_78.87) derived from phytozome v7.0 (chr-ID supercontig_78; pos 1008179 to 1009125 revers e strand)
atagtgccactccttggcttgtcgtcagagattctgtgagtgctttttttattctttgccaaacacgatgctaatacctgtctttcttctgccctaaaatttctactccagattttttcttttttctttttgtagtaaagaataggagaactgtatatacatatatatatatattattcatacatgatgaaattttctagaaaatttgttttaaggtatagaagttggattaaacaagaagacacctatctaggtagaaagtttgctttttgattcttaggttttggtatacaggattttcttttttcttttttctttttcaaatacagcaattatgatgaattaagggtacccatctgttttcctataatttttgttgccattctcaaaaagttataagaattgaaaaacaacccaatttcagaaaaaaaaaaaaaaaaagtcttgtctttttaaaaaaattggtcgtgtaggaaatggaaagaggaaaaagggtagggctcccagtagtcaattatttataaagttgatatatatatatatatgtacacatataaagtaagaaattgcaaatgttggtatattagtgagttcaagttccaaaacgtttaatcccttggaaaagatgagagtagatacaaatacaggaaggaggtatagaaaaaaggaaaattatatatgtatggggttataaatatgagtttcttgggattcccaaacgaaagcatgcgcaatatttagcttgatgattaaatggtgtagtgtatataatggagaaatggcctggattcaacccatcaattatctcctcctcttacctttttttcccttaactttttgcttttttaaaaaaaaaaaaaattcaaatttatatatttttgctgtaaaatataaaatgttttgaaaaaatgtatctgaaactgaaggtgcacgtactaccacgagag

SEQ ID NO: 74319 - DNA, 588 bp, Carica papaya
  Intron number 1 from transcript evm.model.supercontig_395. 5 (locus evm.TU.supercontig_395.5) derived from phytozome v7.0 (chr-ID supercontig_395; pos 38328 to 38915 reverse s trand)
acacggagactcgagaacgcagacgagaagaaaaggttcaattttgttttccttttttttttaatctgcattctcctttattttatttttacctttgattttatcgtatttttctgttattattttggagatgcagctttttaatgattactgttagattcgaggaaaagaaaaggaaattgcttttcatatggagattttcttgtctcttaagtttctaccaggcgttaattgatttggtttgtggtcttatgataatggaaagaaaacaaagctatgcattttatattggccatatctatcggttttatctaggatgtttctattttacattgcaaaaagttttatatagagattgataaaatcatgaaattgataagccaaatagtttttgttcttttttttccaaactactttttcttttaatatactcttcaagtttttgacgagataatggttatttacatgagaattacaaagtctctgaagtttatgcaaagttcagaaacgactatgaattgacattgagctgttaacaatgttccatgcttgaatggtacttccaataaatattttgcttctttgcag

SEQ ID NO: 74320 - DNA, 377 bp, Carica papaya
  Intron number 1 from transcript evm.model.supercontig_48.4 4 (locus evm.TU.supercontig_48.44) derived from phytozome v7.0 (chr-ID supercontig_48; pos 269617 to 269993 reverse strand)
gacgacgagtgagtatacctacgtacatacacatatgtatatgtatgttatatcattacttgtatatacacatattaattttttaatcttagttcatatttgattaccagaataatttgcaatttctacctcagtacttgcagaaatcgatgtcggacaaattaaaatttaatttcatacggtttagttttcttgaaacttagactgtgcttctcttttgatttatttaccagatatgaattaggaatccaactccaaaaaaattccaagttgcggatagcattgattttaatacagaaactggtttgaagttcaatacttgcagggacttctcttcatttaattatattcttattgaatatgcaggtgctatagca

SEQ ID NO: 74321 - DNA, 1017 bp, Carica papaya
  Intron number 2 from transcript evm.model.supercontig_83.3 5 (locus evm.TU.supercontig_83.35) derived from phytozome v7.0 (chr-ID supercontig_83; pos 405719 to 406735)
gctttttctagagatcttctggaggactttacaccgtgagttttttctgtactgactttctgtgtgactcagtctattgaccattctcctattcatctgccctttttattattcaggttgactttctttggacatgcttttagaagtatttgctttggggtggattggttggtttttgctcattgcttgatcatttctgtgcgagatgattatgtttgtgtgtgtttgtgtttgcatgggtgcatatgcatgactttatctggatctttgcagtgataaattgtttcagttcgcggtacatgtttcaaagtgatggttgaacactgcttttagccttaaaactacaggaatgttatcctgaaatcctaaaacatggaccccatttgaggaaggaaatctaaacataaagttagactaaataggagtaaaagttcattttgtaattttctagttttatttcctaaagattaggtatatatgggcagtgaatttattgcatttatatgcataaatacattcctaattatattgatatatatttttgcattcaggaaggcttttaattttcctaacattgtttttggtagagaaaaaggattgatattatagacaggcatgaaaagtggtgcaatccatatataggagaggcttaacatattgggaagagaaagaatatctaaggtttccccaaatccttaccattgttgagaaagtgaacattaaaacatcaacaaaataatcagggtttagaactaatgatctctattgttagcatagagagaaagagagccatcaaaatcctttgttctttctttccaaattacccagatggtagccataggaataatagacataagctttcatgatataaccttttggaaactaatcttccaattttatcctcctgggccttttgtttttaattttgcacattgtttgttgtttgttctgctcatttcttatgtatcttggttgcaatcagttttttgcctaggcttgtggctacaatagtgacgc

SEQ ID NO: 74322 - DNA, 799 bp, Carica papaya
  Intron number 1 from transcript evm.model.supercontig_148. 5 (locus evm.TU.supercontig_148.5) derived from phytozome v7.0 (chr-ID supercontig_148; pos 113530 to 114328)
tgagactgacacacttgaaatagttgcacaactaggtaataattcatcttttgattccacagttttcggcatttaattactttcagtgatgattatcttacatccaagaatgggcttgtggagtttgcatgtttttctttttccagtcaatgtagtcttggttttttcagaattctacttaatggtcattgaatgcatctggtcaatggataaaccttaaagaggcggtcttttatatttactttgcttcgtgcattgttttacataaattttccagaaaagtagattgatgatcaatttcttctccctgcataaattgttccgaaaaagtggaacaggaacttctttattgtttatcacatggcaagagttgtttctcaattatattaaaacatagcccatcagattttttctaattttttcttattcttttgttcaaaagctctaagctcaattgtcttctcccctttttttttacaccttttttaacagagttctaaatgagaaaggaggattttgcatgtgaaggtttttggtttctctcagatttgttggagcatttgtagttagttcaacttctgaaattgctgatacaaaacgttttcctatcagccttggttgtgtttccttttgggtcttccacatcagcaataatcttgactatcaagtttctagttttcctctcatttgccacacttgttgtagcaaccctgtttacctctcttgaattggttcagaaccttcagttttcaaagttaccatgagtatcatccttatgatttggtattatcaggatcta

SEQ ID NO: 74323 - DNA, 459 bp, Carica papaya
  Intron number 1 from transcript evm.model.supercontig_49.1 32 (locus evm.TU.supercontig_49.132) derived from phytozom e v7.0 (chr-ID supercontig_49; pos 1001754 to 1002212)
gccactagtctttgcagtatcaatcccaataagttgtaattatcctttgtgaaaacttgcagaaatggtctcttctttttaatgtcatttacttcaaccttttggccctagaataacaaagaaaggccaatctttgtattattttttaatgtaggacaaagtgagtctttttgttttttttttgaaataaaagtatggtatttatcattaattacaaagtgagtttgaataaaattatggtatgtatttgtaattttccttccaaatctggaaaatcaaagttccccctagaatgagttttttcgtgtggtaaacttgcagagaatgtatcttgacaattgataaactgatgaaaaggggtctcacaatggtcaatagattttatttacgcatgagagctgtggaatcttgcaaccacattcttttatggtttcctacagcttatacctttggtacatc

SEQ ID NO: 74324 - DNA, 875 bp, Carica papaya
  Intron number 2 from transcript evm.model.supercontig_85.8 7 (locus evm.TU.supercontig_85.87) derived from phytozome v7.0 (chr-ID supercontig_85; pos 599411 to 600285 reverse strand)
ctgaaggttagtttttgattttcaatgtaactgtgaactcttatcttttccgtttattttagcatgtattggattttagattttgataattttatagtttatcatggatactatcggaaattaccattatactgcgaaaatgattttctaagtatcctgtatatatgttaaaatggtgtgctgtgtaaattctacaaggaaaaaaaaaacacattttagacgatacgaggttgcagaaaagaaacttctgacctgttttgttgtccatggaaattgaccaaggtgtattagatttaaaagagcatgaattattctctttttctttgctttgaatgatttgttagacatgttgaagctgttctatacgggtcaagggccttctcctatcatgcctgcatgagccatggcattctgctctatagatatatagaaatgctagttggacttaacttctcacactgcacgataatcatcatttatcaagtgcaaaatgcacgctagtatgtttagaaaaactatgttatgtggatacaatgaggctaaccaagactttcttacttcttaaagaatgatatttttgtcgagaactccttttggaattatttttcatttcatcaaggaaaatatttatatgggagtatgtagtgcttgttgaatcattcatggcttttagaaagggattttggtgacattctattggaaagatgggaatagaactttatctaataatttatctcttgtataactttttgaattaaaaacagagatggattcattaatatatgtcaaattgttttcttatcattatttttctacttgtttgctgattgtcacactgcttcaagggattgattacttggaggctaaaaaattat

SEQ ID NO: 74325 - DNA, 650 bp, Carica papaya
  Intron number 1 from transcript evm.model.supercontig_85.2 8 (locus evm.TU.supercontig_85.28) derived from phytozome v7.0 (chr-ID supercontig_85; pos 168049 to 168698)
aagaactctaaggtattgtgcgttattgttgtttgctttttatgttcatcttttgcctttcatctgtttctttcgctgtttattgtgtttccctgtcatataattttgatgggttttaaattgtctgtcactgggttgtgatatgagaaggaaggtgagaaagttctaagctttggataatgcccaccaggtgttcgatgttttgtttctaatggttctaattaatacctatgtgtaaaccaagcgtaaggattagattatttttatgttgggtttttgctctgaatcttttgattttctgtaaacgcttccgtattgttctctttggattaagtaggattcatctaaatgaaatagggaaaaaagatatggtttttttactcgagtatttgtatctataattttgggtaattagttcacatccatttgctcgaggtttttcttagcaacattatcaaaatgattaatcgggctgctcttgttcctcattttgtccttttgattctttcaattttctttatttgcacatattaattagtgaacgagagtatagtttcttaagagcttgcgtattttgtttcagaattttcaaactatgcatcattttggtctaatcggtattattaccttcatgcattttcagagatttt

SEQ ID NO: 74326 - DNA, 848 bp, Carica papaya
  Intron number 3 from transcript evm.model.supercontig_3.89 (locus evm.TU.supercontig_3.89) derived from phytozome v7 .0 (chr-ID supercontig_3; pos 738409 to 739256 reverse str and)
ctcgctgggttagttacctgctcctgtgaatgattatagactatttagctacaatttagatttatttgttagggataaccataattcttactctttaaggcagttcatttatttttattttgaagcggcatggaggctttgatctattctttttgttgcattttgttatggttgacttgttcctttctcatccttcgtagagtggttggagtgtaatgctaatgtttttaaggaccaaactagccatccagcttttctggggcagaatggtattcttttctgcttcgtgggctaaggctcatggctctttaatggtgtcttagaaacgtttttattcataaaaaatgtttctcactcttttcagttcatgatttcttgtgattttttcatggatgtgcaaaacattactatccgaaaattggagtaatttagtgttcggaagtattagatggtgttttgtcctattatgcaggctataggttttaccctttttccttttcttgtatccctccctaatactgttggatatcgaaattcaagtctgttgtggagtgagatctcatttgagccaattaactcttttcttttgcttgaaataaagaagagaatgaaaacatcaataaacttcagttgtgattagtatgggatgtttgttattgggataagctgcaaaggatgttgctggaaggtaatacttttacttgcctttgccccgaaaaagtaatggcaatagagagcttaataaatggataaatttgattgcacccttagaattagtagatttcaaggcctacaactaaatgaaatgaatgcttttttttttaattgtctaggcattacttccattt

SEQ ID NO: 74327 - DNA, 312 bp, Carica papaya
  Intron number 1 from transcript evm.TU.contig_31349.1 (loc us evm.TU.contig_31349) derived from phytozome v7.0 (chr-I D contig_31349; pos 4051 to 4362 reverse strand)
gaattagaaataatcccgatctcctgtactctgatgtaaggatttttgcatttcctcttttgatttgaatttgttcctttagtcgttctgttttccgtacttaaaattaagtcctgtagaaacataatcatgttacaaggatcctgattaactcttttgaaacttgaaattgttttttttttttttcaaccgatcggctttctcttcaactccttcaaatgattttcctctcgttttctatgtcttcttattcctcgcattttctcgcaagcaaaaaaaggcttaacaggatgatatattatatgattcagg

SEQ ID NO: 74328 - DNA, 836 bp, Carica papaya
  Intron number 1 from transcript evm.model.supercontig_9.33 4 (locus evm.TU.supercontig_9.334) derived from phytozome v7.0 (chr-ID supercontig_9; pos 2364554 to 2365389 reverse strand)
aactggaattggctatcaaggtctgactcgctcacctaccatgggtttcttttctgtaattttttttttgaaatactttgctgtaatatttttaggatccttgaatctgcaaatttccttttttaatgtgttcagggttgttcatggttaagcttacttcagttccctcatccccaccttacatttgcaatttttcttgtgattgagctaccgtctctccaccttaaaatgtagaaatcggaatttctgattaggaattctataggaagtgaatcaaatatatgggataaaataacgagtttcttcttttgaattgacttgcaccttctaggatgcttttattttgctacttgtatggaattgcatttctttcccttttcatattgtttcgttcatgtgcttccatatctatggcgtaatctttgtaaataagagagggcatggtacctgcattaatcttattaccatgtcattgggttttaggaaggagatataaactgagatagctgatcacaaaataagaaataatgacatttcagttgcaaactttgctcactgataccataccaatcctgtttctttttctatttttcaatttaaggaattcgcttgaaacgatataattttcattttagctatataggaaaaagtttctcctccttgtttgtggtcctcctgtctgaaattctaccatgagtattaaatcctggaaatcatatcattcagtttaactttctggttcagcttctgtcatcgcttgtttttaaatagattttcttcatgatgtacttttagctgaaactttgtttggctttaggtatttgagtatttgaaga

SEQ ID NO: 74329 - DNA, 494 bp, Carica papaya
  Intron number 1 from transcript evm.model.supercontig_49.8 0 (locus evm.TU.supercontig_49.80) derived from phytozome v7.0 (chr-ID supercontig_49; pos 537456 to 537949)
ttaaacttgacaaggtattctccttcttgatttgctgccagtctccagttgtttcttaattggttaattagaattaatataaacgtcgcatgtgacagcatattctcacttagtttgttgcctttcttaaagaaatattccagcagttttctcttttcttggagatctttctagatcagaaagttcatcggatggaaattctttatgctaaaatctgtttgatgctttattttgtataattccataacctatggaggtttttaaatcccatcttgattatgaccacgagcttggctgtactgtaatcagtagtcatgggaaataaagatctcgagttaatatactctaccttttcttctaacattcattttgaggcaaaactgaaatactttatatcactgataagttgaaagtgtcgctgacagaaaaaaaaaaagggtttgcctaattctgctattcttgttggttataggtaggccagggtacgtacagca

SEQ ID NO: 74330 - DNA, 256 bp, Carica papaya
  Intron number 1 from transcript evm.TU.contig_28071.2 (loc us evm.TU.contig_28071.2) derived from phytozome v7.0 (chr -ID contig_28071; pos 9346 to 9601 reverse strand)
aaagggtatttaagtaatttactctctttctgtttgctaaatgagaaggggaacccgagagttctcatttattcagcttaccttgaagatgttgacagaatccttggcacagataaatcaaatttttctcatcaataaaaatatgtcagcagtcgactaatatttcttctttgatattcgtgtttgtctgggattgttcttgataatttttctttttgcagaaatcgcagtctttcagcagcccaaactggaagaa

SEQ ID NO: 74331 - DNA, 737 bp, Carica papaya
  Intron number 2 from transcript evm.model.supercontig_50.1 48 (locus evm.TU.supercontig_50.148) derived from phytozom e v7.0 (chr-ID supercontig_50; pos 1405308 to 1406044 reve rse strand)
ataactggcagaaggtaataaattaagtgtttacttttcagaacttggtcttaataatgttagtgcatgtcagaaattttgaagaatgaggagtctaattaggcatgctcttatgtttctcttattcgctcactctaggtgtgacccccttctttggttgttcaagatttcagaaagctaaattactggtatgtgggggagccatttatgtgtaaaagttatgccttggctgtaatagtgaccttttgagttttgaccagtctgtatgctatctcccaagttgctcgcttgaaactactattgttacttgtccctgaccataactgacaacttacaatatcctatggtgcatcatgtatggtatcatgctattgctctacgtaactgattcaacttacaagttatccttgtctttttcttttttgatatagtttttcctgctcattactcaacagtttatttgagtttgttgccctatggagctccatcttgtttcagttaggcacttaataaatgttcttcgttttgttattgtggctgaataactgatatatacacgtgtatatatatatatatatatctatatctttatgataatctcataagtttcaacttctaatgttacttcattttgccattttatatccacttatgttaacttcattaagtttaagtgttatcatgttctaccattttctctaggtgtgggctgtattaaaacctggattcttggcctt

SEQ ID NO: 74332 - DNA, 533 bp, Carica papaya
  Intron number 2 from transcript evm.model.supercontig_48.1 36 (locus evm.TU.supercontig_48.136) derived from phytozom e v7.0 (chr-ID supercontig_48; pos 806549 to 807081 revers e strand)
tagtggctagacttgagcccctttttagagcagtggtgagttcatgattctttttctccgttgttttgctgacgggttaggttttgaaaagcatgatttggattttggcttgatttggaagtacttatttgtttttactgtgggaaatctgcatagtttattttgttcgagtaagtacctgtttattatttcgtcatcacttttttccgtatatttgctttgtagaggaacaaaagcctcttattaatatgtggttggtccaaaattccttggttgagtttagttactgccttacttatggcttcttctccataatctgctgataatacatggcacgatcatgatatagtctggatctatatcaaagttattgttgaaactaactatctttttcatgtttgtcataaacataagattgattaattcgaattcataatatctggccatatattggattctacgtttatgttcattgctgcaaatatctttgttgactaggtgcgagaggaggtggaaagagtagttctgcccct

SEQ ID NO: 74333 - DNA, 937 bp, Carica papaya
  Intron number 3 from transcript evm.model.supercontig_175. 6 (locus evm.TU.supercontig_175.6) derived from phytozome v7.0 (chr-ID supercontig_175; pos 174876 to 175812)
agggtaggttttctaactcttttattattattattagaatttttcgtaataaattgagttatttctggaaaatttttgagattcaacatacttatttatgtctattgatgagcataagaaagaaattcctttttgttattcagatattaaatcagtgatgaatatgtttgtttctgatttcttgattaatttttcaataaaattgttgatatcaagcttgcctgatagggatgcaatccagtgttcatggtttatctagatcttgttttgcagttgtaattttctggtgatagcttttctattttttgtttctctgttgatatattcagcgagtcatctttctctatatgtgtgtgtctgtgttcataatcaaataaaataagacactggctgagaaggtagatatcaccacatgcactactgccttaagatacttgtacagatctaatacatccattgggtaattatatagctttagatattataacggaaagatagtctataataatttccattgcattttcttgaggattccaactagtaggaacaaggacactaaagtatcgtgtacttttgcaattgcattttcttgaggattccaaatagtaggaacaaagacactaaagtatcaatgtacttttgcaaattttctcttttccccagcagggtgtgaccaggaatattacaaggtatctttatgaacatttgtggttttgcttttgaaccttttggtttagttctttttatcttgctctgatcttgcttggatagtgtatggaaactatatttggaattgttgaggctctgctttgttctggtgatagcaatgactcatatgttgatcaacttgcagattttattgcatcttcccattactaatttcttttcttgtttgttggtagattcaactctctcagaggagatcattcaaaaggtt

SEQ ID NO: 74334 - DNA, 678 bp, Carica papaya
  Intron number 3 from transcript evm.model.supercontig_140. 39 (locus evm.TU.supercontig_140.39) derived from phytozom e v7.0 (chr-ID supercontig_140; pos 550199 to 550876 rever se strand)
ccattatctaaatgtatgtttgcttttcaatattctttcttcacttttgaaatttttattacttgggttccccgttttattgatttcttttcctttaatgatattggtagattccaaattccatgttgatttattatgaattttatgtgcttttgtttagaggaagactcagctttttagaatacaagagaacttttagttctgttgccgcctaaacaattcatctttttgaagatttgcactttcacttttttccccttagaccacttagacttgcaatttactcatcatgtagcttcttctatattaagcctttgcattatgtttttgtctccttttctttcctaagaacatttgtttctgtgtactttgagtctgagcttcttcgagaaggttagtgcatttcttagttaagagttaaaaaggcctatttcacacttgctattctgatatgctagttcatctgcattctttttaacttgattctttttttttttcttctttcgtttagatgaggagagaagttacgatatggtacagaatgtaccataaaactcgtttttttctttgtttttagataatcaatgtctattcaattagttcatttcatatcttgatatctttcattgttatgtcttctcagatagcaggccaaaactgtttgctggatcacctgaa

SEQ ID NO: 74335 - DNA, 828 bp, Carica papaya
  Intron number 1 from transcript evm.model.supercontig_46.1 57 (locus evm.TU.supercontig_46.157) derived from phytozom e v7.0 (chr-ID supercontig_46; pos 1548599 to 1549426)
tcaaccacgggccgctttctacttggaagatcaaggtattcttcaaaagaatattatttaagtacttgttataattagttctttgttgggtgtcattgaaataccatgttcatatttcctgcttggaatttggttcataaatttattaggttgaattagttggctattacaaagagataaaatggcaggaaatttagaacaggatttcacaaaatgattttttggtctcgtttttcttatgctcagagtgattttatttttgtctatgaattagtgtaatgattgtccgaaaaacttccttttccatttttttattctcagtttttgatatgctattttgttctggtccttgtcatattcacctcaccggctcagtgcaaaatgaaacgaacttcaacgattctaaaattttagggaacttaaatgcctcgtagagagagcagtcatgttatcttgcagttaccctgaaaagtgaagtagagcaaagatattttcctccttgttgagtctgtcttcatctaaaaactaccttatcagtcgttccttgacagaattgcccttttttttctgccaagtttccggaatattatctctcttcatctcttccttgtagatcaaaatcagaatccaattccgttcctgttcaaagatttcttgtacttgctcattttgtaactccgccttttttaacatttctcattttatcaagaagaataatatggtttaggaattatactttttgaagttgggctgctcacaagtggctgactagatgcctcttggttgttatccatacatgcctgcagggaacacggtgtgataggagac

SEQ ID NO: 74336 - DNA, 425 bp, Carica papaya
  Intron number 2 from transcript evm.model.supercontig_82.2 2 (locus evm.TU.supercontig_82.22) derived from phytozome v7.0 (chr-ID supercontig_82; pos 408454 to 408878 reverse strand)
cccacaaacagattcacaatcttctgaaaatagaggtttattttcttacctgttcagataaaaattagtgaaaaaactgggaagaaatagaagaggggttttgaaacatattttgttggttggataagtaaaaatttgagaaaacattttattaattgaagtaaattaggcggttaaggagggaaaaagagattttgtacagttaggaagctcgccatccttttttttttccccccattttttactatacaaatgaaattggttaggatgttctcctgtttcttccacttttctttgctcccctcaatcaaatgatagttttagtttcttggttcaagttgtttatgagttaccagttttgtcttgattgtgtgaacttcctgtttcaagggtatctttttgaggggcatcttacagtggacccc

SEQ ID NO: 74337 - DNA, 523 bp, Carica papaya
  Intron number 1 from transcript evm.model.supercontig_245. 17 (locus evm.TU.supercontig_245.17) derived from phytozom e v7.0 (chr-ID supercontig_245; pos 298812 to 299334)
gatccgttcttcagagatctctcctctgccccgaggtaaagcaataagcctgtaacgtacagaaatcactgaaaaagcaagctactgaaacagaatttcgcttcttttggttttttttttttgtataattccgatctcgttgaagtttttagtggtgaaagcctaacaatttgtttcttacggaaatggaatatttttttttattgcatttgattggcttatttactggtttttcttttcgtatttgagtattctgttattattattcaatttactattaaaatcgttttattattggagatacttttaatggtttgaagtttttatctatttagctttcgagaaaattcgggatttttggttttagtatgggcatgttagtcaatgtgatagctcttggttaagtattttagcaagcagctgtcttgcagatgagtcattttcttttgttcatgtgctgcttcattggttgacactgttttttgcagttcacaagaaatttggctactgctgctgggaaaaa

SEQ ID NO: 74338 - DNA, 399 bp, Carica papaya
  Intron number 2 from transcript evm.model.supercontig_245. 17 (locus evm.TU.supercontig_245.17) derived from phytozom e v7.0 (chr-ID supercontig_245; pos 299316 to 299714)
ctactgctgctgggaaaaaggaggaaaacgttaaggtaattgaacactattagctgtcaacattttttcatttgaacacattgtcaattcatgtgtatcaactaagagtttgaattttctcaatgaatatgaaaattttgttttgaccaccctggaacttctgtcaatgtaaatagtgtctatatacttatactttttcattaggacagggtcattcaacgtgtattatgtcctaccaatgacaggctttttttgatgaataaattctttgttggggcacttgaatgttttaacttggcatctacatgtgaaaatatcatgtatatattctaattattcttcattgtttctcaatgtcatatagctgccgctgtctttgtttgggggatctggaaacta

SEQ ID NO: 74339 - DNA, 639 bp, Carica papaya
  Intron number 1 from transcript evm.model.supercontig_61.4 (locus evm.TU.supercontig_61.4) derived from phytozome v7 .0 (chr-ID supercontig_61; pos 103319 to 103957)
ccttccagatttcggaattagtggccctttatcaggtaaagaatacttttcctgtttctaaaatcttttaatttgctttatctttatgttgcaatatcatggactgtcttttccacgaaaaaataattgagtactgctgttatctgtatgtatctataaaagcacccagaaagttgcttttgtttctagttaactgatgtattaatatggtaatgtaattgcacacatggaacaatctcaaagtgacaccagatacgtgaggcgaacgcttcgtagctggggatagaaaacatttgaatttttgcccactttcttccaaaatctgttgcaacaggctaatcttgatcaagttttggcctggtctactgaatttattagtgttcaaaattattgtatttactttttgctctcacgatctttttacatggtgatgacaagaatttccaaagttctaaccaagttgtctgaacgtttaacgtagtacacttattttggtaataggtaaaaacatacgggtttatgtaggcttccacctcatgcatcacacacagttactttttgattgtttgatcaaatgttctgttggtgattgtgtttcatgcagcggcacttactggacattattgataaagttgagac

SEQ ID NO: 74340 - DNA, 1041 bp, Carica papaya
  Intron number 1 from transcript evm.model.supercontig_17.4 (locus evm.TU.supercontig_17.4) derived from phytozome v7 .0 (chr-ID supercontig_17; pos 73710 to 74750 reverse stra nd)
gagttcgacaactttgttctggttagtattagctataacctgtaataaagcatttgatattgcattgaaagtttaaataaagcatatagctactaaactgtgaaaagatgatgggtggtcatgtaattgatgcactgtgtacaaaatgttgttctttttttttttccctggatcttctcgtatgatcccatgtaaagtagctgactcattttctgtaacaattgcttggatgatttaaatctatgatccgaatctctgaattaccacatattattgattcattacctttagttaaaaactttggaatgttaacttaaaatgttggtacatttcatacatggacttcttgtcttaactgccctatcatcacttgactgagcttcttgtcttaactgcattatcataactgaaccaaaacaattgataccctttcaaatagggcctctattgtttcatgtaccttaacaatcactttttgcctgggctttaagactctagcatttacttggccctggagttggtgtaggggcctgattcacacccaggtgtaaccaaattcacaaaaagagcctacaaagatttttttctgtgtggtttttagctggatagaatgatggatgtgaaaacttttccattattaatttccagatgctcttcatggttcagttctttattaaactgaaattgcagtcaattttatcttacacggtgccttctgctaggctcttcctcgaaattttttgtgtagtctattttttgcaaatgatgtcagaactatcatagaggcctatgtttgagtttttatgttggtatcaaggtataaacagattttatgactgaatcaatgagtattcatgtatacttttgttaaattattatctgctctctagcttcttcatgcctttctagtatttctccgagggtgttacctcgtacttctcccacggtgtcatttattttgggagttttattgtgaattttattttctgtttttctctttgaatagatatctggagaatcagaggcagtgaagaaggcact

SEQ ID NO: 74341 - DNA, 667 bp, Carica papaya
  Intron number 1 from transcript evm.model.supercontig_182. 3 (locus evm.TU.supercontig_182.3) derived from phytozome v7.0 (chr-ID supercontig_182; pos 11717 to 12383 reverse s trand)
taaagtttgttgcatgtaagctcaatctatttcatagttatctttgtaaaatgatcttgtatgccctttagagggcaagtttagtcacttttgcaagagcaatgaggaagctcttaaagtggctatatttcaatagtaggaaatatgaggcagaaccaatcaaggaacaaaaacatttagggaagttaattaaaaaaaacagaaagatctaattttcttttctaagttgtggaaagttttacaataaaggaaaataggaagatttacttttctattttctacatttcctatatcactactctttctgcttaatttattttcctatttactaggtttttcaaattttctatttttgatgtatttggtacctataaaggacacaagaatcagtaaagaaaaagtaggtcacacattttcaagtaacccttttccatagtatgagaaattcgggggtatatttttctccttttctcatttccaatttccgaatacaggtggttacttaaaaatcactgaataactgtcggtctcagaattatgtttaagctatacactggcaagagacctagagagttttttactgagattaactgatgtgatcccagaaatgactaaattagtcctgaagacagagtcttgcaaaaagcaggaatcacgcacgcagcac

SEQ ID NO: 74342 - DNA, 639 bp, Carica papaya
  Intron number 1 from transcript evm.model.supercontig_18.1 03 (locus evm.TU.supercontig_18.103) derived from phytozom e v7.0 (chr-ID supercontig_18; pos 765031 to 765669)
tcttacttccgtcacttcctctcaacttgctcgaggtgatggattttgctctcttctttactttgcttcactcctctcctcacttcactgtaatttgattggattccatacgataatactcgttaatttgataatggtttcctgcttctgaatacataaacgtacaatgtgtttgtttctgctagctgtcctgaggtctaaactgttctccttggctctagttatttggaaatgatatattctctaaaattcgaccggatgaataccgaaaccctaatcgtcgagttcttttgttttgcggcagaggcgcaatgtagttaagttgtcttgaatttgcttttgtaggataatttaatagcatcgaagtggtggttaataatttgccggtttctttgtctaagtgtagatagtttttttgacacccggtatcccattcatgtaattttatgaaatcatccgcttcgttggatgacatttgatttacaataacattaaatcttattgcgtggcatcagtgtcagcttcatcgctgaaattttgaggtttcaatgcacttgtggtgatctagtaacctttgtctcttttctgagaggatataataacattttttcacttcagcagaagcgaaaatttcagaga

SEQ ID NO: 74343 - DNA, 876 bp, Carica papaya
  Intron number 1 from transcript evm.model.supercontig_21.2 24 (locus evm.TU.supercontig_21.224) derived from phytozom e v7.0 (chr-ID supercontig_21; pos 2307915 to 2308790)
gcttcggcgcctccattcctcattggcgcaggtagcattttctggtttcctggtagcttttcggcttcttccatgcaaatagcttggcagcagttaatgtttctttgcgtcgccatgtctcaacagtagaattttttatttcttgctttcttttctcgattctaaggtttcttgcggtataatgtttgcttgcttggcgaattttttgattgtcgacctggaagttggctcgaatttaatatacttcctgccagatttatggatgagaagcttgcttatgtcggttgcaatcccttgtagatcggagttttagctccaatgttcatttgcttctcaccgattaggtggagaaggggcttgctgatgtagttattagttataatcccatgtcaacttggagctttatctcttcaagatggagctacattacgtggtgaaagcagctgcgtcggctgaaatttaatatcaaatataaattgtattatataagtagctgtatttcaattagttaactagttttgtgtttgcgagatagaaagagaatacaagacataatcattgatacaattatgtatcaaaatttgaaactagtttactgaaaataaaagcatatgatatataatatatggttatctatcaataattccatcggttaagctataagcctaattactaatatgtgtgaactaatatatgatgtctagaaaactgataatagaatttttaaaaaatcgactttaagaaacttgcctgcatgttattttcttgatctgtcatgttttatctccaataatcctgtgccccccatcaaggacatgggttaatccttttggttgtcttgcttcaggaatattggcactctagcccaaacgcaca

SEQ ID NO: 74344 - DNA, 783 bp, Carica papaya
  Intron number 2 from transcript evm.model.supercontig_84.5 7 (locus evm.TU.supercontig_84.57) derived from phytozome v7.0 (chr-ID supercontig_84; pos 466109 to 466891 reverse strand)
ctcactggttgacacagcattcattggccaaataggtatctccttgtttctgtctccattcagagtcatcactactttggccttttttctcatttttcctcctgaataattgcatctttgtcaagtataccgactggcatactcgtgttttatttttcttatgactgcttgaatagccattttggtgcatggggagttgtttttgttgatagatggcaattattgaccgcaggtgctttccggttcttacaaaaaaattgtgaatagaaacatagtttaatcggtggatcagcatgctagtcattatgtccagagaatgcaactcaaaatcatgattcttcgcttaatgatttgaacgtataatacctgaattcctgtgtcaccttgatctcctccccctccccacccaaaattggccttttgattaatcactttttacatgtgaaattttgaggtaaaaggctttttatattttgcaatttgataactcataaaggtcaatatgacttcgcttgcaaatgtgattcctactcacaagtgcattaacttatctcagtggacatttatctgaaagtatatatgcaggatcttctatgttcttgagcatagtcaaccttcccatgcataccttctagtgctatattcatctcatggctgtattaccatatacttagcttccacagaaagaaatgaaaaaagatattaaggtttgtataaatacttacctcgtttgtgctaattcatacaggtccagtagaactcgctgctgttggagtttctatt

SEQ ID NO: 74345 - DNA, 449 bp, Carica papaya
  Intron number 1 from transcript evm.model.supercontig_146. 63 (locus evm.TU.supercontig_146.63) derived from phytozom e v7.0 (chr-ID supercontig_146; pos 370650 to 371098 rever se strand)
gttctgctaacagccagacaggtactttttcttttacaaatctcgattctgtttttgttggaataggttgatataatattttcgggaaaaaaaggtaatcaaattcatcagaagatatctttggcgtatttgcatggtaagctaatcaaggaattcctggttaatactagaaatggaaatattatagtctgtacaatatcataattgcattaagaaagtaaacccaatgcattttttgccagttaaataatccccacatttctgtcttgaccatcagaggatcactgttttgtcccctagtaaagaaatatataacatcacaggatccttttctgttaataaattttcacggttcttcagttcatgtgctgtaatttttttgaatgcataaccctggaggagcttccttggtgtcagtgatttaacatctcttagtgactctccagttg

SEQ ID NO: 74346 - DNA, 791 bp, Carica papaya
  Intron number 1 from transcript evm.model.supercontig_73.3 (locus evm.TU.supercontig_73.3) derived from phytozome v7 .0 (chr-ID supercontig_73; pos 97652 to 98442)
cccatctgactcttcaaatttgcactatcaacctggtaaaaatgcatggctattgattaaaacacttttgagagttttttgtttttttaaattttgatttaatagtttttatttgaatcctcttaaatcagacccaattcttcttatttctgtaagttttatttcttgctttttttggttaattaatctccaatttcttttattaaaaaaaaaaaatctccatttctaatttatgtcttctaaagtttctttactctttcacccaaaagatatccatctactgctgtacatcaaattttaagaatctttataactaggaggctattctagtgaaactacggtagaataaagtactaaactttaagactttctttgtgatgatgtgacaatttttgctactacttcatttgattaattaaattacactgttgtacatggatataatacgttttgcactttcaaacatatgttttagctggaaaaattcattatatcaagagctatcatggattggaaggaggaggtatacatacgtttgcataaatttgttgtatttgttcaaatatatatgtatttactatatatatatatatatatatattctatagttgcttgtgtttcctttcatatatacatacatgtatggactatctttatatatattctttagttaattaaaagtaaaagctaattaaaagaaaacatggtgtaaaaagaaaaaaagttgaaatgattttcctggtaactgggctttttgagctgattttcaggattcatcacagtgttcatca

SEQ ID NO: 74347 - DNA, 836 bp, Carica papaya
  Intron number 1 from transcript evm.model.supercontig_70.6 8 (locus evm.TU.supercontig_70.68) derived from phytozome v7.0 (chr-ID supercontig_70; pos 450335 to 451170 reverse strand)
cctctattggcttggactgcactcttgattacgaggtatgaatttctctggtttgttttacatgtatgtttcttccatatatatgttgtactgtgtatttttgttaagcttcatgctttttgtataccaccttgctcggaacacggggttttataattgataatttttttgataattgattaaacctgtggttaacttatgtgatttctgcgacgtggggactggaaatgtttatgtacgttaagtaagcagaggtggaaacggtaagttggcttgctttaggattttgggtttgtccgttaaaggagctagaacaaaaaattttatctatggtcttttaagtttgtctctgaagtatggtaaatggtgggtattcctatggaaagttctaaactatatgttgatagtctggttcagagatggaagaagaggttagtaggacttttgtggtgtttgatggacattactggttttctaagatacctcaatctgattatcttgaaaggtgctcataaagtattttctaacgtctggtttaggcacttgtttcatatatagttcaatgaagtgcatgatgtttggtaaatttagctccatgaagtgctgaatatttattggatccgcaattgttgtgttaattttctttctgttgggaggagatatttttgaaactgtaatacacattatatcatggtcagaaatgaatgtgattcctttgcttgtttggtggtcttcttatggtgtgattaatttttacttgttgaagttaaagtttgttgtgtgaccatttggcattgatttttcacaaatttggaaattgttgcaggaggaagaag

SEQ ID NO: 74348 - DNA, 622 bp, Carica papaya
  Intron number 2 from transcript evm.model.supercontig_340. 9 (locus evm.TU.supercontig_340.9) derived from phytozome v7.0 (chr-ID supercontig_340; pos 47530 to 48151 reverse s trand)
agccagtgctttttacgtataatttttgccctttctctctctatttatttttttttgttaaatggttagttataattaagtttaattttcttgtgcttttatttttatttttttgacaaattattatattaatttttaaaatttaaaactcgttcccaattattttttactataatttgattcataatatttttatttatttaaaattattaatttttttttatattttaacagagaaaactaaaataattaaaaattaacttaactaattaattaaattaataataataataataataaactgaatatttaaaataaataaaaaaattagaaccaaattattaaataaaaattaatttataacaagtgtcaggaataatttaatcatttcctttttttaaaaaaaaaaatagtaaaaagaagatcctttataccgaaatacagcattatgtagaaaattaaactccatatacttgacctaagatttatacaccttattgttacttgaattttctttaaactagcaattgcctgtaaagactgaatgagtagaagaatgggacatagttatgctctaatattttaaactgacaatgaagaatccatggtggtgtatgcagga

SEQ ID NO: 74349 - DNA, 809 bp, Carica papaya
  Intron number 3 from transcript evm.model.supercontig_5.34 5 (locus evm.TU.supercontig_5.345) derived from phytozome v7.0 (chr-ID supercontig_5; pos 3233751 to 3234559)
tgctacaaaaagttggagaagaaactttgccaggggtgaggacaataagttattgactggactggttttaagtgaacttttgattagacttttggatattcctctgactgaaactagtggtgaactttagtgggttgtacttgttatctttaggatgtggctgcatgaattgaacaagcgagtaataaaaaaattagttgactgcccgtctttgttttaaattcttcatagtagacttattgtctctgattttcttttgtttatcccttctttaagaaaatgaagactaaacaaagaggaaagttagcaaaaatgtaaaatacatgttcacctgcatatatgtgtgccataacattgaaaattctgtaaataaatgttattgtaaagaaggtggtataagtgcaaccaatctgatacttgaactttttgctttggaaaattgaggcccacggtaaagatttgaggatttatggtgatctctgcatgtgtatttttgggtagccatggggcagggtttaattaaatggactgtatttggagtatgttcatatgcaaatgcttgatacagcaatttgttgaattttcagttccatagttatcagatgcaagatgttccataccatttgcattttctggttgattgcaataagctttttggttttctggttgcctggattatctaatggatataacataagccagaatctttcacttttactaacatgcatatttgttgtgtgtacctaatgtaatggtttcatgtctctctttaaggtggttattctttgtgggggatcatatagacgtgg

SEQ ID NO: 74350 - DNA, 538 bp, Carica papaya
  Intron number 2 from transcript evm.model.supercontig_3.34 2 (locus evm.TU.supercontig_3.342) derived from phytozome v7.0 (chr-ID supercontig_3; pos 2367737 to 2368274 reverse strand)
tgaaaagccatttacaggtgatgataattaagttctgaatcttgttattaattatctttgattgtttgcgagaaatgagaagagagaagactttgttgtaaaaaaatcaggcacaaaatccaaggaggagtgcagtgaatgaattgatgaacagtggagtgtgttctttggttgataaaggacaaggtctacttttagagcgaagaaaaaaaaaagaaaagaaaaaagtagccatcatttctcaataatacaaagcaattactgactttaccaaacatcaacctcgtggttaataaactaaccaggaaaaatccagaaacagaaacacctgatttgatttttttgactactagcttctactcccatttttactcctctctctctctctctctctgtatacatatatacaattatagtttccttgacatgtagactttctcttttctgggtgttaattctttattcagtttgtttgtttatcttctcggtttcattgttttctattcattttctttgtctacttttgcctctcttgcag

SEQ ID NO: 74351 - DNA, 367 bp, Carica papaya
  Intron number 1 from transcript evm.model.supercontig_73.6 6 (locus evm.TU.supercontig_73.66) derived from phytozome v7.0 (chr-ID supercontig_73; pos 870735 to 871101)
tttagctatttctgctcaaggaagaattttagcaggtaactagagatttgatagtaattatacagactatatatatatatatatatatatatgcatatatgtataacttgttttttactttttttcttctaaaaaagtcggaaatagttcaattttctctataaagaagccacttatactataaataaatatgtatgtatgtatacttagtcttgatatgttatacagcatttttgaggagtgctcagttagcacatgaacagtatcaaaacaatgttgtaaaactcaacttaatagaatttctttcaaaatcattgttgttgataaatatatgttcatttataacgtgaattagcaggaaatctgt

SEQ ID NO: 74352 - DNA, 399 bp, Carica papaya
  Intron number 1 from transcript evm.model.supercontig_30.5 8 (locus evm.TU.supercontig_30.58) derived from phytozome v7.0 (chr-ID supercontig_30; pos 870162 to 870560)
atactgttgcagtcgcagtccaggtttctccttcagaccttgttgaatcggcttcacgagtgcgtaattcctccttttccttcatctcccacacttcctttcttgcttaaactaataatggctatcatttcagtttaatgtcattgtcttaaggtaccaactatatgtctcatttgatttcgtttctttgttctgtatccctaattactctcttttaattgtcgtccacggttaaggagagactgtgttcttccattttcgacttcttattagttgttctgaacagaaacaatcaccaaaaacacctactcgctccacccgtttttgttgcactttgctgatattttttatttttgttcttcagccttgataaaggagttgagcttgattaccactggg

SEQ ID NO: 74353 - DNA, 437 bp, Carica papaya
  Intron number 2 from transcript evm.model.supercontig_65.4 1 (locus evm.TU.supercontig_65.41) derived from phytozome v7.0 (chr-ID supercontig_65; pos 516803 to 517239 reverse strand)
tagagaaagctaaggaaatctgtgccaatcgtggggtatgtatatatttcttagctgatattttattctgtttatgataattccattagtgaaacaacaatcatataaaactgtgattacacgatttgattattagtttttttgcttatctttttcagaaacccttcaagaactattttcatttatttttccactcttccaactcaaaggaagaacaaaaagatttacatttatatttcttagttttttttaggtgataattgtgaaatgtgtaagtaattatctcattaggcagatagagaaacagtacaatctattatttataatttaattcatccttctttacaattgacttaatatcacatatatacagcaaaaatactattgtttccttctctgcaggttgttgcggagacgatcacagaatctggaaatcc

SEQ ID NO: 74354 - DNA, 563 bp, Carica papaya
  Intron number 1 from transcript evm.model.supercontig_66.1 05 (locus evm.TU.supercontig_66.105) derived from phytozom e v7.0 (chr-ID supercontig_66; pos 936412 to 936974 revers e strand)
caacacatgtaagtcactgttgatcttgtgaaacttgtgttattcttcgacagttctgtgttcataactgcttttaagtttttatattttggacttactggatcttgtaccttataaatttctgttattgttaaaagatattgggacgaaaaataaaatgcagccatcaaatgaataggtagaaatattgccagtggcccatataattaattagtagaaaatgctgaggccattccatcaacaaggtttcactttattccagtaatattcttcagattctcatcttccttacagatttccaatgtttttctctttgttatttctcccgtgcaagctgacatactcacatcaactctgtttttgaaattcaaaatcaccatagatgagctgcagatctgcaatttataccattggcaagaacttccatttggctcatgaaacatgctacaaatgcatgaatgcttatttttgcatctactgataaatatatgaaattattcgttcaacatttctttctccatgggacagattccacaagctgggtgggacaaactctttatttc

SEQ ID NO: 74355 - DNA, 940 bp, Carica papaya
  Intron number 1 from transcript evm.model.supercontig_84.4 5 (locus evm.TU.supercontig_84.45) derived from phytozome v7.0 (chr-ID supercontig_84; pos 396137 to 397076)
ccaactgctaaaatctgtcacaagtgaggttatggtgtttctttgtttaataatttattgttctgatcatgatcatgatcatgtaaaaacatcaacatgaacctgtaccttcgtattggagaatcctctttctttcacgtcttcttggctccctaggctgttctcatgtacatttaaatccagagtttcttgctggcaaatgcaggtataagtaatggttaagcttcgaagttttagccaaaacgccaaattgattatgcagttctttatgtgtggctggaattggcttatccagtttttcataccaggagaagtgactaacccattacttacattatcaaattgcaagttcagtctttctagttctgcttgaagcctctatcttgattttgcaaggtggaaagctaccaggatcatttggtatcattgagggtgtttggtttggtttggtttacttttgagtcaatccagcttatacatctaatgattagcaagacaatcaattaacacaatttcaatgtgaggcaatatgaactggatttgggaccgaattcttcgagtatggttgaggttaatatgatttctccgcgacaaaagtaatgggtattaagcgaaaaaattgatcaggtttggtttgatttacttttgagtgaaaccagcttatacatataatgattagcaagacaatcaattagcacgatttcaatgtgaggcaatatgaattggatttgggatcgaattcttcgagtatggtggaggttactatgaatctccgcgatgaaagtaatgggtttaagcgaaaaaattgatcagcaacagaacctcaaaatgtccaagcactgccatatatcatctagagatagggaactaattcaaatagcttaaagtttgaaggtagcctatataacttgtcctttgatgttgcagaaacatttcaaac

SEQ ID NO: 74356 - DNA, 530 bp, Carica papaya
  Intron number 3 from transcript evm.model.supercontig_46.4 (locus evm.TU.supercontig_46.4) derived from phytozome v7 .0 (chr-ID supercontig_46; pos 69966 to 70495)
aattgctggtgaagtcagcatcaaatacattccaggtaatgcctctcctgaatatccttaagcaattttatttttttaaaaagaaaaggatatagatcttcaaagtacccaggagtgccaattgaagttgataaataactctgtggcagaaatttggggtaattcttgtgcttcagtttttggttggccaattgaagccatgagtcctaactattctttcttgagctcaaggtcaaattgtttactctagcaaatcacctttttataagcatggacgggcttcgtctagtgttttgtttggcataaataaacattgagaccaatacattacttcgatcttcaaccgaggatcacatatcatgattcttgtatacaactagattgtttgattctctgccctatcatatacatgcatgaaaatagttatgtaagacttttactttgaaagtattgcttgcgctgatggtactgattattatgacctctaaatttaaatgtcaactttttgcttttgtggtgtcaggttgaga

SEQ ID NO: 74357 - DNA, 889 bp, Carica papaya
  Intron number 1 from transcript evm.model.supercontig_33.1 64 (locus evm.TU.supercontig_33.164) derived from phytozom e v7.0 (chr-ID supercontig_33; pos 1660229 to 1661117 reve rse strand)
tttctactgaggaaatcgtcctagggaaacctagggttcattggtacttttctgctatttgactcctcttatatattttcttttgacttaggcaatgacaatttggtttctttatctattgattggttaatcataagaaaatttatcatatgagtgtgtttgattgtgtttttctgtacttgtatgattactaatttaaagctacttggatttgagatcttgataaccacaaattaatttaaagctagttagaatttgtgatgccactgatataagattttttaatttgtttggtaagaactcatcatctgcttctctcgttctgtgaagtaccagtcgaaactgttgctgctccaacatgaaatttagatttggaactcgatatttctggtgaggagcctagagtgaggagcctagagtgatgagcccacaaacagatagcgtgctattagttgttttggcttttagaaaaagcaatattgcgagctgctagaagattggaattgtctttattcactcttcttagatatgattgttaagttcttcaaagtatcgattcaatatctttcctggagtgaagagggagaaaccttgtacaagtaattttagaatttttttataggccaaactgcaggtatgaaactgatcataaaaatgaaaattgaaaagataaatgtaccagatcaagtctaattttctgtttacagtgttatactatggtctaaattgtttcctttgcacttcaattcttctaatatttagatgacaaacaagacaagaagcagaggaagctaagaatggagatgaatcagcgggacaactaggggcaaaaggtgctgttctatgatatgatgaacattggacatccaagtgtccttacaaggacctt

SEQ ID NO: 74358 - DNA, 802 bp, Carica papaya
  Intron number 2 from transcript evm.model.supercontig_33.6 9 (locus evm.TU.supercontig_33.69) derived from phytozome v7.0 (chr-ID supercontig_33; pos 639423 to 640224)
attggtacaggtacactgtatttttttaacttatctttatttttaaattgattctaaaattttaattattatttatttaaaaaaatatatatgtaacatacatatatttttaaaatattattttaatattataattaagatctttaattattttattataattttatatattattatattaattttaaattatattattttttgaaaaataaaacatgaaaggagggataacgtcaaactaaactatattttggtactcagtctaatttggttatgcttacttctaaactaataaatattttaaaaaataattatgatgatattgtgagtaggagagagttatacaatttgttatgttgtaaaatgtattttatttatttttacagtttaagatatatatttcaaatgctagaaactcctccaatttttttccattttattcaactaattgtttcttcttttgatatttttaagtaccaaatgtttttattgtatttaattaattatgtcaactaactaattaagttagaggtattaaatttgataccatatcacctgacatataagtgtcatgtagcatgttaagtcatttagtaataattatgtaattatattaagaattttttttaaaaaattaaactaaatcaataaaaaaataaaatttccatttgattagaaaaaaggagaaaataaaaattagatactatgttattcaatcactctctcttttatcttttatctattctataacgttatttgataatgattttttgtaattttaacggattgaacttgaaggtac

SEQ ID NO: 74359 - DNA, 958 bp, Carica papaya
  Intron number 1 from transcript evm.model.supercontig_6.22 0 (locus evm.TU.supercontig_6.220) derived from phytozome v7.0 (chr-ID supercontig_6; pos 1725956 to 1726913 reverse strand)
agagagattaacgcaaggtccactgggtcgaggtcagcttctcaaaatggtattgaaaattaagtatttcagttgttcacgcctcctatataatatatacatgtatacacgcagaaacacaagtgtatatctatatgtggcagtcgttgccatcgtcgatgaatgtatggatgcaacattgacaactgggtaaacgatggttctcatgaggtacttacttgttaaatgattatgcgcatggacgtaaaatattactatgtactacgcgtcaacttttggctgcaaaccatcaaaaatggatgttgatgaggccacgtactcaatatctatattatttacatgaatttattataagaggcttgtttctatttgctacataaatgttgcgaagaaaattgccaaatcaatgtttttgagtgtaaatttacaacacactaattatagtacgaatttcttattaaacccgatttgaatttacaatttcgtagaaagggttcatctaatcaagctattattgtcgacaaaaaatcaacagatgttgccgttaacatattcctatacgtatatataaacacgctgttaaagacaggtaggtggtagatgtgttctgtgggtcgagaaatagctatcaaacacgtgttgtcaaacacttaacacccaactgctcataaaaattccttgtacatttgttttgcaatttcaacaacacaagataaagtatacttatagccaaacatacataaaagtgactgcaccttatttgtctgtttggatgaagtgaatctaccaggaaagttcatggctcatgaagaaaaactcaaatatcaaattgtaagcttgaattaaatcaccaataagatatttcccatatgacattttttgggttataaaaggacttgtcaaggtattggtttttcatgcagagaaatattaaccaaagccagagagagagagagaa

SEQ ID NO: 74360 - DNA, 731 bp, Carica papaya
  Intron number 1 from transcript evm.model.supercontig_37.1 90 (locus evm.TU.supercontig_37.190) derived from phytozom e v7.0 (chr-ID supercontig_37; pos 1477212 to 1477942 reve rse strand)
cgctctcctcctcctggcatctcctcttcttcaaggtttgttgtctctcgctccctcaatctcagatctagatcgagtatgttagtacgtttctcgtatatggacatcgtgtataatcgtatgctacatggatgtacgcacacctgtttgatccgtgtttccgtgaattttccttctgtgtgaggagtttatttttttaagctgcgtgcttgcatgcaggagtggttttctgatctgccgagggggatctggtttgacttcggctattttattagaatttttccggtttttaatttcaagttttctgttcgagcttttttagtatgtgcagttgggttttgctttcgagtgattagtttgtggtaaagtttgaaacggagtttgttaattagtttcggaagcgaaattcgctttggaaatatcgttttaaaagcaagaagaggccaatcattttttggctggatgattactggtgttgagaatttgtgaatacaacttcggctgttactttgtgttgttgttaagagtttgtgattgaatgagtttccggagatctgccatgatagcatttacaaatttgagctcgcctagtaaacgcgagttattttgtactagaaattttggtttctatggttaaaattgtttcatttgcaagataattttcttggcatttccatctgagttagctgcctttcacttgatagttgctaggtgccaatcggactctgggg

SEQ ID NO: 74361 - DNA, 928 bp, Carica papaya
  Intron number 3 from transcript evm.model.supercontig_16.1 73 (locus evm.TU.supercontig_16.173) derived from phytozom e v7.0 (chr-ID supercontig_16; pos 2630689 to 2631616 reve rse strand)
ataagatattgaaggatattattaatcgttataaggtacatttcttttcatattttagaaacctttgatcttcttacttcttatatttacatttatcattatgtggatagattagttgtgaaaaaaaaggtcaattttgatactgcttttttcttaaattcattgaagttgtatgtgtacgcatgctcgtttatagcttgcttatgcacgagtgcttgcaagaggaaagaaaattaattaagattatagtcactttaaattctatataggattttcatgggaatagtagttgttgcaccatgtcagctgttgtgttttgttctcatgctgcaaccaggctaaaaggcacctgatttaatcctaaggacagtaaaccacctcccattgatgagtctaatataataacgaccaataattgaggcatgagcagtatgtcctcgtggaaagtaaattttctaaatttatagtggccaaaaaattttataaatttatttaaaaaagtttgtaactctggaacatcttgctgaactccatttagacagcttttttttttttggttaaaagtgcctaaaggttgctcatctgtgcgttttaattttaaaatttggaaagcggctcataatataacaagtttaaatgtgcagagcttatgagtaaaacacctgctgaactttgttcattacagttttgcatatttctatgtaacattactgaagtgattcaattcacttttttaaaaaaccactaaaatggaattgttggtcattagtgcatagatatatcaaggtgctttagtgtccatcatatacagtgcatctttacagtgctcaaggattctaaattttattgaagtcgagtaaaatatacttattggttcatatattctttcttcttatttggcagctacttcaaaattataaagttcatt

SEQ ID NO: 74362 - DNA, 557 bp, Carica papaya
  Intron number 4 from transcript evm.model.supercontig_48.5 1 (locus evm.TU.supercontig_48.51) derived from phytozome v7.0 (chr-ID supercontig_48; pos 289622 to 290178)
tgcctttcaacaagacctaccagatgtgtaacaagaagatttaagtgtcatttctatactgtgtagaagaattaggtgtgtgtagactatctttgtagtgtgtttgaattgtttgcgtgttgtttgttgctataatcaaattactactactggtaacagtaagctgacaattttcgttgatggttagggacttagaaggcagttgcaagtttgaatttgtcttggtagttacattagataaaaacagtttccggtcttatagggagcttttgttttatgtaataaatatggtctgcaaagatttacgaataagcggaaaacaaatttcttaaaattcattactttcttctaatgagtccatagtgttgctttaaaataggtaaaggaacaatcgaaaacattcctctacttgtttagattttagtgttaacaacccatgactagactggggtaaccaatggatttctccatatttccagtcccgaacttgctattagtgcactcattgttaagaagtgaaccctttttccgttgctttgttcacatagtggtgcaga

SEQ ID NO: 74363 - DNA, 957 bp, Carica papaya
  Intron number 1 from transcript evm.model.supercontig_46.9 4 (locus evm.TU.supercontig_46.94) derived from phytozome v7.0 (chr-ID supercontig_46; pos 910855 to 911811 reverse strand)
caaaggttaaatagatcgacaaactcagccccattaagaaaagtgtaaaccatcaaatatatgagatattctatgccaaggattcctgatcctggcaaaagctgagaattatcttcaagctctcttgttctctctatccacatgacccatcaaatggcactagagacgtggtagaagttcctccttggtttatgagctgggataccatgccagtcccattattgatatttgattgagccactaattgcacaaggagttaaggagctgagaggcacaatcccaaagctttctcacttaagggaccagagaagaagatggcttcggacttgtgctccttgtggctaagaaagaacttgtttaccatgattcggccttacttcatgggatttcaattgttaaaatcctttccttgtcagcctctgaactgaaaaaaatagttttccacattccaaatatgcttctaaagagatttctgtagaatcttgttaaaagccatcaaatagttgtagtaaaagccattttggataggtggatcatgggtttaagttattaacctgtacttgttaatctttttctcactcgcctcacccacagatgtggtagtagtgtctcttttttcctcattctagaaagtgaaagctctctcaaagatgagagctctattttgataatgctccttcataaattatatgttatttttttcttttaaatgtcacaaatattcctggtttcctttttgttcatagatagttgaaggttaagttttagaccaaccaatagttgtatttgcttataggttttttttgctttatgtgtgtgtttttctttttctttttttaaatcttaaagaaaaatttaataaaacatttgaagccagaaaaaaggttctaattgagtcttttcgaatttcatcctcttgaaggtatcaattagaattgtgcaaaaaagctcttgagg

SEQ ID NO: 74364 - DNA, 534 bp, Carica papaya
  Intron number 1 from transcript evm.model.supercontig_215. 3 (locus evm.TU.supercontig_215.3) derived from phytozome v7.0 (chr-ID supercontig_215; pos 74815 to 75348)
gctcttcctcggtaatcacgattcccttttccgaggtctctctctgcctctctctgttttttttttcgttttaaattaatgtttgataattaggtcgtgatatatttccaattttctttttgaagttctggtgttttgctgcttggaaaactaagcatcaaagaaaatagtgtgttttttgtggctgctttttgttttgggagtatttgctttaatttttgaaatacagaattctgttttagttaacaaacttcgtttgctctgcaaatacggtttcagtagaaattcaaatatctgaattttgtgcttgatattttctcgttatttcctcgcgaagaaaaacaacagtttcccaagtaatagtgctagtttcctgtttttagtaatttctcacacaaacttcaagttgaagcatttaattcatttattaaaaaagagtttccagataaactgtcttgctgattgttatatacactaagaacttcctgatttgcattcattctgtggtgtgaaggtgggagatccgttataaac

SEQ ID NO: 74365 - DNA, 801 bp, Carica papaya
  Intron number 2 from transcript evm.model.supercontig_44.4 8 (locus evm.TU.supercontig_44.48) derived from phytozome v7.0 (chr-ID supercontig_44; pos 481021 to 481821 reverse strand)
tcaacgcttatcgtcccggtaaatggttcatttctatttctctctggttttttccttttccgtttgcagaatttttgtaagtcctgtgtgcaaattggttaagtttaggttttcttggccgattgtacaaaacggtttgtggctaataatgcagcaacagacttaaaaaagaaggtatttttgagttggaaatttatgtagaattgtgcctagcctttgatgtaacctggaaaatagacagaagcaaagcttgaggacggccagaatatagataatgagcagtttgcagttttaaaaatgtgtacattgtgcagcactgtagtcagcattatctaatagatagaagcttagagaacacttaattctgggtttaaatttccaagaattttaatcggattctttggtaagaaagagactaaattaaagatacaacggatctctgagtgcatcttcttttgaccttagtgctggccaattagatccaaatatagctgcataaagtttgagtattggaaaagtgagacagatatatgcattcagtactttagcaatcagtctgttgcttttgtgagggatactcttttatgtggcaggtagtttgctgacgagagtttgctttttgcagacctgccagtttgatttattttgtttttggtttcttaaattttgttcactgtatgaaattaatgaagagccatctattagaggcctaagtagcatacttggtcgtgtagatgagtatttctgttatatattggcttttatagtaacatacttatttggcggttgtattaggtcgtc

SEQ ID NO: 74366 - DNA, 809 bp, Carica papaya
  Intron number 1 from transcript evm.model.supercontig_175. 24 (locus evm.TU.supercontig_175.24) derived from phytozom e v7.0 (chr-ID supercontig_175; pos 484502 to 485310 rever se strand)
gagagccttcaggattctgccgtatctccttacaggtttgtgtttctactgatggatgtttagtttccttttttcttttcttactcctcttgtttctaaaatttaatcttgtcgctaggatattcgtaattgcttgctaggagatactgatagactcaccggaagggtttagatctcatataaatatggtttttgaggatggtagcatttgatcctctgtgaaattcgtatgtcaaattggctttgcatttccagtttttggagaaatcatatgcggattggggcatgttcagttttttcaaaattttatcgaatagttttgtttaggtaactcttccttgaccaagcttttcaagttagttacaaatctgagctttgttgatatttttgtgtgtactttttaagtatcataccctctttgattgtgttcttccttgctatggtgtcaactctttgtcacttgcactatctttcctaggtgaaattcttatttcaaattggcttcgcattttctagtttttgaagagattagatgcgatcctaacatgttcattttttcgaaaaattttatcaaacaattttgtttgtgcaacccttccttgaccatggttttcaagttagttacaaatctgagctttgttgatgcttttatgttgaacattttttaaatatcctcttggattgctttcctctttgctacaatgccaactctttctcctgcactaatcattcattaaaactagttaggaagtactaacagttttgtgtttcctcttattaattcagtcaagagagtacaccacagcaac

SEQ ID NO: 74367 - DNA, 818 bp, Carica papaya
  Intron number 1 from transcript evm.model.supercontig_18.1 79 (locus evm.TU.supercontig_18.179) derived from phytozom e v7.0 (chr-ID supercontig_18; pos 1654311 to 1655128 reve rse strand)
ctgtacctttcagcttcttctctctttggttttttggtatctggttttggtagtgttttacttatgagttttccacttgaaacgtgattgaaggggtgatgttatcgttcgtgttgtcgatgttggtttttggatcggtttatgggataaccagcttgatacccacctgttttgtttaaattttatggttaatttctgtaagttttagtttatgataaatttaggattttgagttgtttgttttgtctcgcaccttggggaatttatgggatttcgtatgaattttacatgataaatccgtttggaactttattctgcagtggctataaatagtcaatttctgcttgatacttctttatgagctatagcaggaatttttttttttgtttccaaagcaaataaggaaagaggtaaggatatgtttggaatagtattcaaaatatattgactcaattctagttaggattggctaggaattcagtttttattattttgtgaagagcttatatcctcctataattaagattattatggattttggaatgaattcctcaaattaagtacatttttcccaagaatagcccaaaagctgtaaagctgtattcactagattatatctgtactataacttgcaaacttctgttttcgcattgtattagtttcttatagtctttgtaaacttaaagtcctgatgttgactttcactgtattattgtgttagtttcttatagtctttgtaaacttaaagtcctgatgttgcctttcaccgtattattttgggcttgatcttttacaggaggtggatcctactgttgaga

SEQ ID NO: 74368 - DNA, 366 bp, Carica papaya
  Intron number 1 from transcript evm.model.supercontig_2041 .1 (locus evm.TU.supercontig_2041.1) derived from phytozom e v7.0 (chr-ID supercontig_2041; pos 4040 to 4405 reverse strand)
ccacggttttcgatccacaaaggttggtattacgaatttcaaggatatgttcatggtttttaacagagtctaattaattttggccaattcattatttctacgttgaaaggcttgctctttgcctcaaagttaatattaattcccaatattttcaaactactggtacatgttttggttcacgaaaataggttgttatacttttagatattgcatattcatagaattatcaaactactggtacatgtttctggtatcatatctatgcagacatatcaaacaactgttacatttgaagaaatttaaattggtaatttatcttggttgtgaatggagttttagagcctttgtttttctttatccaggaaa

SEQ ID NO: 74369 - DNA, 972 bp, Carica papaya
  Intron number 1 from transcript evm.model.supercontig_20.1 52 (locus evm.TU.supercontig_20.152) derived from phytozom e v7.0 (chr-ID supercontig_20; pos 1612577 to 1613548 reve rse strand)
gagtatatagtttctttgattcaaaagtgtcttgatagaaatttggagaaagcactagtgtcaattgctagtaatagatgtgcagtgtcgtgttttctgcatcaagaagatagtagccagcagttacttgtctgttagttccaaaatcttagccaaaaatttgtatatgacacactgattgtttttctctagtgaacttaatagataatcaactttttatcttcatattcttttgaagtttctaattattctttcagaactcctgatgttggcttgtgttgtagaatgctaacatttttactggaattttgtcttgattcatattctcttgtctaaaaagaataatttataggggagataagtgacttatctgatcaagtagctcataatttttcaagccaaactttatccaaagatttcattctgtcatgcaaattcattcggtttagaataagttagaaatccatgttgttcatgacatagaaagcctacctattggtggtaattacaaagaccaatactcgagaagtaattccctgtgtccttcaatgtgatgtgtttcagttctatgagccattattatcagtaggctgccccagtatcatgcatctttgaagtgcttaagcgtcatttcattgctgtctttgataatgacttaacattttaaatgaatcataactcaagggagaaaaagaaaccagatagtgtctaaattgaatcatgcaccaggaactgcacatggtgttacctagctgtaattgcctaaacaattttggtacagactccattttgttgtctttttacttttataatatattaattttgtgaaatcgaattttattatattgaaatgtaggaatagagtataatacaaatatgataagattaattcaaaataatgctctaattctaaattaattttatgtttaattctatagtagtttagaggttgagttaaggattctgtggaag

SEQ ID NO: 74370 - DNA, 858 bp, Carica papaya
  Intron number 2 from transcript evm.model.supercontig_63.3 3 (locus evm.TU.supercontig_63.33) derived from phytozome v7.0 (chr-ID supercontig_63; pos 1069580 to 1070437 revers e strand)
tggaagggggtgttaaggtttcctattaatcaaatatggaaagtgaagactccaataattgttttttttccttgggaagcaggaaaggaatgtattttgacaattgataaactgatgagaagggaaagaacaatgaatggttgttatgtgtaaaagagttgttgagtcctgtaattacattcttttgtggtgtccaatggtgtatgatctttggattatggtacatggtctactatggataaattgggtgatggcaggtctcttgtgggatgacatttgggcttgggtggggggaaggaatgtgtaaaaagaacaaaattcataaaggttattcattttgactatttttgagtaatttaaaaaaagatgaatggtagaacttttgaagggatagagggagagatgtccaaaattagggatagatgattacattattttgcctctttgattttggggcatgatatctataggtggaaagattttgggaatatcataaatataactggatggtactctttgggtgccatattaatatacttcgtgtaccttttatctcaaaataaataaaaaaagctgcttgagtgttaatataactggttttttcgaagatgaaagtatctcttagaggccgttaacttttctggtggactaaactcatggacaaaaaacagaaagggaaaaacaatataggtctaaactaatgggtgaggaaaaataaacagacgagatttctgctcatacaaaaaaaaatgtctgcatatctaataattctagcacagaaatcctagtttagttgcaaatatagctactttttgctgagttacatgttttctgaactctttttcttttttcaggcag

SEQ ID NO: 74371 - DNA, 505 bp, Carica papaya
  Intron number 1 from transcript evm.model.supercontig_46.4 9 (locus evm.TU.supercontig_46.49) derived from phytozome v7.0 (chr-ID supercontig_46; pos 385521 to 386025 reverse strand)
gtgctggactgatttccctttcccagtcgatagtaatgtctctgttctaatttggcattagttagtgttattcgaagttaattgcgtgaaggttaaaaaagaaatgaggattggttgattagcaggataatctaagctctcttagttacttgaactaagcattgtcgattatagcatgcaaaagtttactgtatagaatgatggaggcatttatggtataacttagtattcaaaagctgattgaaatgtataattgattaaaattagaaattgcggaatgttgttggctgaaacctgactgcccgtgagctaagaaactttcatggattattttttgaacgttttcatggattcacaaaagcaaaaattgccgccaatggtggtttgaagttcctgaagtgtgagtaatgcttcaaggacattcttttttctctttatggcatcaagggacactttgatttgggcataactgtgtttaatggtatctgctcagtctgggtagcag

SEQ ID NO: 74372 - DNA, 892 bp, Carica papaya
  Intron number 2 from transcript evm.model.supercontig_2.17 3 (locus evm.TU.supercontig_2.173) derived from phytozome v7.0 (chr-ID supercontig_2; pos 2464422 to 2465313)
gacgtcgaggaagtaaacaagcagcttgatcaaatgtattcttctctcttttcattatgcctacatatttttatagtggaaatccatatctaaagtggattgaaggtgattgcctagatggtttaagaaggttttctttttgggggggaatatttaacttgagaatgtttagttcattatgtgattcagagagaggcttcttcaattctagattttggtttttgattttaaaaaaaattattccattgagaaacctgccaataaaaaagaaaagggaagaaaaattcaacggaatgtttatgatggatccagttggtgctaactacttttctttaatctgttaaaatttgtctctggcttgatgacaaaatttgtcaatactcacagaaaatgaatacacatttgcaaaactcagttaatctgaccctataatgatggcttcactcgggtccagtcaatgcagatatattttgcttgtggagcaacgccctatattaaccctagataattattgaattttcatgttctgagaaggcacgtttgccatttttaatctccttttctgaaagaatgccatgttaaatctcttaacaagacagtgatattctttttgcgttgttttctctcgttaatattgttcaaatgataaaaatgtgttggctttaatttacttttgcagtttctctctagtttttattttcttttgttgatcaacatttaaagtagagaggtgtccgtcccactctatttgatacatatctattattgatccagttagtttttcttttctttccgaatttcagattttaagttttcataatcatcagttagaatgaacaagactgattttgtttcaggggttataacattggagtcggattggttgacgagc

SEQ ID NO: 74373 - DNA, 725 bp, Carica papaya
  Intron number 1 from transcript evm.model.supercontig_82.2 (locus evm.TU.supercontig_82.2) derived from phytozome v7 .0 (chr-ID supercontig_82; pos 24420 to 25144)
tttttgatttgttggacgcgattagggaggtcaaggtcagtgcaaaacatttcatcgtcatcatcatctctttccttttcttcttctttttctttgtctttgatgttccttgtcaatcttcgaagaactctcttaaattcatttgtctgttgggtaatgtggttttctggttaatttaatattgtgcttgaatgtggcctgtcttgggagtgaaaattatttttggaggatctgtatcagtgagtatgaacaaataaattatttagttttgtggagtcattttattgtagcatactctagatagttttggagatgaaaaacaagtaaaagaaccaacttttcttcttactcatcacagttcgttgataaattcagtcaatttattttgattcaattttcatattgtttatgttcgaattagttataaataaaagattttctctatgaattttctaaaataattcattgttccaaacacatcctcgcaaaaaattggaaatgaagcaaagaatttttgacattaatgctacaagtagagatgatgtatgatttttatgagaatgtgtggtaaaaaataagttttgaatactatattgagagttttaataagaaacatgttcagcaggttattataaatcagaattgttcatctaaagaaaaaagaaaaagaattgtttttattggtgctaatttgtttttgtttttctagtaaaattttcaggcta

SEQ ID NO: 74374 - DNA, 737 bp, Carica papaya
  Intron number 2 from transcript evm.model.supercontig_684. 2 (locus evm.TU.supercontig_684.2) derived from phytozome v7.0 (chr-ID supercontig_684; pos 13799 to 14535)
caggtccaggagctcaagtacacacagagaaaacggtttgtttttgcctttataatttgttattgtcttaatatatcttgatttcacaagattaaatatcaatgaattagcagcctatttagtgttcttttctgcagtcgctatatatatgtatgattagtatccttagaactgtgactatctattctgcaagacttgatatattggagtagggtttgagagagggaaaacaagttgtgattttcaaaattttttcctagtgaatccaaacccatctctttgtggtgtaggtcacattaacaccacgaatttctttctgtcttctattttatgctgtgatttggatgctaaatttttctatatcgcacaatatctatagtattttgaatgtcttagtgtttagcactaattcgatctttggctggctcagctgtctgtgctctgtgatatttgtgttatatcatgttttgacatttttcttatgcccatgttaacttctcaatgaaagaagtgtgtatatataccaacaaatttattgtcttacatcacttttatgtttggttatacacgtgcaccatatgcgtgtaaacctacacaattatttaagcaacaggaaagcataaaactgagtatcttgttaaattatgtacttacctcaaattattttaggtagaattttcttaagatgatctgattctcatttaatccttgtccaggtaaacctgcagctatccatt

SEQ ID NO: 74375 - DNA, 546 bp, Carica papaya
  Intron number 2 from transcript evm.model.supercontig_84.3 2 (locus evm.TU.supercontig_84.32) derived from phytozome v7.0 (chr-ID supercontig_84; pos 319028 to 319573)
gctgcaaaggtatgagatggatagtttcttatcaataaaagcatcacctgcacttgagaaagagtagaacatgtaatagtttccttatactcaataaattcggtcgctcacaatgatcaaatcaacatgttttctcttgaaagtaaacaatttcttggaaaacagtaaaggcaagagctttaattcatttcatattagaaattttaattatttgattcataaactttacatatttgatgcattctgaatccaagcatagaattctacaatggtgaatgtgcatttacatttgtcaatagaggattaacaaaaacatttaaaatgaattggatataaaattgattgagatctttaatttatttacgcattctcgtctctatccataaaatagaaatataaaccaacctcaatgcaagagtgcttattttgtacaatagttggttgccttctttgcatattcagcatgttccaactgagtctggtatcaatcttggctgcatgaatcttgcagttctttgctgaagcaggatttccttgtccaagtcg

SEQ ID NO: 74376 - DNA, 755 bp, Carica papaya
  Intron number 2 from transcript evm.model.supercontig_20.1 39 (locus evm.TU.supercontig_20.139) derived from phytozom e v7.0 (chr-ID supercontig_20; pos 1551290 to 1552044 reve rse strand)
cagcagatatcttcaactctgcgttgcaactttcggtaatatctaattaattatatcattaattattgacatatagatataattaattattatttcagctaagattcttaatccacgaatcaaacatgaccttaattaagtctaatagtttactaattcttgaaaaatatacttttggttgcttttaaacttagacttcattaattttgactttcataattaaaatgttttttggaagactaaattaatgaacatgtttttttagacaataatggggaataaggcttataatctaatatgaatttagacaaagaactgtacgtcatttgaacagaggcttttaatggtttgattagtgtgtcaaaaataattttttctttttaaagaatgtaatttattggactgaatttttaatgaagaaaaaattagaattgaagttgaccacgtaccatttagctaattttaattacttaatagaattggtaaataccttatataaaattgtaagtgtatatatctgttaataaaaaaaattattgagtatataagtattcaactcaattggataatttcatctagacaacgtagatatgtgcatgaaatcggaactgtaaacttacaataaaacgacggcgtttctctattacgctctaatagccattacagacaacggtgtaattaataataactaaattaattaaacaaactatggattaactattaattaaattttggtcaggtgaaagactaacaaa

SEQ ID NO: 74377 - DNA, 749 bp, Carica papaya
  Intron number 2 from transcript evm.model.supercontig_223. 11 (locus evm.TU.supercontig_223.11) derived from phytozom e v7.0 (chr-ID supercontig_223; pos 130861 to 131609 rever se strand)
taccctcctattcatcaggtctggtcaaatgactttttgctgctgatattatttatggtggaatttgctagacatgttgactgttagatcgatgaataatgtatttataaacattgtctcgctcagttctgtaaaagtttgagccaactttatgggagtggaggttgttttggatcttgcatttattcttttgatataatgatttggtgccttctgaaagctttcttgtatatctataatctgtttgtgtatcatttgctacttgtggaaaatcaaacatgttttcgtgtctccctagaaaacataaagtagttaaacagcaaaatcgattgattctatggccttctgcacagttcagaagaaatgaagatagatgtaaaatttgcggagataacatatgcatatcagtggctccattttgaacaatctattgtaaaggggaaaaaaaaaacagaaaatagtcgagtagtgcaagacatgtttttgctagttgctgcacataattcaccttccaaacaaattgccattgcatactcgtgcatgtcatttaatccaatcaaactgctgtatagtattcagagatgcaacagggtggaacactaatttttatatttgatatgaactactcttcttctgttcagccttgatttatactaggatggttcttgttctttaatctaaagagaatgtaattgctgcaaatcccttgttcttctcttattaggttcctttctttttgtagtgttcaa

SEQ ID NO: 74378 - DNA, 738 bp, Carica papaya
  Intron number 2 from transcript evm.model.supercontig_32.9 3 (locus evm.TU.supercontig_32.93) derived from phytozome v7.0 (chr-ID supercontig_32; pos 1180864 to 1181601)
cctttaattgtatgggactcacattcagtgattatttcttgttctggtttctttttcatctgtgttgcttccatcttgttcaactaagttttatgtctattgttattactattttttccaacagaaaaaatattattattgagggaaagaagattaggaaacatggaggattagatatgctcctaaaggaaaaagaaaaaaaaaaggaaaataaaaaggagaaagaccggctattcttaaaaacgaacagttaagaaatccctatgtaacatagacagcacagaattttaaagtgctcatgcatcctagcccaaaaggatgccaagaaagacagcttatccgaaataatcaaagataaggaaaaataatccttgaagattctagcatttttcgccagctataacaaccacagtcttgcaaaaaaagccctgcgccaattaataagtttgttatctagtcatttactaagaattaaagttactatttttccttaccttttgtagtagatgttttgcaatccttatgcttttttatgtccgaaaaaaaaatccttatgcttttgttcttgctttcacacggttgctagagtatttttttttttttttttttttataaagttgttagagttgaattattcttgcctttcttgagtatatgaagatttcaataactactaatttaatattatcttcaacctttgcagcttggagtaaacttacagctactgagaggagcaaa

SEQ ID NO: 74379 - DNA, 529 bp, Carica papaya
  Intron number 1 from transcript evm.model.supercontig_29.1 33 (locus evm.TU.supercontig_29.133) derived from phytozom e v7.0 (chr-ID supercontig_29; pos 1274450 to 1274978 reve rse strand)
ccattacaccgaacctcgagttgctgatattccaggtattttttgttggtttctttgattgtcggttcatcactttttgtcgctgtgcttttctaattggttttatcgataatttcttttacttttcattgctacttctgtaattgtatccctacgaattgcggttataagaatgttatatagtataaattacacaggctcgtctattaggctacctttgttctctgctatagatcttcgtactatttaatagttaatttatagaaatcgccgaatgattgtgctcatatgtttggggttttccttcgggacatggatccaagcttactcctcatcaagaattgacaggaaattaattcctttgctgtcaacttcttttaggatttaaatgaaatgaataactttctgaatactgtaaatttttctttcagaaataaatgttgtaaaatgttaatgtaaacttttcatgaaaggaagtaaatgataattgcctctttctgctccttgtattcttttcaggcattaaatc

SEQ ID NO: 74380 - DNA, 337 bp, Carica papaya
  Intron number 1 from transcript evm.TU.contig_26924.2 (loc us evm.TU.contig_26924.2) derived from phytozome v7.0 (chr -ID contig_26924; pos 13744 to 14080 reverse strand)
ttggccactcttgaagggcacaaaaaggtatttccttaggcctaattgtttccttgtattgtataccctgtcttcttgacttgtataaacatgtaagtagatcaaaagagctggatataacttcatgctccttgttaattgaccttgaattgactcactggagcttctatcttgtataaacagagattaagtgtttctagaaacagtgttgtgaagttttgtcattcattgatgtttgttcttctacttttcattagccttttcgagtcattatttgattgtggaagctccattgtgattaggttatcaaggggattgctcttccttctggctctga

SEQ ID NO: 74381 - DNA, 847 bp, Carica papaya
  Intron number 3 from transcript evm.TU.contig_34684.1 (loc us evm.TU.contig_34684) derived from phytozome v7.0 (chr-I D contig_34684; pos 1872 to 2718)
ctgttccttgcgaccaatttgagaccgctttcgaagttagtagttgatatttattgcctttatttttacctttttttttggtgtatctggttattcatatatatttttatgctctggttgactaatttggtctggatgttgatgtaatcatgtaaaatattgtttggccttttctttttaattgtttctgattctaattttggcaacatctgcgtcactcatatatatatatatatatctgtagtgtatatattatctgtgccagtcatggttcctcgtgattgatttcttatttgattcttaaaaaaataaaagaaaaaaaaatgtggatgagtagatagagctatggcttaagccatatctaacatatcaatcatgtaacgcttagccttcaactttgaccagaaatatgacgtgtaaagggaaccgaatgtcgattcaaaggggagttttttcttgggctgaaagttagtaatgcgctagagaactcagaaggatagataaagtagagagagatttgtgataatttaacacccatcgtgattaatttatcatgactgagtggtggttcattcattttattttgggtattttctgaatattcatgggaagacatcaatcttcccttaagaggggttatctttgttgtgtttaaggagtcttattactggaaactttacctttgatgcatgtcaatcatatgatataaccgtttaaccttcacttacattaatccatgaataaatatactgaaacttttacagttctgatgtcctgaatatacattttaaggagtcttgttctatccccaggctgttgagcggtggcttgtggagcgtgctgtctt

SEQ ID NO: 74382 - DNA, 729 bp, Carica papaya
  Intron number 1 from transcript evm.model.supercontig_36.8 1 (locus evm.TU.supercontig_36.81) derived from phytozome v7.0 (chr-ID supercontig_36; pos 618237 to 618965)
atctgggatatccacaagaggtttgtttcttttctatgccatgtatctttgtgtaagaaacatttatgttatcataataatgtacaataaatagtaggaatatctaggctttgtaattactatgtttggaatgtacatggattccacaaatagtgtggaattctttgcacattcacattttcttatgtttataaattattttagactttggattgaaacgtgttttgcgctctcgtttgtgtttccctgatttagtaattctaatattttaaagttcgtgatttttatcaaacaccaaagattatttgctaatgaattcatttacaaatattatgaaacttcattatttatttattccaagcaatgcctttattttctacttgatttttgtatttttttccatcaatttgttgtttgactttttagaaaaaatttcagtttataatgatgcagtggatgtttttgattggtgggtaaaaggataacaattaactttttgcagttgctggaatggacatttgattggaaatatatggtacgaggcttggttctagataaaaagaggggcaacattttaaaggtcacttccctttattcatgtttcagagtcatttgtcttatgtaggaccattttttggctgtcttggcttgctttttgttttctagcttttcttctcattatatagtcatgtgaattgaaagtttccctgatggttatgcattgtgcag

SEQ ID NO: 74383 - DNA, 856 bp, Carica papaya
  Intron number 1 from transcript evm.model.supercontig_48.9 1 (locus evm.TU.supercontig_48.91) derived from phytozome v7.0 (chr-ID supercontig_48; pos 529097 to 529952)
gcaacgagcttgttcttcgagcttctccttctcaggtgaaactgaaattcttccgtcaacttttcattccttttcttttttcctttctctcggaatcattgtcgccaaacagatttggatatccgaagaaaacgatattctcaactaatactccaaattttatatatcagttaaatgatcatatcacaaacaacggacaatttaaccgattaagtcagttgtcgatgttgttaatttgtgtttcttgcgtgtttggcgcgcctagggttttggttatttgtatttattttgtactttctttggatttttttcacttttgcgttttcgattacacgagtgatgaatcatgttcggatgtttgaaatttttaggattaagccatatagtgactcaatttggtttgcaaggaaatgcgggtgattaggttttccttctttttacgcatgtaatcatgtataattttttgcaaaattgggtatgaagtgagatcactattatatgtttgattgatgacaacatggaagtgaagaataggaaatggattttcagtgcgggatgttctttttatatggaacttgtttagttctgttttccgtcaagtgagattactaacctctatttggtcttatgaagatatacatttgaagagcagaaaatggagcttggaaccttgacgatttaacagtagttagatttgagagactgaaagcttattttagcagtagttagattggggagactgaaagcatattttagcagcagttaggtttgagagactgaaatcttattttttatgctaactgataaattttgtgttgcagctggctcttcacacacttaattcatcgcgatctgc

SEQ ID NO: 74384 - DNA, 999 bp, Carica papaya
  Intron number 1 from transcript evm.model.supercontig_16.1 30 (locus evm.TU.supercontig_16.130) derived from phytozom e v7.0 (chr-ID supercontig_16; pos 1970787 to 1971785 reve rse strand)
taagcagagttagttcaggtaaaagagtctttgctttctcaattttagtcaaacagtctttcttctttcttttttcttttcttttcccccatttttgttcagttttcaatatcgctggtttttcttgaattttgtgttttgtgcgtttcttttgtgtggtttgacggcggcttgctgctagaattcgttttcactttgatctgcttcatcggtgcttgcttctgttttctcggtcgtttcccgtattgggttttgtaagcttgaaatattactagtttcttgatgaatttcttggtttgtcaattttgattcttttttcttttatttggttattatcactttaaagatctactcttacttttaatacgctcaattatcttgttttcattaaattattttcttcttttcattcataattgacatcgtaaacagaaaaaaaaaaaatgtagtaattgcaccctgatcgagaattcggaaccattttacaagtatagaaagcaacagaaaggaaatgagcagagaagctttgactaaaatgtattttacttatgcagaaaatgtaaaatatatattagggtttgagagatgtaatcagcataaattaaagtgttgggtagccaaggacgaaccctatttactaacccctccccatcctcggtagaaaattcaatgagtgattggtgggtttgtaattgaatgcggagtgattggtgtagttttatgattttattttggggctgttttaagtcaattattcatgtaaaaatgcaaaggtttctggtctaattgtttacctgcttccatggaactacgaggctatattcccaagaatttttcctacatacatgtaacattttgtggcctgaagtttatcttccgtttggctttaattcttacatacgaatgacattcttggcatcttctttgattcttcaagtcatatattattctctaatatgtttagacaaatcaaaatctcggagtggttctgatcataag

SEQ ID NO: 74385 - DNA, 673 bp, Carica papaya
  Intron number 2 from transcript evm.model.supercontig_2.30 5 (locus evm.TU.supercontig_2.305) derived from phytozome v7.0 (chr-ID supercontig_2; pos 3673642 to 3674314 reverse strand)
atcagaagattatttagcccacctccttgggcgtaaatattttcttctgtcattttttaatggggaaaggcaaatgttcttggttaattgtaaaaattgataggcttattgtctctgaaggataatggtagatcctgaatacctagcaccaccctcatatgatgtcgactgtttgaggggctttcttttcctcaaagtttcatatttactttcggatgaaagggggtttgttaagcatgctttgttcaatttttttttttttgtttttttactttttgcaatatcgcaagaatataatcctcaacgactccaggaacatctgcttatcagtaaaataattttgttgaggaaaagttgagaagatttcaagctctcaatgggctacaccatgaaaaacgcactacaagttctttgggtgccatgctatgttggtaggcataaagaatttaaaatgtaaaacttaaataaaggaaaccttttggctttcctaacaatcacgtctgctaaaagactagggcaaaaaagttcatggtataaatttctacggagcatctttcttcctttttctaatgcatatgccacatggctacttcatgcttttaacttgctgtttctttttgaacaaatctaaacttcagagggcagagggagcctacattcttttcttaaactt

SEQ ID NO: 74386 - DNA, 727 bp, Carica papaya
  Intron number 1 from transcript evm.model.supercontig_173. 49 (locus evm.TU.supercontig_173.49) derived from phytozom e v7.0 (chr-ID supercontig_173; pos 393346 to 394072 rever se strand)
agtagatttcacaaaccaaggtactgaacttgaacttcttcacttcttcacttttctcatttggaagttttaagtggagttttagtggtcaccatgttatttgcaacttgtatttgttttcctctttagctttttactttgtttggtttggttttccattctgctacttgctgcatttgttcttttagtccggttagggttttagtgggtacataaagttttctgatttggtacaaagaaatcattttttttagtccccactaattgttttagttcaattttctagttattgactggtgaagattctgatttcactgtatttttctaattgggccctcttgtttctttgagtgggatgcttatggcattgtctgtcaggaagccatggaagcttctaaatgtcctactgttaatcctacccaattttgtttcttctacttagtattgatatttccggagcattttctgcgtttttgaggttctattaggagtaaagagtgtaaaatagagccagcttcactatttaatttttgcttactttttaatccgttgttcatttttcaccttgactgaaggtttaattttggtccttcaaggtttcctctttttagttcattcccaattttgttggttgcttataaaagtgggagactttgttaattataatgtgaattttattctttctgaaataggaatcattcaagatctgggcagaggtcaagttctt

SEQ ID NO: 74387 - DNA, 596 bp, Carica papaya
  Intron number 2 from transcript evm.model.supercontig_25.1 28 (locus evm.TU.supercontig_25.128) derived from phytozom e v7.0 (chr-ID supercontig_25; pos 1320850 to 1321445 reve rse strand)
accattcatcccctagaattttcttctctaacaaggtaaatcattaactagcatttatttttagccgtttgttttttcctttgacattttgatggaggataaggtaaaacccattttgggttaactataaaaaaaaaaatggtcaaaattgttggataactttgaatttaataactttgaattcttgtcattgaattgttcaaaccctgttggttattcttagaaaatccagaagaatctcacataaggattatttatcatataaaattatcataatgatgatattaatacaggagaaacaaagaatgagatccaaactttggaatttaaaattattggagacaggattcccatttgtataagtggatggggccagctttcttgaaatccctcagaaatatcttttgtttttctctacattataaataaagtccatcaaccactatctgaacaactgcccaataaataacccccccacctatgcatacacatatataaacaggacagtccattttcttgattgaatatggaatttgatattatcaacattattgattgcagccatatttgccaagtgacacacctgttggactgaa

SEQ ID NO: 74388 - DNA, 334 bp, Carica papaya
  Intron number 3 from transcript evm.model.supercontig_20.4 4 (locus evm.TU.supercontig_20.44) derived from phytozome v7.0 (chr-ID supercontig_20; pos 512018 to 512351)
ttcaccattcagtaggaagcttggtgcttatcaaggtaatgctaatagaaagatcatatttctaagtttaaaatgtgtttgtcttttccttttttatccccaaaaaatgatatcctcctctaaatatttgcatattcttcttgcatataatacatacttttcccgtaaaattcgtttgttatatgctgttagactttcatctgactgaccttcatcttggaggatttatagaattaaattctctgttctttgatttttcttactcctttccccattaatgatttattttccgaatgcagggtcaaagttctaaaactgatttacaacttggtga

SEQ ID NO: 74389 - DNA, 600 bp, Carica papaya
  Intron number 1 from transcript evm.model.supercontig_36.5 7 (locus evm.TU.supercontig_36.57) derived from phytozome v7.0 (chr-ID supercontig_36; pos 471934 to 472533)
cgcttggctcgctttgcaaggcttgtagacctgaggtacgtaaaatatatgctcatgaggaagtgggttttgatgggtcttcaatgctcaaccgctaaattttctgttcctccccacgcttcccaccaagttaaacactagtgttcatggtttgctctgttttttaggggtaattatacaatttgcctacagaaaacatgcattttttgttgtgtttgatagatcccagttgatcccttctttcttttttttttttttggcgagaggcggtatctctggttattttatgttttactatagttttaaccattccttttcacctcatgttactgcgattctattcttttgaagggggaagtggggaacaactttaccagtttcagttcttttgatcgtttatcttttactttccagaacccagatttatttttttttttttaatttctatcttgcttttttaaaaaggagctatatatatgtatagtatgatggtgatgtgggtgtgcttaatgaatctgattatgtccttgacttcatcttttacttgggtaattcaaatgttcaggtggaagtagaagttttggtcatccaaggaccaaa

SEQ ID NO: 74390 - DNA, 768 bp, Carica papaya
  Intron number 1 from transcript evm.model.supercontig_932. 3 (locus evm.TU.supercontig_932.3) derived from phytozome v7.0 (chr-ID supercontig_932; pos 7810 to 8577 reverse str and)
gctgggagagattgtcaccaccattccgaccatcggtaagtccatgtatatgatgttagacatctttcatgacattgttgctttgatttctgctgcagattggctttttttatttgatgaaaattcccaggaatcttaaggatgtcagtggaatttttagtatagaacttgtttcatttctgttaggtgatatattgctctttgtaggaaaatattgtttccttgtgcttataaattgacattgttggccagggaattttcacttctcagtttcagtagctatttggaataagttgataatggtctaatattatggttttcaagtatctttaaggccaaaaggaattaataataaaaattttgtaagttaattgaagaataaattaatttcgaaatcaatttttatttctaactagttatcacatttttaaactattttgagaaatttaattgaattaaatcactttgatttggggaacacaagcaagagggtgaatgtgttttaatcatttcttttctcttaaatctcatgtttaatttcagttttcaatgtattggtttgaagtttattcttattccatccatttgcaattcctttcaaaatgattctcattgtttggaataattttaaaataaaaaatatggagttgccgctaaattctgctctgtttttggaattcatttttcgaaacataattgatgcaattttgttcttgaccagcaaactgtagttgaaattacactgatgcgttatctgatcaggattta

SEQ ID NO: 74391 - DNA, 667 bp, Carica papaya
  Intron number 2 from transcript evm.model.supercontig_27.1 00 (locus evm.TU.supercontig_27.100) derived from phytozom e v7.0 (chr-ID supercontig_27; pos 1142201 to 1142867)
aatcaaagtttggtggaggtgcattttatacaacagtaagattggcatcgttttctcctcttcatacaacacctaagttttcagtgaatcagcatggcatatgatattactaatgtttaatttgaaaaaatcatagaatttgaataatgtagttgaaaaatccaatacttattgaacttatccttggtggttttgtgttctctcaacatttgagaagcttttttttaacaagccattctcacggtcgaggggccacttgcatcggtaatctttctttaaaaaacaaaaattggattgaactgttactattgggagtcggctttgtattattaccgcgcttctttgctatattgttcaaatgattattataaagcctggtgccacggttagatgacaatcttggttggtaacagacctacaactgtgttgaaggttcctctgtattgatggatcctgtgtggcacttccttctgcttggggtttaggaattttttgggcttatggtttttatttgtttgtccttgatctgtttcttagcaatgtggttccagatgcatcctcattgaacaaattattttcttatgttagtcattcttttgttcttacacttgacattattgcctacttgccagaatccgggaagtgtgcctcctgcatcaaactcaag

SEQ ID NO: 74392 - DNA, 572 bp, Carica papaya
  Intron number 2 from transcript evm.model.supercontig_362. 2 (locus evm.TU.supercontig_362.2) derived from phytozome v7.0 (chr-ID supercontig_362; pos 38524 to 39095 reverse s trand)
atgtatgtgattatttaatgtctttattcatcaatttcacaaccctagaaatacttattaagatcaaatattattcaatggatttgtaagtatacttgttgggttgttgggaagcaaatagaatcctgtatgatttgttttttcgtgtcgaattagattatgatttgtttatttcaattatttgcttaagtatttatcatggtcgtaagtaatactaaaaatttagatgggtgtagaagcaggaataaatgtcatgaaccagacacaagtgattgattgattggatttctagaatttgattaaatcaaaagtgaaaggtgtagaacaatacaaaagcatcaaatcatttaatttcttcccgatacgccattcaagggaccacattttatgtatatacacacatatatacacatacatatggacagaattttcttatattattgtgggtgactattaccttttatatatacatatatatatatacacgtagatatggacagaaaattttcttatattattgaagaaaagtggagtggaatttgatgataagatgtgatgttgtgcagattgtg

SEQ ID NO: 74393 - DNA, 157 bp, Carica papaya
  Intron number 1 from transcript evm.model.supercontig_362. 2 (locus evm.TU.supercontig_362.2) derived from phytozome v7.0 (chr-ID supercontig_362; pos 39153 to 39309 reverse s trand)
aggtcaagaaagcttttaggcaacttgccttgcaggtatgttcgttcgccatttctttttctttgaattggattccaaaatcttcatcgtttttttctaatttagttttggtttattaattttgaattttatttttgagtgttgcagtatcatcctg

SEQ ID NO: 74394 - DNA, 616 bp, Carica papaya
  Intron number 2 from transcript evm.model.supercontig_28.6 0 (locus evm.TU.supercontig_28.60) derived from phytozome v7.0 (chr-ID supercontig_28; pos 804456 to 805071)
ctaacaggaaccaggtttgtatattatgactcattttactttagtagttaacaagtgcctttttttttttaatgttggatggttgtgggaacatgacaaaatgttgcgcatgtaaacaaatcttccaaggtcactcactaaacgggaaagaagctttcagtaaaatgctttcaacattaatgtccagtagattttttttcccatcatcaattatcatctttatatagcatgtttttgggccattaaagactactaaatgtggtttaagtttgattatcgagtttcagttgatcatctgttagtttgttccacagtatttttcctccttcaaagaaaaaaaaaaagaaaaagaaaaacagtatctttcctgatgtggctgatgtttttcttcatttttgcatgagattgtttatggtgcagtatgccatgcgaaaaaatatttctggaagatgggggaaaagaagtttttgtattttcaagctgttaactaatctgaaccggtctagtaatgaatgctcttgcagaggcaggttagcatgttcatttaacccattattttctctttttgcctgagatcacaggttaagtcagcatcaatacctcaactacccaaaca

SEQ ID NO: 74395 - DNA, 557 bp, Carica papaya
  Intron number 1 from transcript evm.model.supercontig_34.6 7 (locus evm.TU.supercontig_34.67) derived from phytozome v7.0 (chr-ID supercontig_34; pos 612444 to 613000 reverse strand)
ccttggagctctccaaaaggtcagctcttttttaattttcttcttcccaaaatcttatcttgaaactctttatagaatgcatgcattctcttctccattattcactttttcatttgagtcttttgttaataattcaatcatcattatcaacaagatgcatttttttatttgattaatggaaaaattaaagaaaacattataggggtattaactctctgaaatttttatgcggcaaaatgcattttttatgtattttaaatggtaaagatttaaactttacaaatcacaattagttgcttcaattacacttaacaacactaatcattataattaatgggttttcattgggtatactaaatcacatgattagtaaagtaaaggggtctcttcctaactcctgcaatttcatgaaacaaacccaaaatgtcattctggtcgagccaagaaaacgacatgatcctattctcattgggtcgcgtatagaattactaaaatacccttatgaattccttgtaattacagctaaaacgaggccacaagaacgggacggcggagga

SEQ ID NO: 74396 - DNA, 850 bp, Carica papaya
  Intron number 1 from transcript evm.model.supercontig_23.4 4 (locus evm.TU.supercontig_23.44) derived from phytozome v7.0 (chr-ID supercontig_23; pos 458467 to 459316)
cgccagttgttattggccatcaggtaattatcattaatagaaagtaacatatcagaacatgcccccttggaagagtatcttgaatttttttctatgaatctgcattcgtaattcttttctgcaatccaactgtagtaggaagactagcaggatatatgcactgaagttggatgtttcatgttctgggcgtcagattatctctttagcagtagactaccaaagctgtgaatcttctgatatcatgtcttgtgttgcttgatttacagcatttatatttattacatatcttgtgaacggtgtcttatgatggaactgaaattgacaaaaccagttcttggtttcacgcacttgaattatctgatcttatcccctataattgcttttactcctcatacttcagaaacttcctctttggccctcctgatgcatgatctgccctgcatgtatttaaccagtttgcctggttatttttagaatgaactaaagaacggttttcacaaaacaggagtggagcatgtataagggaaggaattttttcatgagtatgattaagagttgaaaaggaaaaagctatcttaagaacgcagaaaggaattcgcttttgttaaatgaacatctttgaagcctgggatacacatgacgatacatatgacatgaatattactagcacaatcaaagcttctcaaccacaaacttaaactagtaatgttttagtgacaataacaatgaacttagcctattattcatgctctttaaaatttccgttatggtgatttttcaactgaagaaactgatatattgagtgtttctttcaggataaagagctaaggtatcggttcatctataatca

SEQ ID NO: 74397 - DNA, 823 bp, Carica papaya
  Intron number 1 from transcript evm.model.supercontig_17.7 4 (locus evm.TU.supercontig_17.74) derived from phytozome v7.0 (chr-ID supercontig_17; pos 909534 to 910356)
tggcatcataccacaatcacctgttcttttctcaggtacaacatttaatcttctttttttttccctttttttaaatatgctgggaccgtcataaaatttgtccatgttcagatattttctcttctatgatagttccaattctaccttgacaatttgtttggttcgattcgcattcaatttctatcttatttgttcacttaattactaaataatcatgttttcaaagattgtatgatttgtctgtttgaatctctatcataaccttcatatttaagtcgccatcactgccacttgaattctttcaaacttggaattcaaaatctacctccgaaaaaaggtgacagtggaggtgatttcaacatgaagattgcgatgtacacgtaactataatgactagtttcttaataataactaagtgaatgaataagcttggaagtaaatgagaattgaactgaaaaagaccttggggatttttcttgttttacctaccttcatctccaaagcaaaaaattgcaaccttatactgcaaaaagttttctattaaaaacttaagtttttgttttggttcaactgaatggcttgagatgtatatccattatataccatttgcatccaactcttagtttttattctcttgtggtaagtaaaaacatgagctaaaagtgccaaataagttactttgagcattcatacctgagtgaagtaaaaattcatgttagcaagagaatactatacattatttcaacctatgctctattttttatttaaaaaaattaatgttctattcttttaggaacggtgagattcaatcttgatcctttca

SEQ ID NO: 74398 - DNA, 451 bp, Carica papaya
  Intron number 1 from transcript evm.model.supercontig_36.1 69 (locus evm.TU.supercontig_36.169) derived from phytozom e v7.0 (chr-ID supercontig_36; pos 1231257 to 1231707)
cggagagtactctcacagcttacaaatctgctcaggtttttttttttcctctttcgtttcttaacttttttcctaagaaaactaatactcgagtccggatctgttttagatttcgattttatcttcgtgtttttatgtggatttggttgccgatcattcgtgtcctttgattgagggtttaaatttcttttgctttaatttttgaaatttcgacggtaaatgttatatatttatcttattgtttgacttttcctgggaaatttaatggatctcttttctattgtaattattggttaattatttcctgtggatgcatgttgatagagccttttgtgttaaaccgaaacagtttagatgctgttttttttctgatttttctgttcttttctctcggctatatcgcgtaattgatcatttccttgtgattttcaatgtttgtaggatattgcaa

SEQ ID NO: 74399 - DNA, 536 bp, Carica papaya
  Intron number 1 from transcript evm.model.supercontig_30.4 (locus evm.TU.supercontig_30.4) derived from phytozome v7 .0 (chr-ID supercontig_30; pos 96224 to 96759 reverse stra nd)
cagttcagggaccggataggcacctagggttttgggttttgcttccccatgggcggttctaccgttcgcacttcgcttcctgtttttttttatcacatgcagccaatttcactttttccttcgtgcacccatgcttccagccacattttgtctgatttttctgggatcttgatagctgcttgtttcctgtgtcacagttatttaaattattattttggttatctgcgttgagcttctgtatcctgtttctgctatcttcggctttttgtcagtgaacaatgcatctttcgtttctgttttgtttctagagttaataacaatctcttataaataattatttcttttatgtttttatatgcattttttgttgtcttttgttctcatataaatgtgaaatttataatttttgaattatccggaataagctgacactgttagtgttctcagattgtgaattatctagaaatgatactaataaactgacattgttaatgttttcagattcctcaaagcaccataaggaaacttctatcatc

SEQ ID NO: 74400 - DNA, 431 bp, Carica papaya
  Intron number 1 from transcript evm.TU.contig_43776.1 (loc us evm.TU.contig_43776) derived from phytozome v7.0 (chr-I D contig_43776; pos 1033 to 1463)
tacaggttccggaggtgactgtttaccgtctgttttctaattctgaatatctcaagtgtttgtgtctgtaactccagtacttagaaaagtcagtttaacaatgcatattttcctgaatgttggactaaataacttcatgctaggatgtgattctcatgttgatgcaaggcaattttctgggagaaaaaatattttgaaacattttcaagggggtgtgtttcatgttcaagtgaacagagattttgttctacgaggctatttttcttagtgttttgaaacctttcatcagtatatagtttttggtatgtgtagtaaaaggactattttacataatgtagtgtgcattatatttaacaataattatgaatttgacttctttaagctaattttctaacatttagttttcttgttcttccaggctcgtgcattct

SEQ ID NO: 74401 - DNA, 697 bp, Carica papaya
  Intron number 2 from transcript evm.model.supercontig_229. 3 (locus evm.TU.supercontig_229.3) derived from phytozome v7.0 (chr-ID supercontig_229; pos 21995 to 22691 reverse s trand)
ggcaaaagaattctcaagggcaaaaaataaaaggggtatgatgcatattatgtgtagaacttttttggatctttattcttcttagtgaattgttattcttgatattacttacgaagtattgcatccctctaatttttaaatggttttcattattgtgatatatgtttcagatcttcaatcaattcttattcgttactttctcgtttgatatgatagataaaagttatatcagtagtaatggaaggactggaaattcttttctaatacttttcattactttgatatgtttcacacattacaactaattaatttcttctacatattaataagtaagagctatttctgttaaagatgaaaggaagggaagttcatgttggaaatgaactccattctcccatttaataatttttagaagctgttccccatcaattaattgctttgaaaatggagtggctcaaatatgtacaccactactggagtaaaaaagaagaaattagagagattaggatgtactcatggatctgttagctacacttcttagttctggaatctttagcgaacatttgaatcttttcttagaaaatttgtgtttcaagtttagggtggttaatgatttttttctggacagtttgaagatgtgctacaatctagattttcataacatgctttcttatgatgtttctgcagcggctataca

SEQ ID NO: 74402 - DNA, 652 bp, Carica papaya
  Intron number 1 from transcript evm.model.supercontig_32.1 6 (locus evm.TU.supercontig_32.16) derived from phytozome v7.0 (chr-ID supercontig_32; pos 265714 to 266365)
ttccccaggtactttctcctctttttaaatgttttgggatctgttgaggaaccgagaaaaggagggaaaagaagagcagattaatttctaatgtttctggttaagctgtttctgtttgattcattttccccaaattaatattgtgtcgttacccttctctacatttccatcttcccaaacagacccaagagttctctcacgtttggatttcaatatgataaaataggatatagaaattttcccatgtgaattcagaatttgaggagaaattatgtaaggagaataagggatatttgaaccaaaaacagaagcccaaccaaatgttttggaatatgagtttaggttgttaattagattctgggttttatcgtacataatttgggaaatgtgcgtaggatcaaccctaatacagatgctttcaaaataattgcagtgcaagaaggtctggccagaagttccagtcatttacttgcacatatattaagaggtgtcgcctcttttatactcttgaactctatctttgttcttcttttcttttctttaatccatagattaaatcactcatgaatttaggatcgactgaaataagtctattatgcaaatttccatggaaaaagaataaatctaaccatactttagttttcaggaattt

SEQ ID NO: 74403 - DNA, 618 bp, Carica papaya
  Intron number 1 from transcript evm.model.supercontig_57.1 8 (locus evm.TU.supercontig_57.18) derived from phytozome v7.0 (chr-ID supercontig_57; pos 339927 to 340544)
catccagatgtaagagtataaatcatcaaaaatttcctcaagattacactattaattactcataaaaaagaacaaaaatgattccaggatctgggtgttactatatgtatgttttttcattcttccttcccctccccacctccctctgcccaagtggtagctgcagtcttagttattattgcttatttttgttgagtgcctatttgtctgcctcattcttgaaccattaacttaaggcggaatgtggcttctctaaccagctgttctctggattagccacttgtaatggcatgagctctgtgagcatcaccgaagtccatgacctagctaataaagcctcgcagttatcttttgcatgttcttagtgagcctttaactcgttcttttgatttcacattcttgtttctcttgcttgcctttctctaatttctgcttttgttctgtattcatgcttgtaaaggggtaatactagccaaaagaaaattctaatttggatgaattatgaatcaattatctttgtgctcaacatggaatttaataacgatagctgcttaaactcgaacctaatcataattttgcacatttaaggattttcaaatgtttattttcagctggtag

SEQ ID NO: 74404 - DNA, 659 bp, Carica papaya
  Intron number 1 from transcript evm.model.supercontig_80.1 11 (locus evm.TU.supercontig_80.111) derived from phytozom e v7.0 (chr-ID supercontig_80; pos 903368 to 904026 revers e strand)
cgttccagggaaagacagggcaacttgtgagtctccctctttcactaactttcttttcaaagttgttcatgattaatcattgttattctttgtgttttcgttcgcgtcctctgattgcttgttccgagaaagtgctctagaagattaaatgaaaattaatgatgaattttgacatgtacctggctgttatagccctgggaaaggaaggacaaacagtgttttaccaggaaaaccctaatttgattattccttcaagttggtaaattcgggtttctgcaattgtttttcactggtgactcgttaatttagggggggaatgcattgcgaatcccgaatcccgactatatgtttccgaattagcttgaaggattcagatacagttccagtttaattgtctttatcatttggatgaatttgcagtgaaatcataagtatattagcggctttattgatttttccttttccgttaaagaggaaagaagggttttcaatggaattacaagtccgaaagactcttttaggagttgtactgattttaattttgttttggtctgttcaagttttttacgtaaatctatgtgattttcattttagtggtgattaatgtcttaaaacttctagtagtttgctgttttggaggagaagcagattattcaatt

SEQ ID NO: 74405 - DNA, 726 bp, Carica papaya
  Intron number 2 from transcript evm.model.supercontig_75.1 02 (locus evm.TU.supercontig_75.102) derived from phytozom e v7.0 (chr-ID supercontig_75; pos 932858 to 933583 revers e strand)
cctccgattcccgcgaatccaagcgtgaggagaaggtaatttcttatgtctctcgattatataggcgtgtatgtgtatttgattttgcttgacgtgcagactctggatttgttcttcatatttgggggggttagatatgaggatttttgaacttttttttagttgttttccatgttatatgcagttctgtgatggaaactgagtggagaaatgagcaaatgtgtatcttttttgagcaaatgtgtatctgatattatctcttcctgtggttaagtgttgaccgaaaatatggagcaacttttgttctgtgaatgttgcgtgttagcattgaggtatatattatagtgatgtgcaagaaatcggtgggttatgacttactgttgctctgaatcgggaaattttatttggacgaatctgtagatgctatttagttaaatctgttggggcaggttatttactaggcatagctggagttactcaatgtggtccaactgacaaatggagattctttttgctgactgaccaatggggatcgattgttatcatctgcgaccgttaatcgttgagttaaatttgttttcaagctaggaactagattggcaattttccaatcgtcttccgtttgcagagattctcttttgtttttcgttggcttgtatcagcctaatttgcgcttagttattggcctgtttccaaaatatatccatgtcatttttatttctacag

SEQ ID NO: 74406 - DNA, 759 bp, Carica papaya
  Intron number 1 from transcript evm.model.supercontig_26.1 28 (locus evm.TU.supercontig_26.128) derived from phytozom e v7.0 (chr-ID supercontig_26; pos 981731 to 982489)
ccgatctcctctctcaagtcgatcaacctcttcaggtcctctctctctctcaccgatagatcttcattcgtgcttttacttattatgtattgtttattgactttgcattcgattctcgttctttctttctttttcgtggatttgttttttggaatgttgattttgaggattaaatgttgtttgagtttatgtttcttggcgtttggagctaaaatttggaaggaacaaggcggtgataggaagcctaggcttcctgatatacaacctaaagtttatagaataaaaacttcccgaaatttcatcaatagtgtagtgctcgcagttgtcttctacttgcgcatagtcgattcacttttttttttaaggcggatgctcaattcactttagttggctttgtttggtgtattttgcatatgtagatatctgtgtttctaggcatctccaagtattctgaccttgaggaccgccattaattttcttcattttcaatttaagttcatgagtttggctaggggattgttccttcacaaataattttccagatttattgatatggtccttcatcaatttatcgaggctatcgtcagctatttacgtgctgtaaagaggagtaatatcacagttattcattgtgaatcttatcatttgattgcgatatgtaatacaagtcaagtatagatgaaatattggtatggatgagtccgaattttgtggctattgttctaagttagaaactcttcctgctaaaacagattttat

SEQ ID NO: 74407 - DNA, 981 bp, Carica papaya
  Intron number 2 from transcript evm.model.supercontig_26.1 28 (locus evm.TU.supercontig_26.128) derived from phytozom e v7.0 (chr-ID supercontig_26; pos 982541 to 983521)
ctgactcttacaggtatctgcttgactatatgtacttttaagctgtttgttacgaatgaagtatatcctggtggtttcatacagtcagaagatctgtttgaggcttttgggtcctaggttttggcatttttgtttcacaattgactttcacttacatattaaatggagttccttggaaatccgaaaaaatagacattagatttctgtttataactttttcttcattacccctctaccagtctatatagcatgcacatacactcacagatttgacacttggtctgaacctttcagtatggccatgctgctttttttccagttaaggaaacggatcttgacctcaagaaacgcataaagcatgaaataaatatgggatatgctattatttatatataatctgctggactaagagctaattgattttttcaccctttgatctttatgcatttgataatgtttttcacttatgtaaacctagcccttgagatttggagttatttcaaagctattcttatcttttttcttttagctctattaagcaagcatacaactgaagtctttacctcttttgtgtcaactatgccacctcccattttctcatttctgccttacgaccatagctactgttaactatatctttgatgaaccttgacttagatccatcttaatattatatgtttctttggatgtgatattcaatatttaacttatgcagaccttggccttgagattttgcagttttccaaagccagtcatatttctcctgctctattcaatcaatgaaatctgttcctcaagcccatatgtgaatgatacagtctcccattttcccatttctgccctatggacacaccggccattaatacataatcaataaacacttaactttctattcaaatccacgtcattgttaatctttttcatgaaacatataatgtttttgcaggtcaccctggtcaaataagtaccttccaccattgg

SEQ ID NO: 74408 - DNA, 1031 bp, Carica papaya
  Intron number 1 from transcript evm.model.supercontig_6.25 4 (locus evm.TU.supercontig_6.254) derived from phytozome v7.0 (chr-ID supercontig_6; pos 1999553 to 2000583)
atcgagttgcggttaagagaattgagaagagcaaggtattttcttctatattttgcctgtttgatttcatgcttggtggtcaatttttcgcgggtttgtggcttttatggcctcatttcgttttaatgaatctgggtataatggggctcgcgaaattcattctcctgtgtttcatttgttgcggaattgcttccgggtttatgagatttatatagaaatttctgttggataattttctttcccgtttttcttttgctaatgaaggttctgattgtcagctaatttttctgataatgttggattgaatttgatccaaaaagatttacgatcagattccttttttttttcctaattgggtaacttatactgcctcgaagatcagtctagttcttgagcttgttttctctttttcctatgactggagaattaatttgctcttagtaggtttcaattacttaattttccttgttatttttgggaatttgattataacaagctactttgaatatctatgatctaattttccttcactgagttgacattttaacggatgaaattaacttaatttcaaggatttaccacctgaaaacctcataatatagcatataataattagttattcccaaacatacactgctttgaaccagtggaaaaataataaaaggatcgtggggtgagaggagctggggaggctttgaagggcttcaaatagatactcaacgccatagatgagcaagggataacttcaatctcaagtcctcgggttaatcattagttatcataccgaacgtgatgccgatctgagctgaaggctttttatttttaagaaaaaaaaaaaagaaaaacaaagaaaactggaacatttgtttgattttatcagtcatatctttgttctgtataaatattaaatcctcacttgcattgtttagagaaggaacaaaatattctataaagatatggtttttcgctatttcctcccttaatatatattttggcaatgtttcgtgaaaatccattatttttggtggcag

SEQ ID NO: 74409 - DNA, 782 bp, Carica papaya
  Intron number 1 from transcript evm.model.supercontig_234. 2 (locus evm.TU.supercontig_234.2) derived from phytozome v7.0 (chr-ID supercontig_234; pos 157893 to 158674)
agcggctgcaggagaggcccaatttgcattatcaggttctcgtatgttttttgcatattcttgatttttcgaagagttcttgggtttggggtttttttattctagagaaaatcgtgggggaaatgaaggaaatttcattgaaattttgtaaatcttcgatgagtttactagtttcatatttaatagttaacctgagtattgttcaagttcttttttgcttttttaaaaaaaaaattaaaaattagaggatcaacatcaatttgtaccaatggatcaattattatttattcaattatgaaaattagtagtttttgaaccgttgatcttggttaatcagaaaatgcgcgcgagaagcggaaagtaaaaaggctattatgaacagtatgttgtgaaagtatttgattttagtgaattccaaaatatatactttaaagtagtgagcagcagttttagtgcttgtccttggctgaagtcataatgagatcagtagaagatggaaaaaaaagtgaacttcaaagattctgagaagttttgagttagttttgatagctacatttacgccctttttctcgtttacttgacgagaaactgtgtcaacgagggaaaacttgactacgactttttgaaaaaggagatattgaaatgtagagtcccaagtttatgaattttttacctggtacaacctttttgcattgcatttccagagttgaaaagtaatatgaaaatttgacactaacgggataacaggttggggtaactccagagggagtagaagttccaag

SEQ ID NO: 74410 - DNA, 671 bp, Carica papaya
  Intron number 1 from transcript evm.model.supercontig_25.2 (locus evm.TU.supercontig_25.2) derived from phytozome v7 .0 (chr-ID supercontig_25; pos 35852 to 36522 reverse stra nd)
agcatcgtgccagggacatttcccggtggttctgggtactcataaagcatcccctacacgaacctgcacgactagctcgtgtgtgcctaacaacttcagcacgttggtgcctggcacgtttgagagaagcaattttggcttctgtcaccaattcctttccattttcactttgtaatttcaacttacattgttctgtctcatgtccaacaaacaattcatcatcaatgaactttaaaacatccataatttacacattaaacatcaaaagaatacagttcatgaactcactcacccttttcaatttaaacaccaactcactttcaatttttgaataacttaccaatgcaaatgcttatctaacaatccataaatataataactcgattattccttatcttatctcgaagaagaccacgatttggactcaaaagcacgaaggaaagaggattttatgattgaaaatcggttctgcaactcaccaagaaactgttgcggaacctgtgaagcattttgagttaggtttcggtttaagagtggttttgcttccaaaaaatgaatttctaatactcctaacaacctattctaactggtaactactaatgattgtgaaaagattgaaaatggaaatggtatttaacagaaaaacagtgatcctacctgcacagttcgcg

SEQ ID NO: 74411 - DNA, 594 bp, Carica papaya
  Intron number 2 from transcript evm.model.supercontig_7.17 6 (locus evm.TU.supercontig_7.176) derived from phytozome v7.0 (chr-ID supercontig_7; pos 1817497 to 1818090)
tggcagagacattttctttcaaagattttaaagaggtattatttaaagttatgagttagtttatatttctggttttatcgccagttaaacgattatatttttagtggcaattttctgtagcatgcttgcagtgagtgacgtgaagtagagaatttaaattcaaatctaaacctaaaatacataagatgtgtaagttttcatgttagatttatgatttagatttatgattatgtttgttttaattgtatttactgcctgcatgccatgtacatctttcgtctgttatgttgactgactggaaagataagggagagctagcattagtcgctgcttcacaatatgtttctgctgatgtgcaaatgatccaaacttacaattatgtgtagagtgtaaaagttatatgaattttatgaacacagaccagaaagaatcatactttcctatttgtcatgaattggttgagcacatgccaaacctgaatcaatcatttatattttgcgagaataaatttacttaggccctcaaattactgatttatttttcaggcatttaattcttcactgtactctaatgcgcttttcttgtccatgcagc

SEQ ID NO: 74412 - DNA, 786 bp, Carica papaya
  Intron number 2 from transcript evm.model.supercontig_5.15 3 (locus evm.TU.supercontig_5.153) derived from phytozome v7.0 (chr-ID supercontig_5; pos 1205505 to 1206290)
actttgctcttgcaacagtttttccttcttgtaaggtttgaatgaaaagtctatacatgcatttttttttcagaagtcctttatcttgcaaggaaatcccaaaaaatagaagcgttgaagaactagaccatgacattaattagaattttaaaaagacatgtatgtgcttaagcaccctctttaaagattaagtccactgactgaaagatataagtttattcaaaagcatcatccctctggtaacaccttggtttaaagaactggttgaactgctggttttgagggacatccgtatgatggatttccacattctgaatagttaaccattatgacgaggcaatttctagccatttaatttgatttttgacgcaagttctttacagaacttcttgggtaacaaatttatgtcaacttttttctcattgttaaaagatttgattatgtaatactctaaaaaaatgctcccagtaaaggagtcagtgtgatgacaactaagtttgaagtgcctttttcaccttgttcttctaaattttttaatctatacatttgaaacctttttctttccctatttgttgaatagttttgatatataacatattaatggtatttccttatggataaaacataagtttgtaatgttttctatttctatatactccatgttatctattttattcatgcttttcttttgtatcttgaattggaaaaatgtgaaatatggttttttctgttttccccttctgatatacaggtttcgaagaatttggtgcagttttctttaaatct

SEQ ID NO: 74413 - DNA, 553 bp, Carica papaya
  Intron number 1 from transcript evm.model.supercontig_80.1 18 (locus evm.TU.supercontig_80.118) derived from phytozom e v7.0 (chr-ID supercontig_80; pos 1005154 to 1005706)
ttctcaagaaacacaaagatcactgggcgtttctggtaaattattacagtcagattctatgattaattttcctcctgtttgtttggtctgtcttgatggttctttcgttccttttgattattctttcgtattattgatttgttatttttctttttaccgggggtgggggagggaagaggagaggagcggaggtttgagaccatggattgtttcttcataatctggaagatagatgttatttgtaattaagtttcagggatttactgatttccgagttctgattatttttcatctttgctaaattgaaaccgtggtcttcatttctacattagtgaaatgtatgtttgctttattttttccgattgattttcgaaagatttggttagagaaaatgtgagcactgaaagatattaaacgttctgatatttgattttacattaattacaaggtatttttttcatctcctggagtgccacgaacagttgatatggtccctcattttgcttagctttccactttcctgattgaaatgcaggaagaaattgaagcaccc

SEQ ID NO: 74414 - DNA, 667 bp, Carica papaya
  Intron number 1 from transcript evm.model.supercontig_31.7 (locus evm.TU.supercontig_31.7) derived from phytozome v7 .0 (chr-ID supercontig_31; pos 188656 to 189322 reverse st rand)
cacggctgaagacatcaaagccattcttggatcgggtaatcagtcttgtttttttatctattttttcatggtattgcaaattttaatttcaacaacccgttaagtgcaaccaaatcttaagctctattcgagcttcacgttctttctcatatgtttttgtcctttgtttttcattttggcgattgattttgattaagcattttttattcagatgtattagaagtttctcttttgttgaagtgctaccgtcatgatatggatgtaattaagagattgtagttttgttgttttagttttctctcttataaggatttggtgtgaatatctttaaagtatgttgtaatttatgcttatgaagtgtctggcatctgggtgcaatcatttatttttttggttggaaagtgcgtgctatgttgattttaagtttctcaatactgaagaataagatgagggtactggtatattttaggaaattgagcggaaattatgtgaacatggtatgctagtaagtatttgttggatgaattggtaagtctatggattcaggatatatcgtttttctatgtctagaggctatgttgaggtttgatttctgctgtgggaggggaagccttgcaattaaaaactaatttactttcgtgttttgcagttggggctgaagctgaag

SEQ ID NO: 74415 - DNA, 427 bp, Carica papaya
  Intron number 1 from transcript evm.model.supercontig_26.8 4 (locus evm.TU.supercontig_26.84) derived from phytozome v7.0 (chr-ID supercontig_26; pos 651348 to 651774)
gtaagctgatttcttctccctctctcagtctattgaatatctgtatctggagacaacgattgatgctgttcgtgctgtctagggtttctattttcttgcgtggatttcaacattttagattagagtttcagtttcttccgagtgtctttatttacgagttgtttttgtctctgaatgacttttaaaatgcctctgatcgctttttattgtcttaaatggataccattaattttcttcaaacaatgttttgttttttggggctttgtcgtgcttatctgttgcttgattagaaattgtactagtatttagattttctttctatactttctggttaagatctcgtcattctaaatgcttgtacttgagtgatttttgaatctgtgcacgcgcagtctcttgtggcgaacgaggattttcagcacatatt

SEQ ID NO: 74416 - DNA, 557 bp, Carica papaya
  Intron number 2 from transcript evm.model.supercontig_26.8 4 (locus evm.TU.supercontig_26.84) derived from phytozome v7.0 (chr-ID supercontig_26; pos 651893 to 652449)
aacaagaggtttgtttgctttgttgttgcctttagcatgtttatgattgtcgggttgtgatcaaaccctcacagaagaaaataaaataagaaagatgggtatgtataagaatgaatctattaaggcaaaaattagattaactctatatttttctttcatttatattttgtgttagctcatctgcttgttagatggaaacagaagatcttctcctcgaacttcttttgttagcttgcacgatatcttatgattccttttttcatttatctcatgttcatggttaattttaagtgggatttgagtttttatcttgatgtaagatttagctccatgagttttttaccttttttttcttgtcttggctggtcaaagttgactgctatgtaagactggtttgctccaaatggagtctgtgccctctaacaaatgtgcattgttagttaaagtgagacgtagtatgctcaataagtatgattgcttgcatccaccaccttcataccgttccttgttccttttctccagagctggcgagttaactgctgctgagcttgacaatc

SEQ ID NO: 74417 - DNA, 501 bp, Carica papaya
  Intron number 2 from transcript evm.model.supercontig_25.4 6 (locus evm.TU.supercontig_25.46) derived from phytozome v7.0 (chr-ID supercontig_25; pos 663072 to 663572 reverse strand)
tgactgtggtactctcttctcaaggtaactaactccagccagctccttaatcatttttatggaatttataaaggtatatgaagaattctcttcttgttttaagggagcttcatttattgtctgaaatatgttgtttgagtaattaattagcatatttgttttcgtaagaaatatgtctatatcctatacattaatcatagatatacactcttccctacctaggaagagagaaaaagagagaagcttggtaaggaaatcttaactgcaccagtctatggggacaatctgtccttagctaccagagtaaataaaagaacggatgcaaaaggaaagtaagaatgagagagaaattaagaaagaagggcaaaatagagagaacaagtcaaatatttctgagcacttttatgccagttttttgctttcgttttcttttgtgattgtttttttaaattatttttcttttcaggagggatagtttcatcactcacagagcattctgtg

SEQ ID NO: 74418 - DNA, 982 bp, Carica papaya
  Intron number 1 from transcript evm.model.supercontig_157. 7 (locus evm.TU.supercontig_157.7) derived from phytozome v7.0 (chr-ID supercontig_157; pos 128418 to 129399 reverse strand)
attccgtgtcccgggtttcagactccggtgtcaaggtttttcaccttttcctctccttgctgtgtttgaactgtgaagcttttgtatgatttgcgagggtattaagaaaaaatgacggggaaatgagatgagatcgggtcctggatcttgtattttttcttgtttatgttttaggagggaacttagtagaactttgtggtctatgctttacagcgatattgtgaagctttttttggctgtttcggaaatgaaggaaaatttacggagaataaggaaaatttagtttttgcatcacttgaagtagcaagttataattactttcctggtttaactttctatggctttaatttacttttatttctgcagcaaaaggaaaatctacgtcaatcttgtttgtttgttactttatctgagaagaaagtgcgagagtgaaccttcttgaaggagcatcggttttgtgttctttttatggtagccgtctaacagtgcatctgttagggaattatttatcttaaatctttcaattcaatttcatatgcttcccttttgtttgtttgatgcaagagaattcaatactaaattttccctggggagagaatactctactgctgttcttgttgtttgccaagaaagcagaaatagtaatagaaatggaaaaataatgctaatttagaacttgtttttaattaggaaaggtattaattgatatagggcaatggttggtaagtttttttgctttgtggagaaaatcaggaaaaggatatatccagatatataaatatcctttgatagatagcttctttctaaacattggttcctgtccgtcatttttttggtatgatagtatgctcttgaatatgtttctctttaaacctacacatggttgtatggaatcttttcagcatattcattttgaagttctttgaattctgttattctgtttgagtaatttctggcacatctatttcaggtagtagtacgg

SEQ ID NO: 74419 - DNA, 799 bp, Carica papaya
  Intron number 1 from transcript evm.model.supercontig_99.3 4 (locus evm.TU.supercontig_99.34) derived from phytozome v7.0 (chr-ID supercontig_99; pos 561322 to 562120)
ccttgtgagtttctcctccctaatgctcattctctgtttcgattctctccagtttctttcttttcaatttctttaaccagattgtttactggattctgattctcgcttactttttagtttacatctggtgattttgttcggtcgcattttagttttgttttcttgctttgcaattccaatatctacgtaatgtgaattggtgaatcatcgactcttcatgtgattgactgtgatcagtcctaagatttaggctgttcttaaaatttaaatgaaactagaaaatctctcttgttgcttcttccgttatgccttctagctgcattatggttagatttatttattgggataaaatttgctttgcaatggagggtctttgctgaattgaggcttagttttctggatattgacacactatttcccggagttggatttcaattcctgaatcttaatgaatcttgatttttgggagtcttctttcttactttcccataggaaatttctgttcatgtacctcttaatttcaagaaatactattacataggttttgttgtattgctatttggaactactcattttcatattgacattttggaacaattgattagaaactatgcggtaaatctcatcacgatcaacatgggcttcttctctccttggttaaattttggaataggcaaggaggcctaatagaagtcctgagggtgtcaaagtgttcctatttttctcgtttgatggtttgagtattggacttgttcaattttctggtaattttcaggctttgagggattctccagcgctg

SEQ ID NO: 74420 - DNA, 922 bp, Carica papaya
  Intron number 2 from transcript evm.TU.contig_30120.1 (loc us evm.TU.contig_30120) derived from phytozome v7.0 (chr-I D contig_30120; pos 4887 to 5808 reverse strand)
gaattaaagcttccccgtgaagttgcttctttctggtttgtaacaacatcctaccatcgccaaccaccgtttgtttttgtctattcatcatttttagtgcaaggccaattatcgttaccattaatatgaaatgcaactttgctctcaaaagaaaaagaaaacaagaaaagaaaaagaaagaaaaagaaaaaggaaaccaattagttgggacaaaggcacctttactgagagaattttagaaaaaatggttcaaggagtctatgtttcttttctggtagtcaatttataaaaatatctgatttaggtttgtaatgattacataaattaatatctgtaaagtgatttattattttccacacttggtactggaagatggaaactaaactttgggaaagaaatcagcaataattccccgtatcaagagaatgatgtcttagagttaagtagcttgactgcagtataaatattttgattctttacaaaatgcgaaagctaactaattccgttgtcctgtcagtccatatttggtttacttgctggaaaccttttgctttgcttctagattggtcacaactctgcatcaatgtaacaatgtctctgttagttgatatgctttgtatcccaagtttcgtttgattatctagataatcatgtttaagtagtctgactctttggcccatcattgtgctactattatgttcccaagaatgaccatgatatggatgaaagggaaagaactgaatttgttgacaatgaatcttatgcaggaaatatgagatttgattttctttctgttgtgagatataatgtggaacctcccaaagtgaagaatacttgtgttatcaaacttactttctctatattcttgtcattgatctttttggcagcactcaggattgtttcaaggcttcttggagtagcc

SEQ ID NO: 74421 - DNA, 658 bp, Carica papaya
  Intron number 1 from transcript evm.TU.contig_35370.1 (loc us evm.TU.contig_35370) derived from phytozome v7.0 (chr-I D contig_35370; pos 206 to 863 reverse strand)
ccgttgaagctgccgaggccaccatcaagcaacaggtcttagttaactttcttttctaccagctattaatctattcgtgcatggcatatcctttattcttaatgacgcaaaaaacccatttctttaagtaacgatgagcattgagtaggttcatggagtggagtctttattaaacgaccattactaccaattcttggtttggtggattgctttaatggtttgagaaccaaaagtaaagaagaatgtgagtgggctgtactgttaagagccgcgagatattctgcaattgtaacatgcatattgacatcgtaattagcctgtagtatgcaattttattttatttttatgtttgggttaatatccatgtttataagaaacagctctgctggagagctaatcaaaggcacttgcactgaagttactagcagaagtgtagaacatatgtttttgacacgcatacatctttcaaatatttattttttgctgctgtgcaaaggttttcttctgtttttctggttgtaaaatgcttgatacaagtccatttctttgtatttgtactgatatcacactgtatctctcttccttcctaagatattatgatatttctgacttcatccttacaggtggaagagaataatcgattaaggtctgagcttca

SEQ ID NO: 74422 - DNA, 1008 bp, Carica papaya
  Intron number 1 from transcript evm.model.supercontig_3.48 0 (locus evm.TU.supercontig_3.480) derived from phytozome v7.0 (chr-ID supercontig_3; pos 3442493 to 3443500 reverse strand)
agtgtccagccggtacgtattctcatcatcttctttcttccttggattgatctattagcaaagttgtctctgttttttctactatccatctcgcctcatatttgctagagaatttcacgttaagacatattgtttcgtgaacactatggtggtatgctaatccagtgaacttggaattctttatttttttctaaaattgttaagctgtcctttttttgattaagcctgtcagtagattcggttaaaacaactattttttcacacgcttaattgctttgtagcaagtgttggtggattctccaatgacatattctattgattctctacatctaagattttatcacaagaattttaattcataaaccccaaagtatttatttatttagtttggattgagaaaaaatttcacttgtaacacgaacaatagatcgtaataaaatattgatttaatgacattggtgtggaatataaaatgaaattagtttattcacagtttcttagtattcgggccgatacaattgtgcagtgagtcagtttggttcctgcattaattttcatgcttatgtttgtgttctattagaatatttcttgtttatgattctcattgtggcttttatgattaaatacaatttcttttttccagttagcagcgtgcaattaaacatgaagatcattatatcggtaattggtatgattcttaacaccagttttactgctttagtttactttgttttttttcttctttttgccaatcaatctatatatatatataacattgattgtagttagtattttttattttggaggagagtttctttttcttttaatatgaatttactgttgtaaaatatattcatttgtcgtttttatgtaacagttggtttatatggaatcggagtaacatggttggtttatgtagaatgggagtaacatgattcacccgtgtaactttgttttataaaagaaagaattcaacactcacattaggctgtgtgaagcagacaaaga

SEQ ID NO: 74423 - DNA, 470 bp, Carica papaya
  Intron number 2 from transcript evm.model.supercontig_37.1 43 (locus evm.TU.supercontig_37.143) derived from phytozom e v7.0 (chr-ID supercontig_37; pos 1155384 to 1155853 reve rse strand)
gctgattttgagaaattttcagggttgagaataaggtacagaagccagttctataccaaaaaaaattgatacttgctttgttgctgacagtgattcagttttgagttctttgaccttttcttcaaaagaaatctctacgacagttagtaaaggaagtgagcctagctcaatgaataggccttttgatgagtattacggtaggcagtagacatttttgtcgttagtaagagtattattctttctcaggctgttgtatttcttagcatgctgcctttttaagagattgtgacattaaagatagcttcgtttattcagcaatcgaaaatgaatagcaaaagcacaatgtaaggagcccttgggagttgaaagtgtccatggatttttatcacttcaaatttgtcttttctaatctcatgcttttctcttgttgtttaggagtcagttgctcagccctgcagagctaagtgact

SEQ ID NO: 74424 - DNA, 859 bp, Carica papaya
  Intron number 1 from transcript evm.model.supercontig_29.7 9 (locus evm.TU.supercontig_29.79) derived from phytozome v7.0 (chr-ID supercontig_29; pos 699611 to 700469 reverse strand)
gattatctcttcattctctttctctgcgttctgaggtaattacttgtttggtcaaacttccatctgccgttcatttaattctattttattggatttttcactgtcttacctcggcttcctttgttctaccctagccgctttaaatttcactgagcaatttgattaattctaaatttgaaatctcgaaattgtttgatctgtttcgtttttcttaaattcgttaaaatagatttgattagcttgtctggagtgggggcaattgcttatagtttgtcgtatatgctcgataccatcactgatataatatgtatgcgatttctgagttctttcgattaaaataaaaatatttatgcttatttaaaaaatacttttatttgattgtgtttgaattgaagacaaaaattagtgtcggaattgaattcagcaaagtttgaattacttttgtagccttttcgttgctgaggtctcgaattttgaatctcagatttcgtcgctaatgaactgaaaaatcatgctgactttttgtttgaccgttgaagatcatcctccattttatgcatacatggcaagcattaatttggaaattcaggcttcgtgtatattgtgaggctttctactaataaggacaattatagtgcggaattaggagaaaacaaatatgattagcatttaaccaactatccgtatgtgtatttctacacttaactataaagttgcggatttgagttgtattatgagttttaatattatgatattattaattatgttattattaatgtgaatatatcacatatttattaaatgattagtacctaataaataggtaagagacttttgagtttacagggatacaataaag

SEQ ID NO: 74425 - DNA, 902 bp, Carica papaya
  Intron number 3 from transcript evm.model.supercontig_9.20 8 (locus evm.TU.supercontig_9.208) derived from phytozome v7.0 (chr-ID supercontig_9; pos 1395393 to 1396294 reverse strand)
ggattttatagttataccggttttagtgatggaaattcttttttgcagcaagctaggtttcagacgatgtccgactccattgtctcaaagaatatccttcttttcaatctgctctctaatatttgtagaaatctgatggcaatagcacatataaagcgatcacatattgtttcaattacttataacttgctaatgctataccttttgctactcgctgtcctagcacactaggcaattgcattaattttccagatagtagccatttttacatgctcatattctagtgcttctcaaatttctcttgcatgcacagaaataatttttattttcccttctttgcgggcatgcataacctaagaagaagagattggtaccccagccaactcatttttttttcctaaaaagagatgaagtggctccaaactgagttgagaaggatttgggtaagttgcataagttggttgttttatgaggctgaatgtgatgaaaagcacattcagactggataattaggattctcattatgaacagcaggaagtgtgtacattatcatgaagttgaggtagggagaataatgacagtagacaatatttattgctgcacacacacctggcacctgtaaggcagccattatacattcttgtgctctagattccagtggtcatcaattcttccctccccacagaaaacaaattgaaaatattgtgatccttcctcgaattagtgagcaggaaaaaaagcaagaaatctgcacttttaatgaagttgaggtaagaggggaaaaaatttatagggtgaatcctgtcaactttttttggggttgatttttcctagaattaagacagttttgtttcttttcctctctagtattctttgctcttttcccccttaactccaattca

SEQ ID NO: 74426 - DNA, 770 bp, Carica papaya
  Intron number 1 from transcript evm.model.supercontig_85.1 7 (locus evm.TU.supercontig_85.17) derived from phytozome v7.0 (chr-ID supercontig_85; pos 76912 to 77681)
gctccccttcatttctcgacgtcgtttttggcaaggtcggccgtattcattttcctcactttcgtcgttttcttcgttactttcatttcgagtgatacgtacatttattgattcaatagttatacgtttatactagatagcaagaaaattggttttggtttcaaagtaatgtaacatgctcaaaaaacaaaagaggtcaactaagaacttatttatcttttgggaggaaggggttttttttttttttttgaagcttggtctgttattctgttttgctgattattgaagcttggtctggtctgctacagaagtccgaagtacgtttaagatatggtggacaaagaatttgaaattttgcaattaaggatgtatataatgttttgcgtctgcagcgttattgcgactttctcgatttattgctcatatgatgttaatgttttatggagttggctataattctggcgtttgaatattcggtggagttgaaaacatgactatgctagccgaataattaaagggcatacactacatgtactgttcactatagcaataaggagttagattcttggaacttgtctttgttccctagcagtttcctcctctttccaatgtaaaacatatggtaatgtaaatgattttattgcaaacctgtaaggtactgggttagcatggttgttatctaattattatctttaatgactcaatcagtgtggtttataatggaattttgttcaggagacatcaatagaattggtattcattggtgaaga

SEQ ID NO: 74427 - DNA, 534 bp, Carica papaya
  Intron number 1 from transcript evm.model.supercontig_160. 9 (locus evm.TU.supercontig_160.9) derived from phytozome v7.0 (chr-ID supercontig_160; pos 218851 to 219384 reverse strand)
gactcgcttttccttggactcgacagctcgactcagtaattctctctcttcatatttcgctgtactttttttttttttttgatttcgttgttcagttcacaatgagaaaattacaagtatccagagtgcaaagttgtgtttttggctttctaactgtcaacggcttttggctctttgaaaatcgagcttttgccttttttttatcttttgtctcttactcgtttggtctttccctttcaccagttggatttcccttcactattgatttttatggagaatcatggacagaaattaaaagagtatttgtgatctgaattgtttcacatttgtatttacagagttccttgaaggcattgtattggacactaatatcaatatagtcgaatctgaatgaattcatgttgggttatatcttgttaatttattttaatggagaatcttgtttagaagataaagagtatttggaatgtgaattgcttatacatttgtatttgtaaaggtccttgaaggctactgtgttggactccaatatca

SEQ ID NO: 74428 - DNA, 1053 bp, Carica papaya
  Intron number 2 from transcript evm.TU.contig_32999.1 (loc us evm.TU.contig_32999) derived from phytozome v7.0 (chr-I D contig_32999; pos 3647 to 4699)
agttttccatctcttcgtctaccgggagcggagtggtaaactttccttttaatattttgttcaattatctgatttaccttataggccacgatttatgtttagtgtgtcattttctgttttccctgtgcgtccatttgttatccttgaattaactttggggatggttggtggacaggaatattgtttggtagcttgtgctctttgtttcttgttaagaagtctggatccgtcggagcttccgttttcatggattattatgttagattttctttttctggtgggtcgtttgagtttatcgttttctttggatgctcaaacaaaacatttttgaatttgacatggatgctataatccatgaatttctgtcttatctagtttactaacagtacattgtagaggacctagtgctttgactaaagctgcaagttcttatatacaatgaagtcattggtatatcagttgttgagtcatgtgactgcaggcttctaatatagcctgtagttttctcaagttttgaatcatatctccaatgttacaatatgattgcaccgaggcgtgtcccggaacacaagttcacaagatttagatgtcacaatattatatgcctaggcgtttatctagttgtttgaccaggcaaatggagttgattttaagaagtgatatatcctatggaagaagcaggctctcacaatgtctgcacagtaattttcttttcttcttgaatagctagagtgtcccagctgttctgcttggagcctgtttgaaatcaaaagtgaggaggagcttcttagatgggcctgcaggaaaaagaaaactcatgggtttcttgattagtatagctgagtagaaatagttattccgcctaatattttgcctggtttctttttttttttccctttgcaattttcgtttgtatactaatataacatgtcatttttgtgagcatatatatccccttggatctgttattcattgtattattgcagaaataatacttcccttttactcatttcttcaggcactcgtttccagtctttcaaagaagggaagtct

SEQ ID NO: 74429 - DNA, 782 bp, Carica papaya
  Intron number 1 from transcript evm.TU.contig_38280.1 (loc us evm.TU.contig_38280) derived from phytozome v7.0 (chr-I D contig_38280; pos 929 to 1710)
cacgagtattccctacgggacgtgagtattctctcttgctttctttcttgctttctttctttctttctctcctatcagtttgtttgacgtgtgtgtgtgtgtatatatgtatatatcctttctttactttctttatatgggttcttccatgtacgtagtcgtcggagtttaatttttcttctacactatactatattcatgaagtgcatggaatatatatagaaattctgagttgtattgcagtagaacctcattatctgttccttacacctttctacgtgatgttcgctgtgcaccatctagccagccaaatatatatatatatatatatatattcttacaaatgaatttttgcgttgaggttattcgtgacgaagaaagaagccacaaagattttatcttcatcgttatcattagttggagcttttatggggactatcagaaactcgcagagtcaaaattagtgtactacaaccatatattcatcatcttatggattccacctccataagcttcgattcatttatttgcaagtctctgcgggagggtttaagttttctttatgattaatgttagaaggaagtccaaatctttttcacagggagtgaaattttgtatatacatatagacactactgtactaatatgcggatatttgcttgtttgcttcaatctcaattttctatcttgattactttataatttacatctagaattattttcggtttttttttaaagtaaaactaatatgtatttttatttaatttgtacagtttgacgatt

SEQ ID NO: 74430 - DNA, 300 bp, Carica papaya
  Intron number 3 from transcript evm.model.supercontig_83.2 9 (locus evm.TU.supercontig_83.29) derived from phytozome v7.0 (chr-ID supercontig_83; pos 356180 to 356479)
ctctaacgttgatttcttgggcattgaagatttgggtgtgtgtcttttttgattttacgctcttgttcggagtacgtggatgctgcttggaattttagtaatatttcgaagaatatgtttaattttcacttaaaaaacatggaccataaggttgctattgaagtttccaataactaaaatgagaaccgaaggcaactaaaaataactgaaaaagctcaatttagtgagatattattttatgaaagtaaagatagtttttgtgcagattcatacttggagtacttgaagaaggagctccag

SEQ ID NO: 74431 - DNA, 994 bp, Carica papaya
  Intron number 1 from transcript evm.model.supercontig_50.1 03 (locus evm.TU.supercontig_50.103) derived from phytozom e v7.0 (chr-ID supercontig_50; pos 975548 to 976541 revers e strand)
tctcctaattggagagatcttatcaactcaagttggtctgtgctcatttttatttttttttcttcttcctgttctggtctcaattggttcttgaattttgttagggcaacttcaactcaaattagcttgcttctacccatttgggttttatttcaaatcaatggttttttttctcttcccactcttacttttctgtttcttttgattcttgaaataagtttagctattgaatttcactggttaaactcctttaggtgaaaaggcagattcaagagattcagaaaaagaatgcccagaagaaacatttttgaaaaatgagtgaattagggttcatgaactctttctggggatcttctaaatcccacttgactttctgtagttgaagacgagatgggtcatactttgtcatatgaaattttgctagacccattacagaaatcaggtgttaatctttgtatcaaattagggaattttcagttcctacattctagattcgaccttgtctattttgggcaactttctcttatcctgaacttatgatctgaatcaagtcttcagaacttgcactttcctgaaattagggtcataactacaggatttttgaaattttccctaataattgaattggcagaactttccaaatgtgggccaagaaatcaataaaaagattttgattgatttcttgattccaaataggaaaattgtcgaggtccaaatatctttgactcatggttcatttattgattaaaagtttctgctgtttgtatacaatctctttgcaaaaataaacaagtgtttctccagatgcataatcattcttccccatgtctgtcagttataagcttcattgataaaacactgtttgggtgggatctgttgtgttttaagtagggttctttggtagaatttaatagtataaatctccattttcacggattattatatgtatatatatgtaggaaggacgcaaactacaagagaactgtaatagcct

SEQ ID NO: 74432 - DNA, 921 bp, Carica papaya
  Intron number 1 from transcript evm.model.supercontig_5.56 (locus evm.TU.supercontig_5.56) derived from phytozome v7 .0 (chr-ID supercontig_5; pos 410304 to 411224 reverse str and)
tcaagtacgtgatcgtcggtggtggtgtcgcggctgtgagttttccgatcgattatctccttctcttacctcctttcctatatctgtttctctctcgattttggacattttttctttaaattttcaatttatgaatttgatatgtttccgttgaaatctgtgtctgtgatgattcttatggcggtgatgttttaagactgcatcttaattatccatattttttcgtgtagtttaatctttacagatctaaggatatcgattatctgtttcgtgtacgctcgattagtgattgttttctattggaaatggaatagtctcagtgaagaatgcttaattttattgacatgactaagcctataattgacttatgcataaatttgtcttaataaacttatgaagcgttttcattactagttcaagtcccctggaattgtttgtcgggttgaggctccgtttcacaatactcagcagttctgctgattggtttttgttgatgtttactgggataaaatcaagtttaaatcattttttaaactttggctttgcaatcgacatgttatcaatgaatttaaatgaccgaatctattcggtattccatatattatttgatcagttatttgttatagaagcttatacctctgggaaaagtctaaaatattatatgtgctcttaaaaattcattttctgcttctctaacggatgaatgttgatttgttgctgcgattggctccgcaaatctgattttagttattatactattcggttcaacttgtcaagcatgctttcctttttggtttctgatttcaccagaaacggatggtggatgcagattgaagatgcatttttctagtatgctgtgttgttattactttaatttgattgtgatcgtgtatcaatttttttcctttacattataggggt

SEQ ID NO: 74433 - DNA, 973 bp, Carica papaya
  Intron number 2 from transcript evm.model.supercontig_75.7 1 (locus evm.TU.supercontig_75.71) derived from phytozome v7.0 (chr-ID supercontig_75; pos 666716 to 667688)
tgttgcaaacttgttatcaacagagcctgctgacagtatgttcctatctcttgatgctttttatctggaaaggctatactgatttgaaattttcatggccatatattcataagtcttctacatatacacatgtatacgcatacacatctgaaaaattcatgaaaggaaatacatggttataggagcttagacagccacttccactctatcttctgtgagataaactctttccttttcttttttgaagtttctagccaatcaaatgtaagataggagcttagacatttattgtttattctaaattatttttcctaaataatcttctgctataatctctgttatgaatagaaagttgtccctctttcctttgttttcccttgttatttctgcttaatatttgtttgattagcgtggtcagtggtcattttgttcttcagaaatgtacttggctgcataaaaataccaatgaatgatgtctagtatcaatcggaatttaatgcatttgagatctataatagagactttgtttatgcgtctttgatatttggaaatattctttcagatacgatatcatcttgtgtttattgaattaaggaatgcataaaaactgagagtacgcaaggaaattctatggaattgattgtttctttcatggatgacattgtgtaaaatgaatttttccatttgtgacgattcagaatgagttcttgagacttgatgtctagctaaagtgctgtttgacagatttttcttctattgatgatgatattcatctttttactttgattttattataaaaatctggcttggactttcaaacgtagaaaaagaacgaagactttattcaaatttaatgcctttttcctactggcccgaggcctataatcctcagagtgcttgcttatctcccaagcttgttgtggctttaactgtaattttccttgtagttaaactggctgttgggggcttcagt

SEQ ID NO: 74434 - DNA, 817 bp, Carica papaya
  Intron number 2 from transcript evm.model.supercontig_44.4 (locus evm.TU.supercontig_44.4) derived from phytozome v7 .0 (chr-ID supercontig_44; pos 56302 to 57118 reverse stra nd)
tctacgagagacgcttaatcgagaggcacataacggttcgctgcttctccttctcggttcattctagggtttctctttacttttacctattgctcttttttgttgctgagaagatattcacataaacaaaatccaggttccttatcagttgtgcttatcttactggttagttaccgtgtattgctttaaggacattttctcttatcctttcctcttcgtttactcccggtttcagtactatgccaattattggttttagtgttcaacatttcctgctaatgtgtgacattttggagtttaatcaaccggggacttgatgaaactatacatgctttttacttagctaagcccaatctcacttctagtttttttgtcagccgatcgataagttcctcctttctttctttcttttctttgtttttttttgtctttgattttattttggtagaaatgtaagtttcacagttctttgaagctgatggaagtatcaaaatttacgggaaacttcttagttcccatgggtcttagaggactggagcctttaataagctgatgaataagttgaatgttgacaatttaattttaagaacttccttacaagtggattctgtgtttttttggacaccttccccatctattgtcggtggtgcgtggctgaagctttgctgttcaagtgtcaaactctagggagcttatggtttacattctgcagttgcatcttttgacttgtgttgattgcttgttatcatgaaaatggtcagtaaatttagacgaaagattgaagattcacatttttatctgcttcttaatcaggatt

SEQ ID NO: 74435 - DNA, 629 bp, Carica papaya
  Intron number 1 from transcript evm.model.supercontig_73.1 4 (locus evm.TU.supercontig_73.14) derived from phytozome v7.0 (chr-ID supercontig_73; pos 263915 to 264543 reverse strand)
aaccctgcaatcctcactctcttttctgttcttgggttagttccatttcctttctcttttttttttctccccttaaaatttgattaatattacgttagtaattacatattcaacgatttgggtgctttttctgtttgtcatttgcaacttgagaaccattaaaactattcttccctgttcttatttctcttatactttcattactgtactttagtttagggaaaattttaatttaaccccttattggcattcaatttgaaacttgtgattcttttgagcaagtcattgttcttcgttcaaaagttagttaaactcacagtttcctagctgcataagagtaaaaaaaatcattaaacactgtacttgttgaagcagctagtcaacaagttttggtaacatctgaattacgagatagtaagttataaaaaaaaaatcaaatatgttttagattacaaaattcaaatgggtcaaactgaaatctgctctttattttttagatgatttgtatttaggattgaggttaaacatgtgattagaagatcatatccatggttgtatctaactctacctgggataattgatatgagattgaattttgacgtatcttgggtccttgactctgtaggaac

SEQ ID NO: 74436 - DNA, 383 bp, Carica papaya
  Intron number 1 from transcript evm.model.supercontig_6.41 9 (locus evm.TU.supercontig_6.419) derived from phytozome v7.0 (chr-ID supercontig_6; pos 3136158 to 3136540)
tggtaagttttcttttctcagtttctcttttaagaacttttattttctatcttagttagtctttcttcttttgatctcccttaaagataaggaaaaaggagaaggttggttaatcggataatgggaatgatctatattgtggtgcgcttttcctttgtttgttagtttcttctgctaaaagaaattataccctgcattctgattggtctatctgagctttttcaatcgcggtatcactattgagaccgttattttgtttggcttcttagatttgaaggaaagaaaaaaaaaacgatttagttttcaattttatgaagccaatctggattatttcggttcattttccaggtgtcttaccatctttcacttgattcttcttgtca

SEQ ID NO: 74437 - DNA, 718 bp, Carica papaya
  Intron number 1 from transcript evm.model.supercontig_21.1 67 (locus evm.TU.supercontig_21.167) derived from phytozom e v7.0 (chr-ID supercontig_21; pos 1659885 to 1660602 reve rse strand)
tggcttcaactctgacggctctgtatatctcgacggtaattaatttttactctcttaatttctcatacccaagtaaaaaaatcagaatctttgacttaatagattctaaataaagagtctacagatgaaatgtctttctcccaagcaaaccctcttataatttgtttgaattttggcacgtgtctatatgcacatatttgtttctgtatacatacacttgttttaggtcaattttctcctaatgccatttttaaaaaaaatataattgggttaaatacaaagtaaattggttatctgcaacatgatttagagtttttccatttattgtatctatatatgtatattgtgcttattattttttgttatcaccatacaaaactttgcaatgaacaaatccttgacctaaagttgtcaaacattaaaaaaggggttaacgagaaaaggctcaccatcatatgttttgaatagagaaatgaaattattcttcaaggccaacaccctttatatgccattcttcattgtacggcagaattaggtatataaacctgtttgaaattattcttcaaggtcctacaaaatattgtctctattatgatcttttctatatatgtcatatacattcacaattttccatcttgattagacttgaccaacactaaagccaagtttttacctttatgcaggaaccaaattagtgttcgaatccgaaaaagttgaa

SEQ ID NO: 74438 - DNA, 604 bp, Carica papaya
  Intron number 1 from transcript evm.model.supercontig_9.36 4 (locus evm.TU.supercontig_9.364) derived from phytozome v7.0 (chr-ID supercontig_9; pos 2557145 to 2557748 reverse strand)
ttgcaacactttggctgagtacgtcaaggataaaggttattctgttttccccgttataactcttttattttcaattaattccgggaaataccctgttttgattggtcagtttatggaattttgttgtgttatctgtccttttcttaattgttcgtctttttttttttttaattgttctggattttgaatgttaaggtgccctttgtgtttggtgattttaattaatgctgataactcttatgataccttctcttttccaacgtgatctttctgttgaattctgtgtttatatcagatatattttgttcaattttgtggcttttacctgacacttcgaggttctgatcaatttggatttggaaagcaatagaaaattaatgatgcttctttcttgtgtcagtactaggttagaaagaattaagtggttgttgatcgaagaaatttatgttttgccattacacatttgacgtatatgttaagatcttttgcttcttgatgtgcatattcatcattgtgattaccagcatttgtatagccaaaagtgtcaactatgagtgatatggttgcagagttagtatctgattgcttgaagtgttgcactgag

SEQ ID NO: 74439 - DNA, 675 bp, Carica papaya
  Intron number 1 from transcript evm.model.supercontig_165. 31 (locus evm.TU.supercontig_165.31) derived from phytozom e v7.0 (chr-ID supercontig_165; pos 185483 to 186157)
ctccagcaatcgatttcgcttcctccgaagggaaggtgatccactctctactcttttcatctgcaaattgatggattctagggttttagttctatcaattggtttcaagtagtttagtttttttttttcgggggagagttttggacttcgtgttgtaagacagtgcgatccgacgaggttgatattttagtttttcgtattttctgtgcattagtttgtataagattgtttgagatgtttgaattagaacggatatcagcagatagggacactcaagagtgttttttttttcttttttttaaattctaaattggtatatgtttgtgtaatgaagttctaaatgggcagtgattcgagttcagattaaaaacttagtctattcctagaacaaattattctttttgaagttcaattatgagtggttggaagtcctattgccgtaagatgaaaattgaactcgtggagaatttgaagtaaaatttttactgttgaagaactaagcatggatttttcaaagatacttttcgaatcccttatttttagtatctgatgcagatcaggcataaagtggccttagatattattatttttggattattttatgatatccagccaggagcattcaactgcttttgtgttttgtcttgcagcaacttttcatcgaggcaattcaag

SEQ ID NO: 74440 - DNA, 909 bp, Carica papaya
  Intron number 2 from transcript evm.model.supercontig_32.9 9 (locus evm.TU.supercontig_32.99) derived from phytozome v7.0 (chr-ID supercontig_32; pos 1262906 to 1263814)
gccaaggccgttgtcaaccaggtattaataaatgtttaatgtagattgcagtgtgcatcttgtggtcggcgggtgaactttacttccacattcccaaataaacgtcagaagaatttgtttttgttagaatgttagcattttcaccgtggtagtaaccgcttatttccagtgaagtgtagttttccattcttgttgggtatttgctctggcttatttttattgtgttgttgggtttgacttcagttatcagagactcataactctgatttttagaacctgaattgtgaatacagttaccactttggcctatttaggttagatggaaagccgggtaaggaattgactgataaactgcatggttgtgagaattgtttgtggacaaccattagttttatctttttgttatattctcttatattataagccaaatttgtagattgcaatattggttctgaaggataagtggcatttatcaccaggcaattgctttgtcttctgaaaagtggtcaatgcattacatgtagggccaacttggactggggtttcaaatgatatctacttgttattccttgtgtgattacgggctaacttgggctggggcttcaaatgatatgtacttgttattcctggcttttgtggtccattcttaactaaggagtattcttcgctttgaaaaatatttttaggattttctggttctcatgccaaccatgtttattgagcattttgttcttgtctatgttttaagaatttagctaaagcagttaaagaagcttgaacattgatagtatatcttatccataggtagaggagtttggagtttggttatataactataagtcttggttaatttctctttgtaaaataatttcaggttgcagataactactacaggccagatttaaagaa

SEQ ID NO: 74441 - DNA, 932 bp, Carica papaya
  Intron number 1 from transcript evm.model.supercontig_50.9 1 (locus evm.TU.supercontig_50.91) derived from phytozome v7.0 (chr-ID supercontig_50; pos 860287 to 861218 reverse strand)
ccctaacgaggccgctcagcggttactatctcaaggtccctttccctgtccttctcttcctttcttttggttcctggctctctatctatcttctttgaagtgagataatccttatgttctgttgctatctgtttggtttccgagaaaaaggttaacggatagttgaagagtggttctttgtttcttggggggacgaagccgcaacttctttttctccctcgatagattgtggctttgaagatgatgcaaacgcttgaatttatgttcaatcgaagtcattctttcaacgcccgcagtttcccccttcattttttttttcttttgcttttggtttattttctgttgcgttctgcttcttcagtgagaaattgttcgtaaagagaagttctttccatctttctttggcggattacatcactttaatatcgttccagcacgaggcaatatagggtgcttgtttgtgaacgctttcgttcttctctaaatttcttcagtgtccagtttttttctttttggctaatcttttgtgttgcttttgtttgtcgctttatacacaaaaaaggacttgaacctttataattttttaaaaaaaaaaatttccctcgcttaatagctaaacaaggtgcctgcaagttttgtggatttttggtttctgcttcagggtttattggttgccagagagacgaactcaactgcatacaaagaaactgagaaggcattttacgtttgccatatgcttggctttcgatactactaaaccgatttctaatcatgatattgtattatttagttatcttataagtatttggggcttggttgtcctatgtattgttgaagtgtaaagctttgatgatagttccaccgttattaacattgatccgaaagggtaagcactaaatacttagcatgttctggttgtgtagatacttttc

SEQ ID NO: 74442 - DNA, 765 bp, Carica papaya
  Intron number 2 from transcript evm.model.supercontig_79.2 9 (locus evm.TU.supercontig_79.29) derived from phytozome v7.0 (chr-ID supercontig_79; pos 512403 to 513167 reverse strand)
agagcgagcttcgtcgagttttcacgctgcaatcggtgagccctattctgttatctgaaagccttcgtgttttttcgtttgtttttgaaatttcttttctttttgagcaccgcttctggatctctcgccctttatatgcttcgtctgcgtgtaatttctttgatgatttctttttcaggctgctgtattggattttgttaaacaaaattggaaaccctagattaggtgccatttctcttgtttttgcgaaattgaatcgtggcaatctgaattgacttttgtattcttggttgtttgttttgcccttttttttttgaatggtaaattaacttgagtagtgttgctctttaagaaggtttctgatttccaaatgtatgcttgttttgttttgttttggggtatgtgttgattttgctgttgtttatactttatactgttttctgtaagcgaaattactaactaaaggtatgtgaagggcttatgaaggtgaagggcttatgaaggtgcgttatgagaattacatggccattctgagttatacttgctaatcgaattggttccaaatattattcctttgtagagtaattcgatctttgagcgtgatgaaaaaatcctttttttcttcctccttccagctaacttctaaagtaattgttaacctttttggtgttatgatcattagatgctttttccagttttacttgttatctcttctcatattattgttagttttccagtatcactcagttattccttctctctcag

SEQ ID NO: 74443 - DNA, 372 bp, Carica papaya
  Intron number 1 from transcript evm.model.supercontig_79.2 9 (locus evm.TU.supercontig_79.29) derived from phytozome v7.0 (chr-ID supercontig_79; pos 513138 to 513509 reverse strand)
gcaagccattatttacaacggtgagctgtatcctactgggagatgatttcagttgcttgattaagagaagggaaagcaagcagatgtattaattaatatgacgtaatatttacggatttgaaataatattatgaaacaatctgaatttccactttacaaatccgtcttccttcataaattactcttttattgacgcgttcttatttttcactctcaaaaaattacccattttctttcctctccttcttttcctcggtcccctttcgcatatatctctgtgtgcgcgaatctctaaccctactctggtccacgctctgtttgattatcgcttcatcagacatcagagcgagcttcgtcgagttttcacgctgc

SEQ ID NO: 74444 - DNA, 835 bp, Carica papaya
  Intron number 3 from transcript evm.model.supercontig_8.30 7 (locus evm.TU.supercontig_8.307) derived from phytozome v7.0 (chr-ID supercontig_8; pos 2401562 to 2402396 reverse strand)
cgagactagttaaacctacaatacttcactttcaggtttgtaggatttacaattcgtatatttgatattttgattattatcagttaattcactttgatgtttctatcaagacatcatgttcttctgcaaagtgtcaaaagtgtgagattgtgtgttcacctcctcttttcttcacatgtgctctttcacaaatatgtgtttgctacatgcacagtcacacagaatattccgtgcatatacacgctattttgttaattgtttttgttgtattgttatggcaatttgaaaaacaagctcgaatgtaatgtcttgttgtgcattcacatccatatatcttctctctccctctctcatatatagatgcatgcaactgaaaattgaatcttctgtttccagtaatgactcatctaaattaaattcaattaaaagtcttaagtaatgtcttaacctagttgtagggcaagcagtatacagtcttgagttgtctgctattcacagatcaaaggacaaatgaaaagggttgaggatatctttctttagtttgagtactgattgattcagattgatttaagttcaatctaccatttcgtggttctgcaaaaacgaagttgtagactgaatatggttctagaaaaatgttgcttttgttcgcattactgtattttgatatgtgtatttgtgttccctgtctccttgacttcattgaaggccagtgtcatttagagttaatttactactcattgttccttgttcctcataagttgtgttgcctagttgacaattgttgggatgataaatatgcagctcaggaacttagtttgggccacttcaaagc

SEQ ID NO: 74445 - DNA, 292 bp, Carica papaya
  Intron number 4 from transcript evm.model.supercontig_62.1 71 (locus evm.TU.supercontig_62.171) derived from phytozom e v7.0 (chr-ID supercontig_62; pos 1087701 to 1087992 reve rse strand)
ggcctgactctcaggttatcggtttcgttattcaggtatttcttgcagctatacatttcccaaaacaccattagtttaatacatataaactgtttaccggtaaaattaatttataaactccgggtagaatgtagtgatccaattactgcttcaatcaaatggactagagtagttcgacaacattgcagacaaggctttgacagagtttcggtactgatgcatcttgtataattgaaaattgatttattctctgaattttggatgatatctcttgtttcttcttgtcattcag

SEQ ID NO: 74446 - DNA, 814 bp, Carica papaya
  Intron number 1 from transcript evm.model.supercontig_7.18 8 (locus evm.TU.supercontig_7.188) derived from phytozome v7.0 (chr-ID supercontig_7; pos 1898686 to 1899499 reverse strand)
gaagttaactgaaagtcaggtttatttgataccatatgtggtgaattgtgacagaaacttttatttcattactactttggtcattattgatattgggggagtgtgcaaggaaaacaatcaacgaaataattgctatagccagcctggaaaccatatcttgtttaagaacaatatagaaaaataagaaagtcaatcaaaagtcaggtttatttgataccatatgtggtgaattgtgacagaaacttttatttcattactactttggtcattattgatattgggggagtgtgcaaggaaaacaatcaacgaaataattgctatagccagcctggaaaccgtatcttgtttaagaacaatatagaaaaataagaaagtcaatcaaaagtcaggtttatttgataatttctctgctgaattatgataggaatttttattttattattactgtggtcgtcgttgaaaataactgcattagcaagcctggaaaccatatcttgtttgagaacaatatagaaaaataagaaagttaatcgaaagtcaggtttatttgataatttctgtgctgaattaagacgggactttttttttattattactgtggtcgttgttgaaaataacggcattaggaggcctgaaagccaaatcttgtttgaatcactatagaagatttgatagtagtccaactatgtggatattatttccatcatataaaatttacaaaatgttctatgaattctttaatacgggcatggcattaattgattgtttccatcgagcaggatctttatagaaatatattacgaagtggtgattc

SEQ ID NO: 74447 - DNA, 444 bp, Carica papaya
  Intron number 2 from transcript evm.model.supercontig_2.16 0 (locus evm.TU.supercontig_2.160) derived from phytozome v7.0 (chr-ID supercontig_2; pos 2334796 to 2335239)
cagaagtaccttgattgctctaaaattcaggtttgcgctattccctaattcttaattacaggactgttgttgttttctttattattggaattgaattggaaagtttgattgttgagtaaaagttcgaattattgttttgtaatacaagtagttattgatgataaatttctgttttttatgtgtatatgcgtgtgtatgcaatcaagtttcttatctcatcacagattgaataaggaacatgaataatttcaaattttggtgtacaaattttgttgattgtttattaaattcttaggtttgatggctgattcagtctcagttaagtttactgctatgtgctactgagagtcaagaaccttaattctgagattagatttatgcttagagtttgttgtgaagtttctgataaaaagaaattgtgcttttgtcagacatataaaatca

SEQ ID NO: 74448 - DNA, 487 bp, Carica papaya
  Intron number 3 from transcript evm.model.supercontig_8.1 (locus evm.TU.supercontig_8.1) derived from phytozome v7.0 (chr-ID supercontig_8; pos 5225 to 5711 reverse strand)
caagctttaaaagacactggtagaaagaggtgacagttggctcttttttcttccgtgcttaatacagtgcaaagttagcaccttttgtttatgacttgccattaattcccggtgtttgagtttattgaattggccttttgcagtataaaaaataccacaattggaggagtgcaaatctcttatgtgatttgtggatggagtatatatacatatatgttaagggtttaatttttgtacttctgcttattacagagtggacctgttgtggaaacttttagtacatgatttgcttttggatggagcatacctacatatatgttaaggggttaatttttgtacctctgtttattacagagtggatctattttggaaactctagtatatgatttgcttttggaggctgctacgcgtgcactacattttcattcctggaacttgaggttgcatggaccttagaaatggttgttgactgaatttgtagagtact

SEQ ID NO: 74449 - DNA, 540 bp, Carica papaya
  Intron number 1 from transcript evm.model.supercontig_43.1 12 (locus evm.TU.supercontig_43.112) derived from phytozom e v7.0 (chr-ID supercontig_43; pos 1430125 to 1430664 reve rse strand)
taacatttcgagctcctttacggcttcttgatgttggactttttcttatatgctaagagttatgataataaattctattctgagactccattattattttgctttgcctacaagaaccttgatttaggaactaagatgtcttgataaagagaattgttgctagagctagagattttgttgaggcactgtccactgacagtagaattcaaaatttacatgaaaataaatcaacctgactctaacatcaaataccaagtctactgctaattgatactgctatttaagatatttcatatctggttaatttcaaaggatattaatgggaatttgttttttgggtagtgtctaaagaaattgtttgcctatttggtaaatcttctactcattaatcaacctacttaattacatatttaatagttgatgtatggtaatgtattatagttcatcatactagtacaaaacaaatggaactcaagtaagctttagttaaaatgaacctctcttatgtgttgcaggttcgtggtggattgctctatctca

SEQ ID NO: 74450 - DNA, 1025 bp, Carica papaya
  Intron number 1 from transcript evm.model.supercontig_80.3 0 (locus evm.TU.supercontig_80.30) derived from phytozome v7.0 (chr-ID supercontig_80; pos 233594 to 234618 reverse strand)
aactagagagatcagctctggacataaaacaaaccgtactttaatagctttctataacgtgtctacacctgggttttcacttttttgctttctcttgctttaaagttctaattttgattcattttaagatttatccatcaacaggctttgcatcagacacatgggtagacttgaatttctcatgatatgtctattggggttttgtgtgtatttgagggttctgtaaatgaacattaacgttaactttcttcttttttgctttctcaccttcatgaattctatacataactcttcgctcaaagaaaaaaaatgatctatagttgaagtttgggctctgggtgttatgcgtcaattaggaggaagtcgactaggaaagtagggattaggaaacaggaattcctatacggagaaatgaggaaagtagaattgatagaaaagtagttaaaacagttaagtaggcgtgtataaatacttgtattcagaagatacaaggcatcaagaaatgaaatgaaatgttatttaaccggaccactctttgtgattctccctctttctttctcctccctctctctgcaacgattctaagattagatgcaacaattctcagcttgtgcagtccacagtccgcaaagaatttctcacctaacaattctgcgaggaaagatgctttgttaccactgttatgtgaggaattttgtgttatcttcagtgtttacttaactgttttaactacttactgttatcaattatatttccctaatttctctacgcaggaatttctgtttcttaaccccgagtttcctattcgacttcctttcttaattgacacataacaatctatgggtttttgtagttggatggactgttggtatttcaattacaatgtttctttttcatcaactcaaatatgtatgtatagtaggaagtttggcttctgggtttatggggttttgtagttggattggatatattggtatttgccattaaaattcttgagctattattgtttaggtggtgagggagac

SEQ ID NO: 74451 - DNA, 819 bp, Carica papaya
  Intron number 2 from transcript evm.model.supercontig_18.8 5 (locus evm.TU.supercontig_18.85) derived from phytozome v7.0 (chr-ID supercontig_18; pos 626848 to 627666)
ctggtggtggtggcagtgtcaaccacctttggctggtggctggtgagcagtggcatttgttttagggattttttgaatttcttttggtgttttcttccccatgggtttggggctgtttgggtttagggttttgagaacttgggtataggattctttaagctctggtataattttttttggttgaaatataactctggtatcaaattgatgtagatacaaatatgattgatttgtctaattaggtatgtgatgacataaacctagacatcacacctagggttttttagacatgatatttaagaagtttgagtgtcacactgaggatttgattgcatcacacaatcaaaaaattaagaaactctcaaaatatttttgaataattgaatgttccgataagttataagctatttattacttttagcaaccttttctaaattaaattaaaattagaatttttttgagataaacattaaaataggaaatagtaaactaataacttaggaatagtaatcctaattcaaataggaaaatactaataagaataaaaatttaaagttggtaaatctataataatactcatcaattatatggaagtgtaagaaatctaatattagccaagtttgcatcatcgcagttgtgacaatcatgcataaacagaagggtatagaaggtaaaaactagagaacatttttatataccaaatgaagcccaaatattttactttttcatttgcatttccattcttcggaattggttcctgaatgccgatttattggctctattttggcaatgcaggtagggcactttgtttcttacttt

SEQ ID NO: 74452 - DNA, 736 bp, Carica papaya
  Intron number 1 from transcript evm.model.supercontig_9.32 2 (locus evm.TU.supercontig_9.322) derived from phytozome v7.0 (chr-ID supercontig_9; pos 2176224 to 2176959 reverse strand)
aatgtaagtaattaagaatataatcaggttatagctgttaggtgaagtaggatttaggagtctccatcgtaaggtgggtggggatttatcaaaacaaccgcatattaaaagttgctgcaaggttttgaaaattcggggtctttggggaagggagaagaggggagcggggagggatatctcggacgcccgccatctcatctatgaagagatacactgtttagtttgcccatgtcaatgcaaatatggaataatgctgtgatgtaacatctttagtgagatttggaatgagtggaagtgttgatttttgttcacttaaaagttttaaaaacaggccatgtataatcctttgtagttctgatctctgatcttgccaaattatttaacttgtctaagaatcaaatgttaagcaagaatgacaaagattgaaatatctcaaagtagaccgagctcccaatatcaacagactcaactctgtgctgtgttttgagttcttatgtgcccatctgaatcctttaatttttttgagagtgtaagattctgtattgaatttgtcaccttggattcgcattttggctgttcatctgtttgtgtttcacaatgatggcttatataaacacatttatttttaaagccttttcattcctattcatccatctttatcttcgactacattttcttagcagctatttgttaaggtttttgttggtatttcttgatatacagcctaagcaaatcc

SEQ ID NO: 74453 - DNA, 461 bp, Carica papaya
  Intron number 1 from transcript evm.model.supercontig_19.1 61 (locus evm.TU.supercontig_19.161) derived from phytozom e v7.0 (chr-ID supercontig_19; pos 1045154 to 1045614)
cgcagcgaccacgagctttttattcgaggcaaccggtaagaattttgctattttacgcgacgtcgtattgtgatccctggtgcttcggcagaatataggaaatggaaattgagtttcgactatttatcttcttgtttagtttatttacattgaatggcttagtagtttatcagttacgagaaatgtgatcttatttatactaaaaaagtaatttagtctatgtttggaaatccataattagtgatgaggagtgatgaaaatttcattgcagtatggaaattgaattttcagaaaccattgaagtaatattccaaattttatctatcgagtcttactattcaattgccaggatgataactcaaatcatgttctaatgcactggcaatagtgattacgtgaaatgttgttcatttttgagtaactaatggttttggttgcttatgttgttgccataggataat

SEQ ID NO: 74454 - DNA, 507 bp, Carica papaya
  Intron number 2 from transcript evm.model.supercontig_160. 10 (locus evm.TU.supercontig_160.10) derived from phytozom e v7.0 (chr-ID supercontig_160; pos 226213 to 226719 rever se strand)
aaggtatgccattctgtgtaattttttttttcgtttttcataaagctgtttggtttttgtctgtctatgcatttgacttgttagtgtatgagatgagcccggtcctttacttggagcattcttctttgcttctagtgatggataggaagtgtggttaatgttattacttctttttaaaaatgaaaatggtaattattactttaatggcaatgtgattcttttggagagagtttccttcaataaaagaaagtgtgaatttccagttttggtaaagtgagtgtgattagctggttttctcaagtggatagcatttcaattttgaactccattatgacatatggaactttcagcgcaagatatttgcattagaactcatgattttgatacctcgccttgatattatcatttgattcgcgtaattgataaaaagctttggtttgaagtgaagcttcacttttgtgtgctcctgtaatcttaagctagtcaaatttgtttggactacagctc

SEQ ID NO: 74455 - DNA, 617 bp, Carica papaya
  Intron number 1 from transcript evm.model.supercontig_249. 10 (locus evm.TU.supercontig_249.10) derived from phytozom e v7.0 (chr-ID supercontig_249; pos 156362 to 156978)
ccaacgtatgccaaggaaatgaaaggatctattatgaattacttatgaatattttcattataccaattcacttttcaatttaagagaaagtaagaaatatttccagacctttatcatcatcatcatcattattattatttttatccaaacaagggaaagaacggctccttcttctgcattttcctcgatccagacatatttacagatcttagattattctttacaggttttcagcagcacttatatttccttgtttcaggacatcaaatggatggcacataattatttctttgtttctaatccctaaatgtcattctgacagaaagaaaagaaaaaccgtctctttggcttatactatatctcatctctcagtgatttcattgctaggtcctcacttggcttgtagcctctgcattcatcatctttaagacattattgtttcctttgagaaattttgatgggttttgggtatatatgttttgatatttctttcaatttctcataattatgtattcctaaaaaaaaaaaaaaaaaatcatcctcgtagttatgtcttttcttgttctttctcctgtccaatgccctttatttgcagggccattctttcggtgaaacaa

SEQ ID NO: 74456 - DNA, 867 bp, Carica papaya
  Intron number 1 from transcript evm.model.supercontig_3.10 (locus evm.TU.supercontig_3.10) derived from phytozome v7 .0 (chr-ID supercontig_3; pos 41342 to 42208 reverse stran d)
agttcccttatttcctaaggtaatatttgtatgtgcatgtatattcatagatttcatgaataagaattgattctggttttaagatgattacttgactacttgatttctctctctctctctctctctctctgtttccttttcttttctctgggttttatctctggttttaaactttcacatggcgatttagagatctttagatcgaatgatttgattggtagaataagaatattcctcatgcatggaagaaaaggacagaaaaaggtttcaatgctgcttctttgtggttcttgttattctgatttgttcaaacggaaagtatgtggggtttggtaggattgccatgtgagggatctgtttctgaaatattccctctgcacatgtttctaggaatactggataaaattataccggtgatttatcttttttaggggtttaatttaatgggtaggtttcaatttttgtatctttatctgggttttagcagaagatgcttcctctgattccttctttttctgggtggttgattttttcccatttgtaagcttgtcttgtaccaaataggaaaatagagaaaaaaagaaaagggtaaaaaacagaggaaaagcagaggatgacagttggctttagagatgtgaaggattcaacgtttatatacgtttacgtggatatattctgttaagcttaagacattttaagtggtttaactgaatttagggtttagatgatgatttcacactcagatagtctttgaatttattctgtttggttcaaattctcttccacggactcattgatttggtgttttgattgtgatgattggcaatgccagcgagaaaactcgggtgttgttgacaggagctgcct

SEQ ID NO: 74457 - DNA, 681 bp, Carica papaya
  Intron number 1 from transcript evm.TU.contig_33526.1 (loc us evm.TU.contig_33526) derived from phytozome v7.0 (chr-I D contig_33526; pos 2117 to 2797 reverse strand)
aagagctgaaccctcgctcttctctctacaaacaggtgaatgatctttttcttctcttgcgtcttcgttgttcttctaattatctttaattattcgctgtatatgaaatagtttactaaattggtgcttcttcttgaacgttgactttgtataagtggtcggtcatggccatttatggatcattcttgtctctgttatgggttcaattgcagtttctgtaggtttttggttagttgccactgattgattaatgatatgaaagtttttgctgttcggggtggattagagtaaaaaaagtaacgttagccaatcatgctgtaatttgttgtttgattgagggtcgaatgtcacattacaactatcttcttataaatttgggtatatgcgtcaaatcagtaggtcggtaagtaggcagtctaattttgatggatattttttggtgtgttttttcgctgcaaagactgggtggaagaaaaagttcatgcctgatcagatgggtttgtttgatttttttgttagttacttggaaagatgatcttctttgggttaggttatcctttattaaccgtttttcctttattaaaaactcatgtcttttaaaaccattccatgtttcttaatactcacgggcttactcattttgtttttgtttctttggtcctattgaatcgtagatttcaa

SEQ ID NO: 74458 - DNA, 754 bp, Carica papaya
  Intron number 1 from transcript evm.model.supercontig_216. 22 (locus evm.TU.supercontig_216.22) derived from phytozom e v7.0 (chr-ID supercontig_216; pos 213493 to 214246)
ctcaagaggctcttttcctggtcaacaaagccacggtatcttctctttttcttcagctattttctatttgaatacgaattgttcgaatttgatcgctgattagggtttcatattgtccaagaacctagaatgtatggtgcatgaacgtgtaatcatgtgtttgtgcagtttacttacatttgaggaattcgattagaaattgtctttgtttggaagaaatgaatttcataacgaaattatagaactcattctgagatggagtatatatgaaattgtgcaagtgtttttgaaattccgtcaaagctctatggaactcataaagaaacatgttagtattttctcaaatgtattttatatatcacagtttgtttcaaacatcaatattcatttaaaactaaattaatttgtcatttcctttgcaaaatgaaatggaattttgttgttcaatattccaaacagagcttgtattattttatgagcaatttaggctgtgttttgaacaaattaattctttgtagaatttatttgtagaattcatttggaaattcacatttttttaaccatgaattttaatggaatttgtatatttatgcctcaattttagttaaaattatctaggagcttaatttttatggtacatgaatgatctcctccatctcatatcatatgttctaaacatactcttggacttgctctttgtaattttcatttcccaattgatatgcatttctttttgatgtaatggataagttcg

SEQ ID NO: 74459 - DNA, 773 bp, Carica papaya
  Intron number 1 from transcript evm.model.supercontig_244. 11 (locus evm.TU.supercontig_244.11) derived from phytozom e v7.0 (chr-ID supercontig_244; pos 247374 to 248146)
aggtcaaagaataagactattgtggttgagcattggtgagttttatttacatttctctcaaaagtggatgaaaattgcatatggtgaactacttttgactgctcgtgttccttgttaacctggtttcttgttaagattccttcaaatgcaaaataggcctgaaaatcatccaagtgattgctttatctcttttctgttaggtcaaatctctctttttgactgttgtttgcgcctcagctttcagtttggctcccgaaaaaataaagcatcaaaataggcctaacttagtcacggtttcgagaatatagagggagatgtctcttaaaccgaagtatgattctcgtacaaggctcgagttaacctattggattctcttttatctttatttttaatttttttattcaggattttgagatttaattccttaggactcagaatttattctcatttgtatcattagaaaaattgtttcttgagaaaatggtggtagaaagtgggcaagaatgtcttggcttttagttattattactgtttcttcatgtaaacttgtgagttaggaatttaagcaatgattggaacaaatatgaatatgggattcttgcttgcttgttgagaaatgcatgaaagggtttgaatttacttttttttttcttctcttttggttaacttctgcttgctgctacttctatttttctacattcccaacaaaagtacgtcattttcttctatcaatatctttttaaagtttctttcttttgttgtcatagcacaca

SEQ ID NO: 74460 - DNA, 269 bp, Carica papaya
  Intron number 1 from transcript evm.TU.contig_38432.1 (loc us evm.TU.contig_38432) derived from phytozome v7.0 (chr-I D contig_38432; pos 1198 to 1466)
gagagtttcctgaagaaactgctgctgcttatgtagttcttattatattctctttgttttctctgctttatggtatttagccaccgacatattcctaacccacttcatttttcttctctttccattgaaatttagtttcattttaatgttggtttttgtaagaaatatcgctaagaaacagagattaccaattattatgatgagcaatatttttccgagggaaatcattaagttcctttgacctaggcgtttcttgcagagagctattg

SEQ ID NO: 74461 - DNA, 805 bp, Carica papaya
  Intron number 2 from transcript evm.model.supercontig_55.1 59 (locus evm.TU.supercontig_55.159) derived from phytozom e v7.0 (chr-ID supercontig_55; pos 983226 to 984030)
tctctaacttgacttacatttcgttagccgccctggtattttatttatttttttaatctgccctgacaaagcacattgctatgctagatatattaactactcgaaattcaaatgagtgtggagacactatttttagcgttacaacgtctttgtgcggtaacactattaaagcttttgtgttgttaggattaaggaaaacaatgcaagtgattgacggactcttttcagtttttgatttctgactaaagcttacaattgttcgttgatatgccatggaatgagaatctttagaggcattgttttagtccttttttgacaatgcagagaggaccgacatagaaattactttcttggtttacattactactaaaggtctcctgtcaggaaatttgattttatgctctattcacatatgaaaagaagccagcactttgacttcttgttttcccaaatctttggtttgtcaaggctgaattcattcctgcttttgcaaagttttcgtttgatgagtttgtgtgtatgtgtaatttggtttgctggtttcaccatttggtttatgcaaccataatgattacccatttcctcaccattttattctctgtttcggcattctgttttgcctcatcacattgtacttgttgtttcagatgccttgtaattgtgaaagatgctgggaactaacatgcttcttttaccaatgttgactttcatgttttttttttctctaccttcgcaaatatttgctgatttacgatgaatctccatgacagtatagtgatctggctgaagcagaaagaacactagt

SEQ ID NO: 74462 - DNA, 1018 bp, Carica papaya
  Intron number 1 from transcript evm.model.supercontig_95.2 9 (locus evm.TU.supercontig_95.29) derived from phytozome v7.0 (chr-ID supercontig_95; pos 545859 to 546876 reverse strand)
tcaattggctttcaattccatctaccctgattcaggtattcctgcttcagttcgatgtgttcattgaaatttcagttctcactgtaacaagagattagagtagaagtgaatttattatttcggtccatggatggaagacaatatgtgttatggagatttttatatggaggggatataacaagaagattacgaatataaaatcagaatagttgacatgcttggaaattaaaggatctcattgatagtcccataagaatagaagtaggtgatggattgtagctggagtactaggttataagaccgtctggaagttgtatccatcttagtccttgatgggcaaattggttgacttttaagttggtttatgctcgcacttggaattttggatttttgcattttgctttcacttgctagattggctgttgtgttgacgatctgctttcttttccatgtattttatagttgcagtattcctgtttaaacttttgtatcgggttctatttgcttcattgttaaataaggattcgttatttttactaggattttttattttctcataatgataaaagaatatcatatgttgttcttatattgttttcattcttccatcattctatagaatgatattaaaataatgctttgctatttggttgcatgaaaaattctgcatcaccactgatggtttttgtttcagtttaaaataggatttgacaggtaaagagtttatcctattgacttagttcttttaaagacaatacttttctttctttttttttgggctcacaaaaattatatcgggaaatgactaaagtaaaagatgtctcagaattactcctcaattgcttggttgttagttattttatttgatttagttgctttattgatgtgtatctgcttgcatttactcaggccattgagcagtgtaatttcaagcaagcagacataacatttatgacttttttttttcggttaatgatttgggtgtcagatcaaattccttatattgaagctggtactt

SEQ ID NO: 74463 - DNA, 496 bp, Carica papaya
  Intron number 2 from transcript evm.model.supercontig_62.7 3 (locus evm.TU.supercontig_62.73) derived from phytozome v7.0 (chr-ID supercontig_62; pos 475587 to 476082 reverse strand)
gttggagggcttatttcgagctcaaagatcttgaggtaaaaagaacaaattcatcgaactacaccttttgagggcttgtttggtcgctaggaatcctttttttctactttttatttggtttgatttactgaatacgcagttaaagcaaaagagcgttacgttcttttgacaataattatttgctttttgtttttgtctccaataacatgaacatcttcaatagcttgaattccttgcaagtaatttcggaaaagagctttgaataaattgcttgcgattttgctttcatttcctaatttaactggatttataactaaaatgggtgtatgaagaggtttccttgcttttaacctcaatgatttgcgtatggttttgtctccaaatgaaatggaacgtcttgaattatttgaattccttgcaaccattttttcaatcagaaaaagagctgatcttctatgtcattgcaatgtaatccagagagagtcatcaaaggagg

SEQ ID NO: 74464 - DNA, 668 bp, Carica papaya
  Intron number 2 from transcript evm.model.supercontig_9.15 7 (locus evm.TU.supercontig_9.157) derived from phytozome v7.0 (chr-ID supercontig_9; pos 958430 to 959097)
attctgtaagtttcttctcctacttaggatcatcttcctattgtttctgctttcttcttttttttgattgtgataaacccgaattagggcatggagctaaaccaagttaacacaatcaactgagtcaatcgaagttaaattggtacttagggctttattctgactataagacttgtaattaacacgaatcgagttgtttaacctgtaagtcagactacttttgcttaaatggaagcaaaccaccgggtttattgtttgtctaaattgtcttgtagattttgtatacctgatttcctttttgtttcgccaatctctgttcattgcgtggaaatctctagttttatgttctacatatacatctttggcatattttttatgaagttaaccgtgagtgaggttgtggtggctctcactgtgctagtttgagttataatttttttgtttggttgatggggtttatcaagcgctgctgttgcttgcaaaaagttctatatatgctgtgattttcatagcccagctgaatagttttctttgcctatgtgtggagaagtgtttgcgtgcttcatgttaacttctttttatatctgaaaagtgagattcataagcgttatgtgttgttaatggtctctgcatttctatatttcagccatcagtgagaaagcaacaca

SEQ ID NO: 74465 - DNA, 883 bp, Carica papaya
  Intron number 3 from transcript evm.model.supercontig_21.2 7 (locus evm.TU.supercontig_21.27) derived from phytozome v7.0 (chr-ID supercontig_21; pos 290645 to 291527 reverse strand)
catttggaatttgacatatcagggactggtattacgtaagtctattaaattttagcagttgtccattaacgaggtatacttttaaggataaacccactttgacaaaatgtgattggaatagagatgtttatgagggaaacaaagttacccctcttgctcttcttaatcttacttcatgtgcatgtctattgtagaaatattttaccattttatttatactataaggagaagacacatcaatttccatattctgaagtgtattgcatatgttacttttcccatgccatctttgctccattgttatgattgccaaggaatggaaataaactgaattccagattttagcaggttggaatcagttgttggctgtgagatttaattgacttcttgaatttaatatcattaataagaattgcttcatgttatgctgccttatttcttttgtccagtgtaactcagacgatcttgtttcaggcttttgcaaaattcttgtgtgaggtttcttttgttattttaccagtatgcttgacaaatctatgttttttcacttcaatctgaggatgcagacttaaatttgccagagcccagaaatgatcatgcattatctccttttaaatttgattatatgcatgagggcatatgcccgcatgcgccactttttgttccaacaaaaaaacatagtttgtttaggaggtccatattcttgggttcacagtggttactagttctttgtgttctggaattccattgcctgtatcctttaggttgtgtttatacaatctaaagccattattctacttattttgaatcaaatcactgaaagattctagaaagcatcattagtttctgataaatagctagcttgtggcttccttttgcagat

SEQ ID NO: 74466 - DNA, 867 bp, Carica papaya
  Intron number 2 from transcript evm.model.supercontig_29.1 64 (locus evm.TU.supercontig_29.164) derived from phytozom e v7.0 (chr-ID supercontig_29; pos 1802633 to 1803499 reve rse strand)
attcagttggttttaatctcttttggagggtatgtatgtacatatttttgtttattctttcctatacatgcttgtccctatttgattgtttgattttgaattgtttttagtatattaggaaatttggtgattattataccatttattattctattatctcttcttttaatatttagttttcattttattctcaaatgttaataaattaatagttattttcaaattttttcttacttaattttatttggatcgtatattacataaacctagaacttaatacagaatcatcatgagataacataacaaatttttatagaatttgataaaagattattatgaaactttctggttctccaaatggaaatataaacacacatgaatgcagaaaataaaaatttaaaaagtatttttatatattgtttaaggtaaaaatattctatttcagactttatatataaaaaatcaacaatgaattaaaaaaaaaaattaatgaaagtaaactaacagttatttttaatttttttttcgtttaattttatttgatcattttttgcactaattcagaactcaatctattatcatgatataacataacagctttttaaagaatttgataagagattatcgtgaaactttctggttctccaaacaaaactataaatacattaatatagaaaataaaattttaaaaatacttctttttattgcttaaagtgaaaaaaaaaaaaaaatttaaacctttgtgaatatatagaaaatcaaccatgaattgaaaaataaaaaaaactaatgaaagtgaccttaacagatttcttgggtttatgcatatcagggtaactttgtttcaatccctatttctcaagggaa

SEQ ID NO: 74467 - DNA, 933 bp, Carica papaya
  Intron number 1 from transcript evm.model.supercontig_44.5 8 (locus evm.TU.supercontig_44.58) derived from phytozome v7.0 (chr-ID supercontig_44; pos 634510 to 635442 reverse strand)
gctactgcatcaggtacgtttctcttttagattcgatttcctgagcttctagatagcgcttctcctgatatttctgatgaatagaagtttccaagaaaagctattaggttatggtaggtgatagagcgggtggacagggtactagatgaatcaatcttgcgtttttctgaactgacaaagtgatttagattacataaggcgtcgtttcgcggcagttttgtttacataaagtgatttggattttgagttaagtttgtcctttatttatttttgttttttctgcaattttttttgtacatcgctagcgcccccttggctctggtggccagtttacgcttttttctaaagttcttatcaagtaagagattgctttgaaaaggaggctatttttccctttggaatttatttatgattgttgcagttaagcccatttgcagtattgatccaaggtgttgctgatgcaacaattggcgagatatgaaccccaactggaaacagaagaaaatgttttcaccttattattacatgagtagttaaaagaattatttgggcaatgattgaataattgagtgatagataaggtcttttttgatgggtttgattctgaagctgtgggtgggaatatatgcaattggggtgaagtaattctgatttgcaaggataaaagagctttgtttgaaaaggtgaaaccattatgatgactcaatagtttaagtcttctgaactgtgttatctaattttttttatctgaataaggtcaattatgaaaggagattagtatatgatttctgtagacatcaatggatatttagagataagtgatgtacggtttataatatttggaccaagttctgatttctgtgatacttaatacattttgcttcatttggattttcagtggcattcaagtcgcgggaggatcataggaagcag

SEQ ID NO: 74468 - DNA, 570 bp, Carica papaya
  Intron number 1 from transcript evm.model.supercontig_51.3 8 (locus evm.TU.supercontig_51.38) derived from phytozome v7.0 (chr-ID supercontig_51; pos 452797 to 453366 reverse strand)
tttaaggagaagagaggagagaaaaaagaacaaaggtacaggggagggggttaagacaacaatgagatagaggtaatgcaaattcccataacaaattactgaaccaagtaatatctacaacaggtatggctataacacaatattctgttccaactctggagcgagaaatgatggtttcgtttctttgagctccaaaacaataagtccagagccaaggaaaatacaatacccagcttttagcagggtgtctggacaacaaacccaatctacataaggaaaaccagtaagttgagaagaggaatccaagtatagttgcaaacctaaataagtagtgccacaaattagtgaagaattcacttcacaacttgaaggtagtcttccattgcgtcatgcatgaattgatagacccgactaacgataacgcaaatgccaagtgttacaaaggtaagtaaggtactataaagcaccaattagacttttgtatgtcgtaggattggctactagatgatccaatccttttgataattttccccagagttgacaagggaaagaaattggtttgcaagactg

SEQ ID NO: 74469 - DNA, 836 bp, Carica papaya
  Intron number 2 from transcript evm.model.supercontig_17.3 7 (locus evm.TU.supercontig_17.37) derived from phytozome v7.0 (chr-ID supercontig_17; pos 452364 to 453199 reverse strand)
ttgataagtttcaactccttcccgagtttttaaaggtatgtataaaagagcttacctgcttggcttctttttatgcagatatccacggttacattgatgtgctttgtctaatgttagaatgatattatttatggtttcagttaagtggtctagagtgttgtggcttctgacccatgggagcaatgggtggactggatgttggggaaccattttttactttagttgtagaagaaaagaagcaggagattcttgttagatgtagaaaactgctccgggttctcattttctaaaattatttatgtttgatagataaaaatgtaactgttgaaaataaaacataaagtttggtaaatgatagtgaaaatgttgacatggtctgaaactagtcatttattcttttcaaattcatggcgcatattcattgctatcttcggaacttttctttttaaaataaattttcaacagttaaatatgttgtatataagtatatgattttagaaactaaaaatcaagatagttctatctgactcattgttcatgatgcggatcattgtattcacagaattagggatttttggatctaaaacttttgttttttgtgcaagggtcatcccttgcgtagcagggattttgactccctttacttgtaaattctgcttacatggggtggcatgaaataccaaaaaaaaaaaaaaagaacaatgctgtggcggttaacatttctctaagcttggagtatttaaattgtaaatctattgcaacaaaaagtgttaatattgtggtaataatgatgtaatgcaggtacgagggttagtaaagcaacacttggattcatt

SEQ ID NO: 74470 - DNA, 824 bp, Carica papaya
  Intron number 1 from transcript evm.model.supercontig_44.1 22 (locus evm.TU.supercontig_44.122) derived from phytozom e v7.0 (chr-ID supercontig_44; pos 1542656 to 1543479)
atttctccagctttgtaaggcagctcaatacctatgtaagtcctttctggaatttagtttacatattagttatggttctcttttgtttgattaatttccacttcttattttcatattgattttcagaccttttctcagtagctatgactagttatatacctagctgctaaactgaacaagttttcttgttatgcatttgcttttgtaaagatgtgaaaattatatccatcaggaaagatctgttgattgtaattaatcagctctatcggttccatttggttcatattaccatttcccacttagggaaattacataactagaatatttacatctaatcattttcttttgtctcgtctctctctccaaaataaaagcttcaatcaattgccgccctctttttcctattgatttgtttattatgcccctcactgtaaagcttttgtttgttagtggtttaaacaaggaaaaaatgcagatatatatatatatatatatatatatatatatatcagcatcaagccacatcaacacacacacacacacatatatatatatatatcagatgtacgtatattattaggctttgcttcgtctagcatcttcaatgcagtgctaatggaagcccacttgttaactgtgatttgcctttttgatcttgtgtatctcctaaattaattagtgttcttagcacttgaaacatatgatactcagttcaataatatatacataaatatattatgcgcctagtttgagttgaagctataaatgatgaagaaaggagttgatttataaatgtaggggtttagaaaagttgatccagatag

SEQ ID NO: 74471 - DNA, 827 bp, Carica papaya
  Intron number 2 from transcript evm.model.supercontig_397. 5 (locus evm.TU.supercontig_397.5) derived from phytozome v7.0 (chr-ID supercontig_397; pos 22191 to 23017)
gaattgctgctcaactaatatttgaatcgctgaaggtaaaattagtgtggcaaaaaagtttattcaaagatctgctgttgcataattagcatgcttctaagatgctcttgattttgaatattttaattggggtagctcccatgttaaggaagttggttcagctactctaaaaaatttatgagcctgctcaagcagttgaatgtctaagagatggccttccacctcggttcccaatgctcttagcttgtatccacacatcaagaagtttgaaatggttatattattccataaactaattgaaggccttaattacaacatattagcacagccgaaggatgtgtagtttcaattttgagttatttacaaattgcattaattgagtattctgcagtcccaaattagtatcttgtgtcaagctgataattaatgtaatgaattcttcttctcatggattttgcagacattatgaagacttgtctaagtttgtcaagtatttgttaattcagtctctttctcttgaaatatagtgtaaactgaccttttgatctatcaaaatttaacgtgcttgttaacagagagcgttcgattttctcacatcctggcggtagtaccaacttgcatctttctactctgaatttgagcttgcagcttagtagacatgcatggagcatccataatttttcataactattttacagaaatcaattacttgcttactaccagaatctcttttctgcttgttgattttatatgaaacttcacacttcatttgataattatgctgatgttgagtctggactgagttgttgatatgtagggtcaaggct

SEQ ID NO: 74472 - DNA, 1008 bp, Carica papaya
  Intron number 1 from transcript evm.model.supercontig_14.5 0 (locus evm.TU.supercontig_14.50) derived from phytozome v7.0 (chr-ID supercontig_14; pos 555464 to 556471)
gtatgttactttctcttttttaatcatgcagctccatgatcatatgggatatctttccttgcattatttttgctttctcaagctttcaacaagtcagtgctattaacgaacagcctagtctggctactgctaatagccatttgggattattttgacttctttaggcagttcccataggagtggtcgagccaccttcattttttgttatcaagttttctgatggtcatatcgcagtagcacatactgagacattgctgattcccaagcctgcagttgttctttgttcactgttgatgaatattagacgcaggcttcaaatgtttcttgttgttactataaagtcagtgcaacacttaattgtcaagatggtgaagatacgtttgttacttgacaggggcttttccctcttgtcgaaagaggggagagctgtattcataccatatctatttgatgtaagtttgtctgcttgggctgattttaggaaattctatcatgcctacaaaacatggtgcctccaaagcactttgagatagaatctgtaaattaattattttactgtttgtttttcaatgaccaagatttctctttgtgtaatgttatggttgaaaacgtagaggcaccatgcatctgaggcatggtagtagaaacccattgattttagcatcttatattagttcagtccctcttgcataggaagtattggaccctcttttgtaaagctatgcttttactagcacctaagactagtgttacatcttcagaaatctttttttttttaaattggtaatttgacctgttgcaagcaagatagccaatttttagttgatcaactaagatttatgtggaaacagatggtcaaccacaatagcttgcttttctttttgtttttaattgtatgaccatgtgggactagcactaccttttaccaatgaaaagaaacaaaaaaatatttagttaaatttctgtttatttgcacaggctgcaaagattcttgccaacttgatcgtg

SEQ ID NO: 74473 - DNA, 1016 bp, Carica papaya
  Intron number 1 from transcript evm.model.supercontig_75.1 11 (locus evm.TU.supercontig_75.111) derived from phytozom e v7.0 (chr-ID supercontig_75; pos 1030275 to 1031290 reve rse strand)
gccagtgttgaggtaacaattacctaaaacaaaacaagtgatacatatgtatatatatatatatatatatatatatgtatgtaaactagttaggtttgctgtgcggttttatagcgatcatcgtgatcatcttcatgctggtttttataagctttttgacccagatgctgatcatgcttgtttgatgtttccagattctctgactttcttctctttgattcattgatacaaaatttcacctgggtctacttcaaaataatcatgtatatatacatatattttcatgttatcagttttaaacaaaacgtgtagtagttttagttgcttctctcttctctttcgtttgttttttttttttttttagtcatgcctgatgagtatttacatacctatacatatatgtattgtctctgtatatgtatgtatgtatgtatgtgtagcataattatgaaggaaaaccagtatagagaagaagtttctcttgtgaaaattttcactcttagcctcctcaaggataggctagggtttaaacattactggttctctgatgtaaaaattttagttcttatttgatggatctagcttcattgtttagatatagatcattatatatatatatatatatatatatgtatgttgagttcatgataatatcaaaatatgatcaatattaacatcgagaagatcatgatctcttgtctacttccatcatttggttttggcacaaaaatcatttttgcaatctgttctttcttaaaggatctgaatcgtgtgcgtgcatatacacacgtatacccacacacagaacaaagctctgattatatacttttcaagatcctatagctcactgaattatactacagtgagcttgtttgtttcatcgagctggtttgttgtttattatattatatgattgatatatatatgtatatcactgtactccaaaaattatattaataaaagagagatcggatattgcaggttgaatcagctcccacaacattaccagagagcga

SEQ ID NO: 74474 - DNA, 373 bp, Carica papaya
  Intron number 1 from transcript evm.model.supercontig_45.1 3 (locus evm.TU.supercontig_45.13) derived from phytozome v7.0 (chr-ID supercontig_45; pos 444088 to 444460 reverse strand)
aagagcaagaaacaacaataataggaacttcggtggtgttaaattaaagattccatcttttcatcgaataatggatcctaaagcttactttgattgagaaaagaagattgaactagtatttgattgtgataactacactgaatcaaagaaactaaaacttgtcattattgtttttggatattattctattacttggtgggatgatacaaagaagaagcgaagaaaaaataagtagaggcctattgaagaatggagagatttgaagtccatcatgagaagaagatttgtaccaagcaattactatagagagttttacaatcaacttcaaaatcttacataaggtttcaagagtgttgaggagtactacaaagaa

SEQ ID NO: 74475 - DNA, 496 bp, Carica papaya
  Intron number 1 from transcript evm.model.supercontig_44.5 5 (locus evm.TU.supercontig_44.55) derived from phytozome v7.0 (chr-ID supercontig_44; pos 608878 to 609373)
tcggcaatctcgatcctcaggttcctttacttccctcatattctttgtgtcttattaggtgttcttttattggaaggggacattgtttattctctctaattacttgcagaaaataggagcttccttggtttaggttagtttttaggtgtggacttttacgcctttgactttatatagcatgtcagtatgtctccttgctcaaaaaagtgaatcaaaattcttttcctttctaccttaaaagcttccagaaaatggatttttcttaatcctgggtgaaaaatgcgggtgaacagttcactgtgagaacagttttgggtggcccttgatttcatcaaagttctaaagttcaaacaaaattggtcctgttctagatcttaacttatttgtggtgattatttcaatgcattgagtagagctactctcgtgctttagttcaaatattttgtttcttatgcttgcaggtgtcggaggagctgctttgggagctatttgttca

SEQ ID NO: 74476 - DNA, 306 bp, Carica papaya
  Intron number 3 from transcript evm.model.supercontig_177. 3 (locus evm.TU.supercontig_177.3) derived from phytozome v7.0 (chr-ID supercontig_177; pos 165393 to 165698 reverse strand)
gtgctttgccaggtaaatgatgttagatcttggtacaagttttctggaaactgcagcatattttgtgttcaatcaaccttttgatatctttgaactgagtttgctccaccattgatctttggtttaaaattgaaagttaatagttatgatcaggtcaggactattagaagaatgtcaacattaacagggaattataatctagagttctgtctatagtttcttttagtgttgaaatagagattattggtatttaaaagaagggttttggcagaccataaagggggtcgccgaagcatcaccgtttat

SEQ ID NO: 74477 - DNA, 534 bp, Carica papaya
  Intron number 1 from transcript evm.model.supercontig_6.35 5 (locus evm.TU.supercontig_6.355) derived from phytozome v7.0 (chr-ID supercontig_6; pos 2708899 to 2709432 reverse strand)
ttctcttagaaaaggttcttcacaaagttggaacagtatgtttcttttcattttttctgcttgtagttttttgtttcagtttttctttttttctgtttgagctgcctttattgataggattttgtatttttctctctcacaacttggtggttacttttggctgctctttgaacttcttttcccaattaattgctggcaagttggtcggggaattatttactggttttggttctttcttttctttttagtttttcctgcacttctagtcacttgggaattaaattttatctttggggagaagagggggggggggggggttggttacctttactccgaatacatccacacagtaacaaggatgaagtgttcctttatttgactcagaaaccaaaattcatgacaccatgaaacaagcatctatagcagccatagagatatcttatatttagttgaaagaaactaaatttcctgatgctattttcgtttgattttaattcagtggtttacagaaaggcacaaaagtgctctgtttga

SEQ ID NO: 74478 - DNA, 279 bp, Carica papaya
  Intron number 1 from transcript evm.model.supercontig_211. 24 (locus evm.TU.supercontig_211.24) derived from phytozom e v7.0 (chr-ID supercontig_211; pos 144312 to 144590 rever se strand)
aagtttcttttcagggtgaattctttagttctctctttccttcattgttggttttttttttttattctgcatcgttcttcgtattttctttatttgtttgagtttgtattttaatcttggatgttgatgaactttgtagagtgtgtttggagaaggaagttagatagttcgctaactgtttgcaatatgttctagctggaattatacttgtcattcttctttattcgtttcattaatttttaagtggctgatcttctagtagattcagccaacaaatct

SEQ ID NO: 74479 - DNA, 431 bp, Carica papaya
  Intron number 3 from transcript evm.model.supercontig_737. 2 (locus evm.TU.supercontig_737.2) derived from phytozome v7.0 (chr-ID supercontig_737; pos 18332 to 18762 reverse s trand)
tggaatgtatgtttcatttctcaagcttactgttaatttcttccttcttgattgttacaatgctacattattgctgcagttgtgtctttgagtcttctttttggtcttgtggtgtacagctcataggttgtcgttacatttctctccatctttgtcctgcttcaatctaggatcatgacaatttacgagaagattttatatttgaccgagcattattatttatctttttgttttgttaattttatgtatttgctattcagaagttaactggtttctctttcgtttccattctccacaatcttaacaattttttttggactagatttatggaatatatatggttgtggaaaatgtcagaaagatttattggccgtgcactgtgcatgtgcatgttactgacagaattttagttgattacagcctgttcataa

SEQ ID NO: 74480 - DNA, 604 bp, Carica papaya
  Intron number 1 from transcript evm.model.supercontig_737. 2 (locus evm.TU.supercontig_737.2) derived from phytozome v7.0 (chr-ID supercontig_737; pos 18940 to 19543 reverse s trand)
tctactgttttttcactctggtctgttcattcatcttgcttctgtaataatacgtttttttcttcctttttgttattgaggactagcgagaaggaacaatgttcaaaattacttctaataattcttgtcaagaagaattttaataatctaacagccataatcacttttgtcctcgaacttttcgcttatgagctatggaaatgtcaatatccacattcccaacagtccatgacatatccattgccaacccaggaaaacctcaaactcttatagagtatttggtcatcttgataggagttatattgtcaacgttgaatctttttggatgcaagaaaatggtggaagatagtgtatttctcgcatttgtgtgcatgtacacaagacattcactctactgtacaattgcatgcatatgcctgaacatgcatatatatactcatatttatacaccctttaatcttagttatctttgggaaattagtgctacttcatctactattcatgttgcatctatttaacacgtgatcagtttctggggctttattctaatggatagttcaaatatataggttaaatatactggctgagcttcttcgatttggtg

SEQ ID NO: 74481 - DNA, 964 bp, Carica papaya
  Intron number 1 from transcript evm.TU.contig_35913.1 (loc us evm.TU.contig_35913) derived from phytozome v7.0 (chr-I D contig_35913; pos 235 to 1198)
gggattcgccggagctccatattaaaaaggtaaactttttgtatttatgatattttttcttgaaatctttattatatcaatgctctttcatttgtatgcacaagtctcctatctccagacattttgtccgatggggttgaataaaaaagactgttaaattaaataatagatgggatatagttcatgtttgcaataaactaatttcttcttgttaactatgtttctcaagaagttaaacctattcccagagaaactgaataagaggcggagcagatatattttctgaggtttgtgataggatttgaatagtctgatggcattattaaccttaatggttcttggtatgcactgaatcaaaagatatcttccttagaagaatgtctcacagataaaactaaaagctattgtcttctcaatattctttctacgctcagattcaatgttcttgtgatgtgaacttagcatgttgtcaactagatatccgtgcaaaggagcacattcacccctgtagccataatttgtcacagcacctttgttatttcctcttcaagatgttatgtacacattaatttggtggagttgcagctttatgaaagtggacttggtttttgaaatgtgaatgggttaaacaacacatagaatgtatgtttcatgtccttgttgttacctttgatatattgataggcaataatgttttcccatttttaaagaaaatttgctcatctgaaagggaaggaagttgaatatttagtatcgaagtagaatgcatcgtttttgagttttttaaatattttcttcaaactctctttgatatcatcctcaaattgaagtcagtcatgtttgtagctagtattatctgttctcaatcttgttttagttactttctgcatcatggtgctattcttggtgatctgttcttgatgttgcaggttgataaattgaaagttctgtcagagtctcttgt

SEQ ID NO: 74482 - DNA, 381 bp, Carica papaya
  Intron number 1 from transcript evm.model.supercontig_25.1 43 (locus evm.TU.supercontig_25.143) derived from phytozom e v7.0 (chr-ID supercontig_25; pos 1467385 to 1467765)
accgccattccttcaaatactcactcctacatacggtaatttcactttattctgtcattcttctctaattctgcccgtgtttgcttgatttgcttctttttgaggtaattactatttactcattgaatattgtattagtcggggcgttttttttttttttggttgtataattttgttggttttttttattgtataaaattatgactgccgcaacttttgattttgcagcttaatcaattagaatccttttcaatttgagtttttcttccttgtttattacagtaggaaaccgtgaattgggtgaatcttttactaatttatatgcattctcttatgccataaccagttttgataagattacatttcggaggaccaaggagt

SEQ ID NO: 74483 - DNA, 411 bp, Carica papaya
  Intron number 2 from transcript evm.model.supercontig_3.27 5 (locus evm.TU.supercontig_3.275) derived from phytozome v7.0 (chr-ID supercontig_3; pos 1941511 to 1941921 reverse strand)
tccgaggaaagctgcacgtaacgcaggtatgttgcttcttctgaaacaaacctcttttagtgattcagttgtcggttaaataattgacaatgtttgactttttaaacattctttaatgtgaacccaattcaagaattgcttcttgattctgactcaggcagctcttcttttgaaattgaaattaaaggatttcgaaagtagtttgaatcaaattttcatggttttatttatttgaatttcgtaaatgcttgtaatatttaaaatttatttagtttgataaataaaagttctactgccactttctcaagtgactttgatgttctaatatctaatttggcagcttattattgtgcataaaatttccatgataattcaggcaacattaggtgctggttcatcaacggagaggac

SEQ ID NO: 74484 - DNA, 514 bp, Carica papaya
  Intron number 1 from transcript evm.model.supercontig_3.27 5 (locus evm.TU.supercontig_3.275) derived from phytozome v7.0 (chr-ID supercontig_3; pos 1941935 to 1942448 reverse strand)
ggtttctggggtcagttctctaataattcaacgggagtcaacttttgttttatcgattatatcttctgatacttcttttctcttctgattttctatggcgaatgctcttggacgtttccggcattgaaattgctggaaaattaacacgagaatgaaataacgattttagtgtgttatactaccatcttttcaagtgtttgtaggattataaaattttcctgaattctttcgatgatttttcctgccaccaagtataccattcaggcaaaattttttcaggcactatttagttcgcgacgaattaaaataaggttatataggagttgttggtattagttggtctttcattgctgaataatgccgtgttttttttttttttcctgttcatgcgatttcccagcaaccaagtaggatgggatgtttcttgttgtcctttgattaatcatttttatttttctgcatttttacttttaaaccaggcattgaagtaaaaccgggaaagccacacccttat

SEQ ID NO: 74485 - DNA, 721 bp, Carica papaya
  Intron number 1 from transcript evm.model.supercontig_609. 3 (locus evm.TU.supercontig_609.3) derived from phytozome v7.0 (chr-ID supercontig_609; pos 15560 to 16280 reverse s trand)
acaatgtaatgcgtcgttttgcagaacaagagttagaagcttgtgagttctcatgttagcaacaaaaaaagaatcaaaagtttcaacaatggttttttacctctagttgtgataagctttttgactccgggaacaatatgtttaccataggtatatctctttaaagcagtaaagtgaacattgatgtgagaaagaatcaactctagacttatgatcatcacatgttttcagaaccttttccacaacataatttttaaatacattttttattattaccttcatttagaagttattgttcgttactcatttgtgttcaactctatcatatatattgagtctttttatcgtaatttttcaacaacattagaagcaagcttgctaatgattgtagaaccccagtggggattaccatgttctagcaaatgatacacggcaggaaatgggtaaacaccacggagggattaccaattatgttaagcatgcctacacacattcacatacatggacggcaggccatgtttgcagcagagcttagagacatatatgcacatcgaaatcactaacaaaccaaacagttttcttagctatatgcacatcgaaatcattcagaaaattgattaagaaaaccatagaaataggaaacgcaagcctgcaaatctgattggtcactgtgccggatctggccttggcccaaattatcaggtatcgtggcctgattgtc

SEQ ID NO: 74486 - DNA, 694 bp, Carica papaya
  Intron number 1 from transcript evm.model.supercontig_94.7 9 (locus evm.TU.supercontig_94.79) derived from phytozome v7.0 (chr-ID supercontig_94; pos 1069143 to 1069836 revers e strand)
ggtacgtacgtttttctcttaaacagtaaatcaaattataatgcataaaaaataactagtgcaagttaattattttctttaggcgatgatcttggccttttatatatatatttccgttatttcactatcaagtgagcgttacagacgaagtgcatgctagctagcttgggtatgtgtgtgtgtgtgtatggctttataatggctatttgttgagtgttatatatactcatctttaatggtggtgcagatagaatctgaagtactactttttgtttatgttgtttgtatgagagagagagaatctctttttgcagcttgttagatgcttatgttgttttatctatacacaaatcttttctgttttgtttatagcctttacatattatagattcttgaaaaatcactggatttgatttctctttttttggtattgatcaaaggtcacgtacttgaagaaaaaagagagatagagagagaatcagaatattttctctccctaaatcttgaatttgattctcttctcttgtcttgtttcttgcttttaatttatatcacatgaattttagtgcatcccaattcaatatctttgcagatatctttgagcagatttcacaaaggtagcatatagatatttatttaactcatgaaaatcatatgaagctgataataattagttttttcatatgtataggag

SEQ ID NO: 74487 - DNA, 769 bp, Carica papaya
  Intron number 1 from transcript evm.model.supercontig_96.8 (locus evm.TU.supercontig_96.8) derived from phytozome v7 .0 (chr-ID supercontig_96; pos 164830 to 165598 reverse st rand)
cggagaaatcggttgttctattgtcgctcaaaagggtaaaatcttgtactttatcttcgcttccatcttattttttacattacataaaccaagattccgtttcggattatctaggctgtttggagaggaacaggaattaaatgtttttttcaatggcaaacgtgaaatttataggaacataatttaacacaacttcgatggctcttttgcttgtcatgatatgcagatagtagcgagtattagataaaaagtcaaactgccaggaaccttaaaaaatgggaatcctgcgccagttaggacgcatttgagaatgaaaacatcattttttaaatttaatataatcacgctaacaatatctgacgaaaaagtaaaataagccaattgctttatttattagctttccactgcctacccatccgtagaagccaaaagtcaaaactccatcagtgattttttcggcaattgttatccagtgattcacatattttacttttttttaagtttgtcaatttctttgctcatcccaaaagaattaataaataaatactctagttaatccaatttctttcgttaggacttaacccaatgcagacctctctgcccgtttaaggggtttagggagacaaaaaaaaagaaagaaaagaaaaccagagtcctagtctaaataaaatgcagcagaactgctgtcgattagatacaacaatatccggaaggcaaagataataacatggaagctgcgcttgtacttgaaatttcaggtaaatcaagc

SEQ ID NO: 74488 - DNA, 835 bp, Carica papaya
  Intron number 2 from transcript evm.model.supercontig_87.4 9 (locus evm.TU.supercontig_87.49) derived from phytozome v7.0 (chr-ID supercontig_87; pos 280815 to 281649 reverse strand)
gacaggtatgccaaactaagtctgaatttgtgtgagaaataccatttgcaatttcttggtgttagccaaatgtatttatttcctggatggtgcatagttatagaatgggtatacttagtctcttccctttgtgcggtgtgatgaacataatgaatgatatcaagggctttctggttctaagattctctaattttttatatcatcttcatatttgtttttgtcccatgtcttgtacttgcaaatccctgttgatgctagaactatggatggacctttataaagctgctaggatcatcatctgatctaaacaacaatgagctttactactcaacatgttcatatcagtttcgagtcttacaaaagatttctgccagtcattttaaataaatggtaatttctagtgcaagatcatgaaaactgtaaaatatgtgattattttgttaatgtcatggaaatgttttacccttaatgcattctaagaatgatatttttcaaaaagaaaaagaaaacaacatgggactatagcagctctctccttcagtgaaggtagttgcatcgtgatctttcaatagacttatacatggttataatcttggatcaaactcattgatttgactggcaatcataaacttgaagacttgattgatcttttcattgatatgaaccagttgattgaccaaccagtcaattatttaattttttcaactgtggcttggccatctgccaccatgtggtatcatcgcaaagaaactgctgctatggcataattgtgactaccataggttttatgattttatcagtttcataccaaaagtttcttgtcagaaggttttgg

SEQ ID NO: 74489 - DNA, 477 bp, Carica papaya
  Intron number 1 from transcript evm.model.supercontig_297. 1 (locus evm.TU.supercontig_297.1) derived from phytozome v7.0 (chr-ID supercontig_297; pos 31105 to 31581 reverse s trand)
attcaagcagggtaatccctgaatttaattttgtgtctatacatatttaattgttttatcagcttcatatatgtatcatattttctactacatgcagattgcactgggtaatattctaaaatttcgaaagaagaactggcaatttgatttcattggcggcattatatactttgtgttggttttttcgatgtttccacagtgaatttctgctcaatttttttcagttctagaaagccatgcctgttagtttaactttatatgtccttggatcctccttccataaaaattaggatgtcttagttcttctttgtatatgtactagtttgcagggtgctaaaacttacctttggtggagtcctctttctccattaggattatgcaaaaaaatagttttaacatgtaaatattgctgtggagctggaatattactcatttttccttgtaatcttcagtgtaagcttgatcacatcttgcaag

SEQ ID NO: 74490 - DNA, 284 bp, Carica papaya
  Intron number 1 from transcript evm.model.supercontig_8.19 5 (locus evm.TU.supercontig_8.195) derived from phytozome v7.0 (chr-ID supercontig_8; pos 1389554 to 1389837)
gtttttacttatttgactctgacagtaagaagtttataaagaaacatctatggtttaaaatataatagaatctgaatagatcatttttttcttctggaaaaaagaaatgaaatcagacttaggttattttcttctcactttatattgttttttaagttccaatctataacattattacagtgaattaataatttaactttaacttttatacctatttctatttttgattgcttttatctcttattttcttctttaaggtcgatctggtcaaatatacttgttaa

SEQ ID NO: 74491 - DNA, 476 bp, Carica papaya
  Intron number 1 from transcript evm.model.supercontig_42.1 39 (locus evm.TU.supercontig_42.139) derived from phytozom e v7.0 (chr-ID supercontig_42; pos 1311893 to 1312368 reve rse strand)
gtcaagtaccgttggtcaagtcatccattgcaaaggtaaacatatggttttctccaataaaaaggtttctttcgtcgtttttgttgttgaagcttagaccttacttgcacaaataacggtctctgttttctttttccatttttaagatgttcttcactgtgtttggtttagtttattatgctttgttttctaatatcgtctggattgctgcaagtattctctctcctagttatggaaatacatttgattctagttaatgtctcgaccctctttatatttttgttttttggattctgggtacttcttatctgatcagtaaaaggtcttaattatattgaagattactggattgagatgatattttttttccttcaattatgctcttccatggttttagagtgaagaaaaatgaagtgtcaaagcgtttgtgttttggaattttgatttgaaaatttatgcattgtagctgctgtggc

SEQ ID NO: 74492 - DNA, 808 bp, Carica papaya
  Intron number 2 from transcript evm.model.supercontig_150. 59 (locus evm.TU.supercontig_150.59) derived from phytozom e v7.0 (chr-ID supercontig_150; pos 514450 to 515257 rever se strand)
gttacgcaaaaaggcaagtaaatttcatttttgttaggtctgttcgtttacctgaattgagggtgccaatgctcttataattgctgtctaaagcttccatggctttctttttggaaataagcacagaatgtttcaactgaagtagttttttaatggataacatggttaatttctgagcaaatgcaaattttagtgtccttaatgtcagttgttatggatcggttttcagttatgtctaccgctgacactctttagaaaactgtgcgaaaagtaatttaacagtttgtttgtcttgcacgttcgttttattggatgcttggattgtgttttttatatacttataacatctgtctagctattcattggtgtttttgaattgaagaggacttctgtaagtggatcaactaggttgagaaaaagtttgaatataggaatgttttttttcccagttaattattagatttctcactcaataggctctcgctcccttcttcttaactgattgttgatttggctaaagaaatatttacactctagatgccataaagaagcctatatattccattatttaatgtttgttgttttaatcatgtccatctaatcatcttttaaattaagttgctttgcatttggttgatgagcttagttactataggtaactgttttattttaacctaaaatttcatttttcacaggttagcagtactttttagtcattttttcatgagaagctaatctttttgttttttttttccctcttttgctttttgcaggatcaacagaacaccgtggcattgcttttgttcag

SEQ ID NO: 74493 - DNA, 532 bp, Carica papaya
  Intron number 2 from transcript evm.model.supercontig_92.3 0 (locus evm.TU.supercontig_92.30) derived from phytozome v7.0 (chr-ID supercontig_92; pos 284228 to 284759)
ctctgcttctcaggccgttgaaactgctagtggtattaattcttctatctctctgtgtttgtgtttcgttgattttttttggtcgtgcttttgtttttcatttgtctgcggttatagagtattttctttcatatttttatctttcttcgttgatcatcgtattgtttgcattagtttataattagaacttatggaagttttcggaaagtaaaagaagttatacatggagataagtgaatcttttttttttctctctcccaaaatttgaatcggttctagttttatatgagagaagtcgaagtaacatgtatcagtataagttaataaattttacatttatgtttcatcacaaaattaaagtaaaaactatatatccacgttaattagtaattttagtagttagttttggtttgttaatgcaatgcccgagcttctgattgtgtgctatatgtgtatattcaatatcttggcactttctggaagtttcctgacatataattctggttctgccttagagaagaagactcagtta

SEQ ID NO: 74494 - DNA, 931 bp, Carica papaya
  Intron number 1 from transcript evm.model.supercontig_53.3 4 (locus evm.TU.supercontig_53.34) derived from phytozome v7.0 (chr-ID supercontig_53; pos 187146 to 188076)
cttctccgatcaccgctgtgccgtcgctaaacgaagtgagttctcttttttaaaatcgtcgtttttaagattccgccatcttctgtcttcttcggttacatctatctatgtacataaacacaccgactatattacttgacgcgtatccgtatatatttacattttttggtcaggtactaacaattttctcttgtttttttttttggttttttgtttttttttttcaaattaaaatacattattcttatacgatttgttgagatggaatcggattgacggatgtcattgagagatacgtgtttaactggtgaaatttggtggatatatacatgtatgttaaatagacagtaatatgtcacaatggtagattcagtgtagtgttttttcttctttttgtaaaagaagatacggtaatagcgttctgatattctaatttattagtcaatgaatattcaatttaaaaagagaatttttttgctaaaatataattctgataatctaataatatatttcctcgattttgttttgcctcaaatatatatatatatatatatatatatatatatatatatattatatattttcaaaaaatattcaaaatatttaaaacatttaactctaattgttttatgcaaaaattttttacgcataattttttagtagatatcatgtatcatcttatgtaacaggaaaaaaaattcacaggtggatctaattcaagtgtagaatactatgactacataaggagagaatctaattcatttaacattattccgcctgtattctgatatgtaatcattcgaaatcattcattgattcttatcaggtcaatttgacttctgaattcgacctgaagaaacaacgtagtgacgactgttgtcctgaatttttatcagatcagtagcggtcgtgactcctcaatccctccgga

SEQ ID NO: 74495 - DNA, 573 bp, Carica papaya
  Intron number 1 from transcript evm.TU.contig_45723.1 (loc us evm.TU.contig_45723) derived from phytozome v7.0 (chr-I D contig_45723; pos 589 to 1161)
atctcaccaaatcttgcctggattccattcgccaagtaagtttgttgcctgcttttcttcactttgtttacgaactttctgtggtttctcttttgcgccttcagaattcacgaaacttgtttgtagttattgatttagatataagttatgaacaaatttagtaggacaagggagttaagtttaaaggaagtttatagagattggtagctttttgtgaattttcttctgcgccttcaaaattaacgaaacttgtgttgtagttcttggttgagactaaattttgaacaaatctggtaggattagggagttaaatgtgaaggaagtctatagagattggtagtaatcattttcttttctttttatgctcttttgagttctcttcaaccgagggccttgggttgtcaattgttgtagcttgtagaaatgtagttggatttttacatttatcgcctgttgaattgccccaggtttgttctgtttattttttttggaggaatggctatgagattttctattttctattttcttttttctacagatatcagagcacatagaaggtgccattctatacat

SEQ ID NO: 74496 - DNA, 968 bp, Carica papaya
  Intron number 1 from transcript evm.model.supercontig_36.1 77 (locus evm.TU.supercontig_36.177) derived from phytozom e v7.0 (chr-ID supercontig_36; pos 1287917 to 1288884 reve rse strand)
cgtgctggggtatatatatattttccctcatgatacttatgcttgctggttctgttgccttttctacttgattcttctgttccggaaattagaagagtatctactttgatcaattagcagttgaaaatgacaaaagctagaaagatagaacttacaaccgcttgcaccatcttagctaattggatatgatgttttcattcacttcataatactttaatggtgattgtcagagcatactgaagtagaaaggacagaaagtattccccctttctattcctcccagttttctttggttaatgtgcagtaaattccatttgtttaaagaaggtacatctaatatttttgtactatggtagtgttcccttggctgtgactgtctgatggataaagcagtccagtggaaaaaaatagatgcattgttgtccaatagagggaatgaagctaatcttttttcttgatgactgatttctaggtccttcaagtttctacttgattttcattctttcttgaggcgtgtgattgaacttgggagttaaggagaactccaattcagtttagttactcaaagacttggttacagcaaatttataattataaggatgaagtagaaattagtgttacttaaacaggggaaacattgaaaagtaatgtcaaaacttcagtaattaattatggaagtgcttctaaagttaatggtttttctcgcatcttgcacgtttcatgttcagtagctatttgtttgtacctcttcctgctcctgcccatcatgtcggtgcaggaacatcttaaatcatttggatcaccaaagaatatttaagttaactgcggtgctgtgcaatgtcaaaggcatcagcgatagagaattagagctatgcatatctcttttcttggtctatgagtcttttgatgaaaaatgtttttccaccgttgtttagagcacagtatattttcattcttgaattgcagat

SEQ ID NO: 74497 - DNA, 822 bp, Carica papaya
  Intron number 2 from transcript evm.model.supercontig_50.9 7 (locus evm.TU.supercontig_50.97) derived from phytozome v7.0 (chr-ID supercontig_50; pos 924328 to 925149)
cgacttctgggctactgcatagaaggaatccataggtaagatttaattctcaactgccgaatcccaaaaatgatattatcctgtttagaaggtgtttgagttagagaaagcagataattcttatttaagaaaataaacagttacacgataaaataaagtgcttgttgccaaaaaagtaatctatagtttttgatcaagaattaatagaactatatatttattacgagtattttatggctggcccaagcaaccagacttaacataaatgtagctgctggagctattttagaaaggaagaggtccaaccaacttggtgaaataggttgttttagaatcaatttcaaaccatccgctagagattgtaacgatccaaatgatcccactacatcaggaccttttgacatcgcacaaaaggaaaaaaaaaactgttgttttctataaaaaaatcgataaaactgtatgtttaattaaaatatttagggcttatattattttacatatacattgttaactttaagaggatatgaaaagagtaattaagtaaattaattaggtaaaagaataaaaacctagaaacttagaaataaggtgcttgttttctaccttctcaaagtcgcttttctatattatcaaacacgaaaattagagtaaacacgaaaattagagtaagtacttaattctgtttataaaaagaataacaatatcaaacgttctcttagtctgattctaaataatgttttaaggtcaagccaatttttccaatttgagttttggtgagtgtgtattgagtgagatactgatcacaattttttgttatatagg

SEQ ID NO: 74498 - DNA, 413 bp, Carica papaya
  Intron number 2 from transcript evm.model.supercontig_242. 2 (locus evm.TU.supercontig_242.2) derived from phytozome v7.0 (chr-ID supercontig_242; pos 7270 to 7682)
ctactactattattgctactactactgcattatatgtaacaccacaaaaaatctagattattttaatagtattattaactatgcaatactatttttcagatttccttacttatattaatcaattaatttaaatgaaaaaaagtttcgttgccatattaattcaattaaagaagaatttaaatgtacaaatcaacttacaaatgaaaaaataatcaactagctttgatttatttttgttagaaaaaatgaagagataggctaactgaatataataatttgttgaaatatgagaggaagaaataagagagactaattaagaaactcaagctttaatttgtggtcgatgctaaaagctttcaagtacatgggtatttataggtactaactaatactactattactactactaatac

SEQ ID NO: 74499 - DNA, 786 bp, Carica papaya
  Intron number 3 from transcript evm.model.supercontig_91.8 (locus evm.TU.supercontig_91.8) derived from phytozome v7 .0 (chr-ID supercontig_91; pos 95537 to 96322 reverse stra nd)
tgccaggtacagtgtgagattcctcctgagttgagatgatgttttagcagtgtttcagagacaataattcaatttatcaaatttgagaataacattattttctggatggaatagtagagctgctactttgttagttattctcttaaaataaaaatggtcattggttcagagtaggcagtttttgttttaagtgttattattgttttgaaggagttgtgaattatggggctcaagtggagaggtaagacaagttgggtttgaagctagcttgtgcagaatagaacatatattagagcaatagaggtgaaaaatagaggacagagaaagaaaaggagtaattttaggggattaaggtgaagatcctagggaataatagcttgaagtggtagattaagaagaacaagaatgacaaaagagaggacaagataatttaataaaacctcaaaacaagaaattagagaggagacttgttgggtggaaacagtgctttttattcaaggaatagcttgcacctatataaagtacattgactaatttgctcatttattgtccttgcttgttccctattctttcttttgtggacaagaagcctgagtctctctaaatataatttcctttgggtgattttaacaagcagagaaagtttcatttagcagctttggagtttgttgagcaaccttttcgcagatggtctgggtattagatcccttgtaccatttgtaaagctttcttggggaatgaccttgtagatttatgtttttgcaggctctttgttggggtgtcatt

SEQ ID NO: 74500 - DNA, 521 bp, Carica papaya
  Intron number 1 from transcript evm.model.supercontig_91.8 (locus evm.TU.supercontig_91.8) derived from phytozome v7 .0 (chr-ID supercontig_91; pos 96571 to 97091 reverse stra nd)
gattccaagtcagatagtggtttcctctattctcacatttctatcacctatttgctttcctctgttcattttgattttaggctgaatgttatatgttgttaccaccaatagactacagaatttcaattttttttttcttcctatgattatattgatcctcatatgatgctttatgttaatttgcctacttagttatttagagataaaatttagctatcatatctaagaagtcttaagcatcacacaactagaaaattgagaaactcccaaagtatttatctaataagtgaacctctcttaaaagtaggattacagaaagttttttcgatagttactaactaaactttccgaaataggaatagatctctaaatactaatactattacgatcaagaaatattattactaataaaactagaaaaacgaaatactaaaaaaaaaatatatattacttttaaatagtgtaatagttttgtattcttatttatttagataatctggagctagtacattctgcatcgg

SEQ ID NO: 74501 - DNA, 528 bp, Carica papaya
  Intron number 1 from transcript evm.model.supercontig_785. 1 (locus evm.TU.supercontig_785.1) derived from phytozome v7.0 (chr-ID supercontig_785; pos 1953 to 2480 reverse str and)
tctttgacagcatttggaacaaggtcagcatctacacattaatgtctcttacctgcttggttctcgagaaaacgatgaaaatggggaaaggattgatgtgcagttaactgcaagtgttatgataggattggatgtagtattacttgaacgaaaatgaaaattatctgtaaggctagggctcggttaactgtcttcagtctgtttaccgagaaatggtggaagttatgaagtgtaatgctccgaggacttcaaaattggatttgccaagttctttagatatcaagcgttggagaggaaaatgtcctcacaagtgtttgattatggcttttctgttttgattttcaaaaggatggaataggtgtttgtggtgaaagaagggtgatattcagttttgttctttttgtttattggaacagttattggattttttttttaattatgtactacatttttatagaaagcaaatcgtgtggcattgattgagttgattttttgtgcttctctacgtgattttcctgttttaggttt

SEQ ID NO: 74502 - DNA, 481 bp, Carica papaya
  Intron number 1 from transcript evm.model.supercontig_57.1 9 (locus evm.TU.supercontig_57.19) derived from phytozome v7.0 (chr-ID supercontig_57; pos 351551 to 352031 reverse strand)
gctggcaacgacctctccatcctctacaggtaattatttactcttcgcttaatcgtttctttttctttatattttatctcctcttatactcctcgttcttcttttttagcttgatttcaaagctgagtgttttaattgtggtagcaattgttaaatttcgctcaccgataaattttgctttgaacagaaaacttcttcgttttagtttaatcatcaattctgcagcaagatccccaacttacttcttagttgctctttttgtttttagtttccagaaaattataataacaaattaccttttttttgcttgacgctcatcaggagctgtatgtgtttgctttggctgattaatcgtcttgaaattttgttcttctacagctgtaaacttctaaattataaatacccaacccatcatacattcaattttgtctcatggttttctgatcaagctgtaactcgtattggattgcagattgttgga

SEQ ID NO: 74503 - DNA, 279 bp, Carica papaya
  Intron number 2 from transcript evm.model.supercontig_56.1 11 (locus evm.TU.supercontig_56.111) derived from phytozom e v7.0 (chr-ID supercontig_56; pos 1320954 to 1321232)
ctacccccttaatcgctgatatcaacaggtaaaattttaatccccctcggtgccatccatatatgttctcatgtttttcaatctcctcctagctttcaccgttttatccaaattgcttcagtttgtatctgagttctttttcctttcaattagtttcttccagaagtcaaatcatgaagtagcacaaagatttgattttaattagttgtccctatccatattgagttttgttgattgaacttacctaactgcaatgttagtgtttgttgttctttagtg

SEQ ID NO: 74504 - DNA, 660 bp, Carica papaya
  Intron number 2 from transcript evm.model.supercontig_6.27 5 (locus evm.TU.supercontig_6.275) derived from phytozome v7.0 (chr-ID supercontig_6; pos 2108536 to 2109195)
gtgatccgaataggaagtttgtgtttgctgaagtgagccaactacgtgtttgttagatgttcagagcctaatggtgaataagtaaaatcctattgactgttactttttgaaaaaatgtatactggttctgaactccggattatgacatgtgggttacaactgtgcctggttttgaatatatagataaaatttagatttattttcttcctgcatggacttattaattggtttttcaggttttcgtctatcaaattcaagctactccacacttctatataacacccaagataaaattactgtcttatgaatctgatgactgaaaaggagaattcagagagtcataagtttgatacaggatatcgtgtaaaaaatgaaataattatggtgaagaatgcaggtctccgttaccaacattgttttcttcatagtttatatatctccatgtcttgaaatgatgttttccttgattcttacatttttttcttttaaggatttggttatgtgaggaatttgagttccttatgtgtttctcttcctccaccttgcccgattaaaaaaggaaaagaaaattgataaagaaaaaatctagttatcttcatctaacagagcttaatatgcacaacaggctttctttgagcggtggtgggtgacgcaaagtgc

SEQ ID NO: 74505 - DNA, 940 bp, Carica papaya
  Intron number 1 from transcript evm.model.supercontig_37.1 97 (locus evm.TU.supercontig_37.197) derived from phytozom e v7.0 (chr-ID supercontig_37; pos 1527343 to 1528282 reve rse strand)
ctatctctacagaacaaagaattcgacagtctaaagttagtattcttttatttgtgttgccttttcagtttactgtgctagtttttttctttttttctttttgagaaaactttttctcggacaccaaactcacaagtattgaggaatgaagagtcgtgctatcaaaagtggaagcatttaaaattatgttattgaaaatgaaaattaaaagaatttacttggcgaattagaaggacgaaacatattttaactcgtccctctctccacgtttgtttgattatggagaaaattttgcgaagagtagagggtagcaataaggtttgtttggtagatagagaaagaacaaattaagtagtaggacactgaggtttctgtttagagttgcaggttttaataggccaatgaactctatcactttttttattatagaatctttctattacattgttctgatttgggagggaattataagtagttgtagttaaagtattcaatagctaaagatctcgcttcctcttggatctctcgcgtatgttggactatgcatttaataacaatagaatatgctgatgaatcctatgtatttgaaagatttaattcctcaaccatcgtttgggtgattttgtaagaaaagaacaagagggtttgagggtattttgttgcctttattcaatactaaatgtcgttgattccaaaccttgagtattttgtttaatgttcttcctcctaagtatagagaggatcaaggggattattggtattttaatgtctgtggataacatgcaaatctcttgtatgcagggtggcactccatggtgtgctatttatattttctctctatttttttctcaacaaagaaaaaaaaagccaataacatatatataaaggtttaattcatctaacgtgtatgaatgcaggaagttggaactcgcattttgtt

SEQ ID NO: 74506 - DNA, 718 bp, Carica papaya
  Intron number 1 from transcript evm.model.supercontig_178. 34 (locus evm.TU.supercontig_178.34) derived from phytozom e v7.0 (chr-ID supercontig_178; pos 309806 to 310523)
ttcttccgccaagaaaaattccaagaaacccagatgtcagtttttcttactcgttatatgatgattcagattatttggaatcatttgctttaattgtgtttcagaccttttctggttaacaatcaattgccattttgattgaatctgtttggagatagatgtgatcatactttttttgcagaattttcgtcttctttacgttaaatttcaatgattttcacatgggtttgatttgtgggttttgttatgttgaatttcaataatttccaacatgggtttcatgggttttgaatcgattcattgtcttcataaaattattgcaattaggaataatgtgtgaatttggattagcaatggggaagggtttgctggatttagatgttcttcttcaagcattttctttgtgtatgaattataatattttccttttatgatgatagaaagtttgtgatttggcgcagaaaaagcagaatactctatatagcattagaaaaagtaccaacataatacgaattcaggaatacgaatacggaatagtaacaacaacatactaagacgagggtgaagtagtagctaatcactaataaaagaagggggaagagaagataaaaaaaagtgagagtttcaggcaagattcgtaatgtttgctttccaactcgcttgattgaatttcttggctgcagattctaggtttacccagcaagagcttcctgcttgt

SEQ ID NO: 74507 - DNA, 648 bp, Carica papaya
  Intron number 1 from transcript evm.model.supercontig_27.2 24 (locus evm.TU.supercontig_27.224) derived from phytozom e v7.0 (chr-ID supercontig_27; pos 2117116 to 2117763 reve rse strand)
ctaccattcgcgtcttcggtcgctcctgtctccaggtccgtagtccatgcctccttttctctgattgtatattgcaattcgctgaaaattgaatatttttttggtaatcaggaagtctgtttggttgctgagaaaatgaatattggttctttactttgtatatcttcaaaaattcttatttcgtttcattaacaattgaatggagcttctgggttttattccactgaaaaggagttatacctaccattcaaattttccatctttggcgatcatttccagccaatcattcccatgtgaaactagcattagatgaactatctagttgcccatgtaagttttctttgaatgaactatttaggttttgataatctatctggtaatgcatcaacaaaagcatatcaagcgacgtacatttattcatatattctttatcagtaattcaaactttagattaatgactgtgttaagatgtacaaattgaagcctggactttatggatgcatattgagtatggagaatctgcatttagagccaatgcttgtctttttcaacctcgatctccatgttaatttgtctgagatgtcaatattctcgctgaatacgagtgttcaattgtctctttatcctttctctgcagcctagagatac

SEQ ID NO: 74508 - DNA, 268 bp, Carica papaya
  Intron number 1 from transcript evm.model.supercontig_45.3 3 (locus evm.TU.supercontig_45.33) derived from phytozome v7.0 (chr-ID supercontig_45; pos 955017 to 955284 reverse strand)
tcattcaagaaaggtccttatattagtacagattcttttaatcttaatcactactttttggtatgcattgtcatttattgttcttatgatatgctatcactttggccttatgcaaagaaaattctcttttttggttgttatttcttaagatgctaatctgctggatttgcctgtaaatgacttcatgttttcctttcctttcttaaagagggatttttctgtatctcctagtttgatataaataaaaacaattttagtttgtacacag

SEQ ID NO: 74509 - DNA, 882 bp, Carica papaya
  Intron number 1 from transcript evm.model.supercontig_55.1 50 (locus evm.TU.supercontig_55.150) derived from phytozom e v7.0 (chr-ID supercontig_55; pos 952063 to 952944)
acttctccagcttcgttcgtcaactcaacacctatgtaagtctctctctctctctctctctctctctctcctgtaacaataataatatattaataagaaagaggaagaagaaggcgtgtgttttggaagatcgaatgttgatttgttgttttttattcttacaagaatctatcccctttcttctcttctgtcgattattactatgtctacttttaggagatgatggtgatttagcttgtggagtgatgggtggggtgacttgagatttaagataaatttactctcctgggttaattgctttttactgtccttcccaccaaacaattttaggtctcaaagaaatttctgccgactccatttgggagatcaactacgtcaagtcaagtaggttgatcctttgtttatacagctaagcaacgctgtacggctggacccgacccattttaaaaaacttagcatctcgaacctaaccccaatcatctctcacgacccatttccaaatagtttttaattaattactttcaaaatattaatttagacttgcaagtatcataatttgcaaaattacgtgtacggcccaaaatggtgggtttttaaagaatatgtttgggcaccttcttgtatttggattttcaacgacgtgtacgatttttttaaaaatgtgatggcatagttccgcgtttgaaagtttttgaatacaacattttctttttttaatttcattgaccaaatcaaagtagacgttttcattattgttcttcagaattttgtatggatattaatttaatgccctagaatttttgggggggtgaaagtactctcgtctcctaatagctactattgtgtcgttcaacagggattccgaaagattgtgcccgacaa

SEQ ID NO: 74510 - DNA, 955 bp, Carica papaya
  Intron number 1 from transcript evm.model.supercontig_153. 21 (locus evm.TU.supercontig_153.21) derived from phytozom e v7.0 (chr-ID supercontig_153; pos 504584 to 505538 rever se strand)
ttgtttgccttctcacctcactgctattgtcactggtaatgactcctcatttcttatatattcaaacaaatcatatatacatatatatatgcttatacatctcccttttattctttaattttcaagcttaccacacacatacacacataaaactactgcatggaaatatatatatatatatatgtgtactgtgcttttgatatttttccagtaagtaaattctattatgattttaaaattaatatatttctgctaattaaattacatctatatatataggtaatattttactgaaaatgtgtgcttaacctcgctgatttagagagttaagtgtgattcatgattttgcataatatactctctgtgaaattgtcgagaacattaatggttcagaatctgatcagatatccaacttctttggatattcttcgataatctcgagagaaagtgttagatcttcattaattaaaaaataactaacaaatatacatatatatacacgtttacacactcagtggataatgtatatttatatgtgcatatataacaaattcttttaagattgcgttcgaattaaaaaaaatgtatctctgacgaggataatctctagagcacattgttaatttttattgtatattaatgatctcctttagtattctttagttattctatgtgttgataattttatatggtttcttttcggctgcgataatatttggttttgtctcttttgaaataagatcttatgatctgtccttgttgccgatcgactggatctctttatatatatacatatatatatatatagtggtatataaaattaaatctggatgttattaattaagtctatatataatattatttcctaatatgttgttaaattttaaatattattatcatgaatttatgaaaatttgcaggagcaacatcaggaatcggagcagaaacagcaaga

SEQ ID NO: 74511 - DNA, 861 bp, Carica papaya
  Intron number 2 from transcript evm.model.supercontig_50.3 (locus evm.TU.supercontig_50.3) derived from phytozome v7 .0 (chr-ID supercontig_50; pos 18569 to 19429 reverse stra nd)
gcctttgccccggaaatattctgggggttcaagaggtgggtttttatcttttggagtatcattgttagtgccttgccatatgtttccctacgtggtaccttaacttcttttccattgtgctaaaaagtacacatttgtactggtgttgttttatttctcttttggtttttgtatctcgttttcaatgataaaatgcataagaatctaggagccaaattgctaatatattttctagtatgctaaaagccatttcttaaagcatgttgtatattctgtttttcccttttcgtttttggtgtctcccaagtgatgagtgtataagaatgtgagagtcaaattgctaatctaatttctagtttatctaaatctactattgaaatgaaaactcgtcattgaatttctgtttaattgtggaaacttctcttctgcagtctatggcaatgactattaatcttagcctataaaatattagctggcagcaatacttttctatctgaaattttcagagagaagggtagatcattagtacctcaatgttgtatcaagccatatgtcttaatgaaacaggttcctcacaagtgtattgttgtacccatacacatcatgactatagtatgtgtatgtgtgaatagcctggaaggatctttcatactaaatgatttagagagctcatagttagggattttgggatcttttttcttgcaccttaggtcgcagcacctttgccttataattcatgttctaaatgtgttgtgaagttccagctgctttttgctttaaatgaatattagtataatgataaaagggtacagagggatatattttatgatgatttctctatgcagaactgcttccataaca

SEQ ID NO: 74512 - DNA, 465 bp, Carica papaya
  Intron number 1 from transcript evm.model.supercontig_50.3 (locus evm.TU.supercontig_50.3) derived from phytozome v7 .0 (chr-ID supercontig_50; pos 19529 to 19993 reverse stra nd)
caccttctcctgcatcttcttcatttgttagtacatacaagttctcatgctgattgtttctgtcttttggttattgtcgttttcctagatgcctttggttctttcatgttgcaccattaaggaaattgggacagagtggtgatgattaatatgttttattatgtatataaaatcaatacgagaattagaactgggaattaattaagaacggaagaaatgaaccaaatgcagcattgatgtcagctacatcgtatatccttgtcttattttctgtcttgttatgatgtaacctattaagagtaccaccctgttattaccctcagttatctgtctgtagtgaaatgtacgatatataatcttgcttccaatggatcatcttttgaactttgagataccatgaactgcttggaaactaaatatcttggatcgatgctgtatagggttgtagtctcggatctttctctg

SEQ ID NO: 74513 - DNA, 1012 bp, Carica papaya
  Intron number 1 from transcript evm.model.supercontig_18.2 36 (locus evm.TU.supercontig_18.236) derived from phytozom e v7.0 (chr-ID supercontig_18; pos 2573228 to 2574239)
gtctcgttgcttttctcaccacctgcttcgattctgtaagtttctccttttcatcttcttcatcatcaaatccttctctctctctctctctctctcatctttctccatctttcctatatatgtatatatgtatgtatgtatacacgtgagtccatcctttctcttttcctgcacagtatggtagtgttcgtatcaattaacgttcactttcaattcagcaaatcttgattcttgattttcttgaattgtctttggccataattctttggttgactttgtgatcttcaatcttactttctgcttggttcaaataatctctttacgagaatttcattaatctatgatattatttgatctttctgagaacttcattaatcatggtattattgacaagtactggaactaatttattagaagatgcgaacattttaatttaccattttttttatcatatttgtgttaagaataaaatgaatactacaagttattcgagattgaaatgcaaattattttaaattagagagacatacgaaaacaaaaatatcaatctttcatttaatcagaacgtaaatatttagtacaaaccatacatagcttgtttataagcggttctaaccgatcaaacaattaatttcaattcgtttctcttttttgttaaaaaaaaaaaaattaattaaatattttaacaattttgttattattatctttaatgcatattatttatgtccttttttggttattatttattatcattcacaatatattattcactcattaataatcatttgataattaactttaatgggtgttttaacaaattttttttcttctcttttggttttgatcctaaaaagggcaaattggtgtagttttgggtaacggcgcacttaaatgagttagactttgaaatttggtaatacgacaccgttttgttcttcttgtcactaatttcagtttataaatgttggctttattagcctatattttcaggtattattacgccgacaaaacc

SEQ ID NO: 74514 - DNA, 617 bp, Carica papaya
  Intron number 1 from transcript evm.model.supercontig_29.1 23 (locus evm.TU.supercontig_29.123) derived from phytozom e v7.0 (chr-ID supercontig_29; pos 1162195 to 1162811 reve rse strand)
agtatttataagtaactctcttttcccttctttatttcattttcaatcggataccactttctacatggttcttttttcactttctgttagtgaaaaagaaataggaaggaaaagaagagatggaaatttctttcttgagaatttcagagaaaagtcaacccctacagccaattataagattattgaattaaaagaatttgagtaattttttattagtttacttttttctttcttactataaagttggaaaactgaaacgagaggaaggggtttaagctgtatagtataaattgtcaaagataagtcaaaacataatttgatttttagaaagaaagataattcattttaactgacttcctcctttttcttttctaattgttggttgctcgactcttcctgggctgattgcggaatgtggtttcttttgcttcagatcctaatggtatcttcttacttcaattttttccttcctaatatgttgtctaatttgattgatattttaaccataaccaaaatttgatccgaataagagatttgacgagaaggaattaaggtttagcacataaaggaattaatgtattgttcttaaaatttggaaacttaatgttacaggtcca

SEQ ID NO: 74515 - DNA, 377 bp, Carica papaya
  Intron number 1 from transcript evm.model.supercontig_150. 24 (locus evm.TU.supercontig_150.24) derived from phytozom e v7.0 (chr-ID supercontig_150; pos 236153 to 236529)
agcaggaaaagaaagaaacggtatttttaccattctgatctaatgttttatgctgtcttggatatctttgttttgtgctttgactgctgctcattttcaaggctctggagaatgggatatcaatgcaaagtccaagggctgtatcatcatggttaaaccaaaagcttttgatgccttatagttgttagctttaagccgtatcaagtcctttcttcatcctttgtagccctgataaacaaatttgacttggtgcaatagccggattcagttacctgaatttattttttggttaatggttttcttttccttgagattttcttttctgacgtgacttgttttacttggttttgttctttttcaggcacaggtagattttg

SEQ ID NO: 74516 - DNA, 360 bp, Carica papaya
  Intron number 2 from transcript evm.model.supercontig_78.4 0 (locus evm.TU.supercontig_78.40) derived from phytozome v7.0 (chr-ID supercontig_78; pos 481412 to 481771 reverse strand)
tgggatttgttacacccatcctgagaaacttccaggtcttaattaatttctctcttaattttcttgacaattaatttcctctctcttcatcatcactgcttccccatcattacattcaatgtgattaggtttcatatacagtgtatatacataattataaatgaaaagctgcaagttgtagccatatatttcttgttcttcttagtttgtttatgagttttgaagcatacaagattcattgtacgtatgagttatgatatctgaaattgttgcacctaacgttgattttatggcaacggtttgaattaacgtacgtttcttgcaggagttactagagacggactgagcaggcatttcttc

SEQ ID NO: 74517 - DNA, 397 bp, Carica papaya
  Intron number 1 from transcript evm.model.supercontig_78.4 0 (locus evm.TU.supercontig_78.40) derived from phytozome v7.0 (chr-ID supercontig_78; pos 481880 to 482276 reverse strand)
gtcccggttgcggccacaagcttgaagcaaagccggtacgtatgaatcaatatttaattttaatcatcaccaatctcttcttaatattcttagcttctgctgaaagattttctcaaaaagatgaagaatcaaaattcaaacaaaaggattatgcttcctgttttattctttctgggcttatttactcttattttccttctaatacttattaatactggctacctttttttttttttttcaaatttctccctttttactctctttatttatttgtttatttatttattttcaaaaacattcttttgctttcagtggttttcaattaattattgacactgaatgcgattaaattaattttacaggactggttaggtctaccagcaggagtgaaatttga

SEQ ID NO: 74518 - DNA, 1019 bp, Carica papaya
  Intron number 2 from transcript evm.model.supercontig_43.6 0 (locus evm.TU.supercontig_43.60) derived from phytozome v7.0 (chr-ID supercontig_43; pos 697281 to 698299 reverse strand)
tggtagaccggttttctgcctggaagaccgcccaggtacttatatttcatctgtttccataatttccccgctatggcgatcgttgcattttgttataattttattagaatttgtgagtttgcttttgtcaaatattttagattaaggttggaagaaataaagaatttgtggagtagtttaatcaggagaggctgaaaattctatctacaatgataaaaattgagctcgaggagagttgaaaaaatgcattccaaatttcatcaggttctgtagagtttgggatgcattttccatttaattgatgaaacttagaatacattattttaatttcattaagatttcttattaatttaatgtttattattttctaataaaattttcatcctactaaactaggtgtaaatttccaaatgaatttttataaaacattagttcctaagtttaagttattattactctggactgaccattcaactaaagaagatctccattgactgtatgcttctttcgttcttccaaatcttagaccaactgtcgcaaactttgaaatatttttacttcttggggcagagctttcttcactgacttgtaatttggttggagcgggatgctagaattttttttggaattcgcctttcctgattatttggataagttcaatttttaccttctgtctgggtcaaattgctgaattacaactcgcatagttattgtaaggatatctaattgttaatgttgtgcaaagattggcatgctattctctataatgattagctagattttctcttgtgtttcttcttctcttgtgttttttttatctcaaaaaagttcttctttgttcttaataacatatcttctttttctattaaaaaaatactctactagtacttcccttttttacattcatgaatcagcctgtgggtatatatttctaatatataatgttgtatctgagactgaatttcatgttctcatgccgttaccatcattgcggctttaaacatacaggcttttatttc

SEQ ID NO: 74519 - DNA, 580 bp, Carica papaya
  Intron number 1 from transcript evm.model.supercontig_52.1 74 (locus evm.TU.supercontig_52.174) derived from phytozom e v7.0 (chr-ID supercontig_52; pos 1827120 to 1827699)
cagaagtttcttctccggagtcagttccaattaaggtttaaattctctcttcttagtttgtttcagaatttcattcattcttcgtcaagcttggtccttttggttacttttctccaataactttaaaatgggattttgttgtttgaatgaaatatatgtttggtttatatatggagaagaggttctgagctaaatttgtttgtttttgtggcttgattttcgatcaagtttttttttctcccctggttatagttttttaggcctgttaagaatcaatgcagttcttcttctaattgcctaaatttccatggatctgttaagagagcttctatgatactgttaagtttgctcatccaggagtaaagaaagagaaagggataattagtaaaggatgacttttcttagtctgtggaatctctttaattttatattgaatatcatcctagatgagaccaaataatggagatattaaacctccaaaaatttctttttccccatctatctgcattcaaataaattggacgaattggctttggtgtgaacaggaagagccttctggttttctgagcttaaatagagt

SEQ ID NO: 74520 - DNA, 754 bp, Carica papaya
  Intron number 2 from transcript evm.model.supercontig_3.51 8 (locus evm.TU.supercontig_3.518) derived from phytozome v7.0 (chr-ID supercontig_3; pos 3690574 to 3691327)
tcgcacaactttgcattttagaggtatgcagaggttcaaattgctttgggactatttttttttttccttcttaacattctatctccagcgaggaagtaatgcaaacactacatccactaggtaaaaatgcattccttgttaacatcctatacccttgcaatttgtcaatttgatatatttgtagttactaacaattcatttattcaatttagaagctaagctgttaatcttattctggaattttttttgagtttttgtgctgacactagcaagttttgctgatgcaaatgttatatattaagtaatgagctgattagctggtgcctaatgtttaaatctacctgatttttagcagtttggaactatagtgtgcaacaatgatactgaaaattattgcaagtagaaatgaactgatattgggagtagaagaatggtttttgtgtggtaagagcgtaagcatggattttatggtcatgcttctttttggttaatcttgtgtggtcagttcatcagctgcaactatataattatgcaatcttttgttccaacaaatccttgattgtcactgtcaatcttgtatccttccttttccataggttattgcacaagttgtttttcgaagactttcctggtcttgttttgagaaaatatgttttatcttttggtttaatatatttttaaacaatctaacttttccctgattgattgagacgttttcatattgttcaggtaaaatatacagatatatcttgtc

SEQ ID NO: 74521 - DNA, 472 bp, Carica papaya
  Intron number 1 from transcript evm.model.supercontig_19.2 67 (locus evm.TU.supercontig_19.267) derived from phytozom e v7.0 (chr-ID supercontig_19; pos 2280185 to 2280656 reve rse strand)
gccattgccggtgttgtttctttgctttttagcatctgtttcgatttttgtgttttgttttcccctctcttaattctattttttgaaaatattccccttgttttcatcggcattggatttggggaaatgggagtaaatagaacaagttcttttttctttttgtgttcgcacttgggagctgtttggttgtcaagaatatgtgggaaattaaccgaaatattatttttcataacgtgctcttgtgttgttcggttcaaagtgatgatatcactcttcactgatttaagctcaattttttaatggtgtctctgttttattcgttcaagttacaggaaaacatttgattcgtaaaacatgctaagatgttcagatttcgaattgttctgttttttctacttctccaaagatattctttataatgctgtatactcatttttggtatttgtaaatcagattcggggaagcttataac

SEQ ID NO: 74522 - DNA, 813 bp, Carica papaya
  Intron number 2 from transcript evm.model.supercontig_18.1 49 (locus evm.TU.supercontig_18.149) derived from phytozom e v7.0 (chr-ID supercontig_18; pos 1351058 to 1351870 reve rse strand)
ccgttaaggtatctccgggtttcattcttataattgtttatgatttagtctgtatgttttcaaattggaagaaattatctgtttctgtaggatttgaactcataatctagacgaggattcgacagaatcaacttttttcatggaatttatttgaaatggtatatttattttaactatgagtagtgatccctcataaaataataatactgagcttacaaaataatgaaaaaccgagttcctaaataatttgaagtggaattaagataatcatacataagtttatcaaacttggtggaatttaaaatgtgttctctcagttttacttagaattgcctaacagccgaatttttacaattttatgaggcatcttcactctcccacagttaaaataatacgtattttcaaagaattctacgaatgaagttcgtttgttccaatcatagactttaagctcaaaattttgtaggagatgaaattagtgcaagtggctttcctatttatggtagtacatatcaaaccaaaaaccttaaatgccgctctttcctgaacctatttcaatgtgtttttgatgggagacttattaggttgatttagtactggcattaatagttggttgaacatttcatgttttgtctcgcagttatgattctgttaatctggctagatgccactgtcatatgtacgcctttgtttgtgtaattctctattataaatttacctttgagttgctgccatgctttaaatcttcatcttgtttactcatgcaagatttgtgcagaaaattcttcgagagaatcaaatcagttcagagac

SEQ ID NO: 74523 - DNA, 439 bp, Carica papaya
  Intron number 1 from transcript evm.model.supercontig_9.6 (locus evm.TU.supercontig_9.6) derived from phytozome v7.0 (chr-ID supercontig_9; pos 44831 to 45269)
tttctttactcaagcgagaatataggaaaaaggtgtgtgctctttttcttttcagcaattagcaagattcaacatttccttcctccttgctctttgtttgttcggacaaactttaaaagtattatttcccaaatgtccaatttagtttttcatggctgtccaggcatgggttcattaatcaaggtgcactatatcatggcccataacttatttcaggaaaaggaaagatacatatctgtacccatttatcatttctttttatggcattatgagaatgcttatctaagtgggaattcttttaatttttggttaccaaagaaagtcttaaaacctttcctacccggagatcaaatttagttttccacttttgactagacatggctgcctagagttaccaatagatgcacaatatcatgataattaccatgtatttcaggca

SEQ ID NO: 74524 - DNA, 154 bp, Carica papaya
  Intron number 2 from transcript evm.model.supercontig_1624 .1 (locus evm.TU.supercontig_1624.1) derived from phytozom e v7.0 (chr-ID supercontig_1624; pos 1301 to 1454 reverse strand)
ttgctcatagaacagaaggccactgggcaaaatcagtatgctcttaactaataatcttttttagggtttgttttcttctctgttatttcaaagtagtaatgaacgtgtgcttgtttcagctgggatctacatttttcaggcggcttgggtggtc

SEQ ID NO: 74525 - DNA, 555 bp, Carica papaya
  Intron number 1 from transcript evm.model.supercontig_18.1 78 (locus evm.TU.supercontig_18.178) derived from phytozom e v7.0 (chr-ID supercontig_18; pos 1644528 to 1645082 reve rse strand)
aagactatatacactccctggagtctcttgctaacgtaagccttatattttctgaaccgaagtttgaaattctggttcgatttttgaccaatttgtctgtctggtacttgtataatatgtttacctattgtgtgttattgtttggtttatggattatcgttttttatttctcgggttgagatgaaggaatcttgaattgtgtacgagtgctagtttgatgcttgttcttcatttaatcctcttaatataatcatattggcagtgtaggtttggtgctgacttcattagattggttagctatgtggagcttgatttgattcgttcactatattaatactgatctaccccatagtaatcattctcttatatgataatatgcctgtaaattaatgtcttgctaaatttccattgctttcattttttaaaatgctcgcattcagggatcgtccaatataaggtattattatctgaaaccatttaatattttgattagttatatggcaatttatcttatacccatattgaaaagttggaaattatggtgcagggactaac

SEQ ID NO: 74526 - DNA, 571 bp, Carica papaya
  Intron number 1 from transcript evm.model.supercontig_27.2 49 (locus evm.TU.supercontig_27.249) derived from phytozom e v7.0 (chr-ID supercontig_27; pos 2276281 to 2276851 reve rse strand)
gggaatttccgctccgacgaggacccaacccaaaggtatgttctctttgatgagtttttctgtcgttgcggttcatttttctattttaaccttcgaatttgagcttccatttgactgttgcatctttgaatagtttgtgtttttggattgctgagcaggagaagaaatgtggcttactgcatgtcctttaatgaaagatttgagacattttgaaatgggtttatgggtaattaggcgtgatggatattagacttttaaataagagttcttagctaccatatgtttttcatttcttgaatgttccatattcttgattgagttgcttgacttttatgttaggtattttacccattgtggttatttgtaacttgacattattaacgtcttgagttgacattattgtgtgatgatatagtgtttttctccaactacacagttttgactacaatcttgcgcgtatttcatgtttttctgtggaaagacgttctgtttcgattcctttactgatcaattttcgcttcacctgggtggggtgcatgttttaattgatgcagatcaaggagaaagaaga

SEQ ID NO: 74527 - DNA, 548 bp, Carica papaya
  Intron number 2 from transcript evm.model.supercontig_6.36 9 (locus evm.TU.supercontig_6.369) derived from phytozome v7.0 (chr-ID supercontig_6; pos 2823451 to 2823998 reverse strand)
agccggtaaattttttgttttcgtaccttgtagcaataaatggcattttaaggtgatcttgttttattgatctgtgagcatgagaatttgttttactgattgtctccaactcttatgagttgtaattggacttttggaattagatcctgagcaaataccaaaacttaacgagctttacgctatatgttgatctacttctttaggaagggatattctcctgctttctcttttcaatctgcaggatggttctctctttctttctttctttcttttctcctgccattttctctttttgattttgcagttccacaaccgaagttcatgtagagaagagctgtctttatttatctttaatcatcttcttatatctcattactttcctaatttggattgatataaagtctatgaacaactaacctgtgtccaagctatggggttcaatgagttctcgcaaaattctgcagtcatatcgtttatcaataacggaaaaaagtaaatgttagcactctttagtccttttctttctgtctcttcgtttgttcattcag

SEQ ID NO: 74528 - DNA, 455 bp, Carica papaya
  Intron number 1 from transcript evm.model.supercontig_6.36 9 (locus evm.TU.supercontig_6.369) derived from phytozome v7.0 (chr-ID supercontig_6; pos 2824036 to 2824490 reverse strand)
caggaaaattcttgcacataagaagcacgttgggggtgagtattattttcttctacgcattcgaggcagttgaatatgataggctggcagaaagtcaataaggttccttaaaaatcctggtcctggagcctatccataccacttctgtatttgcagagttcaaaattttattgatccctcgtaacactgacaataatttaaggactgtgtatgcaatgtgaaataatgttcgttctctacgcattgaagtagagatttccagaagatgatgagagatgtgaatcaaataaatttatttggcctctttgctcaataatgtagtttactgtgatgacatgaaaacttcaaactagctttatctgttttgtgtttctttacttattcttacaaacatgatgttgccaattccatcctctgcaggtctggaagcaccccgaaatagcttggagttacaa

SEQ ID NO: 74529 - DNA, 325 bp, Carica papaya
  Intron number 2 from transcript evm.model.supercontig_46.1 20 (locus evm.TU.supercontig_46.120) derived from phytozom e v7.0 (chr-ID supercontig_46; pos 1043338 to 1043662 reve rse strand)
gaggaagtaagttatttttccccctccttttctcaattaagaagaacgtttaacgattgaactttataatcttttatgagttaatctatgcatgtggtgtggaacagcctgtaaaagtactacgtgtagtaattcaaggaatatcaatatctatttgtaatgaaacagccattaatgttctgtggactatataaattatctggatcaggtggttgttacagtaggtttatctattaatggccaatcaaaagattataccttttcattgacgtgaaagtatttgcatacagtgctagcagcttggtttagactgaaataccctcat

SEQ ID NO: 74530 - DNA, 952 bp, Carica papaya
  Intron number 1 from transcript evm.model.supercontig_25.7 4 (locus evm.TU.supercontig_25.74) derived from phytozome v7.0 (chr-ID supercontig_25; pos 848684 to 849635)
gcttacttgttctcctctcccgtaagtctctctcccacatctccataacaattacttgctattcacatttttcatttgtcttcaatttgagcaaaatttgtatttcaattttggagcttcatcttcttaaacctacatgatactctctctgttcttgtgctcgagtttagaaaaacaaaggaaattcgagatttcaacctcacaattttcgtttagttagatctaataccatcgaaatctagatttagttttcttcggaaaacgaaaaagagaaaataataactgattatttattgtttgcattatgcgcttatttattcctgaaagtttgcttttgatatggatataaaatcagtgtaaaaaattattgattgggaattccgattgtttattgtttgttccttttgaaatcgagggaaaaaatgaacgactgttgctatgcattctgttttgacgttcggatttgacagatctcgttgttgtacttttggtctatttataatacgaataggcatcaatgttttataatgagagctcatcttgtccattgtctgcagtaattccatgaatggatctgaaatattaggttctggtttaactctgtttagtgctgataggatgtaaatgaatttaaactcaaagaagcccttctatatcaatttgaataaattttccatcaagtcagatgttttgaagtgcttgtacaaggagagcagcccttaagtcctcatcatgttgaattaatgtcaatccaccctcagtcagacttgtgactggactagttatccctatttctaattcttatagccttaccctttctctgttacaaggtatctgtgatatgctcttcttaatgtttttagtctttgatttttagaagttccacaccttctagcttctgatatgagtagctatgttccaataattctgttctatatatgtcataggagtc

SEQ ID NO: 74531 - DNA, 818 bp, Carica papaya
  Intron number 2 from transcript evm.model.supercontig_97.7 1 (locus evm.TU.supercontig_97.71) derived from phytozome v7.0 (chr-ID supercontig_97; pos 446292 to 447109 reverse strand)
tcacaaccgcaagagttggaaaattggagattgttggttatttctacttctctctctctctcttaaaaaaaaaattgaaattttggatcgtagtggatgatcaggttgttcttacagtggcaattagtttacttgaatgtgctgctgagaggagtgaggcaattacaagaagacgaatgtggagtgtggagttgtcgagtagatgattttggctaaaattaagccgatcattttaatcatttctggaattattttaataattttggcgtgtactaggattttggggagagttcttcacttgcttttgttaattgatgtttcttatggttgctgaaaaacactaggatcgtgatttaaaaagaaaggaattaaatgtggtattttgtttcagttccaaaaagtggaaaattcgactgaataaggaattttaggaacctgcaaaacactaaaatgattgcggtggttattttcgacaacaagaaaattcacacgtagccttttctctttttgtttttgattaattctcttgttcaaatctttagctcaccagaaaaattgaatacaatgataggagaaagtgttaaattctccatctgcttctttcttgcgaaattggaacttcgagttatcgaggttgttataaatgactgaatcaagtggtttatgttctatcacttgcaaataaagtgttagcacgttatggttaagatggtccttattttttctttaatttctgtattttagctatagagctgggtttcttcccttctttgttgtcaaatttatgtaagataacttgtttactttatagcttcctt

SEQ ID NO: 74532 - DNA, 477 bp, Carica papaya
  Intron number 1 from transcript evm.model.supercontig_48.1 92 (locus evm.TU.supercontig_48.192) derived from phytozom e v7.0 (chr-ID supercontig_48; pos 1082151 to 1082627 reve rse strand)
gggatcattctatttcgcaacccgattccttcaaggtacttataacttttgtcttctttcttcccatttcaatttctggtccccgtttgtctttagtttatgctcaattcatgtgatttagctttactttttagcttttaattcctaaaattacctttctccttcaattttctgctcaattcaagtactttttttttttttttttcctttttcacgtttgagtatttcgtacttctcttattttttagttttatgatcacttcaagtccaaagaaattttaagctttattttccaacttctaatttatgggttcccaattattttttcagcttttattatcaattcaacttcgtgtttgtttctgggtggtttttttttcttttttttttcctctttcttttcgttgtgatggtttaatactttctttgctgttatcaatagtcacaaccagtgattgcttcgccaacacattacct

SEQ ID NO: 74533 - DNA, 729 bp, Carica papaya
  Intron number 1 from transcript evm.model.supercontig_48.1 99 (locus evm.TU.supercontig_48.199) derived from phytozom e v7.0 (chr-ID supercontig_48; pos 1102381 to 1103109)
ggcggctcttgatcgatatcctctgtaagtcactgccttcccttgtgattaactctcctttgcttccccagtcaaaaccaattggatctactgatggaaaaatgtggttacgtgtttcttctctttacatttgggttcaaagtcggcaaatccaacggcagtgatgcgcttgtaaattatagatttgaatttgttaaacatgcgtttgtggaaacgaaagcgtcggtgattttgatcagataaatgatgggacccactttgctcggtgggcccacgtgccatcagtgatttgtatctcaattattattattattattaagcagcgggttaatttattcattctatatttttaattcattgttattaagagaatttaattcattatgaaatttaactttaatagatttgttgaaatttaataaaatttgattggtcagtgtatcatcataaacacattagtgaattaaattattaattttattaaatcaaatattattatgaagttaaataagataaaagtataaattaaatgcaggatctacacaatccatgatttagtttattattttatgtgggtaaatgcaactacacacacatatacatatatataaatagatatatgtatgcatatccacactaaagtgttatatgagatttgtaaggaaggtttaaatagcttgatggatttgttcaggccagagtttgaatacaagtctgctgagcccgtac

SEQ ID NO: 74534 - DNA, 563 bp, Carica papaya
  Intron number 1 from transcript evm.model.supercontig_252. 10 (locus evm.TU.supercontig_252.10) derived from phytozom e v7.0 (chr-ID supercontig_252; pos 36294 to 36856 reverse strand)
agtcgtcttcatcagatcggtctcgtgaccagcaggtctctctgtataatctcttttccattatatatatatatatgctgattaagtcaagatactcgtacttctcaagatatatatacgtatatgtatctaaataactattatttgtgttgaatttataccctgctattagagataatcgtagttagatgaatgattagatgagttgactgtagttagcatagattaattataattaactcgtaactacatgattcgtttagttgtaattagtccacaatcaaaagattagttgtgattagttgggaggatttaactaatcaccctctatgtataaaataccaagaaataattaatgagaagcacgaactttcatttttttcctcaaactcgaactctgtcgtctcttctttaccctcactctctcgagtttagcttcctgatttcagagctcaatatctttcgtcaatctttgagttttattgatcaatcttcaagcattgtttcttattcaatttgaatttgcagattgtggtgttgagggtgtcaatccattgcaaggg

SEQ ID NO: 74535 - DNA, 829 bp, Carica papaya
  Intron number 2 from transcript evm.model.supercontig_222. 21 (locus evm.TU.supercontig_222.21) derived from phytozom e v7.0 (chr-ID supercontig_222; pos 161262 to 162090)
catcctcgagtagcttaatatatttttgaagttatcatcttttctttctaatttaacagatgttggttttctttatggcttttgactttcttgaaacaattttttgtatgagctttcatgtggcaggcgttctagaatatttatctttgccaatcattaaacacaaacacacacaaaaacacatattgaagatagttctggagacgtgggttgaaatctctaatggaaccaaatggttagtgggtttggggagatgagagggcaagggagaggaggataatcgtgtaatttggagttggggtttgagaggggtcaggagtcaaaagatctttgaaaaaacagataagtaacgatataattttacgatataattctaacacacacaagcacacacacacatttgtattcttaataatatttttttctaaactgggtcaatttattgcagggtcttctttctccatgttttaaacattgttttctcacattcaattaaatatgcaccaaaaaaacactctgttgtaggtcaaggaaatgtgtatcattagcttgcatctggggtaacaatatagatttttcctggaatattctaaatcctagccaaatctctaattcaaacaccttagaactatgcctatctttttcttctaatttcaccaaatacttcgtagaataagagaagaatatcttacatcacttccatattggagtgtagttgaagtctaaatttttactttaaaggaactgttgaagaaaactttcaattttaaaattgagtaacggatgttagcatttcatttacaggtgccagaggagctctcagtgtccc

SEQ ID NO: 74536 - DNA, 793 bp, Carica papaya
  Intron number 1 from transcript evm.model.supercontig_34.1 35 (locus evm.TU.supercontig_34.135) derived from phytozom e v7.0 (chr-ID supercontig_34; pos 1261267 to 1262059)
ttcttcttggttgtaaactccctctgtttattatttttttcttttttcaaagcttgaatctttggtggaagaggagttgttacccattgctgtttttgcaagttcatatgctttctgtttgacttttttttttctcctggtttattcttttttttttttttttcatatgctggttaaattcttagagattggggctgattcttggcttgctctctttcgactttgtaaatcaatacaagggtttgaacaaaaaagaagaaagacaaaacaaatcaaaaccatttagttgagttgggttttcttacatataatctgtaaattaatatttttttattcaatgctgttgttttggcatttcgagaatccatctccaaattttgtgattttaaaatataatgtgctgatcaaaatgagttttagttcttaacttattaggcttaattaggatgagttctagatcctctttctttaggtgttgctggtttaaggcttaatgaggtttagttacaaggcttaatcaattctcagtgaatacgtacattgcatatcagcactatgtagaagataataggcctttataatgaaacccgttttagtttttgcccatagctaaagatctaaaatttacagagcaatatggttcatttgaaaagcatgaaaaatatatggttgcaggtctacaagcatacatctcatttattttatctccgttatgaactcttgcacctaattactgtctagatgagactacaagcaatatatttatgtatattttttatccctaaatgtccag

SEQ ID NO: 74537 - DNA, 1069 bp, Carica papaya
  Intron number 1 from transcript evm.model.supercontig_16.1 64 (locus evm.TU.supercontig_16.164) derived from phytozom e v7.0 (chr-ID supercontig_16; pos 2464520 to 2465588)
aacttcaattggaaattcatcttctacacttggaggtaaaatatgtttagcttttaatagattcgaaaaccccaatggtgtcacaaatctatgatttcgaaatttaattttataataaattacattaaaagaatagtggaagaaggcaggatatcaaatcgtaaaggaccaagcttctgaatccagtctggttaatgttttcttccatctatttttgttctcccttttccctcaaattccagtactcaaacagtttggtttggtttcagagtgaacactaataaaatatcctctttcttttaagtgaagtgtagctatccataattgctttcaggaattatgttttagcactaacaaataactatagaagtttaggtaattaagtttgtgcagaaggtttcttataaagtcattattttcttttctttttttgttcaagaaactttggttttggagcgttgtggaggataagggatttcctcctttcgaaatctatatttatttttaattattatcttttgtttgtttccttgaaattaattttctaagaaatttctttggaagcattttggggctccaatagccatttcagagaagcatgttacagaaattaccaacttctactatgaacaaattaatgcaacaagtcttatattttcctttctttacttgttgggtgacaatgggggataagtacctctttcttgatccaactctcttgtagttctggttgagtttgcacttcttccttttcctgttggtactctatgtgtttgactcttgttagtgtcttagcattggaacttactaactgcagggtttttgatggacatggttttttgttaaaatgataacgtgtacattcagtgtgtttatatatgtgtgagagagttatgtgcatggtatagggatggaatagcttcaagtttgttggttccttattgctttcctgtatgcatgagttgattttaagttatccttagttcaatatatagtaaggtgcttgaggtacatcttagttaattgatgtttaggtgttacttgcaataaaatactcattgaatcagaa

SEQ ID NO: 74538 - DNA, 567 bp, Carica papaya
  Intron number 4 from transcript evm.model.supercontig_25.1 54 (locus evm.TU.supercontig_25.154) derived from phytozom e v7.0 (chr-ID supercontig_25; pos 1604786 to 1605352 reve rse strand)
gtacccagtgtctagcttcgtgctgaactgtaaaggtgcagagtttagctcccgggtcttcttttggcagtcacaagtttgaaactaggaacagtttagacattgagaataatagtgattgtttatggcctatattagtttccatttaattcttaatcaatcaattgatacactacatttttatattaatgtttttatatatagttataacttaatatcttttgtttgattcatcttctctccatcttgaattaaaccaacataacctaaatactgttctataatcaagcatcttggaacatattaaatggttaagaaataactgagaagattgggcttttagttatgcttgcccactatatctgcaatgagatacataagataggaaataaataattgttttttctgcattacaaggtagaaagcaaatttgccatttgttttcttgagctagaactttgtcttattccactctcttactttgtgctttgtagttgacgtcgcgtttataaattatcactttcattctgcttatcctctgaaaaataatgacatttaatgcaggtg

SEQ ID NO: 74539 - DNA, 357 bp, Carica papaya
  Intron number 2 from transcript evm.model.supercontig_26.2 4 (locus evm.TU.supercontig_26.24) derived from phytozome v7.0 (chr-ID supercontig_26; pos 267045 to 267401 reverse strand)
ttgtctactactttcctcaaggacatagcgaacaggtttgcatttattgttggttattcatttcttcttggagaaacttactttaatatttactgtttttacagtgttattatatttttacttaggattcaactagttcatcaagtcgaacccaaatgagtttgatccaagtttaataacttagagatcgtaacactgacactctaatttaatcatggtgattgaaaattcaatcttctaaaacaatttatgccggttccgttttggcaatcttgtccgcagtactaacggacatcattttttttgtttttttttggagcaggtggctgtttccactaaaagaacagctacttccca

SEQ ID NO: 74540 - DNA, 577 bp, Carica papaya
  Intron number 2 from transcript evm.model.supercontig_16.1 28 (locus evm.TU.supercontig_16.128) derived from phytozom e v7.0 (chr-ID supercontig_16; pos 1948395 to 1948971 reve rse strand)
cttctgcagtaagttatcctgaatctaatttagaagcacttcaactgtcttggctttaaattttgttgttgttaatacgtttggtcttgtgtatttttcatgtaaatttgtttgtcattcttctcttcatatgttgtggtgtccagttatctgtataatgtgaagctgtcacccatccaaatttgtgtttacattaatggaatagaatgctgaataatgcttgctatctccaatgagatgtggtttctgaatttccagggaggtgtagttttgatttcagttagaaacgagccacttgactccttgaattagaaacagacaagtttgtgttgttatttcttgttgcaagttgtccccaactcacagatgttagcttctttaggaacccaaaggggagtgtgggactattaattcaatctctttgcccttgaaaattttacatggtttttctaagcttatcttcctgtaagttttttttccctcagtttccttggtttatgttaataatatgattgtcattcttgagacagtttggagcattagttggtaacagaagtaagcttttgcttttaggtgt

SEQ ID NO: 74541 - DNA, 690 bp, Carica papaya
  Intron number 1 from transcript evm.model.supercontig_16.1 28 (locus evm.TU.supercontig_16.128) derived from phytozom e v7.0 (chr-ID supercontig_16; pos 1949029 to 1949718 reve rse strand)
tgttgcgcttctttttgcttgttcatctgggagaggtgctaaagaaacttatcatgatttattaatctttttttttccttagctaattgcatattatcttggtttattgtattagatgagttgttggattatatatcttcgttttgatgtcatgcaagttgtgccttcgattatttaatttgtgtttttacttgaactgaattgaaagggtttgtttctgccttatgtaggtttttcaacactgtgctttatagtctttgtatgttttgtaaaatcaaagctgtaaatagctctttattttatcagttttgtacttgtcaatgtttttgggcttgaaacctagatttagtatggtttttagacagctggatgcaggattaacgaacatggtaaagtatgtactgtgtgggattatagtcaattacttcctgtagggttcacgactggggaggaaagctgtaaatttttccgttgtcaggacctattgggagtctgggactagctagtctttgcctttcttctgattgcagctcgaagaaaataaggaggcatctgtttattgctcttagttgtctttttcttttcaaaaagaattggtttgtggtggtggcttgggactttagggttgttttttcagattacgaaacacattctaatgaagctatgattctacagaactcaaggttaagc

SEQ ID NO: 74542 - DNA, 631 bp, Carica papaya
  Intron number 2 from transcript evm.model.supercontig_8.32 3 (locus evm.TU.supercontig_8.323) derived from phytozome v7.0 (chr-ID supercontig_8; pos 2688710 to 2689340 reverse strand)
tccggtgtttctgtttggagtgtaaagtgcagaaggtatggatagatgttggatttcgattccaattgatgcaggatgagtagttgttaaatttacttcttccacaaatagtatagaagtagaaaaaatttaattgaaagtaaaagaataaagatagagtaaattagagatcaatgtgaagaaaaatatggaggaataaactgaacaagatagtttagatataaaaataatcaaaagaatgaacacatagagagaacatagaataaaaccctaacaaagaaatttttaataatgaatcatctgtttcttttggtagttactagtatttatataggtattaacttacaagtaataaaaagaattatcaaaaagaaaatttaaaagatctatcttaagtttttgcaataattggtctaattgtttatttgaggatgaaaaatctttctctggttgttgaactaatgaaatgagaaaaagtgctattcttctaaagtttatgattttatgttgcaaagtggacatgtgaccttctaacaatattgaagttcagtcaaaaaataagaaaaatagaacttctgccttgcattatttttcttattagttctgggtgtttggtgtcatcagatacctg

SEQ ID NO: 74543 - DNA, 684 bp, Carica papaya
  Intron number 3 from transcript evm.model.supercontig_34.2 08 (locus evm.TU.supercontig_34.208) derived from phytozom e v7.0 (chr-ID supercontig_34; pos 1945145 to 1945828 reve rse strand)
cttctgcacctgaagctgtagctgcacctgccaaggtagctgttaagtttttaccgtgctttgccttttctcttagttttaagttaatacggacttgtatcctatagaatttaggtgtcaagtagttgttttatgacccctgagttgacgattggtactgccaattgattgtggtagaaatttgaatgtattgctgtggaattgaggggagttgaatttgttcaattatacataaaaaatgaaagtataattaaaacttacaatcaaatgataagatatagtaataggatgacagtagagtatacctgaatcgaattggctttagtgttaatgtgttagttaggtaaactattctgaatcagcgtataaaactaacaaacaaattgaatatgatccttccaaaacaagccatctatctttaggaattgggttattgtttttctaatgtggtatttatttgcatcggcgtcgaatatgctcggatggaagaggttgatttgtttgaattatggttggaggcaaactggtttaagggctgcatattactggctaattctccttcttccatgtgaatctcaacatatatattttttggaaaaagaaagatggatttcaagattattgatctaattccttcatcttctgtggttatctcatgaaacttttaggaggccccagctgcag

SEQ ID NO: 74544 - DNA, 676 bp, Carica papaya
  Intron number 1 from transcript evm.model.supercontig_78.4 7 (locus evm.TU.supercontig_78.47) derived from phytozome v7.0 (chr-ID supercontig_78; pos 536960 to 537635 reverse strand)
tctggggttgcttcttgttttgctaatagtctcaagtcagtttcttcttcttcttcttccactcgccgactgattttttttcgatttctgcgaatactcaatcactgttttcaggtttcagttaatttgtgttgttactctgggttttctatgctcagttaacttttttttctgtgaattggtactcgggtgcacaacaaacataaacctgtgacatctcttaccaataaggtaatgaagaaacttgtgatcataacgacttaatttgaaaagcctggcaaagttttattacttctgatactccattgctctttatcgtatctgtttcattttattgactctggaagagagagaaactttcaattgaattttgattaagtgaagaaaagataaatacagaatcctctcactctttttcaagtattggggaagggaaatttaggagatattgtcaccgtggaaaaagtaaagttaacaacctagcagagaagaaacgggtgagattatttagtatttttttaatcaaggatcggaatatggtgagtatggcagccttcagatacagataatatttctaactaacaatattttgtgataagccctttgcgttattatggaatttgaggttgtttatttttcagttgtaggtgttgcttttagagagaatatagctagg

SEQ ID NO: 74545 - DNA, 320 bp, Carica papaya
  Intron number 2 from transcript evm.model.supercontig_194. 11 (locus evm.TU.supercontig_194.11) derived from phytozom e v7.0 (chr-ID supercontig_194; pos 176110 to 176429 rever se strand)
ttctacaaattgttctgaaacaaatgtgagcgaacttctgtttcattaatttctttatgttgggcaggtcttagacgatagaattaaaagattttcctaaaagcttaagttcaatcttctctgtattatgctgaattttattttttttttaaatcaaatatagaacggcaattaggattcaaattctagattttttagttttgatatcatattgaacaaatagaattttgcttttcattttttatggtgaaaatactgctgcttaatcttgcccctctgtcaaacatgtgctgaatttttctattgaatttcttctttag

SEQ ID NO: 74546 - DNA, 520 bp, Carica papaya
  Intron number 1 from transcript evm.model.supercontig_194. 11 (locus evm.TU.supercontig_194.11) derived from phytozom e v7.0 (chr-ID supercontig_194; pos 176445 to 176964 rever se strand)
tcgccaaggtttttttttttttttttaaaaaaagtatataaatttattagaccacttcctctttaacttcattgaattgtcgtgattgctaagaattactattttcttattgtttctttgaggagcttatggtggcaatcgtctattgtagtttctcttaaatttcacattctattttcttattttgcattttcatttcgtgcaaacataacctaagattttctttcatgaaagcagcttgttaatttttcacggattccttgtctcttcattaaggctgtagttgattcattgccaaaaaaaaaagaaaaagaatagatacagagaaccgtataaattccttttcttttcaatgaggaaagaagtgctaatgtaatgtttgcaatttcattttgtatacttgaaatagaaccttcactttcttgcttttcattccttcaactttgaagtttgtcttgttagtgaattttgttatttacctacagactaggttgcaggcacaagctgcgggagttcctta

SEQ ID NO: 74547 - DNA, 259 bp, Carica papaya
  Intron number 2 from transcript evm.model.supercontig_37.8 (locus evm.TU.supercontig_37.8) derived from phytozome v7 .0 (chr-ID supercontig_37; pos 44774 to 45032 reverse stra nd)
ttgaacaacaggtcagtgaccattcaatgaagatgatattatttcagccatttcaattatgggtttctgttttgcttgtttcttttgtttttgtttacttctggtcacttgtgttttactgtggtagaattgcttttgctttctttgctttttgttgggcttattcttaagtaaaaactttgagaaaattgaatgttgataatccaatctggattgtggttcagcttgcagatattgaactggcaagcaaacaaaaagc

SEQ ID NO: 74548 - DNA, 695 bp, Carica papaya
  Intron number 1 from transcript evm.model.supercontig_37.8 (locus evm.TU.supercontig_37.8) derived from phytozome v7 .0 (chr-ID supercontig_37; pos 45140 to 45834 reverse stra nd)
cccaaaggcgtaagcttgctcaatatcaacaacaggtatgcctcattctcctttcttttcctggactttttttgcattaattttgttgttttcttttccaaattgtctcagaatttgtggaattaaatcttggtgtcttattcacccttgtgtacgaggagaatagggagttctgactttccttttaatttgtctaactgtttgttttggtgcctggaaactggagcaaaagggaaagataaaagggtgaggaagaagttggatttgcagtatggttgggatggtagtgcaatgaccaattataatctctttatggttctgcagatccaatttataaataattttgccattccaattttgggcattggaggttgttgcccattgcccaactggaagaataaacttgatcccttaaaatatgaagcatatgctcagtttagagtcttttgacaattgtctcaaaccatgctcatctgctgttttctgtttcagttctggctaactttattaaccttataatttttccacagctcttgttaataaatgtatctggtacttataatgagatttttcaacaagagttgccactcaaatgaatgctctgccctatgacttgtataattttttatattattctgttttgcaatgtccacttttcagcttgagtccgtcattgaagcagaaaagcaagctgc

SEQ ID NO: 74549 - DNA, 911 bp, Carica papaya
  Intron number 1 from transcript evm.model.supercontig_213. 13 (locus evm.TU.supercontig_213.13) derived from phytozom e v7.0 (chr-ID supercontig_213; pos 378831 to 379741)
tgaggacgccgaccagcttcacaaggcttttcaaggtcttcttcctgtatatacgaacatatatatatatatatatatattgttcactgaagttttatttttattggcttgttcttgtcattgacgtcagatcgttgatcatctgtgtctgctctcttgattgatgtatttggtttcctgttacatcttgttttccacgatgatcctttcgcgatcactcgtactatttgtggggattggagtacttttcatgtttacagttcagattaagttgcatatcgtcatgatcgatttcttgtgagtggcttttttgacatcttaagttactgtcttttgggttatattttgttttaatactgttattatatggttcatttgttgattttgatctgcattgttgaaggtctctctttgctgagtggtaaatggcaatgtgtttcttctgatcatcgccttttttgggaatcattgttctggaatattttttatgctcacagttaaaatgttggtgatctatagtgttagatctgttcgggatttgcatatactgcagtgtcaaaggttcttgacacccttattctactaatttacttcattagatttgctctttttctcctttctgtaattttgatttaagaaattttcattttgatcgagtaatttatatatcactcttatgacttctgatctttgattgatctaaagtcatacgccagaatacatcttgttgagttccagttagttgaaagtgaaaactgtctaggatttactggaaatgattcaaggtgaaattcagtctattttatgtagattcgaataaagcacgagtaatgtatagcaatcaatgaacactttttagagtttaatgtccttggtatggttttataacagttttgatcactattcgcagg

SEQ ID NO: 74550 - DNA, 650 bp, Carica papaya
  Intron number 1 from transcript evm.model.supercontig_36.9 4 (locus evm.TU.supercontig_36.94) derived from phytozome v7.0 (chr-ID supercontig_36; pos 739726 to 740375 reverse strand)
ctcatcgccgaggctgtcatcttattactccaaaggtttcataaccctcattttcattatctcctatgttattttatttttcatctggagattactataaatttagcagcagtagagttaatgatcgttctgtctcctttaagtatgcgaacttctcatggacatgttagattttgagttgatttggaattgtttcgtaaatcattttctatgttagtatttcgttatttatgataaggtttatgaagagggactgctaagttctcattgctcaccatagtaactgtaaactatgcaaccagctggattgtttatgtaaaattttccattaacatcatctcatagcacccttattgaataacatcttaccaacctataaactatggcagatgcgttaaaaggatttttctttttttttgtatctcaaaatggctttatttttgtttattttgtttcgttttcaatcagataatgaaagaaattggacaagatttatccgaattcaagtgtggtctggcccatctgttctgtaagttaaatttaaagccatatattctcttccttctgatttcacccttggatttctggaataaatgttgaaacataaattaatgttccagtgcatcatacaagtgcttctcttaccatca

SEQ ID NO: 74551 - DNA, 670 bp, Carica papaya
  Intron number 1 from transcript evm.model.supercontig_19.2 60 (locus evm.TU.supercontig_19.260) derived from phytozom e v7.0 (chr-ID supercontig_19; pos 2144298 to 2144967)
cattggatcttgtaaggacacgccttgcagctcaggtatgatcaacatattctttggtcacatggttggtatctgtactcttacatttcatcactttcaccttttttttactctcatgtgcattagttggcccagctttttgtttgaaacttagcaaatgtcttgttccagagatataatattatttttttctttgcagcttgatcttttttcatttttgttgaatattgacctacttctgacttcaagtatatacagagggctgttcttttgtctaattttcaatattaataagaagcgttttgttcagaggtagcagtatttgtgattagcatgcaagtattgcaataataactgctcttggctgatatttgtactatttaccgtggatatatgacaaattttgagctaactttcagaagtgagtttttcagcattttatgtagtagcgcttgatccattccttctcacccaaaggctgtgactatgttataggcatttatttgattcttagtagcttgattctctttgacttctgggagcttcaaaaagtatataattatgaaattcttgttggagctgaatagctggtagttctatttgtgaattttgctgttctctttcttaaaaaaaaacaattaatgcatttaatttcatattttgcagacaa

SEQ ID NO: 74552 - DNA, 535 bp, Carica papaya
  Intron number 2 from transcript evm.model.supercontig_6.40 8 (locus evm.TU.supercontig_6.408) derived from phytozome v7.0 (chr-ID supercontig_6; pos 3073099 to 3073633)
agtagaacacttcgagatacgcgaggttttacgctgtaagttcatatctgactgttggctcttttgtttttgctttttatcaaccaagttgttcttttgttgcttcatagtagttgcttttttgagtttgttattggttccccttctacttatatttgagcaactggaacctgcttgaaccccaatttaatagtttctctttttgggtatcattttcttaagtgaagaggtttcgtagttttgtttctattttagtagcaacaataatttgctttgtttcactgccttatacatcattttggctgtatgatttttaaggctatccagtagaattggatccgtcgcgtgtaagtcatggcttgtaggccttctaaatcacctatctgaacttttcttttcattgttgtaatccttccatttccttcataatttcacagattcatatttgtttgacataataaattcttgcaagtaaactgagaaagtgaaattggttgcaggcatactgcacacgattgtctttcaccgggcttta

SEQ ID NO: 74553 - DNA, 757 bp, Carica papaya
  Intron number 4 from transcript evm.model.supercontig_169. 36 (locus evm.TU.supercontig_169.36) derived from phytozom e v7.0 (chr-ID supercontig_169; pos 371223 to 371979 rever se strand)
acaaccgtgctgatcaaaagctgtaccaccttcaggttatttttctctctccttgtgctttcattttaatttctggcattacatcctttatagtgacacttggtagtgtagttgccatacagccctttttttaatcagagtaacctaagctaacttttgttgtcttttgtcaacattatatcacaatgatagaaccaaaactacagaaatgattagatgtactgaggcggaactcttatgatgttgataggatgcagaaacataaaaggcgaatacgtttttcttactaattagatggttgtgtcaatcacttggttcactatttcttctcttcaatcaattccctatggaaattggtgctttctctagtcaggaagaaaaataattgattttcaatgtgcaactaatgcttcaattctgtgtattgtgtaaagtgtcaggaagctatctcaaaatgatatttatttcaagtagcttggcaattggcttgtgattggatgcaggaattcttctgaaactgattgagactctcgtgacagtctactttgctttttttttttaattaaaggaaaaatagctgtttaaaaacatttgtagtgagaggaacgacttatttcaatcttatatttcaaagccgtggactgtcatgcatctaatctgagggttttgttttttcctcattatttttgctaattccaaaaagaatgttattggcattgcagactcctcaaactcctattgtgcgcacaagtgcgta

SEQ ID NO: 74554 - DNA, 1034 bp, Carica papaya
  Intron number 2 from transcript evm.model.supercontig_142. 3 (locus evm.TU.supercontig_142.3) derived from phytozome v7.0 (chr-ID supercontig_142; pos 9680 to 10713 reverse st rand)
tggaggagctggggggtcaaagtgtcaaccctgctgtaagtagcagtgcagtgactatttcctctttttcttcaactttgtttgtattttccattttgaaatacggaaatgtaatttttcttttttgttagaatctttgcttaggttcttctgatttttcttgtatttcttttaacgatcgaatttcggaagaaaaaggcctttctgatctgaggaggatttagatttcaatctgtcttggtcgaattatttgtgtaagattaccgtactagagctcgatcccttgcttttttcttccagtttctggcaacaaaaatgagcttgattttgattttcttattcgaatttgaccttcaatcttcagttctcttggagaatttttcgtttcagtagagaacgttgttgatttgtcttatatgtcgatagattagtttttatttgaatttctttttttttttttttaatttcggtctatgtaactaattccgcgaattcttggatagagctagatttaaacctgttgtgctggggttattagtttgtggtgaaaaatacagagagtttttttggtatcatgattatatatggtttttatttgacttgcaggctttagagcctcggcctcatatttcttcatgggaatgaatgtgaatgccgctgctaaacaggcatgagggacttcattcttgactttgaatatttagctgaaggattttgttggtattttctggaggcctttgatttttttgcagaggaattcaccgcgttttgtttgatacttacctccacaattgaggagttgatacgcttcctcttttgtctgatcttgattgcatagattcaaagctttgaactcagttaaaccatttattatagaagagagtgatttcaagcttagttagataaagtgagtgttgaaaatttggtccagtgattagctaaattggttggttgcacactgacgctggcatctatgggttccattcaatatactgttcattattgttgtgtttctagaggtaataggactctgt

SEQ ID NO: 74555 - DNA, 800 bp, Carica papaya
  Intron number 1 from transcript evm.model.supercontig_1843 .2 (locus evm.TU.supercontig_1843.2) derived from phytozom e v7.0 (chr-ID supercontig_1843; pos 5393 to 6192)
tgcaacaggtttagttatttttaggtggattcttctccatctaaaatatttaatatttatgtttttgcattttattcacaaaatttaatctgttttcaagatagctatacttttagaaggtgaaaattatcttgaacagacaaaagtttacaactgaaatgcattgacatccatctgttcatcttggagccaattttacttggtagttggggttagagtagcaaacagaataatgcacaaagtgatgtaaaacaacttgtataaccatgaaacctttttattagaggaaaattttgggaaacctttgggtggtctcccatttgatttgaacccaatatttatgagcttataagaaaactaaagaaaaagttttgggttattttgtaccagaaattctccaaaaacttgctgtatgtaacacaggtctgtcatttctcacaaaccagatggtttggcttctgacaattgcatttagactcagttttgccaatatagcaaattatagaataacttgttactgcttaaaacctgttaattattgatgctatcagaagtttctatcttctccagtaaaacaatagactatttttcatattaagtgtctgttcatatttatatgtaagtatcaaatggtgctgtcttcttgagctacccctgtttttatgattaaaccaatacattatttatttaagcttgtgcttttatctttcatattaatgtcttctgtaaacatctcatccagtgttctgtagctttcatttttgctatgcatctaactaatttcctatttatttttgcag

SEQ ID NO: 74556 - DNA, 739 bp, Carica papaya
  Intron number 2 from transcript evm.model.supercontig_89.5 6 (locus evm.TU.supercontig_89.56) derived from phytozome v7.0 (chr-ID supercontig_89; pos 761647 to 762385 reverse strand)
ggactgtctcctagtgagcttgttactgttcttaggtaagttctcttctgcaatttatttttagatatctaccttgtatttgttcatgatgtatcggtaacacttggatccaatttcctcaaattattgagtgaagaaaattttgtttgttagggtccctactggatcttgttattggtctttcaacataaaaatagtagagactgaatattgttctgagtttttcttcttctgtttactttgaaattttcttagagactctttaagagggaacccttcagtctctagagtgaggaagtactcttaacttttaaaggaatacttcatttgtaatctgtcccaaaaagacagcaatgtttatgaaaagattgaggttatttaagaaaaaaaagcttatgacaagattaaggtagctaccttccagtttttttttccagaatttatcctaactacctcttgtctttaatcttagacttattcttacatgtatattgttattgaatatttaactaccataaatagtagaaatttacagcataataaccaaatacataatttcttcctcctttcgtgcaccttatcagaagttatgatctgatttttggagtccgtaacagagttttgcaagtgctcagtggtctttgcacttttattttctctttccctataagatatgtaattcaacatccatgagttacatagatgcctgaagttatgattgtttctataaccaggagat

SEQ ID NO: 74557 - DNA, 855 bp, Carica papaya
  Intron number 2 from transcript evm.model.supercontig_162. 12 (locus evm.TU.supercontig_162.12) derived from phytozom e v7.0 (chr-ID supercontig_162; pos 69119 to 69973)
gctttcgtagcgtttttattgctactattgtgtgtgtatgtttgtgtgcgtttttgcaatgaatgaactcatgggtgcttctttgtaagttaggttgttgatgtttgtggtctttcttaagaactgtaagttcgatgtatttttgggtagttggctgaacttaggggtttggatctgtttaatttaagaggtatggttttatcagtttgttatttcttgatgttaatattaaggtatctgatctgcccacataggttttatcagtctgataagggtagttattaaatatctcttttaatagattttaaaagatagaaatctgtcttttaaaagtctgcaatgctattaatttatgacttcttctgttttgtattacatgtatttggggctgtgggtagacttgataacttctgttttcatgttttatagagctggttcttcttattacactagaaagtttacaatttttttcctggcttttttatgtgactgtcctgtaatttatgtttttttttgggtccccttctggaccaatttcccaagtctaatagggagtccatgaggcatttggtggtctgtgttatatctagatccttttttatggatacaagaaataccttgatttcaaggacttttctgcatttcattcagcagtcttccttttctttagttgctatagttaattcctttgatgcttttggtaatggctaactgaaaattcctcaactttttccattttacctataaaattcatatgcatagaatcttttcctgtgagaaagtattggaagctataaggattatagtgcatagtagcatttctacatgtgtaggaagttcttgtcagtagtttac

SEQ ID NO: 74558 - DNA, 548 bp, Carica papaya
  Intron number 2 from transcript evm.model.supercontig_70.1 7 (locus evm.TU.supercontig_70.17) derived from phytozome v7.0 (chr-ID supercontig_70; pos 142166 to 142713 reverse strand)
ctttcagtaccaattggtcctttgatttgaaccacgttttgttacggtttttttatgagttcatcgagcgtgaatcgtgcatttcttattgtgtattcttccgataaatctctttattcttcttgaatttctttaatcgtattaaactttctgccttttaatgataacttatggtttttgtgattgcgttggattgagaaatccggttctttgcttttcttggaggctttaattgctacctgttcatgttttgacaagaaattttgtttggtgacatcttttttcaatcttttggaacgttcgcctttgcttttcttggagcctttaattgcgatctagggttcacgtttggacaaggaatttagtctttttaacatcttttttcaatatttttgaacgttcgcctttgtttctcttggaagcaattgcagcctagtgttcgtttctttgacaaggaattcagttgtgtgacatctttgttgatcttttggaatcgtttgcctgtggatctaatctcctttttaatggttctatacaggcatatctga

SEQ ID NO: 74559 - DNA, 307 bp, Carica papaya
  Intron number 2 from transcript evm.model.supercontig_808. 4 (locus evm.TU.supercontig_808.4) derived from phytozome v7.0 (chr-ID supercontig_808; pos 3823 to 4129)
gtacaaaggtattttagttaaggactttcagagaatttgggggtgagaggaagtgtggcacatggagattcaaatgaatcttaatgattgggaaataaacgagtaataatgtattttgagctcttttccagtcattgaatgagagccatgatcaaccgatttggatgcttaactcaagtggcaccttttcggtagactcattttataaatactgaccaagaacgaagcaacagagaacaagtttcgtttttggcaagtggatagttcatgcccttccaacgattgctttctttgcttgggaagcagg

SEQ ID NO: 74560 - DNA, 543 bp, Carica papaya
  Intron number 1 from transcript evm.model.supercontig_60.2 8 (locus evm.TU.supercontig_60.28) derived from phytozome v7.0 (chr-ID supercontig_60; pos 319964 to 320506)
gcatcgactatccaaaacggtaacatcccacccagcagaacaaacccccaaaacatagcatagtggctctggctaataactacagctaccactaccttccaaggagaactagggaatcggatgtagacttaactttgtgattacggtttaagttttatttatttcttctttaaatctaaaagtctcctaaaattagtcaatttatcctatattatttcttttctattttattttattatttgtttaattattattttccattcattcaaaaattctatttttaatccaaattataaaatttccaaaattttgctttattattattttcctttttaaattctagtccatttccttcttttaaattaacaattacatttcattaattttacaattttctagaaattactacgcatgggggattttccccttgaacccacgagtgtgggatttttcccctagcccgcacccacaacctagaagggctgtctgcatgcacagaccctttggcatgtgtatgcttatcgggcctgtacagcaggcaac

SEQ ID NO: 74561 - DNA, 767 bp, Carica papaya
  Intron number 1 from transcript evm.model.supercontig_81.9 (locus evm.TU.supercontig_81.9) derived from phytozome v7 .0 (chr-ID supercontig_81; pos 44909 to 45675)
gtaaccagaaccgacctccacggagtccctctgctgtaagtctctatatcttttttctttttagttttagagattgcttggctgctgtgagaacagaggatgacagaggaaattggaaaatgtaaaatcatgatgcctcaaaagggatagcttttatcgggggtcattcaacttctcaacatgcttttactccttgttttcggagtaaagcttcttggattttcctccttttggatgtatcttaacggaggacaagtttaccgaattgaaatccaagatgcaggaccaagttggaggaatttatttagataacctatgttttgtgctacttttcactctaaattttttatatttatgattatgtaagctcattacaagcgcctttgttttaacggcgttagctggatcatggataccactcttctcctggaagagaacaactttctctactagttctctaaatttggaaaggaagatagtatttctaacaatagtgtggataaatccagaagcaaaacatgctggttataaattcagttttgaaactagaagagattacctatgcataaaagtagaggcccatattttcattttcaatttaattgaagcaagtggctcttctgtgtattttggtttttctatcccgaattattaattttgttatgttcttcacaatagaaaggtacgcaagtttatagttgagaacacctttctgtttggtttcattttttttctttttttttttttgttgattggcagaaaaagga

SEQ ID NO: 74562 - DNA, 731 bp, Carica papaya
  Intron number 2 from transcript evm.model.supercontig_6.38 2 (locus evm.TU.supercontig_6.382) derived from phytozome v7.0 (chr-ID supercontig_6; pos 2919224 to 2919954 reverse strand)
gtctctcttcaacagagtcatattccttctgaaaggtctacctgtttgggatttttgattctcattcttcagttgcatttaatcagaactttgtcaattttattgacgatacattgtgtattctgagtcttaacttatatgtaaagaatcgacgaataaaaaaactatttacagattatgttcgttgtcttcgtttggatgtgttacatccttgtctttttgttctcttgtccatttcattgctgaaaataagatgaaacattttttttttttaagtaagcacgtgaagagtcaaaatcgtatatatcattgcacttttagactactgttatgtgagagatatatattactttgcctctagatgtatccatattctggttgatctgttttacctattggtaggcatataaagaaaggtagaggcagaagtgccaatttcaatttatatttcttattggaaatcagtttgaggtgatcttattccttccattgcatgtgatgttctctttataaggatgacaataaaatctaaaggaggttttgatgatttcacaattttaacatttaacttcctctgtttgtgttacttgatatactgccgtgatggtttacttctcatctccagacaattgtgactgaaagatttgtaaagtatgtactagtgttttctgtaaactaattctcattctggatctcgtgttctgtagaagggggtgatttaaaagccttaa

SEQ ID NO: 74563 - DNA, 890 bp, Carica papaya
  Intron number 1 from transcript evm.model.supercontig_46.3 7 (locus evm.TU.supercontig_46.37) derived from phytozome v7.0 (chr-ID supercontig_46; pos 302978 to 303867)
gacaaggaggttcgtcttgttctcctaattctcttgttttttactttattggttggcttcgattgcctgcgtttgaagaaagaaacttacgagttgaaaatttctggaaccaatttgtgtttattatgttaattcgtttattagtttattcattgaaaaatatggagggaatctgatttctaaggggattcacatagtatgtgttgagattgacagtttgcatattttgaactctgatttgcttggttagattggtacattaggagattttcttaagactagttattgatttattgcaagttggaattttggctctaggatgtagattctctttacttttcactgcatataacggagtatatttttctaaattgtcaagtgccaacttgaaatcttaaatcacggaagattttgagtctgatgtgcatggctgttgatgctaagaccatgaagagagatgtttttaggctacaaatgcatgcgtagttttcaattattgtatacttttgtttagggaaggaaacattgtgggggaggatatagtgatgaccctcgcaaaagagtgggacattttttcccccaattagaaaagttaatttcattgaagaagaaatgtggtgacgatcgtaccccatgaactaaagttctattaacttatgctaacattttacttctctgtttctataagttctcaacaaaaaagatgctcatgtccatcctattgtatatgtagcaatttgaatttgtaaactgagcatgtgagttattataacaaagctttggctatgataaagatatgaagatgtgtattacttctcaaagtaatgaggtaaactaataactattatttaaaacttatgattttagctacttgagagagcacttaaaga

SEQ ID NO: 74564 - DNA, 659 bp, Carica papaya
  Intron number 1 from transcript evm.model.supercontig_64.1 5 (locus evm.TU.supercontig_64.15) derived from phytozome v7.0 (chr-ID supercontig_64; pos 128369 to 129027)
ctcagtttcttctgggggatttccgtcaacaacttgtaagtcgaacctaccatcttgttaaaagaacctgacactttcgaagagttaagagaatccaacttgccaaaagaaaagatgccttgcaaatgcaggattttagatgcattataaaacgtcgaatccaagttaggcatgtaatttttagatggaagcatgttatactcacaagtgggtcttggatggaagcgtaatttaaggggggtggggggaagcaatctctctttgaattggcttatagagcagaaatcaaattcctgattgcgagtggtttttctttgaatgccactcttgggtgtcactactggccaaaaggttgatgccccttaagtggaaacgttttgttgtgatagaagcaggatcttcaatcaaaaccttctcgctgtcaaattcaatgcatgttctccagtttgtgctatattttttgtggaataaggattaaacattgtggtgttatacatttctgacgctatttgcaaagaacaaacataggacagtttgtgtttctttcaagtgatgtaggtgaattgtcagaggttttagcttttaagtgcgtatggactgatttctagacgttgttgagaattgctttgcaggaaatccccaaaaggttttctcaatat

SEQ ID NO: 74565 - DNA, 639 bp, Carica papaya
  Intron number 1 from transcript evm.model.supercontig_9.94 (locus evm.TU.supercontig_9.94) derived from phytozome v7 .0 (chr-ID supercontig_9; pos 502835 to 503473)
attactaccgaatcgccgacaatctccttagacaggtgccttttttatgtttaattttctacttaatcgtgatcttaatgcctttttctttttaatcgaagtttgttaagttcaatggttcgtttttggagaagaattgttatttggtgtttaactattaacctttacctccattggagttgaatgttggtttttctatactagcaaaaatacaattctggcaaccacaaagcaattttggtacggtgtctggttgaaattttactatagagtactggagattagaccattttaatgctttcaaaatgagtataaaatgtgcgattctaagaggttttcacagaaccgtcattttgagttctcgctctttaagaacttattgccagtcttctataaaaaaattacaatatatctgttggagcttgtgggctgaaccacgttactttgttgaataagtatttaccactggataaatagggtctatgttaagctattctttgatttcagaactgaattcagtatcgaaagctttctaagttgttggcgtgccttttgttggatggcttttgcttttatactaagtggttgttactgtcattttcaggctcgtatttaccgggacgagaagaatattgtaga

SEQ ID NO: 74566 - DNA, 946 bp, Carica papaya
  Intron number 2 from transcript evm.model.supercontig_43.1 33 (locus evm.TU.supercontig_43.133) derived from phytozom e v7.0 (chr-ID supercontig_43; pos 1656270 to 1657215 reve rse strand)
aatcttccatacagttatctatcactgttcataaggtaattgagtaatattttcttcattactttcttgacagtggttctcaatcaaactttttctctgtagttttctacagtcccttgcactccaataaataaaggtttctttttgatcatatgttttatttgtgttcttccattacagatttattaatgcctttttcttttcctttcaaatcttctttgataaatgcaattatgaaatgatggcatgtattcataagtaaaaccatgaatggtggactgagttactgtgaaatgatgctctgctaagctggtttattaaatgtgctgccttccaagcttttgacttgtttaaattgcattattctgatctgtatctgctaataggaatcagtacctcacaattggattcatttgcttctcatgataaaattctaattctcttgatttgtaaatagttttttacatgcgtttgcacccccttggtgcttatagttaattgtcatttatattttttatttcaaaaaaattatacaatttcaattctcattttgattatgttatctataatttttgtttttggtgatagaaaaagaagtattattaggaattagaagagataaatacaatggcaaagaataaaatatcctcctagaggcttcacaaagaagaactgcaaaaaacacttagttacaaattctggtcgcaagcgtacccccaaaaatcagaatattatatgctaattgtaggaagaatttagacactaaaattttgagcaagaactgaaatgtccaaacaaatatctgctaattggagtaagaacatattttacctaatatgatatcagttttcagaccatgcttgatttttgttttgtttttgttttctgtttttcctacataaatattttagggagattgaggaatcagggatcaaggcattggaga

SEQ ID NO: 74567 - DNA, 389 bp, Carica papaya
  Intron number 3 from transcript evm.model.supercontig_753. 1 (locus evm.TU.supercontig_753.1) derived from phytozome v7.0 (chr-ID supercontig_753; pos 5711 to 6099 reverse str and)
gaaaggaaggcataccagggtaagtttacacactataagcacaggcttgaatgattcactagtaaacacatgttgcttatggtaggtagcaataactcaaaccgcattgtcacacacatatgcataagaaactatcatttgcttcaatacttttttgtttcaggtaacaatgtcaaaatttttataagaagccattaacaaaaactttaatccaaatattcttgaaattttatggaacctacatattcaaggataaccatgattgtgtcagagccactcagaataacttttgaatatttgttctactttcatgttatttttattcggcaaaagaatgggtagaaaaatgaaattgagtttctaaattacttttcttctccagagacttt

SEQ ID NO: 74568 - DNA, 671 bp, Carica papaya
  Intron number 1 from transcript evm.model.supercontig_576. 1 (locus evm.TU.supercontig_576.1) derived from phytozome v7.0 (chr-ID supercontig_576; pos 8811 to 9481)
aactttcaactgatcacagcacaagtgttgaacaggtgtgcttccacttcctctgaaaactttagatttgttttctattggatattatttttccaatttgctcatagatatttatcagttgactgtgcacttgtacacactgggaaaaaagatttttagtccttaaaggtgcacaaatatctgaactcttttgatcttttacacatagacaagtgagacacttcctttgttattgtaagataaaattttctttgaactgacattttgtgtacttgccatgcgatggtgtcggaaatccaaactggaatgtggtgccatatatgtcttgcaaatacatgaatgtgctgaacctcaggaaaatagaagtttcttatggtagatttgaagataagagcacacagaacttccatgcgaatttaaatctcagcaaatattttttctttagttctcatttttttctttgtattattaatgggaatactgcaccactccatctgtcgaaaacaagttcacttattattaaatcaaaccaaatattgactgctccgaagtagaaatgtattgaaacaaaagaaaaaagttttgtttagtttagcagttgattagttaaaaatcttgcttgatgatttccttaatacaggaaattttaaggataaaagctgaacatccgg

SEQ ID NO: 74569 - DNA, 888 bp, Carica papaya
  Intron number 1 from transcript evm.model.supercontig_20.7 6 (locus evm.TU.supercontig_20.76) derived from phytozome v7.0 (chr-ID supercontig_20; pos 846732 to 847619)
gaagtttctacagacttacagagatatcagcattggtattcttcccctctctctctctctctttccatttatatacaatttgaagatcgtgggcgtttgtatgtgtgtatagataagttagcctgttgaaggagccctaagatttcctcgatatattgaaaacaaaaaattaagctcaattattcaatttttaagttgctgtgagtatttctggggaaagggagatgaattttattgaggatttcagttagtaatagctcagctgaactgcaagcttatttcagtggatttaaatgataattttttacttttgaagttaaactgaggtattagtttggttgctatgtaagattgggagaggatatttggagcaaatgaattattttggaggatattatttgaaaacattagttttatgaagttatttttatgtaggatacccattagcggtaaacaatgatttaatttctcttgtaatcccgcatatttcatcttcacattttatcatttttttttggaatttgaaatacattgttccagttccacttgttcttatttggaattgaatttaattgttttatatttgaactaattaaaatttccaaatgaattccgaaaaatagtttattgttgcaaatatacctcaaaagatttatttttcactatttttgatgtcagaacatgcaagattgaaaggtaatttagttgtatattacttgctataattttcagttcccagttcccatgctgccatttttgggtggtttcaacaaattgtccttgtatcgacagtggatatttttctgtttatctctgttgttctggtatttgtaggccttatgaatattcaacagtgcaggatttgttggtgattccttaaacaggaat

SEQ ID NO: 74570 - DNA, 832 bp, Carica papaya
  Intron number 1 from transcript evm.model.supercontig_58.3 5 (locus evm.TU.supercontig_58.35) derived from phytozome v7.0 (chr-ID supercontig_58; pos 349592 to 350423 reverse strand)
aggattacgaggtaacatgttgcagctgaattatttattctatcagtcatactgagtttgggatttatttctatatttatttcactgctgcagaattacacttttacctttatgtttcttcaagcaatattcatctttttatttttcctctctctgtatcaactgataatcaaataaatagcataaaggcattctcaaacaagatctgacatgattccaagacttgactctagtgattctgagtttatttagatgtcggtacgatgtttttaggaccctactgcacagtactaacaaattagatattttatcactcgttgatcatatttcctcactggccacatattaattatgcagcaatatttatattttgtaagctacaaaaaaactatcaaaccacaaagagtaatatttctaagcattctttgaccaacggacaaatttagaaaaaccacgcataatgaatatgttgacgtggcttgattatgaggatatcttatttatattctgatagatattttatatatatcctgagatatttaatgtttattctataaaatattttatgtatattttaaaaagttttgtgagagaaaattttttataatttttatatataaaagatttacagctttattggttatgtattcttatttttcatagtaaaaaagtttcttctcaatcttacccgtaaatgtaaacatatttgtcaaatcacgttaaattttgtgtcttttcttatttgtgctttactttattgtaatcgtgtgcactttagagattaatttttctaacagagagcagaggtggcggcagtttagatcaagagcca

SEQ ID NO: 74571 - DNA, 823 bp, Carica papaya
  Intron number 1 from transcript evm.model.supercontig_69.5 5 (locus evm.TU.supercontig_69.55) derived from phytozome v7.0 (chr-ID supercontig_69; pos 686290 to 687112)
agagggactttcttgttcgtaacaacggtcaacaggtgattgacttcgttgcttgggtctgagactgggaagttttcttttcttctttctttagttctttagtagctctagtttctgtgatccatgaattttctttgctcaatatgtgatgttgtacaaagcatgtaggctctacaggattgattatcaggggaagttcacgtgatcacaattatcatttctgaatttaattgagagtggctgcaaaataggattgatgtatttgtggcatgggaggatgttaaaaccatttctagagatttttcttgtcatttggtaaatacctgtctgcttaactgtaacttagcaggaattgcaggtaagctctagtgttagggattttcatagtggacgataagtggatttagtttgatatatggagggtataattgtgattatctaggttatctttagaacaaataaacttggtgtggaatttatttggatattttaatttattttgactgagaaggggtgagggatctttagcctttcatggtgaaaataagtataagttgccaaaagaattttacaaacaaaattaatttgtccctaaaagcgttaacttgcgtaaaattcatttttgtgtaggtgaactgtaaactgtattcagtgaactcggttagatgattttttgggaatggaatgagttctattaattgactcaaaagtgtttatggttggccacatgtctcttgttagaggtatgaatggaacggaaatcacatactaaattcctaattttacaggttaaaatcgatagcctgaaggggaagaaacttgg

SEQ ID NO: 74572 - DNA, 902 bp, Carica papaya
  Intron number 1 from transcript evm.model.supercontig_92.1 4 (locus evm.TU.supercontig_92.14) derived from phytozome v7.0 (chr-ID supercontig_92; pos 169018 to 169919)
tagctcgccattttgatatcgttgctcgttgtcaggtccgcctcatctttcttatacatgcattagcagattcttctctctatatctccgaagaacattatctgttttggcttatgttttgcatgagttgataggtttaaattcgagtgcttgaattggtactgtgcaattaagtagggtgttttccgtacaaggagttgaagttggattatcgtcttaatctttaagttgtgctattttcaatcaaattgatttttttttgtttttttttttattgagttcaaatttcaatagccttctttttaattgcttctggtttctaaggtatgttgttaattatttcttgatgtgtgatattaaataatgagatttgtgttgagaaatcttggatttcttagcaccgagcatgagaaatactggaagtgtgaagatactgaaactcaaggctgcactttgacatgttgatacggggttcgtcctcttgtttctatggaagatttagtggaacttgttgatatattaatagacttgtaaatgttgtaaatgggtggcatctcgttggtgcctatattaatacaattttcaaacttcatatttcaaacaaagtgctacactttgacccgcctgatcagcactggagtattattgacaattgggggaaatattttagtacaatgacaacttagtcttgtgttcttagtcaaattctcatttcatcacatatgcaattgtcttccattattctctcctgtttccatgaacaattttttattgcagctttaatgaatggactgtattatgatcatctggttgaactaatggttcttacttggctgttttgattgtttgtttgcaaacttctattctgaaatatagcaattttgaataccagggcggagcta

SEQ ID NO: 74573 - DNA, 496 bp, Carica papaya
  Intron number 2 from transcript evm.TU.contig_34934.2 (loc us evm.TU.contig_34934.2) derived from phytozome v7.0 (chr -ID contig_34934; pos 1855 to 2350 reverse strand)
cctcgttcatctccaagagtcaataactattccaggtaataattcttaatttctttattttaaaaaaaaaaaaaattgtttcagacagttgattatctgctgtttctttcaatcaattgtttcaatcttctaacttgattgggaagactaactctttgaatcttcaagcttgagattggaataacagaagttcaatgcaaaatagaaattgaatatgggtgcggtagtagatttgaattaggtgaagtaaaaagaaaaagagtgaataatagagttgggttagtttctttgttttttcccatttggagaaaatgattgtgtctgcaggaagaaattagtatcagtaaaattttgaatttaatcaaaattatttttgtgatggaagttgggaaatgcataaactctagtgttatacggagaattatggtttatgatatcccaaatttccatttttatcatgatatgcctgttatgttactgtgcaggaccaatattt

SEQ ID NO: 74574 - DNA, 567 bp, Carica papaya
  Intron number 1 from transcript evm.model.supercontig_76.4 4 (locus evm.TU.supercontig_76.44) derived from phytozome v7.0 (chr-ID supercontig_76; pos 879063 to 879629 reverse strand)
atatatctcatcttgctcttgatattggaggtataacttgtgtttttatttttgttcgcctgacaattccatgatttgtgctgtgatcttttatttttcattttttattgttgctacatgacgatttgtttgtttgagttgttgtttgttccttggttctcatgtcttgggctcgttactcttaggagaatggagataaaagagaaaacaagatttggtgatcataattttctaatttgcatgcacggtttctctcttcttttactcccctggtcgctttcctaataccatcatgtggattctcctcatagttcctatgcaatttattctgaaacttttaggaaaatagaacagataactcttcaatttgaccgttaatgcgagattctctttcctcctattgcccccactcctccccaaggaagaaatgaaatactttaggacttctggcttttcatctttttcttatttgaaaatgatgcggtttctggtagtatgtcgagcgcataaaacattcaatttctattggcaggttctctaattaagttggtatatttttcaagacac

SEQ ID NO: 74575 - DNA, 486 bp, Carica papaya
  Intron number 1 from transcript evm.model.supercontig_48.1 19 (locus evm.TU.supercontig_48.119) derived from phytozom e v7.0 (chr-ID supercontig_48; pos 689515 to 690000 revers e strand)
tctgcaactcggttctcatcgacggtggcaaaaaggtaaattaaaaccaactcctctcttttctttttctcgggaaacaaacagaaaatcatgcgagaaatgaaccatttgattcgtattaattgattctgcgtttcctaatcaaaaaaatgatctgggttttgtttttttttttaaacagaagagatcttgtttttatttactgtataacaaagctccaagtcagaacatggttcgtactctgttttttttttttttccttcctgggaaacaaacagaaaaaaggaaataactttatccgtacctgttgattctgagtttacaaatcaagaaaatattgggtttttgataaaaaaaattgacaggtgacgacgatgacaccacgaaaattgattaagtttgtttttcgattatgggtgtgttcatattttttctcaactgcgaaaaacagagcttcaaattagaaaagtcatctgggaagaaatc

SEQ ID NO: 74576 - DNA, 424 bp, Carica papaya
  Intron number 3 from transcript evm.model.supercontig_152. 46 (locus evm.TU.supercontig_152.46) derived from phytozom e v7.0 (chr-ID supercontig_152; pos 348551 to 348974 rever se strand)
ccagcaaatcaaagatttgtccttctttctgacaggttgttaccttattgtcatactttgctgatactattagtggattgccttgcattttctgaatgttcggtgatactggtcttgtttcatgttcttttgttcaaagattaaatttttgttgtttctgacttaatggcttctctatcattataaacacttagtacatgcttataaacacttatacatgtgattcgtgaataaaattgtcttttgaaagttgaaactaccaccaagacttcttcattctcatttttcatttttgaaactggtggttgtttgggtaaaggcattattttgattattttacttttgagagcataaatggctaataatatctctttctttctgttttgcagctgtattcccctgtacaattttagctatatataca

SEQ ID NO: 74577 - DNA, 618 bp, Carica papaya
  Intron number 2 from transcript evm.model.supercontig_5.34 4 (locus evm.TU.supercontig_5.344) derived from phytozome v7.0 (chr-ID supercontig_5; pos 3228294 to 3228911)
aagttagcagagaacacttgtctggctttaaaggagtgagttctcaatctctgttttttttcctttccttattcttttctttcactttttttttttttgtaaccaatcacatttccatttacaatagttcaatttagtaaggtaactgatgactatgtctcaatttgtagcaggaacatcgtgcattaagtttggtatataaatgaccttttgattgtcagttgccatgtcttaacacaattcaggttgagcacatgctaaccaataatcaaataataatttttgtccaactttagaaaatgcttggttaggcaacaaaaagagttggcctgtcatctatggttccttactttgtctgtttctatttgcattagctttacatataagcttctgactgcatcttgcggtatattcttaagtggctagtatcagaaaaacatagaggtgaaaaggatatctggataagctaagtttctcgtctatatttatggtttctgggatctagttttcatgtttctacatagctaactctgagaaaagtttgttattatgctataagattgttcaaagcttgatgattcatgtctactgcttgctgcagcgtgttttaaattatca

SEQ ID NO: 74578 - DNA, 866 bp, Carica papaya
  Intron number 1 from transcript evm.model.supercontig_18.1 12 (locus evm.TU.supercontig_18.112) derived from phytozom e v7.0 (chr-ID supercontig_18; pos 933240 to 934105 revers e strand)
gcttcttgcaagtcttctcttatcccgtcgtgaaggtaaattaaatttattcggataaaattagttaattcgttcaattttgttttgttaagaattatttattacaatcttttatttcttttcaaaaattaaaaataattacacttaaatgtattataaacttttccagctataaaattattttaataaattgtttgttaccaattgtttcaaaagtctcatatctttataatttttttgtactctataattattaaattttatataaaaattgaactcaaatctaaagattacatattattaataatttaattttaatttttaacgaataataatttaatataatagattattagaatagtgatgtttgatctcataaaaattatattttattttaagtaatttttttttttttttaataaaaatttcgatgaccgtttaattcatctttctcttaccactctcagaataaaaaattgattttttttttttttttttgacggagctaagttgatcgatttatcggatcgtagatcgggactgacagggtttgaacccgcagcttccgccttgacagggcggtgctctgaccgattttgaagattttttttcttttttatgagatttttattcttgttttaattttctcactaatttattagcatacataatttattttactatccgtatgagatttaatttatctctaataccttaatttatttttttaatacaataattaaacatatatacatagtataattatatatttttttaatacaatatatatatatatatatgttgatttgtgtttcgattgggcggttttagtgggttgggatccgaaccaatttagagttgccgag

SEQ ID NO: 74579 - DNA, 794 bp, Carica papaya
  Intron number 1 from transcript evm.model.supercontig_63.1 8 (locus evm.TU.supercontig_63.18) derived from phytozome v7.0 (chr-ID supercontig_63; pos 563601 to 564394)
atcaaacttagttgagctaagtgtgaaagagcaaggtaaggaaaatactaaccctacaattctcaattaaaactctagtgtagatgttaataagtttccttacccatatagaattagaaaagataagaatgatgctaagtttactagatttttagaggattttaagaaattacatattaacattccatttgttgaggatttgatgcagatgccacaatatgcaaaatttcttaaggatatcctttctaataggagaatgattaaggaatatggcacagtaaggcttattaaagagtgtagtgtcattatacaaaataagttgcctataaagcttaaggatctagggagtttttttgtaccttgtgaactaggaaattttaaatttagagatgcattatgtgatttgggttctagtattaacctaataccattatctgtttgtaagagactcaaccttggggagatgaaggagacacacatggttctgtagtttacagatatatcaactaaaagacctatgggagtcattggagatattttggtaaaagtaggagagcttattttctctatagattttattatacttgatatggatgttgagtatgaattatcattgattctaggtagacaattctcagccgcagctacagcattaatagatgtaaaaaatagtaaattaacccttaggttcaatgaggaggagatagtctttgatttaaaaaagataatgacaaatctttctattaatttggatgatatgtgttgtgcaattgatattattgatgagtgtgtag

SEQ ID NO: 74580 - DNA, 351 bp, Carica papaya
  Intron number 2 from transcript evm.model.supercontig_52.7 4 (locus evm.TU.supercontig_52.74) derived from phytozome v7.0 (chr-ID supercontig_52; pos 666527 to 666877)
tacaggttagttgcagattcctctatttgaaatcttgttttcgtttattttctttttctttttctttttctttttcttttttttcttctttattttttgatctggatatcttaaatccatttttagttatcttcttccttctctgcgattgcggattcgtggagaaggaaaacggatatacctaaatatgtagatctcgagtacgtcgtcgtcgtcgtcgttgatttagtgtttgattgattgatttatttatttattcattgtttggctggacggaagattaagattgacgcaatggataattttggtgttgcagagggaacacaccgttttgcagcaaggagtgcaggc

SEQ ID NO: 74581 - DNA, 434 bp, Carica papaya
  Intron number 2 from transcript evm.model.supercontig_21.9 (locus evm.TU.supercontig_21.9) derived from phytozome v7 .0 (chr-ID supercontig_21; pos 183336 to 183769 reverse st rand)
tgggtaaccctaaacaggttaatttctagggagaggtaaaatgaaaaacactaacatctatatttggatacttaaaactttttgatgtttttgattcatacatagttgttaaactatactaatttctaccatgtatatcttcattttctaccatgtatgttatactaacctctatatttggatatttcgaactttttgatgtttttgattcatacgtagttgttaaacctaatttctaccatgtatattatcattttctcggtttctgttagatttatctatatataatagattaaaccgactcttccaaaattttaaatggataagaaattatcaatgtacattaatagtaggatatctttttctgattcatccagaagaagaaaatgaatggattatttgttaatgtaggttattttgatggtagattatta

SEQ ID NO: 74582 - DNA, 1012 bp, Carica papaya
  Intron number 2 from transcript evm.model.supercontig_43.1 48 (locus evm.TU.supercontig_43.148) derived from phytozom e v7.0 (chr-ID supercontig_43; pos 1821703 to 1822714 reve rse strand)
gtggacaaaccaagcctgtcttccacaagaaggtacttttctttttgtttttccctgctattgctaattcaccaagtgtaattctaagtattcccgtttggatttttaataatgctaaactttcagtgattaatttatttactcaaacaactttctttgttgcattagtgcttgctgctattttcatgtttaggatttggtagttatatgagttagtagttttcaatagtagacacctggtgaacggtgaggaataacagttcggttctaatttacatgtagtcgttaaagattgattttgtttacttgtaatgtgaggaagattggttttgttgacttgaatcttctcttttttgtgttttcattatctgtattacttcaattcttttcgctttaaaatatctctaatatacggattaaattttgttgtttattaacttttatttcaagttagtattaattttttttgtcaaccttttgagcaactgattgtttctatgcaatgtcttcttgcatatagaaggacatgaaaagaaaagaaacaggcattttctataatagacctatcaaataatatgctttcaaaggaacttaaatccgacttatataacacgatatgttactttgcatgtagattttactccctattatctctaatatgtaatctttatttgaaggaaaaaagaattttcttcatgaataagcatgtctatggaaatgaattgtccccttttcttcccaattaatcaagataaccttgtcataatatatcaatttcttcatgaataatgacacccaaaaaaaattcttcatgaatatgaggatagaaataaatcattcatgaagatgagcttgccgaacaaacatggtttcaaaattttctttctatacccacctcattgttgttttaaaagattcaataaggtccaagattaactctaacttgcctccgggtcaattgcgtttgctctttacaggcgaagactactaagaagattgttctgagacttca

SEQ ID NO: 74583 - DNA, 944 bp, Carica papaya
  Intron number 1 from transcript evm.model.supercontig_20.8 9 (locus evm.TU.supercontig_20.89) derived from phytozome v7.0 (chr-ID supercontig_20; pos 1025227 to 1026170)
aggttgaccagagcacgctctttgacctcatcctggtacacgaagttacccatgtctccttcttttcaccttttgttctgattcttttacctcgttctttatgtttttcattacctttttctacggttatgtcaattacttgggtgcttttatgttttcttctttggttctttggttgagaatgctgcattgtccagtagcttaggtttttttatcggatattttttcttttgatttagggtttttgtatagttaattgcgtagtttgatttttctaattagttcttcgatctctttttcatgaattttacttggattaacttctatctggatccacacaatttctcttttctttgtctgtttgtcctatttgtttgtaccaatttatgttcgcgattatgattaatagtgcaatttttttatgaggttataaaagttctagcacattttgggaaaagatcttgctcatagattgtcaggttttgtctacggattcctgttttgccgcatagaagctgattaatggagtaagagaatacttaattgggtttttgatggaggttggctttagcccagttctgatcatttaagcaggttttgtatgtcttgattaatgtgttgtttcaaattgattcctgccgtggttatttgttggaatacattcgttcaagtggcaatcacctaatgcacttaacaataaccaacaatgcaatagagcatcaaatgcgaatagataggttgtctctgatattaatatatgttgttgattgtaggagatttataaaaacggatctaaaaatagcagattgacaccctgcatcttcctctcaagttggtaaaaaaatacagattttggtttgaatatttactcatttatctaaccttaaggggggtattatgttattgcaggctgcaaactatctgaacatcaaggggctgctgga

SEQ ID NO: 74584 - DNA, 929 bp, Carica papaya
  Intron number 1 from transcript evm.model.supercontig_42.5 7 (locus evm.TU.supercontig_42.57) derived from phytozome v7.0 (chr-ID supercontig_42; pos 546160 to 547088 reverse strand)
ttggtgtatgttattctctcgctctttgtataccatgtatgttaatttgaaatttgttcatactgtatctctgattgtctatgcttgcacatgtaattttaaccaaaatgaggaatacttaaaccgctcaatatctttccttctataagtttgtttgccattggctattagttattgagtttagtttctgcatatgttttatgttttttcctaaccctttttttcaaaaataattttctgtgctgaacttaatttcttttatccatctctgcgagaatgttttattcagctgctactttagtacgtttattggaaagagggaagtggaggaaaaaggaaatctagacatggttgcgttcattcaattatttatatagaaatagtaattaatggtaatttatttgaaaaaaaagtaattaataaaaaaaatggaagaatgatggacattcttccttctaaaaattttgaatggagaaaaatgaggagaaaggagactactttaaaattttaaaagaaaattttctattttatccttgattatttatttcagagtctatcttatctctctattatgatggaatattattggctgctttcttttttccttttatgaaactaaaacaaataaaatataataataatttattctcttaagaatctctcattttctttctttccgcattagttctttactgatttttacttgatcataatgtaaatgatctaatcgttaaagaaataaaggacgtgtcaatcaattttattgctagtgaatgtataactagttgggtttccgaattttatgagttaaaactttctcttcaagttaaaattctagctttgctactatatattttatgtagctttcatgtttgattgtcattttttacttttgtgtctcaaggggaatttactgaaaaatgtaggga

SEQ ID NO: 74585 - DNA, 935 bp, Carica papaya
  Intron number 2 from transcript evm.model.supercontig_74.5 1 (locus evm.TU.supercontig_74.51) derived from phytozome v7.0 (chr-ID supercontig_74; pos 453877 to 454811 reverse strand)
tggtgaaaactagattccaaacacaggtactttatgtacccagtcctccccttccaccaaacccccaccccccctaccgagtccctaccatgtccagtactgtcctttgctaactttaataagttaaaatatgaaagcacatctgtacaaggtctgggaaaagcaaattatttggaggtccttgatgtttggtatagttatagttgagtttattatgtttgaaaataacaatttagtcattttatcatttaatgttatagaaagtaaaaaataaattaagttacctactttgataataggttctcatgcatattatgcttttcttatacttctaactcctgctttttctttgtcatctgagctgaaatcattgtaactttattgctttttttcttgtggaatcacctactatgctactgttcttattattccaattacgtaattagcatgtaacatgcacttagttatcagttaacgctgattaagaagcaaaataagtcaacgaatctgtttattatgcagagatcgaattattttaaaataatttacccagttgtaattatatcatagcaactcgatctctataaaatatctgtttgactcaattataataatatcataacctcaaatatattaacttaatttaccatatttggatatcagaaccacaggctgttcttctaatgtgaccaaatgacctgcatgctaaggaatttaattatctccacttgaataacagctgaaatattaatgttggagacattttatgttgctttcacctcagtagcgtggaaatatatgcttacatgttacttccttgcctgtttgcacctctctggcatttgaaaccctagtcctgtataatatttagttatgtatgttttaatgtatttttcctactatgcaggttcctggctccaggagccaatataaca

SEQ ID NO: 74586 - DNA, 513 bp, Carica papaya
  Intron number 2 from transcript evm.model.supercontig_53.2 1 (locus evm.TU.supercontig_53.21) derived from phytozome v7.0 (chr-ID supercontig_53; pos 108795 to 109307)
tacaagtctatcagtgcacggtattttgcattttggattattctactcactgttattttgagtttttttttttttttttcattttaaatgtttgaataagcttgtcttggtcttacctgattctgctccttgtctatgtggaataaagtgttttacttgtgtatttggaagggaagcttctctgagttgggttgagggagcagtgctttttcttttcgtctcaaagttttgggaacggattttcttatgtagatggcttaaaagtcaaacctggcattcactgactatcttagcactttgttgtgtgtttgacaccattgcttgtgtatttatcctaaacgcattatcctgtacctaaacttatcctgaagagcaaacacttgcaaactaagtggtgcagtggacttcatatatgtatacattctgtttttatctccataatcatgtaaaagtttctttctaatatcaatttgaggcatttgtgctgacgcacatgcaaactttacctcagct

SEQ ID NO: 74587 - DNA, 348 bp, Carica papaya
  Intron number 1 from transcript evm.model.supercontig_5.17 1 (locus evm.TU.supercontig_5.171) derived from phytozome v7.0 (chr-ID supercontig_5; pos 1437103 to 1437450)
ggccaaactctgaagacactagcttctggtaattccctcttctgctaattaatctaaaaaagttattgttatattctaaaaagaatttacaaattttaaattaaaaactgaaatgttttttaaaaaataaatattataaaaccaataatttaaaatttaaaataataatttgttcattctttaataacatagtctaaagtgtgtatgcatatataacgttagggaattaattatttggattttgttttagattaagttgaatactgtgtcctttattattgataaaattaatagcttgtattcattttgattattattgtcttaactaatatttgatatttttaggaa

SEQ ID NO: 74588 - DNA, 784 bp, Carica papaya
  Intron number 1 from transcript evm.model.supercontig_166. 15 (locus evm.TU.supercontig_166.15) derived from phytozom e v7.0 (chr-ID supercontig_166; pos 84653 to 85436)
atctcaaaagcaagatcattaagcaggcaagggaacccgctatcttttctaaatgtgctgttatttgttaggtgtttgtcgtcatttgctgtgttttcttactttttactcttaaaattgaaccctagcactctatgcgccttttagtggagaatgaagttctgatgctaggacgatttagtagtttgttattggagtttgagcaatattattctccgtttcgattttcttcgaactgatatttcttatgtggttattgatttttcgttcgatattaaaccctacaaacttttaagcttgcagttggattgcggtaaaatacaagaaagaacgaacaaaagaattttatttttttaaaaagatttttatacatttggttattggaacttttactttgtccagcttaactgagttgtggaacactaaaaacagggagacaagtattgtgtttggctccgcaaatggcagtcttttctattttttttctaagagaagctagaagtcaagtatgttaaaaaaaaaaaggttcgattttgggaaacagaaaatatgtggttttgtgctaattaatgtcatggcttcgagattaggtagaactttcactgttaaatttaatggataacaaattcaatcatgacgtttacaacttggaagtttacttgtggcttgtaagtgtgatatacgtaccaaatcatactacatctttgctgttaaacaagtaaggtttgaattttgtcatttttttggcaactcttcatgttgcaggttgaatattatttcagtg

SEQ ID NO: 74589 - DNA, 905 bp, Carica papaya
  Intron number 1 from transcript evm.model.supercontig_9.29 4 (locus evm.TU.supercontig_9.294) derived from phytozome v7.0 (chr-ID supercontig_9; pos 1995238 to 1996142)
gcggggatctggaaagcagttattaagtgaggtatgcttgaatatgtgagaagtatatgtattgcaaatgcatggataggtaaatcaaaagctaactagaaaatgagtctacgaagaaagttttatcttaatttacactaatttgtagacatttgagaaattttcataggtgaaaatacccaagtttcctaggaaaactcgtgttatctatatacacacaaaaatttcatcctgtgttccattttttccttttgttatttaacctcttttggagctctaaattgatagacagaaaaacaattaaggccttctctgactttccacttctcgcaatgtcctgatagaacaagcctcctgaaatggaacaaggaataaacaaatagaaagtgaatattttctacctcaagaacaagaaattaagtctggcttatatttttaaaaattccagtgatgtataagattaccatcttgttctgttttgatggcttgacctgatttcatgtgtataatagttatttaatccaaatctcttgtttggatctcacaaactctggtcaaaattgagtttaccatcaaaataactagaaaagataagtttatttatttttaaataaaaagtgaaaagttaagttcattagttactaacttttgttgcttgtattgatatcaccattgccaaccggggcgagtgatctgtggtgatttcaccatctaattgttttgttatccaaaatttggtcccgagtctagtagagactggcataacgacatgccacctttgttagatagcgctaatatatttgctggttcttcggtcatatgtttaattagttcaaaatcttttggtagtgttttagttgctgcacaaagatctctgagcccatttgctagctgacctttgcagg

SEQ ID NO: 74590 - DNA, 350 bp, Carica papaya
  Intron number 1 from transcript evm.model.supercontig_50.1 43 (locus evm.TU.supercontig_50.143) derived from phytozom e v7.0 (chr-ID supercontig_50; pos 1369197 to 1369546 reve rse strand)
cttcaaggactctttaaatccatgtaatattttcttgctggtcatatgtaattatctgaatgagcatatgtgttgtgtatatacacacacacacacacacacacatgtatgtattgttatgaaaagtaatcttatttcatgatatagtttataattagattaatctaaaacacatatatacatataaggttgtaggaaatgaaagttaagcaggccctaggctaatgactaccaatatttgattttctcaagcaggtaaattgagttcaagagagaagattacttgcaggtctgttgaggttgggtttttttaaaaaaaatcttcctgaacgtgtgtttgttgcagaaat

SEQ ID NO: 74591 - DNA, 846 bp, Carica papaya
  Intron number 1 from transcript evm.TU.contig_39061.1 (loc us evm.TU.contig_39061) derived from phytozome v7.0 (chr-I D contig_39061; pos 778 to 1623)
gatagacgggactggtctcaccgccattgttacaggtcaatctcagttctctaatttttttttttttttttgtgcatgcttttgtttttatgtattatggtttgggtttacttttcattttttgttcttacgttgtcgttgacattgagtaaacccttttgaactcgttgataatggtgaatgactagttcagggttggttgatgtgatggatacgaaccctaataaatatgccttaatagctatgttgagtacccgagcttggattcgtgagtcgcatgacttgtataattgctcattccattacaaaatgtacaagcattttagacattttcttatgagaatttacttctacgaaagtaagctatatacggaacaaatatacttcccctataatttcttctagcacattttaattatgagagaataaaaatctcttacaatattgtaaaaataaatactttaattcttacgcaatttttctcaggtagaatttaaaattcatcctgttttaaaaattcaacttttatggttctgtaacagatctttaccttgccataactgttaaaatacacaaggaattcattttgatttccacaaataaaggtcatttgttctaaacacaatctcaagttaggttatgatatttttggctaaaagtttcgatgaccaaactcagaggatattgcttttaggacaactcaatcgggttttgttttatttttttcccatactggatactattggtggtgcatagcgcatgaagcagctgttttgattagtttaagtgttgacaaagttatctgcctgtttcttcttgttttgcttttcgaaataggtgcatcaa

SEQ ID NO: 74592 - DNA, 639 bp, Carica papaya
  Intron number 1 from transcript evm.model.supercontig_7.89 (locus evm.TU.supercontig_7.89) derived from phytozome v7 .0 (chr-ID supercontig_7; pos 810290 to 810928 reverse str and)
gtaattcaagtttaaatagctcaatttgggccaaggtatgaatttgagacttgtattaaagagaatttgaattccatttctgagtttctctcactgttaggataggtatatgattatgttgtgagtcaatgaatgaattgaacaatactgctttggaagctgcttagagctctattgcaactatttaattaaagcaattatgtggttcacaaaagactatgtgagagcagctctctccatttaatgggtactaaccaaatgatctgcaaaccagctaacttattcactgagtgggggatgcttcgattcatgcattatcattattttttcttcttgtcctaaagtctctagcaactactattgttgttttgtatcagtgtcgttatatgcacaatatttcttcttcgttgttaggaaaggttaagatatatcttgaatatgaaagacttggacatgtgtatgagcctccacgggcaccttgctttacgttttcactttcaattttgatcagccgtttaagtgggtcactgaagctttattctgccaaggaattaaaaagttgcaaagtataaatataacactctaatgcattatcgatgcttaaattattttcgtatctcattggatgcatgctgaagg

SEQ ID NO: 74593 - DNA, 900 bp, Carica papaya
  Intron number 2 from transcript evm.model.supercontig_49.7 8 (locus evm.TU.supercontig_49.78) derived from phytozome v7.0 (chr-ID supercontig_49; pos 529154 to 530053)
aacgccactgctcttttcctcttcttggctccgacgtatgcaccttcaaatatcatactttgctttacttttttctttaatccagatcaaatttgttttcattcactttttaaaatcttaattacttaatgcgtatggatttgattttttaaaattttaaaagtgtaatttgaaattgttaattgaatatatatgtattagtatttgtttttatctttaatgttataattctagttgtctatttatatttcaaataatatatgtacgtaagattatctatataaaattttttaaatatataaatgtaatttaaataacacataaaatctatatatatatatatttttaatatttgtctttatctttgctgttgttttttaactttagggttaggattgcttatttaaattttctaactacaaaattttccaatctgatattaatatacaagttatctttatcttcttctcttttgaagcttataaatagcaaaagtttgcattaatcaccctcatattttccattatttcaattatcatatgaaatctgaattttaccctaatttattcgataacattaagattttctttttcacacaagaggaagaaagaataaacatgtgatttttatcaacaaaaaaaaaaaaccatgtctcaaaaattgggcttatcaacccatgtgggttcttccctttaaatttcggatttggcaggtgtgtgtcgtgccaattttagaacttgttttactcttctcttttaattttctacaaaaaggttttttacaagttaatgattgtaattagtagtttctagttaatgtttatatagataagttagaaattaactaatccagttaaatgtgtgattgcatgcatgtaataggatcacattcaagaggatc

SEQ ID NO: 74594 - DNA, 570 bp, Carica papaya
  Intron number 1 from transcript evm.model.supercontig_5.16 1 (locus evm.TU.supercontig_5.161) derived from phytozome v7.0 (chr-ID supercontig_5; pos 1318837 to 1319406)
ttccagttctgtagaagatctagcccctactattggtacttccttagcttcctgtttgtttctctttcttttattctgagcttgaattctgtttggttgctggagaaataaaaaatgagaacaagaaagtagaccattagtcctctcccttattggccgtattgaaaaatacaaaagataatatatacatatatatagtatattatcactttctgtgtttttagtcttttcatggcaaataattacttggctagcaaatagagtccattgattttggatctatgattgaacattaaaactcagcaaaagtgaggtcaacttattaagacaatcaatgtatttgtgcattgatggctttttaccgttcttggctattatacatttttaatgatgaattgtgcatagataattaatgaccactgtgcttttacatggaattttaactgattgatggcagtctggctttttgttgtttcattgatttttcatttatctttgatttgccttcttgggtatttcccccaactgtgtgcaggtgtggatttcaagatcaagcagctaacagtgggt

SEQ ID NO: 74595 - DNA, 662 bp, Carica papaya
  Intron number 1 from transcript evm.model.supercontig_94.4 5 (locus evm.TU.supercontig_94.45) derived from phytozome v7.0 (chr-ID supercontig_94; pos 671045 to 671706)
accggccattcaagtaagctcctgcaacacatttctctctttccggtttttgtactaatgatttttgtgtttctgtaaacatggatctcttttctgttttctttccctttttgttctctgctaactctgtcttgcagaactctttgatagctatatttaattttttttttttgaaaaataaatcttaacttgctgagacttgtctattcttctattttcccatcttagctgttgtgggtttgaagacattcattctcctcttcctctcatatcacttgctttgagaatattacatgacactgttaagctctttcgttactcttttttttttttttttttccttttttgagtcttctgttgttctttctcagtacgccctttggggggagtcttatgagggttttacagtggttccttcagtcatcactaatttctttccagattttgcttcttgtttcttagctttcaaacagcacgagttttcaacaagagctagatttatgtataatcaaggactgtatttgatttttttttttgctaaagtagagtccaatggcgatttccagctctgttttccctcagcagtaattttaagacctatatatataataagcttatttcttcgtttatttgtgtggggatttttggttggtaggtgccgc

SEQ ID NO: 74596 - DNA, 591 bp, Carica papaya
  Intron number 1 from transcript evm.model.supercontig_327. 3 (locus evm.TU.supercontig_327.3) derived from phytozome v7.0 (chr-ID supercontig_327; pos 12636 to 13226 reverse s trand)
ttagtgtaccaggatcttcttacaggtgattgtctctttaatggcggttcctctgtttgttaccgtttgcagttttctgaggattgattttggcgggtcttgttttttgaattttgatggacttggtttctaaaatttccgtcaaaccttttctcttagtttttcgttaaatttttttctatttgacatgttcttttaactcgtggtttctctcttttgtttaagtttcaaagttcgattttattttgaattagtacaattttctttgacgctaagcggaagatggtaattcttttgtcgtaaacgactgagttatgatcagtttgatttctcgggttggctgctgggaattcagaagtgatttcattgatctttcttagaaactttcttttccgatcatggatgattttttttttttttttttttttttacctttggagattttcaatttgttaacaaatcttactggtggttatttataattctgtgttaatcatcagtgtcgatattgtgtagtttatacttcaaagcttgattttcttgatgaaaatttcaggcgacgagcttctgtcggactccttcccctacaag

SEQ ID NO: 74597 - DNA, 522 bp, Carica papaya
  Intron number 1 from transcript evm.model.supercontig_70.7 2 (locus evm.TU.supercontig_70.72) derived from phytozome v7.0 (chr-ID supercontig_70; pos 482675 to 483196)
ttcaacctccctttcaattgccgcacagattccaggtgatttctttctttctctctctagggttttcttatgtttctgattcttcgcgatagatttggtaactttgtcattattactttctaatgagtgtatctttagtttctttttctttttttttttttttgcaattgtttgttccaactgtgtgtaacttagtccaagatttacgaaataaactagcagagcaaagacaggtgaatttgaataaattgctagttcatttatttgatgaatcattaaacatatatgattcttgataatctttggttctttttgcaagattttgtgctggaagcttgatttcttttttccttgagttgtacggatggagtttgttgttaagagcatttttcctattgggtttttttaatagtattagtgaagatattattttttttctgactttgttgtacttagtctttgattgagtgtgttgtccatgctgcaggcccgttggctccagctgcagaaggtttcagtcca

SEQ ID NO: 74598 - DNA, 518 bp, Carica papaya
  Intron number 3 from transcript evm.model.supercontig_4.81 (locus evm.TU.supercontig_4.81) derived from phytozome v7 .0 (chr-ID supercontig_4; pos 1715138 to 1715655)
tcactgacaaggacaaggccgccgcccatttgaaggtctgtcgccatgctttccatgttaataattatgttgacatggtatatatggtttcttatgtggtaactgtggaccagaatcaggaaaaaaattttcttccagcattgtttttgtttaagccacgatcaattcagttggtctcacggcttatttagattattgaggtgaaattcaccgagtctccgaatttcaaattccgtggacactttttactattcttctacaaagattcttttagaagcagttagttcaatattttatctcctttagattatcttgcctcgtttagataaattcaaataccagttatactcttcctagaaaacatttcttgagaaaatttgagcttttatataattgttttggttaattcacttgcagctctaccgaaaatcatgtgcatcctagacatgattggatatgacaatcaagttgtttgattttcagggtggtgctaagaaagtaatcatctctgcacccag

SEQ ID NO: 74599 - DNA, 434 bp, Carica papaya
  Intron number 2 from transcript evm.model.supercontig_53.1 43 (locus evm.TU.supercontig_53.143) derived from phytozom e v7.0 (chr-ID supercontig_53; pos 1204218 to 1204651)
ctggtgttctcactacaggaaaggcttattacgtaatctttctttttctttttttttttctaaaccctgaatcttcactttcttggaaagaaagtttccttttctttgatttcacttctttcctgagtttttatgtaatttcttattttacaatgtacatatatatatatttatctgggtatttcactccttgaaacttgaaacttgaagattacagaaaaatcataagtgaggaatcttccagctgagctttagctgaaacaaacataatatggttattgcttaatgggtaaaaatataaaagctgatcttgtatagtaaggtaaaaatataggaagttagctagaggtctgagctcttcctagcaaccattagatagtggtaggaatgccttaaattaactctatttattgcgttctccttttctcttgtag

SEQ ID NO: 74600 - DNA, 871 bp, Carica papaya
  Intron number 1 from transcript evm.TU.contig_29521.1 (loc us evm.TU.contig_29521) derived from phytozome v7.0 (chr-I D contig_29521; pos 4104 to 4974)
aacctgggcgaaggtacttctgctgttcaactaaaaaaggttctaattagttcccagttccttcattttcaatttttctttcattgaccaacactgggtagaacaattaatcaataagctgctgaggaatttgggtcaagagtgcattattttgaaggcatattaaccattacaaaagtacagatctggaaacccagttctgcaagccaaactcttttaagaacagcatataaccctcttgtgcctttcttataatatttttcgtcttctatacattttttttgaaataaaagtatgaataagtattattcacaaaggtaccaaaggaggtaccacccgtatgcaaaaatatttacaattccataagtgatgaatgacatgcccaaaatcttcttttcgtctcctgtacataaaaaatattattctagagttcaaacattaaatggttagtatttactttctaaagaaacttttagccaattgtaattttcatttgcggattcaataactccagacttgggatcattcaattggatcaaaaattttcatttcttttctgaaaaactgcttgggaaaaacttggaatcataatatgttggagttaaatactgttttcagcaaacaaatgtgcaagtggtttgtctgatcacaaatattgtaactgtcttgtctcttgaaatatattttgcttacatttgacctgttctggattatgtttatcaaaactgttcttttagttttttgaattggcactggttctgtgcttttccctgtgctctcttccttaaatatataaattttcgttctctgataccagaattttactttttttgaaggttttgggttgcattgaggtttcagcagctatatt

SEQ ID NO: 74601 - DNA, 407 bp, Carica papaya
  Intron number 1 from transcript evm.model.supercontig_29.4 0 (locus evm.TU.supercontig_29.40) derived from phytozome v7.0 (chr-ID supercontig_29; pos 362429 to 362835 reverse strand)
ctaccccctcaggctactgctgatcaacagggtgaatactttgtttcttgcagctttttatggtttgtgaaatgaaatatattgcttaagattgaagtgtacctactaatgcagattggtcatgcagtaagatttatatgaattttattattggtttctgtttatgggtggctgaagttttttatttttattttttgctcataatctaaattagaaatgaagaactgaggacccaagagaaggtctgatcttttttatgggagctaataaattaggctgggatcaggattaccaaatgctatccgggggctaattaggattagaattaatcattcatatttgattggttactatcagaaagtccattactgattctagtattctcttttcaggcaagatagaagaag

SEQ ID NO: 74602 - DNA, 850 bp, Carica papaya
  Intron number 2 from transcript evm.model.supercontig_7.60 (locus evm.TU.supercontig_7.60) derived from phytozome v7 .0 (chr-ID supercontig_7; pos 609562 to 610411)
tcacttttcaggttactttctttttttcttttttcttttttataaataatatcagaaatttaattattacccacataaaaattatatatattaattttaacgaccatataataaataaaaaattaattaaactgctaatcatttttttttacttaatataattaatacatgactcgacaacacaacattcgtctcacctttttttttttttttcccactcaaataattttatttaataatttccataaatcatctttatatatttaattgtgtggttattatcctcttagtattaaattccaaaaaaattgttatcaatttccctcttttaaaaaaatagggaaattaaaatttaaggttcataaattatttttattaaaaataaataaaaaagttgactcgcggcaaccaaaagtcaaaaaaaaatacggttgtctacaacaaaaaaaaaaccacaaacagctgtggagagcaacctgccaagctgttatggtcgtgactctcagtttatttctttataattatttttagcacccttctcacgtattccactttcttctttatataattttaatatattcaaataattgaattttcagctccatataattttaggcttcaactttttgcttatttcagtctctatcttgatccccagtcttacatctatgaaattattgactatgttttaatattaaaatattgttctcataaatttaaaatcaaattgaaatatgcagaattaaagactgaattttctaaacatttgggttaaattttttaatttactaatttgaatcaaatcatgtattatgttgtttataattagtatatatataaatgcaggact

SEQ ID NO: 74603 - DNA, 312 bp, Carica papaya
  Intron number 2 from transcript evm.model.supercontig_178. 8 (locus evm.TU.supercontig_178.8) derived from phytozome v7.0 (chr-ID supercontig_178; pos 45487 to 45798)
gatttctgttgacgttaattcctcactttaggaaggtatacattatgcttggtattttatctggtcttctcctttgtttattgcttttctttttctgatttttgctactccacaagcaactgttatatatggatctttctccgggaatccagaaatgctggctggatgtttcaccagtactttccccagtagtagtgtttgcttttgactgagtagagtgcccttattctcttttcaatttatgggagtaaacaagtgaattaaatctcactaatatctcttttacatgcagatcttgttgtcagcctttga

SEQ ID NO: 74604 - DNA, 746 bp, Carica papaya
  Intron number 1 from transcript evm.model.supercontig_19.3 6 (locus evm.TU.supercontig_19.36) derived from phytozome v7.0 (chr-ID supercontig_19; pos 321323 to 322068)
aggtaatgccacccttagccagtcagattacagtctaggtttaagctttttaactgtcagcttccgaatttatgtgataagatcatatttaccaaaatggactggccaatgccaagaaaaaccaaatttagcagttggttatacaaaataattaacaaccatgattttcttattggaggatgacttcatcattaagtgaatcattcaggtattcaaagatttgttccaacgaaaaattttcgtcttccttttgattcatccatctttatctcttggcaagtttcttcttttcttttcctgttctggtcgtatatatgccggaaggcttttgatggtatggttttggtggaaaatggtggattctcccaatccaacatttaatatttacaggaggtaattttcaactcttctaattttatatcttttgaaaaactgtcttgggtatctgtcgggctgcaaaaccagattgccttttcgttttctttttcttttaaaataaattaaattgcagcacttttgctccctccattaaattagtttgtcatttgctgcattgagattaatcgatttaaaactctaatggagaatataagaataccatctctatatgctgattttggtttctgagaaattactaggttttcacgggaggagggttaaatatcaactttgggatcatgaatgtagaccagtcatttcaattatcattaccaaatttagattttgaagtttagactggatcagca

SEQ ID NO: 74605 - DNA, 988 bp, Carica papaya
  Intron number 2 from transcript evm.model.supercontig_42.4 2 (locus evm.TU.supercontig_42.42) derived from phytozome v7.0 (chr-ID supercontig_42; pos 332451 to 333438 reverse strand)
atagaaagctttctaatcttcccaagatcacacaggtcttattccttcttcttggtgttttaactcgaaacgtaattaggaaagaataaaaaaaaaaaagaaaagaataaactcataccagaagttcatcaagcgaatgtctttggattcttcaattgagcaaataacacaatcaaactttgatgacaaggagagcaatatcttctccagaatagtgatatcttccattttctcacaatggaaacgccttttgttgctgattcccatggttcttgcacaatagttggtgacagattcgccatctttcatttgtagtctctcaaaataccttcgtaaggcttgaagttgtgcatgtttcacttgggaagagcttgatatcttttcttcatggaatcccaaatatctttcaaagtatcattactaagaattgtttccaggatagcatgatcaattgcctgaaaaagatcattttgtactctcaaatccttgagtttcttgccttctaactttgtcttttgggcatcagtcaaagctgcagcattgtctggttcttcaattccaaactccacaacctgcaaatactcctttagcatactccaaaagtaatagtgaccattaaacatagggattgtaggctgcataaaattagtatttgaagcatgattgtatggggggatgaaagagaaagctatttgcttattttgtttaccttttttttttttttttttgttttcactctcgcttttgattttggctcacgtgttttactttttttcactctcttcctctatcttctcttttcaccctcttcctcccgtgttttagattcaacgcttaacaactttttaaataaaatataaaattttaaaacaataaaaatatgcaaatttattcaacaaagtatagtctctgtattatataaactctgtttggccattgctatgggcttttgattggaatttgaaatgaagcagccaactctgataat

SEQ ID NO: 74606 - DNA, 677 bp, Carica papaya
  Intron number 1 from transcript evm.model.supercontig_172. 17 (locus evm.TU.supercontig_172.17) derived from phytozom e v7.0 (chr-ID supercontig_172; pos 507851 to 508527)
gcagccacgggtaaagagtcctttttggactcttttttttcaatttttccaagtattttccatggaaagcacatgggataatttctaccttcttttaacattttttttatagttattttaatataaaatatatccgctagaattatttaactatttattttaactttagattgagataagttaatattttattaatttcttaagtgtttgtaatcatttagaattattcccggaaaaatctatataaatacctttccccatcagttgtaaacacgcattgagaagaataaaaatttaaaaattttctttcttcaagaattagtgttgctaatttttttagcatatttaaattctttagaaggtggggagctttcagaagttttgttgagcaaaagagtaagaatcgacttatcgggtaagcccgtcgtgtctttcttttccttattttaattccttaattcttgtttttgcacgtcttcaggtgttataaattcaaataaagggataggtaatttaggcggttaagtttctatattgcatgtgttggtgtaggttataggagttgattcaatcctccccctactcttctgcgtcaattcatttatgctatctaactgtatctagcttgaaaatcaattgggaaaagttagaattgtttcctattgagaaggtgttga

SEQ ID NO: 74607 - DNA, 975 bp, Carica papaya
  Intron number 1 from transcript evm.model.supercontig_91.2 (locus evm.TU.supercontig_91.2) derived from phytozome v7 .0 (chr-ID supercontig_91; pos 2571 to 3545)
ttagctctggtaaggctcttggagaacttccactattttcactagcctaatagtaggagttgaaccttagattcttctggaattgaccatattcccataatagtaactgctacattacttaatttaccaatttgttttggaaagtgaaactctcttctaagttaagctttttgcctggcctgtcgttcttcaccagatatttgtgttatgtgttttagaaatagggagacttatgatcaccagttgcttcactatgatgtggcttgaaagatgcatgcctagactgtttgatacttttggattggtgtaggttgctctattttcactataagtttcatgagctcaaacctgttgaggagggtgtgagagaggaagctaaaattctttggagaggagcattttttgcaggtttctggccattgtggttggagaggaattatatgattttcgaaagactgatttcttgattttcagtttctatgggaaaggatgatctttttgccttctctatgggctaaggtccatggccactttattgagatttccgttggtgttacaaagaaattgacagataatattgtattgattttttggtttttgttgttttgttgtcctggttttcaggacttagaaggctgtaggaagatatcttgttgttgaaattgtattttctttcttaattttttaaataatgttttttttatccaaagaaaaatattaaccatttgttggtattactgactttttaataaaccttgattcaccattaacaagcaagtactgaagtttgaacttttaagatacttgtgtgaaatcatttcagttccttcctcttgcttgcttttaacaaattgaatctcaataaatgatttctaacttcgaaaacttaagttgacaatacttctacagaattatactatttggctgtttcatattgcagaaggccacatcatctgataacctgcagtctattga

SEQ ID NO: 74608 - DNA, 873 bp, Carica papaya
  Intron number 2 from transcript evm.model.supercontig_66.6 7 (locus evm.TU.supercontig_66.67) derived from phytozome v7.0 (chr-ID supercontig_66; pos 670619 to 671491 reverse strand)
ttgctattggaactagcataggtgccaacattttggtatgttaaatcaagtgcgctttatgtttcttgaatcttattcagttcttcaaaatattttaagattttaagaattagaaaaagtgggatacataaggtctggagccggtaattaatactaatcctagtaaaaggcagaaagccttagaaagctcttctattatttttcttctaaagaggtcttgaatctcaactccatgatgagaatgaccattaaacaaatatatggtttgaaaccaaaaaattataatcaattaaaagagagaaaatgccttcagtagctcttctattcttttttttttaatgaaaactgaaaagatagagtaaggaatttaagacaaaagcttcttctacgtcttgcctgtctaaattaccatccccctatccctcatctcagccccaataaatctatataccacctaactggttttaagaagcgggatacgaatcccataattttctttttgaacataaaataagatatgatttggagagtcagaatctttaagacacaaattcttaaatcatgaagatctagtgtattattacagcccggacatttcgcttgtctaccattttattgtcatgttgctttacctcctgtctttattctctccttattctcttcgtgcattttgctgctcagccacatcttcgggggcatggggaaatgaactcagtacattggagaaattttgcttttagtattcttggacatcaaaattatcggatgccagtttttatcttattttattggttagcaaacaataagaactactattgacttatgatttgaaattaatgccttacttctttcaggtaaaatacctaggggagg

SEQ ID NO: 74609 - DNA, 861 bp, Carica papaya
  Intron number 1 from transcript evm.model.supercontig_66.6 7 (locus evm.TU.supercontig_66.67) derived from phytozome v7.0 (chr-ID supercontig_66; pos 671564 to 672424 reverse strand)
cgctgctgcggcggccgcaggattgtggtgatgacttgagcggcagctgcaagatcgtgattagctggttagggtttgtcaaccctaaccctaactggctatacgagtttactggtttacccttcggtgtgtgattttcctattttaccgcctcctgcgatactaaaccctaaatggtttcctgacatttaggctgttaatcaaatacatgaatgaatatgtgatctttctatgatcctgatgagctggttagggtttgtcaaccctaaccctaactggctatatgagtttactggtttaccgtttggtgtgtgaatttcctattttaccccctcctgctatagtaaaccctaaatggtttcctgaatatttaggctgttaatcaaatacatgaatgaatatgtgatctttcaatgattcaagtatgcatttgcctatattttgatttatgctttgatgctttatgatgcattgttattacttaaattaaatcattttcactaatgagaattaagacaaattcaaggaatttaaggtggagaaatgttagatacaataaattaaaaattaatatgagaatcagaactagaaaattgactaggaattgaatggaacataaaccaaattctgcataaatatagtaacttattcaatagtattcctattcttaaaatgacaaaaatgaaaaaagaaaaggatatattagtatcctaagaatgaccattctacggaggattcttgttgtattatcttctcaaagctttttgttgttagtctgtacttgttagtttctggcacagtctacgatctttcagtaatatgttactttgcaataatttttgcagtctgattgcttctata

SEQ ID NO: 74610 - DNA, 922 bp, Carica papaya
  Intron number 4 from transcript evm.model.supercontig_55.1 36 (locus evm.TU.supercontig_55.136) derived from phytozom e v7.0 (chr-ID supercontig_55; pos 865097 to 866018 revers e strand)
ctaaccaggaggactctgttacgagtcaactcaaggtaagatttcatttttgtttgttatattttctgttccaagtttctggagagttaagattcaaagaacaatgaagaaaacgttttgcatccgtattgcaacaatgcgattattattaattacaagcagacttgtatgagcaaggagacaggttgatcctttgactggaaaaagaaattaattaattaatacggaagaagattaagattatgcttttctattttccttttgaagcaatcgattttctcttttctttattgcttataggcggaaagcgtgcgcgagtaaataggtgagcgagcgcctgaaaattgatgcaagctatatcggacacgctaattacttgtcttgtaattgaaaatctaaaaagtatttcaataatctttagttgttggtgcttttattaaattataaagtaagcatcccaactaactaaaccccactttgattattattagcaataatgaattagagaaaaaaaacaggctaatcaatttttagaagtagtcagaaatatcaagctttttcgagactaaatccattctcagtaccttatatgggagagccttgtatgtaaaatttttatatttcataaactcttaattagaaaattcattacagaccattatgtaggagcaagtctcattctttagatacacgttttgaaactttatttcgttatttgttagagaaaattttgaaagcttcgccaacaaccttcctacattcctctttatctgaatgaaaagctaaaattcaagtgaaaattcttctttctttgtactgtttctttttgttttttcttccttttacagtctaatgttgaagttacagtctagctgatataatttattgttgtttctctgagggatatatatgtttgtgtaga

SEQ ID NO: 74611 - DNA, 875 bp, Carica papaya
  Intron number 3 from transcript evm.model.supercontig_33.1 72 (locus evm.TU.supercontig_33.172) derived from phytozom e v7.0 (chr-ID supercontig_33; pos 1775823 to 1776697)
ctactgaagttcatttgagaacttagtctaatcttgaagtccttgctgtcttcccttgtgatctgggcatgacctttctctgttttgctggggctttgattgctgctaaagctaaatatatgcaactatcctagagattccattttattgcaaagtgtctggataatttagcctcttcttatatactgtagatgctttgagatcgtgtgtcaattttcatattgtatgcgatatagaaccaaaactctctagatctgtcaaaattagaacaaaggccttcagaaactccactatccctctccatttatgacccaaaaaatggccaaggatgagatcaatgagcttctttctcgatttgtctatgtagataccactatttactataagctctgccacgacaaaccttgtggatgccaagttaactgagtcaactcccacggctgtctcatctcagggcaccataaagaaaaaaattagaggactctttagcatgagagaatgcagttccaataatcttgccatgcaaaaaacgccacatggtgagagacttttgttttccaaatgggcttccaaggaatacaatctagattctggtcttgacccaggagggagaaatagaaagttttgacagaaaatttgtcactctttggacagcttacatataagtcgattgcatggatttttctgagggtttcctcaacgaattgggaggctattttttaagtttgaattatgtttttctctctttcttttttcttgttctcgattgtcttctttttttatcatccccctttgttttcttttcctcacctaataccttctttcctataattgaggcaattgcataaatgaagttctttgatgtggttaggcat

SEQ ID NO: 74612 - DNA, 781 bp, Carica papaya
  Intron number 1 from transcript evm.model.supercontig_42.1 55 (locus evm.TU.supercontig_42.155) derived from phytozom e v7.0 (chr-ID supercontig_42; pos 1496228 to 1497008)
atcgtgattgatcaggttcaatttggtggttccaggttggttcgtctctttggatttgtttaggttttggacctcctgattgattattaggggggtttatcaaaaacaagatttgattttttagttactaatttaattttttttaaattgttttctccttcctatgattttgttatgtcagaatctggttgctttgcctgcaaaaagaaattgtccatttctgtatcagccttttaatctgcaatctctgtctgtctttctctctgttaattcctgctgtctcaaccttttcacccacaattttcttctacccaaatcttcttacccatctctctttcatcttatctgaatatttcctgttgatcctgtcagattctgattgcttctgaacagtggattacttatgccctctttttctcccttcaattttcaggactttaccttatgtgggaggcaaatatgttaaaaaaaaattggttcccaatttatgggtttattacttactgcatatagttttatgggagacttgatagtagtttatttatcattggttaacataattggttgtgcttaatttcttaacacttggaaatgattttagagtgttatggtagaaaagattttaagatttaaatggtatgctattatattttttcatctcgagtaaggtaggatttgcttgtgttctcaatttgttatttggctacaacctaaattttgaagtctagcttatatattgattccagaggacaaggtgatatcaagttcaagacagctccaa

SEQ ID NO: 74613 - DNA, 647 bp, Carica papaya
  Intron number 1 from transcript evm.model.supercontig_18.1 33 (locus evm.TU.supercontig_18.133) derived from phytozom e v7.0 (chr-ID supercontig_18; pos 1174436 to 1175082 reve rse strand)
catctgaggtggagaaggttactgatgctcagctggccgaatagaagtatatcgtcagcaaagaaaatatgatgtcaaaagtatattgatgtttctataatttattcataattagttttgaaagatgcacaataaggagttggcactgtggtagctctgtccatcttgttgggaagaatatgatgtcaaaagctctcatttgaccaatagttgggttgtatcttacaaagtatcaagaaaagtgaaagaggaaaatagagaactgatgagggacttgtagattctcttgagaattatataatttctgtttggttttctttatcgaggcatcaacagcattcttaaatcatcattgtttagtattattttatcctgaatttatcaactggatcagtaaaacgtttttccctcttgttttaggtgaagaaattcttccttccatgctttgtctacctctatcttttaatatgtttacaacttgtttgaatataattaaattgcctgctgatgattatcataatccagtatcctaactctggtggatgagggtgctttagctgatgtgtcctttatatgaaaaaacgatagtaatagcttggttgttactttcagtcagaaggcatcaatagctgatctcaaggcacagt

SEQ ID NO: 74614 - DNA, 763 bp, Carica papaya
  Intron number 1 from transcript evm.model.supercontig_51.1 35 (locus evm.TU.supercontig_51.135) derived from phytozom e v7.0 (chr-ID supercontig_51; pos 1291934 to 1292696)
cccgggtatatcttttgctatatatatattatattgaatttgtgtgtttatgatcatctgttaataaatttttctttggaaaaaaaatattgggtaatggtatttcttctgaaatgagaggattctctgagatgggtatgtttttctttgtttttctgggacagaaattcaaatgattgttcatttgacatgatgtgaatgggtattttctcttatttcttgctaattgagctcctttccccgttgttgatgtttttttttatagcatgaattatggaacaactttaggaaaaagtcttttttttttgttctcagttggataaaaagatgcataaataatcaggtttcatggaaattgaaattcaataaaagatagatatgcaggagttgaaacataccgtataatcaaacaattcaacgaggcagcctttggaaaaaagacataatatatacatatatacacaagtaaagacaggagtctgtttatgattatctgggttgttgtataagatgtcctgcaatatggctctcctacacatggatttgcattcatgccttgcttcttctttggcttggttcaaggctttatgatgtgctgcgcttagtttttattttgtagctggaatttctggatataaatttggaatcaatctcagaacaatagaattttgcgccccattgttttgccgtttctttattttgtatgcttacagagttttttcctttcatatcaattgcagtgacacctcggtaggtgtagcac

SEQ ID NO: 74615 - DNA, 585 bp, Carica papaya
  Intron number 1 from transcript evm.model.supercontig_175. 7 (locus evm.TU.supercontig_175.7) derived from phytozome v7.0 (chr-ID supercontig_175; pos 182765 to 183349 reverse strand)
catacgcgcaggagaaagagcgtggtacacgtggcccaaaaaataattaaatatttgcagggttccaaacaagtgggatttctaaaaaaaatagaaaatattaaaaatccgaattaaattatataaattttaaattttaagaattaatttaattttttaaaaaaacaaagagtgaaacgaacattaccaattcgatagtctcagtgacagcatgtaacggtaatcatcttattttgcataaatccttcttatacaaggattatataaatatatacatacatacacccccattctatatgaacttccgctatatatataatccttcctcccagttcaccactgcaaaattcgaacaccttgtgttaaagcttaccttacttcgcaaacgagacaaccagaagacagttcgctattccttcctcccaaccctcaaatttctctaccatcaatccaaaaagccctaaatttctcctccctaattttttcacgctgctataatggttgatgtagccgataaattggagtattttcagccatcactggccttgagacctcgatttgtgcaccgagatccttcaagcccat

SEQ ID NO: 74616 - DNA, 695 bp, Carica papaya
  Intron number 3 from transcript evm.TU.contig_30793.3 (loc us evm.TU.contig_30793.3) derived from phytozome v7.0 (chr -ID contig_30793; pos 6860 to 7554 reverse strand)
gtaagggtgaggaagggggagggcaatctttgctggtctatgagttacttcgcatgagaggaactgcatgatctttgaaagaccactatgccccctctgagtaagttttgggatagaactacctttctagacatgttatgggccaaggcatatggaaattactctgatatactcatctcaaaactccatcaaaattgtggtgctagcatttccatctcgtaggatgggatcaattttgtactttcctgatgttgtgatattttgctatgcctcatcttttgattttgttattcctttctctctcatattaacaaagaaattgtgtattcgttcaatatgtatcatatcttcactgacatttgcaaatttagtctttattttcaacaactatacatattctttttgtgtatggagtaatatagatttagaaaataaaaacttaaaatagttctttgcaactaagcaggaccctatggttttatatatatgtctattctttgctcttttcttttaagtaggttgctttatgtcctttgattcttctgagcaacacagacaatcccttttttaccaggatttacaggctgaaatatatagattgcccagctttttccttcaatctgctcccttcagaaacaacattttgtctattattttcaggaccctaagttttggacatatagaccattctccga

SEQ ID NO: 74617 - DNA, 456 bp, Carica papaya
  Intron number 1 from transcript evm.TU.contig_30793.3 (loc us evm.TU.contig_30793.3) derived from phytozome v7.0 (chr -ID contig_30793; pos 7818 to 8273 reverse strand)
gtggaaggggctggctggggtttcttagtaggaaggtaatttacctgctacagtccttggaaagccatcactcaagtctattcgttgttcatacctctagcctaaattcaagtaagagatggcactagagtgattttctaggggatacctgatgggggatcaacttttggccacccgactttccaaattattttacctattagttagacataacacccctgtttcttcttttgcttctaatgcagagggaagagtggcttgaaacttctgttttacctgtaatctattgatagagagacttctgatgcgcatttttgagtcgtttggagataatctgtatttctcctcagcctgattccaatttggtcccatgagctctcagggttatacacaagcaagtccttttctgaccacctcatagaattcccaacaagaagccccatacctattgccaag

SEQ ID NO: 74618 - DNA, 679 bp, Carica papaya
  Intron number 2 from transcript evm.model.supercontig_70.1 04 (locus evm.TU.supercontig_70.104) derived from phytozom e v7.0 (chr-ID supercontig_70; pos 781409 to 782087 revers e strand)
acgaataccgcctttcgattcctcctacaacccaggtactatctcaaactattcctttctccaatggttattcaatcaagctgctcgagaacatagacaaccaaaaaattctcgtaaatgtgattagtaacttttaaatttttgtcagaattggctaatgttagatgacattataattgatgtcgcctaagttttggttagacaacatattaattgatgttgcataagttatgggaattaaatgagatatttgttgtcatattttatactctaaaaattgttttgtttgaagtagaggtacctatgagagtgatattgtccctttgccaatatttcgaggtgaaaattttcggatgccaataaaccggaagtgacttaatttcgttatcgataattttctaaaaacaatcacttgatatatgaatgaatgctagagttttaatatccgaaatctatttatgttataagaattaattttacataaaaatgatgagacagttctcaattcatactttctatcataaagaatataaataatatatgaataatcttctatcaacatggattaactttcaagactgtgattttgtacatgcatgaaggagattctttttcatttttctgttgaatttggttaatgagtttcgcttatctgaatgtttgattcaatttcaagcag

SEQ ID NO: 74619 - DNA, 717 bp, Carica papaya
  Intron number 3 from transcript evm.model.supercontig_92.1 06 (locus evm.TU.supercontig_92.106) derived from phytozom e v7.0 (chr-ID supercontig_92; pos 806019 to 806735 revers e strand)
cctcgagaggtatgtctgccatagccatttgaaaaagtctttaacctttttcttattaaactagtataatattgttgccaaagaaaaagccaagttaagctcttccctttctttctctatttgaatatgagatttttgttaattccttttccttccttgcttttcaaaaccccctttttttgttttttccccctatttcctttgcctcccctcttaattaggataatactaatatttatcttttaatttgctttttctggattacttatttctgtttactttttcggactatcacttcctttgatgaataataaatactccatagccagtagccttatccatatatatatatttccaggctagctgacactagaccttgttcatgtacatttttgggatcatatttttttttctctgaccaatttattttttctacaaactgttatcctattgtgcttttctttcttggcctcttctatagtttggaatttcctttattttattcatttgtttaactgaaaaccttacattgctgagtaagtctttgaattaactccaccatccctgccatgctcatcattgcttcactgcacaacactccaaatctctctttctttctctctccctcccccacccaccccccccaaatttcaatattgtaaatttattttggccttttcagttaactggtgaaacagtaggggaagtgaaggcagt

SEQ ID NO: 74620 - DNA, 356 bp, Carica papaya
  Intron number 3 from transcript evm.model.supercontig_1618 .2 (locus evm.TU.supercontig_1618.2) derived from phytozom e v7.0 (chr-ID supercontig_1618; pos 11910 to 12265 revers e strand)
taacaacacaaaaaattaagtttattttaatatctttattaactattcaacattttttttcggattttcttacttaaatttattacttaatttaaatgagaaaaaaaaagtttcgttgtcatattaattcaattaaagaagattttggaagtacaaacaaacctagcttgatttgtttttgttagaaaaaatgaagagataaactagttgtatataataatttattgaaatataagaagaagaaataagagagactaattgagaaacacaagttttgatttgtggttgatgctaaaaaccttcaagtacatgagtatttataggtactagtactagtactactgctactactactc

SEQ ID NO: 74621 - DNA, 986 bp, Carica papaya
  Intron number 2 from transcript evm.model.supercontig_20.2 02 (locus evm.TU.supercontig_20.202) derived from phytozom e v7.0 (chr-ID supercontig_20; pos 2087807 to 2088792)
aactagggatctcagttgaagtgaaagagcaagtaattttcctttacttctccttttcttttttacttgttttcatatcgctgaagtttctttctgcacagatctaatgaatataattaagaagaaaaagtcattcatcatccccaagaaagcattattatatgcattaagaaatagcgtaagtaaagtcagcataaatctattgcatgattatggtctgctattatatagtattttactgcacacagatcatgtgatgattttagactcaaggaaagaaccgacagctttgttgggatctcatagcaattaccattaaatgtgatatgtaattgtcaacttaaactgacatcgtgttcgcacagcaattactgtaggatttctttttgaaatatgaaagtgttggttttattgagattattttcttttaggagcacaccttaaataattctttgagtaatgttgaagtcagttttgttgctaccttatatttagttattgtttgtgcctgtcggctattatacacattctgcatgagtgcaagaggtattagagtatggtagtcttacagcgtttggatacaaggatatgtactgatttaaggacgatatgtaatgatgcatatctctattgagtcactctacttctcactatagtttttgggtctaatttgacaaaaatgaagttcaaactggaaaataaaagtaaagaaatattcaccttttaatcatcaaccaagtgttcaatgatttttgttgcaaaaaatgcatatgttgacaaggacttgacttatgttttatgaatgatttgcattttatgacaggaaatgggtagtggcttctagttgtttgtaggacaaacacttttaactttctcatttagttaaagaatcctttttgatttctcctagaaatgaaagtttgtagctcctcatctttagactattagaatgtgcttatttcacggattggcttcaggtagagcta

SEQ ID NO: 74622 - DNA, 1011 bp, Carica papaya
  Intron number 1 from transcript evm.model.supercontig_19.2 82 (locus evm.TU.supercontig_19.282) derived from phytozom e v7.0 (chr-ID supercontig_19; pos 2358185 to 2359195)
gcgtgccgttcacaagagagcgtgggttccatcaggtacgcgtgtctatgtttttattggtttaaattcgaaggctccacttggcagcgtttgggatgtacgcgtggatgatgatgatgtaaagttgtcatatcattatcactgccgttgaaaacccgaccatggagagattgaggtgtgatatggtcacgccacgtgtagtttttcttttttgaactttttgcgtttgggagatcatttaaactttatcctcctatatttatggcggtggatgagtttagtctagtaaatttgggttgaataattatcagcttagagttttttctttgacccaaaagaagaaaaaccaacggatctagtcctttaattttgtttttttttttaaataaattgcttgagagaattttttgtttggggtatgaaaaaaaaaaaagaggaagataagagagctagcggatataaaaaaaaaaaaaagttgcaactttcacagtctcgacttccagttagatccatgtaagaatgaccgagtaatacctgtcaaaatttgagcttaaaagttcaaaaagggaccatatcctttgggtgtcacaacctaatttgtcagcaaatcttgaggacattatttttagccgagaaaccaacaaatttctgcctaaaaatttcaccttagttaacttggtagaattataccataatggtagcacaccaaacccagcagcataccgcaatgcttttattgctgggtcttgactcctgagagtgagttttatgtgaaaaagtaaacggtaaaaaatgaccagtgatttttccaaggattttcttgccgtctcttgttgaataaaagcttgaatattaaagtcaattaaatctatttctatcttttagagttttcttgtgtgtatgctcttggttggtatcaatgatatagtagcatcagtattttatatgcgttagttatataacatgatatactactccaaaactttcagcttgatataagagggaacccat

SEQ ID NO: 74623 - DNA, 305 bp, Carica papaya
  Intron number 2 from transcript evm.model.supercontig_37.2 29 (locus evm.TU.supercontig_37.229) derived from phytozom e v7.0 (chr-ID supercontig_37; pos 1697763 to 1698067)
gcatctactcaggtgtgactggttatgtttgattcttccaggtggtattcgagattcaagattaaagtaggatactgtgactgttatcctcgaacttacaacattaagtttattaagtttaaatactagtattttaaccattaaattacagttctttaaaattattattctttaagtgtcagtactaagtttagcgttacattctccgttaagttacacgtagatctacccgaaaaaatgagaaatttttttttcattttttttaattagagatttgatcttggtcatacagccattgtgaagac

SEQ ID NO: 74624 - DNA, 302 bp, Carica papaya
  Intron number 3 from transcript evm.model.supercontig_26.3 2 (locus evm.TU.supercontig_26.32) derived from phytozome v7.0 (chr-ID supercontig_26; pos 339940 to 340241 reverse strand)
gaggattctgggagaagaccgtgggaaagtggaaggtaattatttttatttcttgaagatctgaagatagttctatgaagccacttcccataattttcttagaactgggaataaaccctagctgacctaaaaggggaagagggacgaaaactgcgctgctcagtttgagttccatgcatctacaaacttctgcagactaaccatttaatggacattacttttcctgcacgttttgtgtgtgtgttttgtaaaactttgtttttttccaagattttctgatttttactttcatttcaggcata

SEQ ID NO: 74625 - DNA, 723 bp, Carica papaya
  Intron number 1 from transcript evm.model.supercontig_18.1 9 (locus evm.TU.supercontig_18.19) derived from phytozome v7.0 (chr-ID supercontig_18; pos 118681 to 119403)
tggggaacttggcgtactcaattccaaaaatcaaggtacagattcaacacttgttcttgtttggttatatatgtttttgaacgtgtaagatatctgatttgacttgttgggttttaatgctgctcttcattgggataggtagctgatctatggccttttttgagcttcattgatggttaaatcatattcattggatccataaaagttggagttgtatataatattcataaactgaatattttacttttggaatttgggagatctagctgaatttcctatgtgcattatgaaagaacttgtagctgcatttaaacagatcatggtgctagttcaatgtcccacagcattacattatacatgttcgaccaaatgtgcgtgatgaggattaagaatcaatcaggaagagaaaagtttgtagaataatcaaaataacttacgatatatccagcttatttctgttaggaattttatttacgaaggtttcttcagttgttgcttattgaacatttaagccttctttcttggggcataaaataatacttgttatatatcttcctgaaactgtaaatttgatgttttccttgaggcattttggaattggtagtttaaatgtgaattctctgttaggctacccctggtttcatggtttgaattgatacccatctcatgccttagttttttttttcttttgattaatttagccaggaaatctcttgaaatatc

SEQ ID NO: 74626 - DNA, 450 bp, Carica papaya
  Intron number 1 from transcript evm.TU.contig_29936.2 (loc us evm.TU.contig_29936.2) derived from phytozome v7.0 (chr -ID contig_29936; pos 2619 to 3068 reverse strand)
gtctcccagtgcacagatcctgtcatctatttctggtattcttccccctcaaaatgtcctgttacttccgttagcagtcaattaaactttctattgatatgaattggcttgtgaaataatgcattgttcttgtttatttggttttcccagcttataaattggatgaattgggaaatgcaaataaaccatgattaggccggagtgaaaaacaaaaaaagagtacaatgtactatggttgattcaggctaaagtaggctctaatatctcataaattataatagttaccaggatatatctgcacttatcatttttatgcaaaatgtttggaaactttcgtgtgccagaatatatccttgttggtgattgtaatgtcaacttttgaatgtccttgagctgcccttgcctttaaatagatggtcattacattctcattaacaggacctaggagtg

SEQ ID NO: 74627 - DNA, 357 bp, Carica papaya
  Intron number 2 from transcript evm.model.supercontig_31.3 5 (locus evm.TU.supercontig_31.35) derived from phytozome v7.0 (chr-ID supercontig_31; pos 692569 to 692925 reverse strand)
attacaggtatttatttttacatccctaattcaaattttgtaatcatctttcaaatgagaaaggtatagagtttggattggcttttggtttcttttcttggttagcttctaattttgtgatgacgtatgaaattttagtcaaatgatgagaaatgataactgttttctcttttacttaataaattattttaatacaacttaacattttggttaagtaattagaaatggtaggatcagatatagcaattagaaaataccataaaggaaaaaaaaaaaaagttaatagaaacattgtaaggtccgcaatgtttggtttgatcagatacctggattcatcggctacaaagggcatcttcg

SEQ ID NO: 74628 - DNA, 611 bp, Carica papaya
  Intron number 1 from transcript evm.model.supercontig_18.2 27 (locus evm.TU.supercontig_18.227) derived from phytozom e v7.0 (chr-ID supercontig_18; pos 2512156 to 2512766)
aaagtcaagttagtatctctatctctatctgtgtcgatttatgcagcacattatatctagttacctagttacctagccctattgctgacctctgcttggttctggggaaatggaggaaaactttggagaaaattgtctttcgaagtttacgtacttgtaaattcatatttattgtaattaccaatagcaggtgtatcaggaaacactgtatctgtttgagtttcatgtttttggaaatctcgaattgacttaattcaattaaatttttttcgtttttttatatatttagggtttgtgttcatttctcgtggttgatgttcttatgagtatacgtacatttttgtgcgcacgggaatcgaaccaaactgtgaaatctgtggttttactccgaattgcagttgattattaaagttaagttgaatgctatatttagacattgttaatgtgctcaagccaacggggatggtggatgtgttttctgacttactcctagtttgctgatcaacttatcagcttccttctacatgttagtttgttgtctttattgcttgattatcccgttaattttatgagcatatcagtcatttatcttctttttggtttacagctat

SEQ ID NO: 74629 - DNA, 932 bp, Carica papaya
  Intron number 1 from transcript evm.model.supercontig_4.63 (locus evm.TU.supercontig_4.63) derived from phytozome v7 .0 (chr-ID supercontig_4; pos 1564061 to 1564992)
ttattgctcctttgtcagcaaatacacttggcaaggtaatatatcaggaaagctccctatatattttccttatatcttgtacctagtttaacgtatatacttattgggatgtgatgtgagacagagagcttgaaggaaaactgaagaaaattaaataagaaaaagaacctggatctcaataataattctagattctcaaatagtattaactatagaaccccatcttgaaactaaattagagatacccattatatgagcaacaaacctgataaaaacaggaaaaatttgaacctacttagaaaaacaatcagaatgggaagaaataatcattaaagaaaaatctattatggcaaatactaaagaaacaaactatagaaaagcctcctatttctgtttaatacactttcttctatccaaacttttcctttattggttccccactgggatgcttctctttggactttggagcgcatgtcactaagatggtatagttctcactagttttattttaggattctttttatacttggtaagacaacctgtggcttctggacttagaattgagtggtgcagtatcttttgtctttccagagcagttggcgaagtcacattacaatacaggtgcatggagatctatttgatgaattgtatatcaatttgtagttcttcatgcagatactttttacaaagctttcgtgaaatattgtctttatttctttctatagggggaagaaaacatgtccattaagaactaatcttgtttgagtttccttcgttaagattctcccttttgagagtgtcattatctatttgtcgttccttgagcatgatgtcaaatccacatgtagaataattgcatttgttagtcatttattttcatttaatgccttattatagattgctggtggcctctgtgacaatctgctgacaag

SEQ ID NO: 74630 - DNA, 829 bp, Carica papaya
  Intron number 1 from transcript evm.TU.contig_37634.1 (loc us evm.TU.contig_37634) derived from phytozome v7.0 (chr-I D contig_37634; pos 172 to 1000)
gagcaagatttgcaatcacagggacaactgcagaggtgtagtttctcgatcttgtccttaagggggaaaagagaggaaacttaatgaggatataagatgtttattcaaagtcagagagttgccaaattaccatttgagtactatttaggtgttgaatgtcacatacatgatctctgtaagatatacgtattaattgtattagcactaattagattttcacatattgatgcaaaatgggtgatttattaaattactatgggacatgatagttcctgggattgctaagttatggcctctttgtttggtaaatttactctaggctgctgcaaaatagatatggaatgtaacaatttgattattcccagaagtttgttgtataagaagatcatgtgaagctggtgggatgtcagagagtttaaatttgatttaacaagataaggacaatagatcttgtttgatgattttgtatctcttagaaccagatataacaaagttattggttatagtatgtcgaatgctttatctattgttaggaagggaaataaatttttatccattttgcatccatcctttttggcaagtgtcctcaaaggtgttttcatttacacacttctttgtgctctttgcttggtttctgctttataatgttcaaaaatttccctgtgcttgtggtagatattatgattaaaagttagaactttatagttgtgacttttgctttttaggtgagaattgagattccttaattttgttccttgataattacactgttaaactagtatttttgggaagaacagttgtagttggtttaatgtttattatgtagcct

SEQ ID NO: 74631 - DNA, 446 bp, Carica papaya
  Intron number 1 from transcript evm.model.supercontig_148. 42 (locus evm.TU.supercontig_148.42) derived from phytozom e v7.0 (chr-ID supercontig_148; pos 552800 to 553245 rever se strand)
agtaccaggtaagttttggagctttttgtctcttaaaagttggcatcttgctactatgagaaccatgcatggagaaaaataccgagtcacatagttcttgtacttgtaactctttgaaaacctgagaaaatgaaaaagaaaaaagattaactaagatactctcattactggttaggtgggtttctttgcgtttgataaaatatctttactgatttggatgggtttggttgagtttgtttttctttccagccagattaagacaagtaagaagaccttgattttgatctatctttatttgtcttctttttcttgggcagcacttggaacatcaagggttttaggggtttgtgttataggggtataactatatattgttgatcatattctgtgtgtaaagagtgcaagttgcaggtgtttgtcacggatttgtggtcggatcatacacc

SEQ ID NO: 74632 - DNA, 529 bp, Carica papaya
  Intron number 1 from transcript evm.model.supercontig_15.3 0 (locus evm.TU.supercontig_15.30) derived from phytozome v7.0 (chr-ID supercontig_15; pos 496352 to 496880)
gatacagctgctcagtggccacaggtagagagatctgggttttggttattttgtgttcaggaagcttttggctttcttttttcttttgtttttcaaaaggaattcttgtttattgggtgccttttttctttggcaaaagatggtggtgttcatgtctttagtggtgcaagtctctcgagtccccactcatatttggatttagtttttatcagttcttcaacgttttgcactttatctttctcctttgcttttcttcttcttcttcttcttcttcttcttcttttctaaaagaaaaaggcttttaaatttcttctcctttttcttctttattcctggctaaaataaacctgaaaagtgcaaagcaagtaatttgcaatctgaattatgttttgttttctagtttttgtactctttttttcttttcaaggtctgttttcttttgtaatcttgaattgttgacaaatatatatttatgtatataatatgttttgtaggagattgtagtgaaaccaatagaggagatagtcac

SEQ ID NO: 74633 - DNA, 963 bp, Carica papaya
  Intron number 3 from transcript evm.model.supercontig_43.2 4 (locus evm.TU.supercontig_43.24) derived from phytozome v7.0 (chr-ID supercontig_43; pos 242886 to 243848 reverse strand)
actgccagttttggcacagaaatctgggcattaaggtaaatagctgattgtttcttttcctttttcctaatttgaaaatattcttgtgggcttacagacttaattcaaagtttttattagtgtagttgatgctaggttaatgtcttttgtttttgttctgttttatgtttttatattctataagcatgtaggcagagcaggataaaatgttcttggcaaatgtcttgtaaggcaaactggtactttagtttaaagcaggaagttatatctttattcatcttttgatggattacagttttagtgttaggacatcggggctttttagtgcactgtgtttcttgacattgtaattcgtgcattttggtgtttatatgctttttttactttaactaaaattcaagttgctcagtagatgagttaatcacctctgtaccagcatatcctgagttattttagtctttgaggtctcaaagttcttatttgggaaaaattagctggctgtacttgctaaattcttgaaatgttttgattttcttgttacattttgtgtaaattagaagagactattcttacttatctcctggtcaagtcagtaactgtatttcgttaaaatattcagattttttttaaacaggaaaagttaaacaactgagacgtatcatgaagttattgcaatgtctctataataggagttaaatatttactaatgaattatgcacgtatgctgaaataactttttttttcatcaaaattcagggtcttcaagttttaatctattattacaatagaaatttgaggctttgaccttcctactaaattgatctgtgtgtaaattctgtgacaaattgtgtgggttactatgatgacaacagtagctacagatttttaactctatattgaacaattcaatgtaagaagcaactgctaatggacaatatgtcattcttaactagtgccgactgc

SEQ ID NO: 74634 - DNA, 572 bp, Carica papaya
  Intron number 1 from transcript evm.model.supercontig_3.48 5 (locus evm.TU.supercontig_3.485) derived from phytozome v7.0 (chr-ID supercontig_3; pos 3460476 to 3461047 reverse strand)
actctgttttctacggaagaagggttccaaccaaggtaactctttttttttttttttgggttatttttttacatgctgtaagacctggttaatttaattctattagttcaatctgcagtttcagtttgagtttttaatgttggtttttagtttttggtattaaaaaattggtttaatcgatattctgaggacttgtatgaaatattttagaatttgtcaggcaaatgaataaaattttgtaaaatatataacttcttttcaacgttcaaaaaaattaaatcttcttttttttttaaaaaaaaataaaaaattcccttgcgttctttctcctccaccccgagagacacttctctttctcatttctcttcacctttacgctattttttccttttatttttctatttaaaactaaggaatttttaattttaaaaattatttttcggatctatatttccatgggtcttataatattgttttgtttattcaatttccaagttcaatattaggacataattatttgaatgataattgttatagtgtgattaaaaatttttataattgcaggaagtgaa

SEQ ID NO: 74635 - DNA, 697 bp, Carica papaya
  Intron number 1 from transcript evm.model.supercontig_25.9 1 (locus evm.TU.supercontig_25.91) derived from phytozome v7.0 (chr-ID supercontig_25; pos 960189 to 960885)
tgggcatcctgggtcttgttatctccttatcagaagtatactcatggttaggtgcaagataagttcacgagagaatattgtgtcaacgaagagattatatttgatatttgaattttcgttaaacttgacactataaccgtgttctgtaatggataagatcagatgtataggaaggagcaaggaaacgaacgattatttgaatttttttgcctgctttttgacttgaacgttaggtgtttagggttcatcgcttcctttgaatcgtaactatgctttgctgtttgtatctagctgagataagatgaagacagcttgagaattttccgggtcagcataagagcttttttccttgctggaggccagcctgccggttcttgttgcttgcattgttttgcttttgggttgcatgatagaaatgtatgtatgatgtgttgcaaaaagaagtcaagttgcggaaggagattttaggataattgccttaacaaatgtgtgactcattttttcttttaaaacctcaatgggtgactacgtttaataagtttcggaatttgggatttccattttgtttcttgtttggctttaaatttattgtcatattgcttactgtttctctggatgagtagcttgatatttcaaagatcttcaatgatgatattgtatttgcaggctgccccagataatataattgtaggctctc

SEQ ID NO: 74636 - DNA, 449 bp, Carica papaya
  Intron number 2 from transcript evm.model.supercontig_34.6 6 (locus evm.TU.supercontig_34.66) derived from phytozome v7.0 (chr-ID supercontig_34; pos 609051 to 609499)
tttacttgttccctgtaattttcttctttaagcttatacattcttctctttttagaatgattttctagccttagcccttgatgatttccaggcttacagaaacacttttgacttttggcagcatttatgaatcgttctactcaaatcaatgccaatttccttaccattcaattacttagagcatatacaaaatttacaattaacatcgtaattcaaaagataggatttgactcgagtcaaattgattatcatactcaaaataatatgaatatatttaaataacgaggattaggtcttagtttcttgtattgagtgcataaacctaacaattgaaagagtgttctagcactttgttggggcaatagtccttattgctacgaatcatttaactttattttctttctccttttgcagcaataccacccatcaagggttcttactcttgtata

SEQ ID NO: 74637 - DNA, 963 bp, Carica papaya
  Intron number 1 from transcript evm.model.supercontig_55.1 45 (locus evm.TU.supercontig_55.145) derived from phytozom e v7.0 (chr-ID supercontig_55; pos 910588 to 911550 revers e strand)
tttagccagtgaagcttccctgccaagccctcaaggtataagttttgaatgttttcccttctgggtataacattttaccttgcttttggaagtgggatgacatagtttcttgatctatttacgaaagttgcttgctttcttgtgtgatctaatgattattttctgggtttattacgcttttcctcttgctttgaagcttggataatatatagtttcatatatggattatctgattatggaatttagttccttgggtggatttctattagtcaaaagtggcattttagccatagctcattaacccattgcctcagcaatccacttgatcacccattaatggtggattcataagatagtgattgaaggtgttccaggaatgttagcaaaatcaaagtaatgctaggaggcaattgtctttctaaatttgagtcaggatcatctggccctgaactcaaaaggtaaacagagagtttcagtcttattgtgcagccattgcttgtggggaccggggaaaaatgggtttgcaaccagtggagtggctcaatcaaaacagctgtcttagatgaaatgaatgtcatacggataggaaaagtagcttttgaggatgtagatttcacctgagaaaacaagagaacttgactcttccctctttgttcattcacattgctctcactttaaaaataactggggcatgaactgaaacttgtaaaattatgttgtgtatatttcctatcatcttcgaaactttgaatctggtatttacatatgggaagaaaaattaagtcgtaggagtctttagtatcatgataaaagttggtggctactacattacagagagtatgttaataggaagacagaggattaatgtaatctaaaacataagatattgtatgtcataacttttggagatatttctgtttgttcttgtgttttctgatgttgaattctcaataacttctacag

SEQ ID NO: 74638 - DNA, 707 bp, Carica papaya
  Intron number 1 from transcript evm.model.supercontig_211. 37 (locus evm.TU.supercontig_211.37) derived from phytozom e v7.0 (chr-ID supercontig_211; pos 279397 to 280103 rever se strand)
gagtcgatctcgtggtatgttctgtttattccttaatcacttgactatgtttaaggagtttttgtttatggaggcatattcattcatcaattgttagtttgtttattgattagatgaaatgatggattgttaaagtgcccaaatttgttttagaatagagaaaaatgaaaaaacggtaggtgctttgcttaaatagtagaagctggaaattattgatggttgtagctatggccactagaaatgggaaattttatgtgcacatggtgaggaatcctttttaccatcattatggcactgtaggtattggaacttgtctttttgatccagtggcttctgcaaatttgaaatctgtattccttcattctgagttaccatttacttgtctttttctggtcaactcactataatccgaaagatgttaataactccatagatctcctgccagcagccatgtttacctttgatgaacatatttggagttttttatttctttaatttgttttttcttgaactgataccataggaataatttacatgctaaattaagctctgatgtatgagttacatgtactcttagctatcttataaaaaattaaaagaacataatgagtcattcatagtttcttctttcattgatgaattcatcgttaatctaacaacttcatttcatatttcttagataaagggcccttctggtgaacacattc

SEQ ID NO: 74639 - DNA, 496 bp, Carica papaya
  Intron number 1 from transcript evm.model.supercontig_41.4 3 (locus evm.TU.supercontig_41.43) derived from phytozome v7.0 (chr-ID supercontig_41; pos 1024785 to 1025280 revers e strand)
aaccctcaaataaaggtgattttgagtgttttagaagtctatgttgcatagttggataaagcccatggcaactaacatggctttttggtgattggtgccgttggaattaactttcttagcaaataccggactgtatatagtgttctccaggagaccttttactggatcccgagcataattgtcctcaatttaaatattctattctccattgcccattcctgtttaggatgagagagatccttccattaaagaatgaaaaagagtccttgataccgagttgacttgataccgagtacaaactctggctccagcttttgttggtcaagaattattctaattgatggctttttcactgtttattcttttcctgaaagcatgtaaacagttgagattgtaaatactcagcttcattgagtaaacatttcatttgctaatctgtattcttatttctttttggacagcttagagttggtcaagctatttatttaactggcag

SEQ ID NO: 74640 - DNA, 829 bp, Carica papaya
  Intron number 1 from transcript evm.model.supercontig_249. 9 (locus evm.TU.supercontig_249.9) derived from phytozome v7.0 (chr-ID supercontig_249; pos 152572 to 153400 reverse strand)
ttgaagctatcacgctgttcattcgccaggtaactctttccttggagaaacccttccattttcgtgtttactcacgataatggtaccttttccttttcatctagcggattaaatgtagttaaggaagacgaaagaaagtgaatttttgaaatgtgctaatttccgtttcctttttattattatcattatatttttttatgctgggctgtgattttctcatcacataaatggagaattagatgaatattcatggagaaatgaagagtaaatttgtgttctgaaagaggaatattttcgttttacgtttggcaactgataggatatagggagggaaatgtagaaaatgtaaggctgccagagatactttatgctaaatatttgatggagaatttttttatttttttaaaaaactgaagtaggcttaaaattcatggagaaaatggttggctggttgaagaaattttgcaattcattttaagttttgatggtgatgggctctagcagagaaaattaaagaaaataaagttactaagaaacttgtaaactgaactaggtgaaaaaaattataacttctggatattgaacttgaagtttcagttctgcctcatactatggttcacagtattggtccctggacactaaagtttattttaaactataatatattttcattcaaaagaaattttgccctgcttcaatcctagtgaaaacgagtctatgaagttatgcattcaaagatatgataataagtcactcacatacattttggatattttgatatttttctgttgagttaggaatctgttgtccaataaacaatttcttgaat

SEQ ID NO: 74641 - DNA, 437 bp, Carica papaya
  Intron number 1 from transcript evm.model.supercontig_246. 8 (locus evm.TU.supercontig_246.8) derived from phytozome v7.0 (chr-ID supercontig_246; pos 69018 to 69454)
gtctgatttccactgagattcgtaccttggagaaggtcttctttcttttactttttttttaactcttttcccttttgcttatttcgtttcatctttttttgtatgtttcgctgccaatgactttttctagttcttaaacaagaaaaaaaaaaaaaaaccttcgtatatacgtctcttggtgtatatacagattttcttttatgcgcattttgtattttgattatgagcgtatcaggtgttgttgacgggttttctttgtttggtttactttttatcatttctctaattgatttatttcttgtgtctggatagttcttagttctctcggctatcagttgtgtcattgtttctggaagttgaataagttagcgaaaggtttttatatgaaaaataatattaaaggtttgtgaagagaaaaggaatagaccaagttgtag

SEQ ID NO: 74642 - DNA, 569 bp, Carica papaya
  Intron number 3 from transcript evm.model.supercontig_18.2 35 (locus evm.TU.supercontig_18.235) derived from phytozom e v7.0 (chr-ID supercontig_18; pos 2558090 to 2558658 reve rse strand)
accagggtaatttctccgcttatttccaatggttggtgtttcagtttttttttttatatatataaataaggttggtgttcaggttttttttataaaaaaaaattcaaaataataatttaatcaagtcttaaactagttgccacaaagaacaacattgtttatatttgttcttaatgtattaaaaagataggttgaaagcagaagtaaacaattcaaatgcctgtttccggtatccagtagcacaagtttgacaatggaatcatatatactatatatatataagatgactggtaaagacaaattaataagtgtttctacaagatgttaataatgacaaactgcaaattgtacacttcttctatttgcttgagaggaaataaacaagctccctaataaaggaaaataggtcctgtttttggtagaatatagcagttcagaagttaggagcacttaacatgttttcttcaagaagctgtaataaagatgacaatttctagcctccaagaatccgcttattattgttatttacaatttaaatattttatattcttctgcagacttcagagttg

SEQ ID NO: 74643 - DNA, 729 bp, Carica papaya
  Intron number 5 from transcript evm.model.supercontig_27.1 91 (locus evm.TU.supercontig_27.191) derived from phytozom e v7.0 (chr-ID supercontig_27; pos 1934544 to 1935272 reve rse strand)
ctgagcagacatccattattgactccaaaaataaggtaatttctttttatgttctacgtcttgttcaattaacatcagctccttgcgtgtgcacgaaaagtcctcgttagattttttaggcctgaaaaagtatttaactactaattccttccaaggatgttaatgagataattagccttttcatattctataatattttatttcatgaagtttcaaattattctccattagtcaattgtttctggtggactagtggtggaaacagtcatatgtacatgggtttgacagcctatggtttcctcaactgtagctgaggttggaatttgaagcaactataaacagagctagccctttgatgaactagatttccttgcactgaaaatttcgagtaattagaaacaagaaacatgagcttacttttgttctctgccttcatgttgggcccaattagttcatcttaaagtgtgttaactcaaaaagtagttgcaaaatttttatttattgcagaacatatcctttctgtcaacttataattcttattctagtctcgaagactatttccttttttctaatattaaaacttttgattgggtgacaacttcaaatccatgtgtcctgagacttaatctgtttgtttaccttttggtatctaatttactttttcctttctcaacactaatggttcttgttataggatataaagcaggagaaagtttcggtgcaaatctc

SEQ ID NO: 74644 - DNA, 931 bp, Carica papaya
  Intron number 1 from transcript evm.TU.contig_36284.1 (loc us evm.TU.contig_36284) derived from phytozome v7.0 (chr-I D contig_36284; pos 1122 to 2052)
agaggttaactgcttggtgagtgagagcattcttaagtagttggaggagaagccgagataatgtggttcaccttcaggttaaaggattgtgaaatgatagatcagaacatgcagagattgtcagagacaaaagatttatacaatttatatttttccatataactttttcttacaatcgcccaaaaattttagagaattattttaagatataacttttgtttctttcttttttctttttttctaaaatgggaaacaaaatgacacgggtctaaacaatacctcatagatttgaatgaagatgcatatgaagatcgtttcgaactttgattacttgcatgtaactgacagggttattacgaacccaataagctaaaaaacaaattcttctacattgtttttctctaattcccgtagtcaattttacacatttaagaatattgatattttgaacccacaattaacctaacacaaaaatcaagagaaataaacaaaaaaaaaaaacaagatacttgtctcttttccaatcaagcacaagaagttcgaagttaatattaatctcccaattaggtggaattaagtctttgttgaagagatatgactgtttctaattctcttttccatctgtttgggttacataaaacaatcaaacgaaatgagactcacagttaatttagaatatttaattcttgttttggagattcatcagattactaaatttaatatttctttttgaagttttaccctccttttatacaaagaacttttaaagagaaaacatatgttaaactaaatgagaagaaagataggtatgagtaatcgatcccaacttaaacttccaatgtcaactctcaaatttactagtcgagtgaactcgcctgcaagatttttaagaatcattgactttttgagatttttgttagtaggctccgag

SEQ ID NO: 74645 - DNA, 1020 bp, Carica papaya
  Intron number 2 from transcript evm.model.supercontig_9.27 9 (locus evm.TU.supercontig_9.279) derived from phytozome v7.0 (chr-ID supercontig_9; pos 1906944 to 1907963)
gaattctgtcctaggtaaaagatttgaattccttatatctgttcccccacattgttatagatgttctcttccctctttgtagcttattttctccttgtcgttctcaaatgagaaaaatgtctagtgatctttggatgaagggcctctctcatttatataaattattgtctttcatgacttaatcacaagccgtgagaattgcagattacatttatgaaattttcctccattaaaatttctacattttgagttacacgaagtgctcaatcttaataatattagtgtgttccccagtacagagtattcttataatctcgaatcagtcaaaacatctcatgagtcagtaggcatttcttttttgtaagaaaagaaatattattagaatctagggaaaggaaagatacaagaggatgaggcaacctcaataacaatcaaggcagaactgcttctgaattcatttgaagcgtagataaggaaatgtttctgaaaaacttatgtggttgcagatatttaggaggcaaaaaatgatccttgaaaagtctggcattgtgctccaaacataacactcacaaccttgaaaaaaactgaacctctacataaaatacttgtctccttctcaacaccatcaccctttagataagacctcaagaaagattaaatagataagggacaagcccaagtcattaggcattagaaataaattagtggtatatgctcaagtaataagattactaaaaagctaatgttgtttttgtgtaaaggtattatatttacacttaatacacatattctaatggactgttagaagtatccttctgcttctggattctgaatctctgatggatataaatcttgcttcaaaagtctaagtgattttgtagttttattgctcttcaattattgtcatcagtacactttttgtgtttcttcatttcatttgtaatatgcttcaatggttctcttacatctttccttttcctttaattgttggaaggactctccgccaagtttttgaatcat

SEQ ID NO: 74646 - DNA, 662 bp, Carica papaya
  Intron number 2 from transcript evm.model.supercontig_97.4 6 (locus evm.TU.supercontig_97.46) derived from phytozome v7.0 (chr-ID supercontig_97; pos 280384 to 281045 reverse strand)
cgacttcttggggctgaggtttgtcttctctaatttagtttactgttctgagggattgagatttgggaaatgtgcatctctatgagagtttagttgctttggatgtcccgtgatacagattatgattccccaggacaccattttgtaaaacacagttcatatgccactgattctaggagagtttttttgtttaggatctttgatccttgtttttatctaggtcaccttaaaagaaaaacttttgaacgaattattatcttatcatagttctctcattttcagtgttctgcacatatcactgaaaggctaagaattactcaatacctgcttctttaatgagaaacagttttcatccaccagctagtggggatatatttgtctttatcaatatatatctttagtagacaaagaagctgaaggaagatttaagatcagataatcaaattgaagtttgagactttaggagtcttgttggaatggtgatgtcccatgcttatcatcacctctctttcacgacttcttaaatctcaaccttcgtattgaataacaaaggatttaccttgtattgtggatggaaaattcacttctgctaatactgatactttatatctgctttctatgatataggtcagggcagttcattctgggacagccaccctgaa

SEQ ID NO: 74647 - DNA, 340 bp, Carica papaya
  Intron number 1 from transcript evm.model.supercontig_98.6 6 (locus evm.TU.supercontig_98.66) derived from phytozome v7.0 (chr-ID supercontig_98; pos 1127456 to 1127795)
ttgaatcgtctcgtaagtttgttgaaatattttgctgtgttcttcagtattcttgttgaagtgtataatttgggaccgttagattatctcttactgatgcctataattcaaagtgatagataacccatgtgtccttgtcatgtttcttgatatcatattgtcagaaacctatcatgtaaactgtagttttatgaacttctgattttcttcctgaaaatataatttgtttcaacataataatattctggttagattagttggagttttggatctgctattaattgtcggaaaattaagcttaatactgatctgcttgtattggctggaaccattaggcgac

SEQ ID NO: 74648 - DNA, 649 bp, Carica papaya
  Intron number 3 from transcript evm.model.supercontig_5.21 0 (locus evm.TU.supercontig_5.210) derived from phytozome v7.0 (chr-ID supercontig_5; pos 1794605 to 1795253)
gtctacccctttaccaaacagcaacatttaaacaggtaggttttctgctttctgtgagtttcatcaattatttgtttttattgttgaagttgtttaggattacaaaagagcttagcttaagtatagaattaaatcgagttctttaccgtgattttgttagatcagatttagactttcggataaatttactatgtccaagttctgatatacagttcatatttggaagtaccccagagattatagtttatctcaaaaagaagacttttccatctgatgtataaatgtcaaaactgagatttcaaaaactggtttggcacatcaactaagcatatggaaccacctttgaggaattgcaataacaaactgtagggaaactcttaaacattgactaataactcctaaatgaatctaatccatggatggttataagtgtagaaaaaactagatgcattgagcttttgacccataaaagattgcgtttcattctataaagatgcagccttgagttcaacattgatttaagatcttcttgaatgctgcactttttaatgtgtttcatgcctttttgcttgcatggttttgttttctcaattttctacttccacatcatattgtcttttatacatcttgcagccttcagctttagaaa

SEQ ID NO: 74649 - DNA, 388 bp, Carica papaya
  Intron number 4 from transcript evm.model.supercontig_26.2 28 (locus evm.TU.supercontig_26.228) derived from phytozom e v7.0 (chr-ID supercontig_26; pos 1624278 to 1624665 reve rse strand)
tgttatcccagtattcatatctgcttgtggaggatgtgaaaactgcatattaaagaaaaacaatgtttgtctttaaattcccatttagaatttctccttggatgcctggatatgaatcttgtaggtttacagacctcaaaggagagactttgtttcacttccttaatgtatcaagtttttagtgaatatactgtaacagataaaacccagatagtgaagatgtaattcctccaagcttagcatatcttttcagttgtggggtttcaagaggtactgacatttaatattatcatcttctgaaagtctgcttaagtaaacaaaaaactacgactaaatttatatatgtataataggggtaggtgcagcttggaaagcagcaaaggcgaag

SEQ ID NO: 74650 - DNA, 279 bp, Carica papaya
  Intron number 1 from transcript evm.model.supercontig_714. 1 (locus evm.TU.supercontig_714.1) derived from phytozome v7.0 (chr-ID supercontig_714; pos 6283 to 6561 reverse str and)
gattgaacccgaggagcctcgcgttgcttatctctgtaagttgctttcttctgttttgggcaactctactgggttaatatctttcattggttatcaccaaaatcatgtttttcagtttagttattcttgggtttgacgtaatctctttcaaagtttttaccttttgctttcttatatgagaaacttctttctagaaatgcaattcaaaatatgaatgtgatatatgcctgcttgcatttcacatgggttaatggagtttttggggggcaggtcggtttc

SEQ ID NO: 74651 - DNA, 697 bp, Carica papaya
  Intron number 1 from transcript evm.model.supercontig_8.14 2 (locus evm.TU.supercontig_8.142) derived from phytozome v7.0 (chr-ID supercontig_8; pos 995232 to 995928)
ccaggggtattttggtaattttgaaactaccgctggtaacacgttgcatgcgcagtgagtgaactacgttcgtagtgctcgttggttcgtaacgaaaataaacaaacattcttcgtctaaatattacagtacttggaaaaaacaaaaaataaataaattgcatgaaattttaataatacaattattataaaagtttaaatgtcttcctataaatttacatcgtttaatattataattaattcgacccaataaaacttaaaaatgtagcaattaatttctccatgatatataggtgaccaatcattaatggcttcacgtgcacgttcatgattagtacgtcttaatgtggaccaccattttattagaggattaatatggtttagcatagtttttttttttttagaaattgaacttgaattaaaatttcacatgtaatattagaccagtgcggcatagattaagtaattaaaatatatttgattaaaaaaaactaattttaattaattctccatattatatataattaattttaaactgattattggatcgatgtcgactgatattcttttgtctctatttttatttttaagggaacatttccagaattccttgtcactcagttaagcattaattaattatgttaattaatactaatttcacaggtaataataagcggcttcttaagccttccattaga

SEQ ID NO: 74652 - DNA, 548 bp, Carica papaya
  Intron number 2 from transcript evm.model.supercontig_8.14 2 (locus evm.TU.supercontig_8.142) derived from phytozome v7.0 (chr-ID supercontig_8; pos 995909 to 996456)
ttcttaagccttccattagatcgactgggtcacaggtcaaacaactctcctttttaagtcttctattcttgccaccacagacgaagaagaaaaaaagaagattttctctgatcttttaccattctcgtctttttcagcaacaacaaccaggtagctttctttctggtctccctttctctcattttgtgtttctctcctgaagatcctatgtgcatcagaacttagtttcgttgatttactattggtttctcttgaaatttccgggggtttcgtctttgctgatcctttctgatcaacaatgactcatatccttttccacgtacttattttctaaatttgctgttttttgtttgattaccgagaatttgacaagcgaagaaaaaaagaagataataaaagaagtaattattgaaattgtgttaaaatttggcatgtgtctttataatcgctcatcggcaagtggcggaaagttttttggttctatgacaaatttttgtttcgctttaactgaagcgtgcgcggtaataagagagatcgagaccgtgaaa

SEQ ID NO: 74653 - DNA, 913 bp, Carica papaya
  Intron number 1 from transcript evm.model.supercontig_9.64 (locus evm.TU.supercontig_9.64) derived from phytozome v7 .0 (chr-ID supercontig_9; pos 321926 to 322838)
tttgtcggatttgtcctctttgcaattgaacaagggttggaccttttagttaatcgtatgtggtagtgaattattacctagctgttggtggtttatcatcgatcgtgactcctcaaatgttgggctagatatttctattgtctgcttgtggagattcagaggcattttggctttctaggacacagatttctgctaggctgaactgtgtcattagtggccgcaaatatttgtttctttcaattggattgacccttttcttcctctctttttccccgcaaattagcatttttcctggcaaaattttctgatgtgttcttcttgctgtgaattaagcttggagtaagttgtaaacagcactcatcagctgctgcaaatctatttcgactcttacttcttttccacttctggcctgtgatgttgttttgcggtgctgctgggcttctggccctcctttagtgattcatggatgggtttttgctagtttttggcacttgacagagtttaagtgatatgctcttgctgttgtttttaacagccttgcggctgtgttcttgatgtaatcatactactgattgatatatgttcaaaaaaattgcaggagaaaagttctgcagaatctggaacatctttcttgttttctgtctctcttcctcagttggtccatcgttttatttcgctcgttgaaatgtattgttctgagtcccatctgtaagttgttggctgttcaaaagttgctggatcgtaattgaattataccacatggcgaggataaaacctcaggctcttctaaatcaaagcaaaaagaagaaaggggcccaatcgtgtcagtgtcactacagttatcacctgcaacttgattatagctctaatcatattgtctttaattgcaacatatagcattggtcacacaggt

SEQ ID NO: 74654 - DNA, 1053 bp, Carica papaya
  Intron number 1 from transcript evm.model.supercontig_9.18 9 (locus evm.TU.supercontig_9.189) derived from phytozome v7.0 (chr-ID supercontig_9; pos 1222458 to 1223510)
aactcaccggcgttaatcctctcgcgcaagaggtacgtctgtttttggggaagaaattcgggattcgagtgtcagtcccttgttgattgtgtctcatgatgttgattgttattcagctagggatagcatttatgtgtagttattattgtttgcctgtgcatatttgtaggatatttctctcatttttgttcaagcagtttgtttccactgtttttttctataagagataaaacaaggttactgggttggttcgcaactgtttagattcattctgatgcgtctcatacgtgtaatagcatccactgatgctggacatggcatcaaataagcataattaacttctggggatggcgtgcgtgactttactattgatcattttagagccacaaattaggtgaacatccctggatgtagtattctttaagaggaaaagcttcaatcattatttatgataatgatcatcaaagattgggttgattttgggtgtggcatggactatttaattgtcttgtaactatgttttgttcatgggcagtacccccttggtaccgttgtgcataataatacttatcttatatttcaaaaaaattttatgacgatgataaatccagcatggctggtaattgggtgcattggaacttaaaatgcttttcatcaaatagagatacgtcaccgtgttgaatgtcagtaagtcggtgctactgagcggtaataagcattagaacttattattgtttgctaagaattggaggcaaggtactgaacttgtgatttttttccattttttgtcctggaatttgtttttgcatttataaaattacacagttggtggtgtacaaagatattattggtaattgcttctattgttagtttgatttgatctgatacactgggaatctcttctcttaggctattcaattttataattgttttctgaatgctttctctgtttttaaatcaatattcattattgccctatgatattgacttgtaaatatggtatctctttgatgtgcaggcagctggagctttgtcaattaaaattggtaagtt

SEQ ID NO: 74655 - DNA, 817 bp, Carica papaya
  Intron number 1 from transcript evm.model.supercontig_95.4 4 (locus evm.TU.supercontig_95.44) derived from phytozome v7.0 (chr-ID supercontig_95; pos 861214 to 862030)
ccgtcaccaaagtccaaagtggtatgtttttttactggttctacattatttttattagctaggggattttgttctttggttactgagaattatggatgaaagaggaaagtaaagggaatagcaagaaattaaaatgttatgttttttatttctttttctcccttttcttttgaacgctttttatgtgttctggttttcgatgaagataatcagatatctaaaaaattgagttgaagaattttgtctgattatagttaggaactatgttatacagcattaagatcattgtttggtttctgggaaaatgcaggaaaattatatacaaaaaacaaaaacgaagcaatgataatggatcttatcttgttttgtgtattataaaaggcagcacataaattacagataagatgaagagtttgtgatttttggaccttactttttgcattgctttgtcaagtttcctattttgacgtctactgtttcacattagtcacgaagtaatgtttggcatttgagatttcttaaagctcaaaaattttattaatccttagcactgtaatttttgggaggttggttttagtcaggcttctgctctagaatctaatgtctgaagttgatagatgttttgtttcctaagatgagtgttatgaaaatgggaaaattgacctaactgaattacccctaataagtctatacaaggaacggttttgaagtttctatttccttcagtactattaatagtatttggagtttcaagtattgtctttttcaagttatttactaattaaacaagtgcttttcgcagcacattcgagcttag

SEQ ID NO: 74656 - DNA, 994 bp, Carica papaya
  Intron number 1 from transcript evm.model.supercontig_18.2 47 (locus evm.TU.supercontig_18.247) derived from phytozom e v7.0 (chr-ID supercontig_18; pos 2638261 to 2639254)
ttcggagtctggaccatcaggggaagaaaatccaggttggtgacgctttcttgggcttttctccttttcttttttgtgtttattgcgaaacgcgattatcagattcttaatgtttggttaccgagaaaactgagaagaacaaagaagaaatgtgaaattttagggagatttacgtcgtgtatgtcaaatgcattttggctgtagttccatgctgatagaatgctaaacgtactctggttctgaaccactactgaaacaatttagttgggcttagttgccctggttggttagggaaactgattattgttgttctagaggcagctttttactgtggaaatccttggcatctttcaatgagaatctaggcaccagaatcgaaacatgttatctttgaagtgaatcgttaaaggaatttttgtctaacagaatcgaattacacttttttttttctgttataaatgtctttttgattatataaatgcctgattattgtgtcatccataaaaaggtgcatgagcattccgaagtgttataacctcatagaagtctggaaattgtaattttatatccagatatgagctcataaatgccacacgccctaaagccaaagtagtatagtgagaaactttaggttcatgcctgttatcaatttgagatgttgagaatattgatgagtagcaattggttcgactctcgtcctgaagttttcggacttgcaaaaatatatctttattgaatcaaattctttggttgtaatttccacccatccaaacttggttttctatacctggttactgatgtagtttttcttttttttagaagacattttttttctttcctttcatgatattgttcatggtgttcgtgctgtatctccactgatctctttattgttataaggttgtaatttcccataatcccattgttattaatttattttctgttttaccatatcgatccaggacacttccaatctattaaaggatcacaacaa

SEQ ID NO: 74657 - DNA, 777 bp, Carica papaya
  Intron number 2 from transcript evm.model.supercontig_36.1 0 (locus evm.TU.supercontig_36.10) derived from phytozome v7.0 (chr-ID supercontig_36; pos 96003 to 96779)
ccaggtataccaaaggatgcatcatttttaaggaactctttgtcggatctttttcggttccatcagttataaattctacagtttctaattctgtatggttgcttaattgtttgctcaaaaagtcatatggacaataaaaagattgttctcattccaaatttgtgttactggtgtttaaacatcttgaccaagcttctcgcagtgttagtaatatatgtgtgtatatataaatgtatgcatatgtaatctccattagctcgtgtggttcgggaggatacagggagcaaaaagcattatgtagggtatttattgcctgaatattggttttgttgtcagaatggaatgatagaattttcagtaaatgctcaaacaggacaacatttttggaatatattggttctttttgcatctttagcactaggacttattttttctgggaagtgggcgggtattgggtttctttgtccattttgcaaagtatggaatgttcttttgtattaaggcactttcgtttcatccttctcttcccctgcttccataagaagatttcttagcctccaccctttatgtaacatttctctctctttgtaagcataaagaaattggtgaattggaatgccttgcttgtttactttaacagagcatatattattttaaagaaaatagaaaatcaaataagtcaatggattggaataccttgtttgggtaaaaaaacgtaagatttgtactggttctacctatatcgtctgtatgctgttctaattttcagaagttgga

SEQ ID NO: 74658 - DNA, 910 bp, Carica papaya
  Intron number 1 from transcript evm.model.supercontig_56.1 02 (locus evm.TU.supercontig_56.102) derived from phytozom e v7.0 (chr-ID supercontig_56; pos 1256207 to 1257116)
tcgctgccagtgcgttcgctgcctgtttcgctgaagtacattaccgccattttctccttattactttactgctttgttgatttgatcgcatatttttctgtcccaatatcgcgatatctagcttgatatggatcggctattgatacatttgtgtttaaattttaaaattagtcgtgagtgtaattcgaagtagttctacttcgttcaggattgagcggtgaatgttaacttgtgtctcatggattaatttttatcgtcatgtaataagcggctttatttatgatttctgacggagaaagaagaacctgtgggtcttgatgtgcagtgatgttagtagtcaaacatgtagacctctgctttatatcatttttaggtagaattgcttatgtaccgttgataattttttaaagcattagatagtagatgcatgattttacttcaaaatggggagtttcattttaatttttaatgtgttgaattggtgcttttcttattactgtgtgttttatgcttgagttcatatatacgtaatggctatgttggtagacatctacttttggagaaattgcagattgtataggctcatatttgatattagacctctactctggtttatgccatattagtgaactggactatcttattgtccattagtccaaaatagattgggatcaattttctgtgccactatgaaccaatttgtgcagttaggttttcaagttctttgtattcgaatgtttgcctgaaaacaaaaaggaaagagaaaaaaatctgatctcatatgagaagctttgaattatatagattatggtgcagctgagtgttaattgttacaggtgcatttgtttataagcatagatttaaatccaatgcagatttgtaccattcctctggacactgctaaggttag

SEQ ID NO: 74659 - DNA, 909 bp, Carica papaya
  Intron number 1 from transcript evm.model.supercontig_214. 8 (locus evm.TU.supercontig_214.8) derived from phytozome v7.0 (chr-ID supercontig_214; pos 128078 to 128986)
tgacaacagcatactattatgtaggtatatcattttttttttgttcttctcttctttagttcagtctcatttagcgccgagcacaatggtgtcatcattgtaaatagaaaataatgaattaagatgcagcaaagatctggagtacttcttatgatagttcaagcacatagatagaactgtctatcattttatgcaagtacgattcaagtagcaaattagtttttattttaacctcaaattttaaaatattgtggaggtgtttggagttgtttatcttatgtttatcagcagcgctaaactcttttttccattctctctgttggtaaaagatgctcactaggttttaaaaagactttaaagaagttaaaaataaacatcttgtttctaattttttagcttcctcttttttttctctgacaaatttcattcaaatctctcttcatatacagttaaaattaacaatatgtagaataacttaaattatgaaatattgataataaaaaatattcttgtaaagaaataattatttatttttgcaattaactctattgaaacatataacttctatttttaaaccagaatctatttgctttaagtgcttaaagtaccctagtacatttagtaatatgtgcacaatcaatggaacttttgttatgcaaaattaatggtggaatgccagccttttttttttttttttcccctgaaaagagactgctgagtcttaatctctctaatctctacaaggccatgtgattagtaaattaaaattaaatccagattaatatggggatgagaaatgtactttgtttcacagcaacaatgctgtgcgtataatcaaattattgcttttcttttcattttgtgattaaacttcaccacatctgcagtatccaagagaatcagaagagc

SEQ ID NO: 74660 - DNA, 1046 bp, Carica papaya
  Intron number 2 from transcript evm.model.supercontig_2067 .1 (locus evm.TU.supercontig_2067.1) derived from phytozom e v7.0 (chr-ID supercontig_2067; pos 1725 to 2770)
caacaaaaacaaagcactggtttcctagaaggctggtatgaccccctttgccctctgcgtctctctccctttttctatgtgcgctcctaccatgtctacaattgcatgtatagatgtttctatttgtccaagttttctaaatctgccataatctcagttatttttaggttttagatcagttgactcttcaaaaagctaacccttttacctctgagttatcggtgttcccttcgcgggggtacttgtgagtattagattaatcaatgatttctggtaacctggtgatgtgaatttctttactgttatattcaatattcacaaatttcataatttgattttagatgtagctggaaataaaatgcagattatgccagattatccgaagtcagcttaggtttttcctaagatgttcctacagattaagaatgtaacaggagtcataattctggtttctcaatgggaatttagtctaatgagcgattccgcgttagcataatttacttggttgtgtgactctgtaggttatgttttctttgtttggatggtcctactgagcttctgaagatagagggcttgaagagggtatttttcgaaacatgcaaagcccacaaagggggatttttgctggaaaaaatatgataacattattaatgtttttcgattgcaagtctaatcaaaaggagtctttgtataatcctattgtaagaggatcgggaactaaaaagtggcatttttaaaagctctagaaaaagtaaatctataatagtgtaaggtagaaaaggaatctaacactgatgttgctaaatacataaggttgtaatcaagtgcagtttttagtgtcttatctaaggtgaagtgcgtagatgtggcaatcaaaataaaatccgctaccttagtgaccatttctgttgttacattgggcatcgccagagtttatatggtgttcaagctttataagtaattattagttcttagtgtctggtcaatggtgttaaattactgttcttctttcagtttggctgctctgtgctgttgctgcctcctcg

SEQ ID NO: 74661 - DNA, 266 bp, Carica papaya
  Intron number 1 from transcript evm.model.supercontig_21.7 5 (locus evm.TU.supercontig_21.75) derived from phytozome v7.0 (chr-ID supercontig_21; pos 936808 to 937073 reverse strand)
gcaaccctaattttccaagtaccattcacttgggtgttagtgtttaaagtcggactaaaaacaaaatggagcagccttagccttcggagtatcctcatggtttaatgtgttgttacttggagtttagtcttttcttcaaagtgtagaattgctcgttcagcttcaacgttaatctcaaagggtttaatttccttttgctatcatggtttggtatgtataattatattatattatattatattatttatttatttttgcagtctaga

SEQ ID NO: 74662 - DNA, 794 bp, Carica papaya
  Intron number 1 from transcript evm.model.supercontig_334. 3 (locus evm.TU.supercontig_334.3) derived from phytozome v7.0 (chr-ID supercontig_334; pos 22688 to 23481 reverse s trand)
ttgccgcatttgcctcgagagcgacagcgaatttggtgattatcgaattctttatttggtgttgaaatttgattgatttgctccttttctttggattccaagttctggagttgttgtgtgtagaatttccgcgatgatttgtcataattgatatgcttttccaagtggacggtctgctttttgtgcattagaaattacaaattctaatcggggaagaaagatagacataaaagggggtgaagaaattgatcattcgggactaaaagtggttaatgagagaacttgaggagttgatacatttgagtaaaaattgaaatgattgcagttatacatgcatttggtttaagctattatggcaggtttggttggaacctaatgaaaggcaagggcacaaagaagctttatttatttatttatttccagaactataatggcttactaatatattagtgtattatgaatgcttactcaggatatccaagtattaatgttgattgattatggtggtagattttttacattaaccttgtgaccttttaaggtggacgggtttattggctttccttttgttgtttgttttgaactgttttcaccttttattttcagatgttaccggtcattaaggcaatatacttttaatgaataattaagaaaagtttagcatctttttttcctttctgctctttccattttatgttttatctttaatggtgttcgagtgaaattttcttatgttattgtttcttatggttctaaatgtgctgaggctgatgcttgcttgattttagtaggtg

SEQ ID NO: 74663 - DNA, 802 bp, Carica papaya
  Intron number 3 from transcript evm.model.supercontig_34.1 27 (locus evm.TU.supercontig_34.127) derived from phytozom e v7.0 (chr-ID supercontig_34; pos 1089150 to 1089951 reve rse strand)
gggtaaatttcttctccaatcttcagttgtctttgtttctaaatcaggaattcaattgaggaatgttacttttgagttgggattaacacctaactgggaaataagagaagactgcttgtagtcatgagagaatatttgaactatctgatgaaacaaaataaccaaagcatctgctttgaagttagaactggttttattttttggatgttcctctctcgtgtttatcatacacgaaaggaagtataaccacattgttttatgaatttctttaatcttttaccactaaaggtaaggggaggacggattattcaggatgtataaagaataatctgttctatgggcttttaccaggaagagttttagtgtcattctcgtcaacataagctccttgattatgatattgtggtgtaatttgcatgttgttctaagtgattccagagttggagcttaagcaaaggtcagtatccagactttggcagctgtaaataattggtgaagaccactaagactcaaaatctttgcttaagctattctaagaatagtatcctaactattcttcataggagtcaaaatcttttctttgatcattggttgggaagctaaagggaaaaataatgattttgctcaaaatgacatttaccgagagcaatatattggccttctttaatggtttgatcagcagttattctttttgtgctataggctatgcatcttttaggaaataaagttcctttataatgtgaaagtagattgaaagatagtttatactcataatcaggttttatgttgtttcaggtctggg

SEQ ID NO: 74664 - DNA, 855 bp, Carica papaya
  Intron number 1 from transcript evm.model.supercontig_84.6 9 (locus evm.TU.supercontig_84.69) derived from phytozome v7.0 (chr-ID supercontig_84; pos 537412 to 538266)
actcttcttgagtatctcagaggtaattaattaatctcgctattttctgtttgtttggctatggggaaaatttacggggagggaaagaaagtcagagtaacagagaactttctgactttgtattgtggatttgaagtgaacttattttcttttcctctgggttatttttaacttttgttttccttggcttttgatgatcaagttctttctccgtttcttggtttgtctcctccagagaggggaattgagcttgtttgctacttagaaagtgatggaaaaaaaggaaaagaaagagtttgtgttttcttttttctttctctgttacaatctcattaaatcgatcaatctgttttatgatgatttgaatgagatgaaaattggcgtctggctttctggaaagtgaaagaaagtgagagaaaggaatcacgggtttctgggtcttagacctcataaattacgcttgctcacttcagtttacttaaaaaggtttggtcccgttaacttttgatccttgacggatagttcaactcaaaactttttcatttgaacagtaaaaagtttgaggaatatagagagtaagagaaagtcttacgtccaaagctccacttaatttaatcatatcaatcagtcatttgagtttgtgttcttgaagaacttaattggggcctttgtaattaggctattaaatatttgccaagttggtggtctaatttgttattgtagtgaaaacaacatatgccttcttacttcttgttcaatcttctagcatttgatgtgttaatcctgcaaaaccttattatcatctctttttgataacaagaaaacattggtttgaccgggacaaagcttggctgc

SEQ ID NO: 74665 - DNA, 990 bp, Carica papaya
  Intron number 1 from transcript evm.model.supercontig_77.3 9 (locus evm.TU.supercontig_77.39) derived from phytozome v7.0 (chr-ID supercontig_77; pos 395999 to 396988 reverse strand)
gcagcccctcgcctgcaatttacccaggtgatttacctttttcatctcttagtcaatttaattaattgccactcctctacccatatgtgtatatatatgtatatacatcttttattttcttcaatgtctgtcttaatatgaagaagctagctagtacttctaacaaaggggccatttataagcaacaaacaaaattttttctttaagttacggtaaatactggtctttgcgttaaacgaaaataattaacagacaattaacgatgttaattattatgggttttattttgaccttatattttttacttttaactaacagtaaaaaaaaaaattattaaaagttttatcttttttttattttttacttttttttttttaataaaaaagttgggggttaaaaaagcagagacagatctggcgttcaccaagtgttggagagagttacgtgggccgtaacgaaatcatgtgaactttcatttattaataattgcaccgtcagcgcgtggtaaaacgagaaatggggaatgttatttaattggttggattttccacgcgcttccatctgcaattgggatttgagtcaaagtttgagcgtcctggtctcgatctggttgcatgacagggattctggtgtctgttcttttggtctagtgcggtcaagcccactggatctccggtggaagttgttgttctcaacatttttcctgctattccatttctgcccctactatcttgacattatttctattatattctttaattagtaaaataaataaattttagtagcttgaccatttatgttttcaagtcttctaattaagattttctgttttttttttttttaaataattaattatttcgtagttagtcaaattcattgtttgattctttttgactcgattaatgaatagtgggtttgactaatattcaaataatattataataaattataaacataaaaagagttttgatgtgtggagctgcagattta

SEQ ID NO: 74666 - DNA, 468 bp, Carica papaya
  Intron number 1 from transcript evm.model.supercontig_195. 45 (locus evm.TU.supercontig_195.45) derived from phytozom e v7.0 (chr-ID supercontig_195; pos 390066 to 390533 rever se strand)
cttgaacaggtatacactcaaatccaccatttctttttttgtttctatttgagtctattttaattaaaaacttatattatcattagtgcatttctatgatctaatttctaaaatgtatgaatttttatttgatatttatgtttttaacgcattaatttctgaaacgtatacacacatatatatatatatatatattattatacagagcgctgaaattaattgctcaccagtgtttggggcccttctgggaacactatattcaaccactcaaatacgatgtagttttgcttttcatcttcttcttatgttccttttgctctctgaaattttgactgcatccagagatgggtacacgcatttatattatatatatatatatacacagataacttagcacatatgaatttatatgtgtgtgtatatgtacgtacagattgaggaaagatacaagcagtaccagcagcaaat

SEQ ID NO: 74667 - DNA, 848 bp, Carica papaya
  Intron number 1 from transcript evm.model.supercontig_6.35 1 (locus evm.TU.supercontig_6.351) derived from phytozome v7.0 (chr-ID supercontig_6; pos 2682275 to 2683122)
gtcttgagacctttctgcttttgttggcttggaaggtaaaccacttcgaagtcctatcattaattattttctactgcgacgatcttttactgctagagttatgctgcaactcagtcttatgtcaagaagattatattgctagaattatgctgctattcaatcttttactgacacaattatgctgctatagttgtactgcaaattttaggctatgtttggaagaggataggggattgactgggatgaaatgcttaggcagttactctgtagagatttgagtagtagatggagtgaagggagaataaggctgaatattttactttcatttccagccaaaaggttttcttccaaaattttaagattattctgggtcttttgcaaaatctaaactttcatttctatctatttttttttttccttttgcaagtgtagatagtaatagtttcttcattcatcttccttgtagctttttattcaattaaggtaaaacgttattctcattttcattcctatggcattcaaacaaaataaaatattatagattttgcaatttttcatttgattttattccgatgcttattcagttcttcccactcccaaacacaatctcatgtcatattcggtttttcctcatacatgtgaaggacaaggaaaaaaacggaggaacacaaaagtattgatgcaatgttaatagcttatttcaattgatgactttatcttttctgtttctttttgtttgagagggtgcgatgagagtttttcacttaaattacatttttcatcttttggtaatgcaaaatattccctttataggttttcttgccgcatagagtatatcttctccgtgg

SEQ ID NO: 74668 - DNA, 860 bp, Carica papaya
  Intron number 2 from transcript evm.model.supercontig_948. 1 (locus evm.TU.supercontig_948.1) derived from phytozome v7.0 (chr-ID supercontig_948; pos 9462 to 10321)
aaagttcatcagcggtggggccgatatcattgcaggtacgtatgattttctttttctgctgagatttatttaccgtacacgtgtcgtgaatgccacgtcggttacagttcaaggcgtacaattaaccacgtctgcaagttcatcctaacataaatgaataacggcggttacttttcttcaaaaaaaaaaaaaaaaaaaaaaaaaggaaaataataacggcggttactgttttaattacgtaggaaaagatgaaggttaagttttgtttaaatttaattttataaaaatagaatataatttaaacaaaggtgatattttaatttgaactaacttattattaaattattaaggtaggtaatttcgtaatttttgttctttagacattaaaaatggaaattgatttaattagtgaataaatataatttaataatacgttaaaaccataaataattgaattctaaatataaaaaatttaaaatttaacattaaatgaaattataataaatttgaaccgtaataattgaaaatgaaagggtaatagttttagttacttcagaagtttattatgtgagggtgttcttttaatacatattttcaagaaactcaaagtttaggtcttccaaactccaaacttcaatttgtggactttttatttggcttaggtgggttgttttatagtcttaacatcagaaaaagatacagttaattctacacatttttaattttgtaccattatatttatatttctatttataaactgctaaatatcaaacttgaaatgtatatgaaattgatttgaaattagaatatcattcttactttaattataacgtacaatatcaaacaatttcaggagcaat

SEQ ID NO: 74669 - DNA, 453 bp, Carica papaya
  Intron number 1 from transcript evm.model.supercontig_21.1 41 (locus evm.TU.supercontig_21.141) derived from phytozom e v7.0 (chr-ID supercontig_21; pos 1490900 to 1491352)
tcgtttctcataataaacgaatttacaacgccaaggttttcttttaccttttattttgtctatgtgttcgtaggttcttcgtagattttctcagaaataaatggaattcaagttcaaaagaagaaaaaatcaagaaatcgaatcactctagtaaccaaaaagaagtcaagaaatgtgttatttcatagattttggattaatcagattgattttcggttcttttgatgttaatgaggaatcttgactgcttgtgtaactatccacagtcgaaccccttcacttttttctcgtcctgagaagctagagtttcattttttgtttattttgtaatggtcggttgttcccagtactgtaatttcttagtcgtgccgcgtttcataattcttttggtctgcatgtgatctccatttttattcagttacctgatgtactatatgttctatttgcaaggta

SEQ ID NO: 74670 - DNA, 454 bp, Carica papaya
  Intron number 3 from transcript evm.model.supercontig_21.1 41 (locus evm.TU.supercontig_21.141) derived from phytozom e v7.0 (chr-ID supercontig_21; pos 1491584 to 1492037)
ataatctcttctgttttgcaggggtggaacaaaaagtgagcacaacttctcatttccacaactggtgttacagaaagtttttgattattctgtattattagtgaaccagttcaatgaagtcttagtgagctatttatatatgtatataacctttctctaatttttaacttttttttaagcacgagatgttaatgattattatttccatgagatttcttttaagcacgagatgttaatgatcattatttccatgagattttgttgcttgccaggttcttttgtttctgaaatgcttctcaggctagtccagattatatgtttttttccaattctgtatctgtaaatttaacagaatacttttggaatgggaaaccaatgttgaaaaattcaataggatggaaggaacttaagtatggtttaatgtcttaaaacttttgtttcttcaacagctggg

SEQ ID NO: 74671 - DNA, 636 bp, Carica papaya
  Intron number 2 from transcript evm.model.supercontig_26.1 54 (locus evm.TU.supercontig_26.154) derived from phytozom e v7.0 (chr-ID supercontig_26; pos 1163859 to 1164494 reve rse strand)
tagctgctgatagtgctggcgcagggtgcaaatatgtaagttcattttgttaacgggagctttttgaatggaatatttttttaaaataagcttttgaatggaatatcaaatttgatggtaagaaatattacacctagattacccttctcgtccttttggctgaggttaaatacgatgcctagaagagagattcataaacacaacaaagaaggacagataggtcatagggatgcagaagaagttgaaggaatgtatgaaacctcaatttttttatgcaaaatttatcctcccttcagtacatgaaaacgcttcctagtttttagtttatatatatatatatattaaaaacatacaaggttgttagtaagaaagaaaacaattgtgagattaatgctgggatcagaaaattctaaaaagttgttctaatgttttttagaaagttattttctttatactttggttatttcacaaatatgcaatgcttacaacctttcatggacaaactcatgaatttagaaaataaaaactagaagatatttttatgaactaagtggagccttatcatgtattcttccctgcttaaaactaatgcaactgcaaattcgttacagggctacgtgtcgcttatctccgtgc

SEQ ID NO: 74672 - DNA, 674 bp, Carica papaya
  Intron number 1 from transcript evm.model.supercontig_6.38 9 (locus evm.TU.supercontig_6.389) derived from phytozome v7.0 (chr-ID supercontig_6; pos 2958971 to 2959644 reverse strand)
ggagacggagttcttccaaattctccaatagccaggtaaatttttccttttccttatatttgtttttgaggttcttatgtttctctgttcttccttcttttttgaacgagggatttataactttaatgtcgaatagatacgtcctgaatgtagtaataagaagatttggaataaaagtctggagagatgtattagtcatcatcttttcttttgctagttcggtttattcctcgcttttctgtaacttaatcgtgtctgctcttcgttatgataatttccctggatagaacggacttatccaatcttatggcttcagttacatgtgcaaatattttcttcaaagcttttatcattcccggtaatatgtactgctgttcaaagaaaacaatgtttaaacaatacagcaaaaataatattcccgtatgattaaatagtttagttattcaattccgggtccgaaacctcacgtctttcatcttattgtatttgactcatttgttcatgcatctagaatcattgacaaaggcactgtagaagatgagtttatttcaggaggtttatgttcatcatgcatggaactattgtttattgattgtaagttaatctttattgacttacatcatcattgtgtattttcctgtggtgataccaggaaggcagcagaacattcagac

SEQ ID NO: 74673 - DNA, 647 bp, Carica papaya
  Intron number 1 from transcript evm.model.supercontig_89.7 4 (locus evm.TU.supercontig_89.74) derived from phytozome v7.0 (chr-ID supercontig_89; pos 1071923 to 1072569)
gaagagattattaagagtggtggtctggagagagggtgaattttctttctagtttgttattcatcttattctctttttattaactatatcatttttcgtaggataagttgaatttctgtgtaactttacccgcttaaaagactgtatggccgctgcttatacatatttttgttgttttatgtgttcaaattattttaagcaggttctttggtagaattgtgacttatgatgtataaatttgattgttttacatgtttgtctgtctaagcctttgaaagaaaggggatgtcacttcaaaacaacatgttaacgtgaagttagtattttctgctttatgcaaatgcttattcatttcactagttccgcaggtgtagatacttaaggaccaatttgattaatgtacgaacaacctcagtaagctagtttgaaattctcttgtaacatatgattattatggatcgattttcaggtcattgaatatatatatttataatgtttagatttcttcaaacttttataagtgatataagattggtgtcaagaaattactagatttttataaccaagaacttgttgcattttatgaaaggattataactggggagttttgtatgttcttgggctgtacagtgaagatagtggcactg

SEQ ID NO: 74674 - DNA, 616 bp, Carica papaya
  Intron number 1 from transcript evm.TU.contig_39947.1 (loc us evm.TU.contig_39947) derived from phytozome v7.0 (chr-I D contig_39947; pos 609 to 1224)
ttggagttctcgctttctcgattcgtctattctctgtaagatccctgattaccattgctagtctgattctgtagatccgatctgttgacttatcgttaggatttcgccgtttcttgtttggctgttaaggactgaaaatttgatttcctaattatctggatgatcgatgcatctgtgtgttatatgatttctgcatggatgatgaggtagcggacgataagaaaatggaaaatatgctttggaaacctttttttttttttcagtaaatatattttaagcttgactgagccaaattgtcgaacttaaagctggatgagacaagtaatgcagtttaagaacctcgactgagcttgttaaatttttttctctctttcctctccctcacttattaaaatatttgaagcggatagtttttcttttgttattttgctccaataatgaaagcaatgcagctaataatccatcagaaaagagacgagagagagaatagcagttttatgaatttctgtaaaacctttctttttgaaaaaagttaatatatcagttcgaaatgcatttatttcttatgcagtttattactttgggttcttgtggattaattttcaggttataaagt

SEQ ID NO: 74675 - DNA, 920 bp, Carica papaya
  Intron number 1 from transcript evm.model.supercontig_84.1 18 (locus evm.TU.supercontig_84.118) derived from phytozom e v7.0 (chr-ID supercontig_84; pos 879052 to 879971)
aagttaacctcagtgagagcaaggtactcgcttctattctcagctcgtattttgctttgtttcttggggaaggtggttatgactttttgtgctaattggttagaaatttttactgattttttatcggggtttgtaaagttctttttgggattgtctgtgtattgaatctccgttgagtttttagctgatttcagtttagattagtctgtaatatataggcagtttgattgggttcttctacttgggtcctaggtctctgattttacttttcaatagatgcgtttttgctgattctagagtgagttttgtgcccgtttctttctgggttaaagagccttggatttcgtggctggaatttgtgtttgattcatggggaagatgataatatgtagataccagtagcttcgcttttcgagctgtctgctgggatttgagtggatatggtgatgatggaagaggtctgttaatgattttcctgtaggttcttcggctcccttaattttgtgttttgtggtttttcatttttttctctaagaactttaaaaaattcctgatttttgatgttatgaatttgcttcgaagggtatgatttgaataatatattttccaatgtaattgagctttttgttagaatattgcgattgatcatgagctttcttgtcagagtgcctctgcttgcttctggggtttctagggcttcactgttaatataatatatatatatatatacgtattagtttcatatttctttcatattgcaactccaaagcaatatctatacattgattcaattgggtctaggtttcagactcagtcaaagatcttaccattttagtttggcatggagaaatttcttattattctttttgctccttttatgcatagctggtggttccactgaacacttgggttcttatctc

SEQ ID NO: 74676 - DNA, 875 bp, Carica papaya
  Intron number 1 from transcript evm.model.supercontig_227. 7 (locus evm.TU.supercontig_227.7) derived from phytozome v7.0 (chr-ID supercontig_227; pos 362656 to 363530)
tgcgggaatccaaggaagtcatacccaccggtgtggtatgttccatcattctctgcacaacttttgatcttcattcctttgtagtcatgtgtttatttcatatccatcatcatgattattattatttgaattatcggttttgtagggttcagggatttcaaatttaggcaatacttgcttcatgaattcaatcctgcaatgcttcacccacacggtgcccctggtcgaggctcttcagacttacaatcacccgatgccttgtaatcgtatgatctatatgtactttaatctcggttttttgttgtttccttttccgagtcaagaacattaatggctaatttaatacttttgtatttggtatattttattattttcgaaagaggtgtttgtctctgacttttgattttaatttttgcatttcaaatgttttttgcaaccagtggataaagtgtaaagtaattttggaaacaactaaagtcaaaattttcttttaataaattttcaaatcaaaaattaggattttttttttaaaaataatttttgtttttactaaaaatttatacttaaaatttcaaaacattaagttcaataaacatacaattctgctttcttctttaaagtgatggcgttttatccagtaatttgtatgaagtataaatttttttttttttattaaaaacatatttaatgaacaattattttaaagatatgtttaaaacttaccgcacacatctctacaattatttgtattaaatatcaaataattttctattaacaacacatttggttaacagtatatttagtgattaattattttaaaagtacttttaaaactcacagcgcaagctagtttgcccccagtctaggctcttggc

SEQ ID NO: 74677 - DNA, 653 bp, Carica papaya
  Intron number 2 from transcript evm.model.supercontig_85.7 4 (locus evm.TU.supercontig_85.74) derived from phytozome v7.0 (chr-ID supercontig_85; pos 524004 to 524656 reverse strand)
aatctttaacgaagtggagagcttacaccagctaggtattgaattatatgatcattttctaacacgattattatagtcaatatttttcttcttgttttcctttttgtttttagtttccttttctctttacattgcatgtaacattcgaaacctgcgaaatttttgcaacatgtatgtaattactgatcttagaggtagctttagtaagtacttagttgaatgttgaattgtcatcagaaaagttgtaaaaggagggaagtggatatggtggattgcagattctgttgttcccccccttttttcttgctacggttgtggcatccacttagaataaatgctttttctttgttttttgtttcttcatgcctcactttggagacctgttctctcgacttgagagaagataattttcggcttttgttctttcattttatatttcttattttctatatgactctattcaagtcggtaccagctatcataaatgggcaaattttgccttgttgtcttaatattacgttttgttcatgttgtttcattctatgtacctgggtttttcttctgatgcaagaagattttagagctcactctgattttatataaccaatctacgtctatatcttcagtacagaaaccaagggaacaggttgcag

SEQ ID NO: 74678 - DNA, 988 bp, Carica papaya
  Intron number 1 from transcript evm.TU.contig_41331.1 (loc us evm.TU.contig_41331) derived from phytozome v7.0 (chr-I D contig_41331; pos 631 to 1618)
tatccgcttctcagattatcctcttttcctcacttgttagtcatacatcttcttttgtggactcatttttttttttttaaattttattttcaaggttacgtttgttcttagaaggctacttctgtaatcgtgttctttattttatttgggttttgatttgttgttattttcttgagttttgttttctttgagtcataaatgttcgtgaacaaacaaaagaaaacgttgttcgtgattgctttctgttttgagttttttaactggttttcattttgtgcctaatttctcttactgggatccttgttgatggtttgtgctgatttactgtaaagcttcgccgttattggttcaatgtctgctttatctatttggtctaattgcttcttttccgtttgtgttttcccaagtttctttcttcgctttctcccggcttaatgaactcaaccgcgagggggaaaaaaaaaaaaaaagaacgaaaggaaacttgaaactctaagcgcggttaaaataagatattgcttgattagaatgcagcagctatttgttttttttttttttaccgttgcatcctttgttatttatgccttcctttcacaaaatgacaaaccaagttctttacatttcgactgcgtggattttgttaagatctctttcttagctgagaatgcaggatatatcccagaagatgaatttagcgagcttgtgtgctagttacttttgtctctcaaattgcccttttaaataatctgaaggactggtttccaaagcctgatttcttttggatattctcatcctaaatacaatatcatggtcaaatcagatcctcaattgggttatgcacaccattttcgttgaagttaaatagtcagagttgctgtaatcttgttcacttgatttttatgcatgctatgtttgtaatttaggttttgaatttgaatgtttgttaattgcaggtacttccacgtctctgactgaaaatcgaacagaa

SEQ ID NO: 74679 - DNA, 628 bp, Carica papaya
  Intron number 1 from transcript evm.model.supercontig_70.8 7 (locus evm.TU.supercontig_70.87) derived from phytozome v7.0 (chr-ID supercontig_70; pos 587466 to 588093)
gtgagttcgaatccgtcgctgtctgctgctctcatccggacttcttttgtagatcttgttaattgttttcttcgaatcaatcattcgttagactcttttctttcgcttgtttctttctaagctctctctgcaagactccgtcctcgaagtttctgctgtctggttacggagcacatacatatggtgtttctcttttagctttttggttcttggtaaacctcagggaagttgaattagacaattatcgaaacgatgcatgttgttcttgcctgttattttattcaagctgattgttattaagctttcctttcgcctgtatcttctagtgctctccgaccaaaactgtatattctcatgatattctctgcagtttggctgctgagaatatcagacacatatgatcattcatgtttttagctgcttggttgttttttagcctgaggataattaagggaatcaatattaagcgtgcatacttattgttcttgttaaccaaccgagacttgctgttgttccgttatattttaagttaatagtgccgtttgattttttaaagtagtattaaatatcttttcttgtaattgttgaattaggttcttcaaaacgatattgatttgttgaatcctcc

SEQ ID NO: 74680 - DNA, 719 bp, Carica papaya
  Intron number 1 from transcript evm.model.supercontig_51.1 54 (locus evm.TU.supercontig_51.154) derived from phytozom e v7.0 (chr-ID supercontig_51; pos 1482218 to 1482936)
ctcattgcggcagtggaaaaagcatcagcggcaacgttctctcagcttgccttactaatttatcagtaaaagtaaactaagaatttatcaagaaaaaatgtctttttaggatacccaaatctaggaaatcaaagtttctgtctatcgagcattagtcataggttgtaaaggctggaagtaaaacaaacaagcttcgagattgctgtaaggtttactattaatagacttgtgactagattacatacccggacctgatcaatttcttggcttgcttctaactctatttcaatatttcagattagattagaagatagagaattagtggaggaagtaagtgcaagatggtagtggagaaatttctaaatagatattgctaaagttccaataatccccttctgtaacttgattactatgatttaaaaatgaatatccttgagtaccttcttggcactcaatggagatgaaagtggtagctcttgggggagtgaaagagtgaaaggaagttcagtaagtaatcatcagaatttgaacttaggaatatggattctaattgattaccttgtgattactatgtttgaccccttggattttatttttctttctgttgtttttttccccttttctcccctctcattcgggcatggatattatcattctctaatattatgttttctacatgtgcaggctctacctattcagattattcttactcatctgga

SEQ ID NO: 74681 - DNA, 520 bp, Carica papaya
  Intron number 1 from transcript evm.model.supercontig_85.2 9 (locus evm.TU.supercontig_85.29) derived from phytozome v7.0 (chr-ID supercontig_85; pos 173758 to 174277)
ttttattacaggagcaactgggtttctggctaaaggtaacttagtatacaagttatcgagatttatatttctgtttatgctgaagttctgcaaaaggtcatgtacaatgttaaattttctactaggtcatcctagaatttttctttgtggatgatctgggtgggtgtcagcttcgttttagttatgagggtaaatcaaagttttgaagataattaatttcttcctcgtgattttatactatattcattatgaaattcattaaacatatgtttcaaaaatattttgaaaacatacatacaaatttaggaaatgaaaatttccaatctatgaactcattagttctctgttgattttagttttggctatagcatatatagaaatgtaaccaagtttcctctatacatttttacaattgtgtgcatatttttggtaaatatctatagatctgatatatatctttctgtttcctaactaaaaaaatccagttcttattgagaagatactacgaacggtgcctgat

SEQ ID NO: 74682 - DNA, 579 bp, Carica papaya
  Intron number 1 from transcript evm.model.supercontig_1515 .2 (locus evm.TU.supercontig_1515.2) derived from phytozom e v7.0 (chr-ID supercontig_1515; pos 10766 to 11344 revers e strand)
gacgcctacgctcgcaccaacactacccctaagttcttattctctctctcgtttgatttataacacaagtttagataattgcgttatatttcaagttcattttgtatgtcagtgagttccgcatatcgtttatcgagtctataccttctgtaagtcatggttagactgttcattttcatttttttttgaaataatactgttcaagtttcatacttctggttttcatgttacttccctgcctagtagaaaagtatcttcttccttttcaagggttccgtctcgtgtatgtatattctgcttctcctggagttcataggaggaatgactttttgttaattccttagctattttaattttcaattcaacctggaatcgctaggatgggaagtcaacgggaggggaacaaattgagaatttgtcaaagtggaaataagaactacaaacatagcacatattcgtacgatcatttgtcaatcatttctttgctttccttcattgttattagtattatttctgtgagctgcctctgctaaaattctctgtgttgctcccaggcaagatattttagggcagtattca

SEQ ID NO: 74683 - DNA, 568 bp, Carica papaya
  Intron number 1 from transcript evm.model.supercontig_2.32 9 (locus evm.TU.supercontig_2.329) derived from phytozome v7.0 (chr-ID supercontig_2; pos 3809417 to 3809984 reverse strand)
cactttcacgactgttttgtcaatgtaaatattcttctctctttctatctctctctctatatatatatatattatataaatgaaatatgtgtatgcttttcgattataattttggcagctttacttctcagtcttgggatattgcacatgtgatatatgtgtcgttgataaacttgttgatatatatgatgtataaaagtatggagaaagccagtgtcattatggccatccaggatatctatctacttcaattattagacgactctgtggttcccatatgattgaagattatgtgccattagtacagtgttcattcaagggccaaaagcaatatgaacgacacttgtccattcacagtattttttaactgatatataagaaacccaaatcaaacaaaatccaataaatgtccgtgtgcattatatatatcacgtcaacttctattttattttcctgcttacttttttccctttttttatttagataaaatgaggtcataaacacatgaactcattatcataaactggacttcctaataacaattctttaagaggatttgaagttgttg

SEQ ID NO: 74684 - DNA, 880 bp, Carica papaya
  Intron number 1 from transcript evm.model.supercontig_531. 3 (locus evm.TU.supercontig_531.3) derived from phytozome v7.0 (chr-ID supercontig_531; pos 26188 to 27067 reverse s trand)
caggtgtatatatatacgtatatatatatatatatgagaatatttatttaaaatcttaaaaattgttcagttcttaaacatttttttttttatatcatgtatatatacgtgtctgtgtttaactatataaaaaacgtatgcatatatgtatggatatttatactttatcatgaaaagtgagggagtaggctgcatcctctcaaactatttgtgttttcaaatcgagaaaattgtataatattatatgttgttgaattttaataacttggttagttggctaacaattaatgcaagactttcgtggaaagtaatcaaattattaaaaagatatagtcaaattatgaattaattaattacacgtgatgtaattaattaatataaacataagtgtttatatatatatatatatatatatatttgaaaaaaattaatttttaaatcatctacaatcacaataaaataaaaaaataaaatttaacttaattcgataaatatacttatatttataaataaaaataaaaaattattattaaataagaatatattatcaataaaattatagatttatatataaaaaaattataaaagttttttaccacaaaactcttccaaatatatataaaataatcttcaatataaatacaaaatatccttcctccgacaaatataaatcttttaggataaatataaactacctccaaaataagatgtctctaaaattaaaccatatcaatatatatatatatatatattatttctgattatgagtggtttatgtgtattattttgatcgataaatatatctgcttttttcttaactaaaaaataataaaataaaatttcagttcttgagggagaaaaatttcgagcaaaaaattcc

SEQ ID NO: 74685 - DNA, 923 bp, Carica papaya
  Intron number 1 from transcript evm.model.supercontig_83.5 9 (locus evm.TU.supercontig_83.59) derived from phytozome v7.0 (chr-ID supercontig_83; pos 611377 to 612299)
gtgaaattccagttgtacaggtgattacgctggtgatttagttttcttctttcctattttaagtttgattttctttttcttttattttaggactaatatgctcacagtctcagctgaatgtatgagataatggcttggtaagatacaagagtgaattcaaaaaggggaagtgcatttactttttatgttcgtatacttgttgacgaatagagatatttatgttcggaaaatgtttgattgattggaggcactgataaaggagggaattttaataagaaattatttgaaatatgaagatattaacgcaaatatacatgactgcagttgcttgacttacacttcactcgaataatagagattgcttgccttttgaatctaactaaattgtctgtaacctagaattgcttcacttggcgtatctgtggaaattgggagttgaaagctgatctgtctgacattcacccttgcacaatttaaaaattgcagtcacatatactttattcgctgttttgacatgctaacttatgttatgagatccttggtctcttcattggttcgtctcattaatagtttgttctcaatatcttaatgaaacagtttctcttttaagatcataatacaaactttcatcttgttattggatggtgaaagatttagcttatcgtgggtaatttttatgaggacgaacttttattcaaaatgattttggtgaatcagatgattgatgtctgacaaaaaaaatcttttcagctgcttacagtactggtataccagaggttcgcatgcattataagcccagaaacttgaagctaatagcttgttcctgtaacaataaatggagtcaaattttgaagtattttctgatcaactgcagttcttttgtttcaggttccagcatctattaactgtaggttgcttgaaca

SEQ ID NO: 74686 - DNA, 972 bp, Carica papaya
  Intron number 2 from transcript evm.model.supercontig_32.1 05 (locus evm.TU.supercontig_32.105) derived from phytozom e v7.0 (chr-ID supercontig_32; pos 1294762 to 1295733 reve rse strand)
ctccaagaagatttctgtgggactgctcttcttaggtacatatgttatcatcctatttactttgcaccggatccctttcatcgtggtttttttggttcattcacctgtctactgaagttattggatgtataaaacacatgtttaataagaacaagttatcaaataacacaagagttgaatatgaaaataaaattaattttttattgtcggctcaattagttttttttttttagtttaggtatggttcatgaatcttatttagttaatatcttgaagtttactctcctactatggttaagatttttttggattaattttaaaaagacagtggtatatatagctgaagcaccagtacctaacaaccaataaccgatttggaggccaatggagcaactatatatattttagttaagatttacttatttgaaagttttatggtgtctataaaatgacatgtctattttgggctttagatatgtattactgattgtttcaatccaacatatccagattcttttttgtctcttctctttctttttttttcctggaaatccaagatatccagactgttctcagtctattttcttttcttttgtttttgctgcctcttctttctgtcctgcatcagttaccattatggtttttggacggtatgtgtactttatgccttcttcaattcaaaactccattgcagttaattgccaattgttcggcagtgaatagatgaatttttatgttctgttgaaattcttagattatattaggtcatttctgtgtttacttgagctgccttttgctgatcctaatccttattctactagtacggtagggtggtttatcaattttggtttatggaggaattgttagtagaaaggatttttgttccaagattaagatctgtaggttgttcttagataaagggttttgctaaagaagtaacaaatgtttaattttttgtcctggcagtacaga

SEQ ID NO: 74687 - DNA, 690 bp, Carica papaya
  Intron number 1 from transcript evm.model.supercontig_32.1 05 (locus evm.TU.supercontig_32.105) derived from phytozom e v7.0 (chr-ID supercontig_32; pos 1295771 to 1296460 reve rse strand)
cgtccaagttccttctttaccagcagtccgttcaggtataactgtcgtatgaccgttgatattacgtagtgccctgcatgtgtcttcactcttgcattactttttgtttaaatctactctattttcatatattagtagatattaactatcgagtatcaaatatgcgaaatagtttacagttgagcaacttctatcgtatattttcaatttaattccatagagagaattttatttctctttgtaagggaaggaatgccgttcagaaagacgaatttgtacttaaattgaatatagatttaactgaaaattataatgatattcaaatctttatcccatttttaatatattgccgatcctattttgcgcaactgaaattaacactaaactcaaacctcatgcttttggtgagaatggagttggggaaagcactggacctcacttttagagtatgttttattttgagaataggtttgttaaattgcgactcaagcttaaccctaaatcacaatgctattttcttttttcattggtacataaaaatataagaatttgggacctaatcattgagggtattctctttttgttttttaacatttaatcattgtttttctctttttcttcacctcattttacgaatactggtcttggaacgcagtccccaaaaggagatataagctatttgcagaagtt

SEQ ID NO: 74688 - DNA, 572 bp, Carica papaya
  Intron number 2 from transcript evm.model.supercontig_171. 23 (locus evm.TU.supercontig_171.23) derived from phytozom e v7.0 (chr-ID supercontig_171; pos 288367 to 288938)
ggatacgggaaagttcttcggcaattgcttcgtaggtaagttcatacatcattttacatacatttatacgaatcaattgcgaagttaactttttatgatagtttattttttgcgtatttgagtttgatatcacactgatttgctctggatgaattattggatgctgactgcacttggatatccttcagttttacgtggtttctgttaatccttttatacaaatagcttatttagatatcaaggaatgtatctccgatcgcatgggatcggtataaatgaaatttgtccagttcattgactaatcgttgactctccgcatgtatgcttcagctctttagctgcttctccgtcttactgcatattgcttgattcctctcatttgtacattattttcttttgcactttatcagcttatctggagattggatatgttggttgacttgttgggatataggttttaagactcgcagtttttactagtttatcatagaaccggatcctgcatctttcttttcgccctaatcagttttatagcagtttgtgttaaaagaaaagacctggggaggagcagg

SEQ ID NO: 74689 - DNA, 732 bp, Carica papaya
  Intron number 1 from transcript evm.model.supercontig_146. 22 (locus evm.TU.supercontig_146.22) derived from phytozom e v7.0 (chr-ID supercontig_146; pos 102305 to 103036 rever se strand)
ccttatccctcgctctccttctcgccaatctccaggtctctctctccatttcttctacttcacttcagtcttgcttttccttcacatttgtttcgctcctcttttcggtaacatcagtttgaccttttgactattacaatatttggcttaagaattctttattataggttacagtgcacttaccaatcaatccttttgaatctgcttaaaaactagaaccagtcttgtatttagttgatcgtttccaggtctcaatcaaaaaggttattttagagtcgtataaacttgcaggcaaactgtcaaaataataccaactctgttacaaatttaggccttgacaacattaaaacagaggtgtatatcctatagttattaagaattatctgtccctgtatttgcttggcatttctcgttgcatttcattcatacaagccaggggagcctgcctccccgtaatcttgctggtaccaaagtaagaaaccattttaaccttatgccttcagggctacatttttttagtaatgttgatggatttccactcaaaatctagaaatattttaaactggactagacaagtcatggttttatgagttccccaattacttaagttcactcccttgcttgattagttgcaatgcaatgcatttctccacagcttttggcgaatttttattgattgatcacattttccactgcttttctctgattgtttattgattgaattgatctcag

SEQ ID NO: 74690 - DNA, 718 bp, Carica papaya
  Intron number 3 from transcript evm.model.supercontig_16.1 09 (locus evm.TU.supercontig_16.109) derived from phytozom e v7.0 (chr-ID supercontig_16; pos 1674303 to 1675020 reve rse strand)
tggtactttgatatcatttgccatcatctcagtaggtatacacaacaactcaatgtcctcctttgcttttgcttacaatcatgcacatgatctgggaagggtctggaggttctagaaagcattttcgtggaccacttaaatatcttaatcgaaagctatatgaagtgagcttaaaatatttctattgattattacttacttgtcattactgtgtttattctctttgctgggctgcacgcttcacacacggggacaatctatctaatctcaagttctcgaagaatatttcactaggcactaaaattatatagggatatgatttgctttcatattatctttctattttaagatttttatttcattattattcggcgactttattaccatacatttcatttgaatagttctatatatctttgaaaaattcttagcgtttatggtttttatcaatttcactgataagcgatgctttgttcaaaagtggattgcctcttatgtgtctatggatgaaaatcctcatcttcctgcttctgtaataaatgatttttgtttacatgtcagggactaatctgttagaaaaatgtatttgtcgtaaatgttcaatttgttttaaagaaataagtggcattcaagtgcagtaaatatgtccatagctccacatttgtttactgagttctttctttattttgaattaggtgctatacacttcttcaagaag

SEQ ID NO: 74691 - DNA, 960 bp, Carica papaya
  Intron number 1 from transcript evm.model.supercontig_21.8 3 (locus evm.TU.supercontig_21.83) derived from phytozome v7.0 (chr-ID supercontig_21; pos 1028403 to 1029362)
gtaagcttttctctacgtttcctcggaaagctttccattatcgattacaaaaggtctaggctttgattgattgctgagaaaaatgcaggggctcaacagatttttgtttcttgacgagtgttttgttgctggatttggtttaagatctatgctacatgtataatgcgcatatgcgctcttctattgatggttcttttatttccggtgaacgagaatgcaatttgtgcttgtcgtctttggtggctgaaggacacactataaatcttttgttgggtttgtataacttcttaagaatggctcggtgtggctggcagttaagatgaattttcattaccacctttataaggctcatatgattatacttgactagggatgcatagacaattatctggaatgtacggagccagtgttaatttgtgttactgtcgtttccctggtgtattaagttctctctagcagtctgtgcgtgctaccaagaagatctgagaaaataaagaagaaattgtcaatccttttttccccttttgttttgtttctacgaaggatggtaaatttttaaacgtgctactattacccaatcaaactgagaattggttatcttaatctgtttgaaaatcacttaacagtatggaatgtatcttctgatctcttcttattttgctttatttgatttgaaactgaatatcttcatctgccatgtggtctcggttcccaaaaatcacatatataagtgaacattgtgttgccacttctgagttataccatgttcatgctttgtattgctgatgccagtaaacctagatgttgatttcacttaaaaattgcaagtattatttccttgcaaaaatgttagtttcaattattttataggttttgtatctcacagttgaaatttatgctttggcaattatttcttttttgttagtcgaagaggaaaaccagggagcccaaggaggaaaa

SEQ ID NO: 74692 - DNA, 422 bp, Carica papaya
  Intron number 2 from transcript evm.model.supercontig_6.77 (locus evm.TU.supercontig_6.77) derived from phytozome v7 .0 (chr-ID supercontig_6; pos 618775 to 619196 reverse str and)
ctgaagatttggatcaggtttgctctgatttcatgaaaattttgagagtaggaaaaactcctttttttatcttatttcatcaatggttttgtgcctcattttataggtaaaatagaaagaaaaaaaacaaaacaaattaacaactttccatactaaatgacagctaacattctgttatggatgcttggttgtctaataagaataaaataacaatgagcagtaacaaatgtaacttatttctaatatttctacaactcgctatcagataacaatgctaggtctttttaatgaaaagaaaaaacgttgaatctctaaattattgatgaaagatatttctttgggtgaagaaagtagaaacatttcaaagctccacaatgctgatcttttggattgttatttcagggggaggttaattgcgtaaa

SEQ ID NO: 74693 - DNA, 551 bp, Carica papaya
  Intron number 2 from transcript evm.model.supercontig_65.1 53 (locus evm.TU.supercontig_65.153) derived from phytozom e v7.0 (chr-ID supercontig_65; pos 1338290 to 1338840 reve rse strand)
tgcattgccggatagctgcaggtattttttagaaacttattggttcattttatgtaaatgtgagaattctcatgggggtcattccattgaggtgagataacctgattaattcaacatgtaatatcaaaatgtgagattttatgggagcatttcaaattatgttttatcagatacggaacccaactatcaaggtttcttaaagactttagggagctgaggctgtgagctaggtatatgatcatgatatgatgatagaaaactggtgttctcttttttaccagttaaccctagaaacatattgatgagaaccataccaaaatctgaaaactgccatgcctactaaagcttaggaacaaattgatttatgtattccatagttacctttgtggaatcatgtcaacaagtttgagtatgagatattaaccatgttttccagtagctttgcttgctgcagttaatgttattattttcagtggtgatgattatctagttaattacggttctttgcctgtgcagactgtttgagtgggaagaggtagagagctccgaag

SEQ ID NO: 74694 - DNA, 782 bp, Carica papaya
  Intron number 3 from transcript evm.model.supercontig_42.1 87 (locus evm.TU.supercontig_42.187) derived from phytozom e v7.0 (chr-ID supercontig_42; pos 1967387 to 1968168)
gcacttggaggtgaaatcggcaagattgctgataggtaatatagatgacattgagaagcagcttaatgattttggaatttgactgttgtcagattattttgatgttaggacggggtttttgaaataaatttgatatacaatggttgtttgtggggattttgggatgaactgttaaactttctatctgcagtgagtgtgaaataagaagaactgtgagaagtatgtcatggattctgcatgttgcaatgatgtgtagtggaagatggaagtcagtagcattgaattccagtcactggtcgtgagttcatgtacctggagatagctgcaggttcactgtttgaactcacaagaaaaacttaaaggaaaagatatgttatgaggtaattgaaggactcatctattgatgataggcatattgaaaagcagaaaaatgcagtttgttgagctgtaattgttgttatgaagagcttgtcaaggatatttattggtgaagcaacgcaagagaaggaaataacacacagaaaactaagctatatagggaatactagtctctaaatggaaactaacaaccagaaatgcttatagtagaaaagactagatgggaaaatacaatatttgtattttagtaactaaattaatgcatttttggtaaaggtcgtcctttctttttggtacaatggtaaacatcaaccttgctcatggttattttctcttgctgcaaacaaaattttttttcatataattgcactaacaattttttttttcgtttttcatcaatacag

SEQ ID NO: 74695 - DNA, 488 bp, Carica papaya
  Intron number 1 from transcript evm.model.supercontig_48.7 0 (locus evm.TU.supercontig_48.70) derived from phytozome v7.0 (chr-ID supercontig_48; pos 400203 to 400690)
aaagttttgcgaactcaagcaaaactaagcagcgggtgagtattaatggttatgcccttttgctgagacttgagctgtcaaaagctgaaacctgatgacttttccttgaaaaatttcatatcttcgtactggtgcaaatatttcatacggtgttgtactctgtggagtttttgcttttgaagtttggttgagaatgatcctcagtctctgacgttaataatagggttcacttttttacaacattcttatgactttgaggccttttttcttgaaacacgttaaaatgtagactggatttttaaatcgagacattcttttttaagaaacccatattcaaggaattgcaaaatcttgcaataaatctctccccccacccgccttcctttctctgtgggacttctgtatgattggatgtttttttggtgacttaactatcatactttttcttctcagaagaggaaactgtctgataaattaggaccacagtg

SEQ ID NO: 74696 - DNA, 822 bp, Carica papaya
  Intron number 1 from transcript evm.model.supercontig_563. 1 (locus evm.TU.supercontig_563.1) derived from phytozome v7.0 (chr-ID supercontig_563; pos 12457 to 13278 reverse s trand)
ctcactaggaagtggacccatttgggaggtaggtcatctttcattggtttgtttgtttactttatgtaggctctggttgttttggagagaaataatatggaaattttgttagagctttttttttcaatgtttatatgaatttcatgattttaactgagcacatcattttaattgcatatttgatttttgatttttattttatttgtagtagtttttttccaaccagaagctaaccctttggccaacccaatcttccaccggatacacctatgaaaatcttttctttatagaattattttcttccagagtctaactccagacaaacttcttgtacttttagagtactaataatttctgagtagtcctttcttccgttctgaacttaactttgatcattcttcctaatgaatctccatagccacttaccttatattgctttgttgattccattgtcttgatttaactatcaggaccaccatcctgaaatgggtctttaaccatatgctaagccacctagtggaggctccttttcttacatgtttgattatgctaaatggtgaatctggtttctgtgtattttatgaattagtaaatgtttggttttacgaaaatggcaagagtattgtaactttatgtttgcaatataaatttcatatgtgaaaaaatgatttggttcaattaattcatcaaggatatggaactttgtcacataaaatgtaaattaaattcatgcaatttatctcgtaattatgttctgaaactttaaggttttagttgttgtttacggatatgatgttgctttgggcagggcagaggaggagc

SEQ ID NO: 74697 - DNA, 541 bp, Carica papaya
  Intron number 1 from transcript evm.model.supercontig_67.5 0 (locus evm.TU.supercontig_67.50) derived from phytozome v7.0 (chr-ID supercontig_67; pos 700870 to 701410 reverse strand)
ttctgctgtagaaagggtttggatcggtatgtatcaatgatgggtcaattgatggaaactggagtttccttttgctttttgaatttctatttttgtttgatctgattatttgttaaagggtgctattaaatttatggtgaaatttgatttttgattgattggttacggcgggtgactgttgtgctggtggaaatggggattaaggtgggtttaaaaattaattaggtggatgttggtttatttttcattttcttttaactcttctgtggatcctaaaatgacaaattgtttataatatactgaactgagtttggttgtgactggtaggtttagcctatgtgaagtattcatgttttgtgaaactacagtaacagaggagttgtttacattactcattccatattctttttcttttttccctgtattctttaggagtgtgatgttactggcaattggggttcttttcaccatgttgtaatgatggttttgatgattagtttatgaaattctacaggaaagacagggagaagaaactgtcaac

SEQ ID NO: 74698 - DNA, 889 bp, Carica papaya
  Intron number 1 from transcript evm.model.supercontig_55.3 7 (locus evm.TU.supercontig_55.37) derived from phytozome v7.0 (chr-ID supercontig_55; pos 246917 to 247805)
caatcgagctccgaactatcgtggccttcgctctcgtacgaaacaaaaccctaggttcactttactctttattgtttgttcatgcttttcattcatttcgttttctttatatataaccgtttatgctatgcacatagtttgttatgtggcgggtttttgtaataccctaggtggaacacggttggggaagtgttttggtttttgttaaggtaggatccttaggcttatgttttggagctaatcatcgaaagcactatatcaatagatgttttgcatgctaaggttgtagtatagttttgttttgcagagaaacggctgcattacttacctgggaatgccattttatagtccgtggctattctggttattggaaacatgttaatggcgtaaacttatggggaacatgttgataacgtgtatatataagcattagtgctatagctattgatccgatgtattattgataacttatgagctcatatgggtagtaaacgtactcgtagttaagtatttgttcaggtaattattagttcatttgagcatgtacaggatcatattgggcaaaggatgctttgagtgaagttacataactagttttagttggtggacgctgcatgatccagcgttatggtaatttaacttacagtatgaggtactggcatactaggctttctagagaattataagcctgtagctttaacacttcatgcgatcattctgcattttgcccgcaatctttgatttcgggagagttttgtttcagctttttgtatatgcatcataggcatgtccctaagacctattaaaaacaagggagctgctgatgggctttcttcactattgcttattctcaggaatcagctattttgctacctcattgccaagagca

SEQ ID NO: 74699 - DNA, 563 bp, Carica papaya
  Intron number 1 from transcript evm.model.supercontig_286. 7 (locus evm.TU.supercontig_286.7) derived from phytozome v7.0 (chr-ID supercontig_286; pos 28268 to 28830)
ctcttccaggtttttattttgttaatattttactatcgtttagcagttttaatgttgtttacttctttccttataatttgtgtgatgttggggtagtggctggggatttgggccttgctgattgtagattatgtctaaatttgagtcgaatgtacatgggtggtacaacattttgtatgttatgtcttgctgttgttggtttgttaggtcatttttagttactgcaaacgatcaagatcatagctaccaatcactcttaagaaacccatttttgtttaagagtcgctgacacacacacacacacacgtagttctttttaaattcatacgaggatgctgctgatttttaatgcttcattatgttattaaattctctttatgtcaatcatatattgtgagtcaacctgttacttgtactggctcctggatcagataagaaccctctatgacatcttttgctttgggttgtgggactacccgttgaatgcaactgctttaagccttcatgttgagcattctgtttaatggactactaatagtcagttttcccatatttgaaggctg

SEQ ID NO: 74700 - DNA, 564 bp, Carica papaya
  Intron number 2 from transcript evm.model.supercontig_286. 7 (locus evm.TU.supercontig_286.7) derived from phytozome v7.0 (chr-ID supercontig_286; pos 28846 to 29409)
aaacagctattcctacagttaccaaggccttaaaggtaaaacttcctgccatacctaatatcttttcttcgtaactttgttattcatatgcttgtattgcttactttattttaagcttttccttagttgatgtaaaattaaaatcaagtgattgaaattttgcagttagctgagcttgaaatctactcttttatatataaattatcaaagttggaagggttgaatatgctcttttcaagaaacagcccactgtttctaaattggtctccttttcgtttgtcaatgagaggggaaattaggcagaaggtcatccgagtagggagtgattttcaatttcatcagacaaattttcaaatattatattttcattacgtactaaatcatttcagtcttatgactctgtcactatgtgtttaattaaactgctaaatattactttagagccgattgtcactaatgaatgttggttactaaaaaacttgctaatcatggacttattcgctcactggctaaaatctagtaactctttacttgttaacgaatggtgcaagtagccaatggcag

SEQ ID NO: 74701 - DNA, 1028 bp, Carica papaya
  Intron number 1 from transcript evm.model.supercontig_4.49 (locus evm.TU.supercontig_4.49) derived from phytozome v7 .0 (chr-ID supercontig_4; pos 1377246 to 1378273)
gaggagaggttaaccctctcggtgagattttgggccatgtttaaatgggaagctgagaatttagtatcccctgtttctgttgctagatgttgcagttcctagttttcttcagcttcaattgtttgggctcaaatatgatcagtctttgctttcttgtgatgctaatcttaggttcaatagacgccattaattagcatagaggattgagagaattaatattgagagtaaaactgttaagttcctaggttagttaattgaatattattggtgagaatttatagtactcattgaatatactttgttgtggatatgtattgtcttactgtctgccttgacagctttgattgaacaaaatatagctggactgaaacatgctgttaagtacaacagaagtatagcttgttctaccaaacttgggcgcttctttttcttttggttttaggaaactaactgggatggttcttgtggcagtattgcagcaatttaaggaataaatttcttccttgcactctcacattgacactttcttgttgcctcagatttttgcttggattttctgcattactggttctttcgtacttgaccaaatgatcaaagcttggacaatataaccttgtttgtcaggattggaaacacgacctttcactagccacaattgtgattgctttttagttattgataactacaaaattacttagacttaaggcatgagattttggtttatggcccgaggggcaaggagctttctcctgggattatgtgaactataataaatgtttttcctgtcctatggtctctccttccgtgaaattggtggtgcacagaggtttgggttacaatcccctgcacatatgtgggtttatttgctttacaaatggagaacaaagggccagggatttgttgatttttgactttcttcattgtttgaccacctattgctgctattttggtttgctgaaagtaacaggagattttttttttgttttcaatcagtaacttttgctactcttggtgagaagaccacggtg

SEQ ID NO: 74702 - DNA, 802 bp, Carica papaya
  Intron number 3 from transcript evm.model.supercontig_46.5 4 (locus evm.TU.supercontig_46.54) derived from phytozome v7.0 (chr-ID supercontig_46; pos 443233 to 444034)
caggtaaagaagcattctacttagttagcttgtttccatgatctatatggtgaacaaaaatagataagtagaatagggttcctctccaaacaccccagatcttacatttggaagttggagatggaagctttttttttccagacaacttataattttatatttagtaaatagaaatcataagtacgtattactagattcaagttggaatcatttgctgaatttttttatctcttctcttctcttccttcatttatccatcttctctctttttcctctctttttgatcttctacagttaagataataaagatcttaatttcatctctccctttccctctcttttcatcactctcttccgaaatctaaggatgaaaataattatgaattttcaggtttatttagtcctccccgactttgcttttcactttataaaataaaaaactggatgttccattaaaaatattgattttctatgttgttgattatgctgtttttatatctccaattcattttttctcataaaaaattagatttaatgtaaccatttgacgatcgagcttagtgttatatgccaacatgattcttaggttcttatcatgtgcttgtatgtgcaagccaacatgatccgcagaactggcagaattctagattgagttaatcaataaatttgatgctcatgaagatgccaaatgagttaatcaaagctagtccttcatgtgttacttgcttgtggtttttgaaaggtatgttatttacttgacctccggcttgcctttaaacagagaagcagatcatccatagag

SEQ ID NO: 74703 - DNA, 750 bp, Carica papaya
  Intron number 1 from transcript evm.model.supercontig_150. 30 (locus evm.TU.supercontig_150.30) derived from phytozom e v7.0 (chr-ID supercontig_150; pos 294278 to 295027)
cgaggctcagagaacaagtcgccaggcaacaacaggttccagtttttctctccgcttcgttactttgctccaattggaaccctaatttctctccacagaaacgctttagatcgaaatgcatttacgattcctcagctggatatccacgatttctttgtggaatccgacatgtttgattttttcaatcgctgattggtctttgtttgtcttcttattttgtacctagctgatatcgatttttctttgctgattgtaccgatgtttttatacgtgttcccttggttatgatcaactaggtcaaatttataacatgagtttgaacgatggatctatgaaatgattgtttcgattagcttcggtgatttcagagtcacttgagtttctgctgttttttctttcattaatttgtagagcttttgataagctgatgttcattctttttgttttatacaaaaactttttagagctagaaatatgtattggcgcgatgaactgacgaacatgttctggtgaaacatggaatgataaactgattcaccatgttatgtttcaatttagtgaagcaaatccttttttagattgaagttcgatgctgatccttaaaattcttatgggagttgttgtaattgcactgtttccatcctgcatatttgtgtaaattcatgcagaagacagaggaggaaatgaattttcatcagcatcctataatatctagggattgaaaaattgcagaatctggtataaggtgtg

SEQ ID NO: 74704 - DNA, 861 bp, Carica papaya
  Intron number 2 from transcript evm.model.supercontig_23.3 6 (locus evm.TU.supercontig_23.36) derived from phytozome v7.0 (chr-ID supercontig_23; pos 281960 to 282820)
caattcgtgatttaggtatgtctgaatgtctaattacaatgcaccacttattctctttttgttgtcataatgaatagtttattttgattttattttatttttttgaaattatttgatgttcttggaagttggttatctgttcaaagtctcagttgtgttttttcctcatgtctgtattcattcatggaagatctttgatagagaaggaataactttcctttgcaaaataaacaggtgttgctagtgcagtagtttattcagtttccagacaccaatcacttgtaaacatcctatggccatggttatatatgatgtgaatgagttaggtatggggaagaatgttgataggatatgaaattttgacacttgagcattatgcattttcccatttcttcgtcttttgagactgcggttatgccatacatatgcgccaagttctttttttggggttaaaaggtatgtgccaggttcattaggaaatttcctgctgttctgaactaaaatctgattaagaagctcatgaaaggaccatactggagtggaacttttactaaatttcaatctcattttgttgaaatgctaaatatttttgttgagtttcctgtgatattctgatcttttaaactctttgttatttcctgtgcttgttgagtgtcttttgctttttcatcaagtatcgctttggtgaatctgctgttatgggtgtgcttgagttcatctattcttttctttttaaaaaaacaaaacttaaacatctaacggattttgctggtttctcttggttgaagtgacatcttctaactggatgatacttgaagcttccttctaagtagttgcattttatgtttggggtaggcaaga

SEQ ID NO: 74705 - DNA, 327 bp, Carica papaya
  Intron number 1 from transcript evm.TU.contig_28922.2 (loc us evm.TU.contig_28922) derived from phytozome v7.0 (chr-I D contig_28922; pos 7432 to 7758)
gtttaagcgattgtcaagcacaaaccggatcatctgtaatttcttacttcatttttttctttacaatttacttttattagtttactgtcatgcacttctttgattgctttttcctcccttcaaaaactgggttatacgattcttcatatgggtctctctctctcttccccttcttatgtgaatttttttgggttatttttgcatcatttaaattgttttttaaatggtgtatattgtctttaacttagtgttattattattatttttttgttttggtttgctgtctgcccaattgtttaactttctgtataggtctgcactccttca

SEQ ID NO: 74706 - DNA, 1051 bp, Carica papaya
  Intron number 2 from transcript evm.model.supercontig_248. 6 (locus evm.TU.supercontig_248.6) derived from phytozome v7.0 (chr-ID supercontig_248; pos 198701 to 199751)
gggatccagtttctgctgcaatagctatagttaaggtaccagcttttgttaggactgatatagcatgcttcttgtacttgatggttacggtgttacaatcactgggatatttttgctgaagggcgcatattattcaatatgattgatgttttagtaaatttgaccacagtcctttatatttttacaatccccatttttgttgataatcaaggagtgaattgcttgctttcttttttggggaatgaacatatctatttttgcagccatgagataaaatttatctttctttttttctttttttagtcacaaatcacaaaacagctagcacttctagtccctgaaggtgaaatatattctaccgttcgtatcgttatatagatgaaacagaattgatttcctcatttatgttgccactgtttcgtctagtaattctcatagtcctgataatcacataaacgaagaccatttgggtgaagctcatatctatagttcctattaagtaggaacctgagagttgttttctagatatggttctaccgatcaattttttattttttggcattaagtggcttcccttgagacttgaacccatgctctgtgcttcaggagtggagcttctaatgactaatgggctaaactgagatggtgttatggaatacattatttatttaacttttttgtgattattcttatttatccttgtagacacattattactgtattgtttctaatctgcctaatgtacaaaaaatgtgaagaatcaacaacttaaaatcttcaattgttaaagtttcagatttagtttttggaggagttgtgtgtgcagatgtggtttgatggggggttggtttaaatagctccatcagtagatgagtttttgagttctaagttgtataccaagttttttagtttcctatattaagaatagtgggtgtattaattatgttctttttggtactattagactgtgaaactctactacattctgggtcatctttttgcttaccattcagatagctttgttgtttttaggggggtctcacagctactg

SEQ ID NO: 74707 - DNA, 559 bp, Carica papaya
  Intron number 1 from transcript evm.model.supercontig_26.9 7 (locus evm.TU.supercontig_26.97) derived from phytozome v7.0 (chr-ID supercontig_26; pos 740708 to 741266)
gaactccattgcagaaaagctccaaggaagatcaggtaccgaagtaactctaattttatatatacttgtgtatgtgcgtgtgtgagagatctcccaattccctctatatcttccggtcgaaagtgttatcttcttttacaattattacttgattttgattatcttctttcccataaacggagataactttgaagctcaaccctcatatgtgtgtgtatatataaatatatgtacatacaaatatatatatatatatataacactaattctcttggctgataattagaaaagtatatatagttgctagatataatgattaaagatattcatcatcacatcttgcaatatttgcctgttcaaatttgaagtttggtggatggaattttagcttgcatatattaattttagatttatccaaataattgacatatatacgattttgataatactcaagaagatggtttagtttagctccttttctttttttttggtgaagtatttataatacccttgattaattgtaggaaagagttgcagattgaggtggtttaatcagctt

SEQ ID NO: 74708 - DNA, 882 bp, Carica papaya
  Intron number 1 from transcript evm.model.supercontig_428. 2 (locus evm.TU.supercontig_428.2) derived from phytozome v7.0 (chr-ID supercontig_428; pos 5781 to 6662 reverse str and)
ccgcaactgttgaaaccatagccaatctcttgcaggtttgtattttaagtttgatggtgttcacttcgattcggtcatggtgtatcttcatctgcatccatttggtggtagttctattttgggcttttctgggtgcgtttcatttgctatactggttttctttcaccttttttgtatatttggactctgcgcaaatttgaggatttttgggatctggctatttttgtggttttcctctctttcaccaggacccatgggcattgacgttttagggtctggttttgtagcatttggatattctctctcttactatctcgtcatttgatcataattagaaattttttttatacatcaaagaatcagagttttaccccaatcgacctttatgggctgagaaattctatggcctctctgaggcttactttataaggttgcatagtaattagtagtttaagtaatcttataacatttcttagtaattttgtagtttgttataagaatcgctctgaaaacatcagtaacttagtaatccactaattttgtgtagcaatccattagctttatgtagtaagtaattactacacggtgtcaattaattaacacacaattattggattatcattataaaaaaaaaaaaaaaaaaaaaaaaaaaagttaggaagtcatcatgcgtttgtggattgctagggggtgataaatttttatgtatgtttaaggttgttaaaattaattttctcttaatgagactttataacttggggtaaaatgggacataataagtttttgcaatgcttctttcttagtgttcttcaggaatacttttgatagaaatttaatttaatgacctgggaaaatatacatggcaggaagttgggggtaacc

SEQ ID NO: 74709 - DNA, 663 bp, Carica papaya
  Intron number 1 from transcript evm.model.supercontig_80.8 0 (locus evm.TU.supercontig_80.80) derived from phytozome v7.0 (chr-ID supercontig_80; pos 605248 to 605910 reverse strand)
ttccttcgttcaaggtgagaattagtatttattggtctgatttttctatatcaatatacattttgtcttgttcacagatcaaaatagaattaaataattgataagcttcttctattatctatctacttctatgtttctgtacttccaatttgtatctttgtgtgggggaaacaatggatattgtgattttgtattacactcacacactctctctctctctcatgttttgtgttttttactatcctcactcactattttcatgccaaattccacgaaaattttctcaaagagaatagaactatacaaaaatccatttcaatatcttcatcaagaacataacttgactcatcacgtcagtatcctacaatgggtatacagtttacttatagcatgcaaaaccactggacactaaaaaggatatggtgaaaataaccaaaccaaggcatcagtattgaaagaatatttatatgtcaacttcaaatgttcccaaatctaaatggaggctcatttcggcatttcatcaaacaagtaatatgcaatgcacaacattaaaaccctgagccgtccaccgcactttaatcaaaactttcctttcaacgtttcatcaactctcagagaaataaaccagtaccggaacaaaaagaagaataaccacaaagaaag

SEQ ID NO: 74710 - DNA, 701 bp, Carica papaya
  Intron number 1 from transcript evm.model.supercontig_58.4 1 (locus evm.TU.supercontig_58.41) derived from phytozome v7.0 (chr-ID supercontig_58; pos 474147 to 474847)
caatcatacttgtaagtcatttttctatgagagtatgagtttaagttatgttgtacattcaatgcgaatttttgttaagatattataatattattgattgtgttgttataagtgtgtatgcatcatttaattattaaaatgtatgaattcctacaaattgttctcttatataactattaagtagttttacatttttcttgtttctataaaatttcatttcatcttatcttatatggtatatatgtatttttagtgccaattaatggattagaagctagagaaaagtttaaaatttattagttctttcatgtgtctataattattagtgaacaaagaactcatgcatgtaatcataaatttgttgtctttgtttccttgaatataaaattatttatttaataacatggtgatattaaaagcaacttagttattttcttgaatacttaatcaaaataataatagtaggaccttgagaagataaatatacatccatgtattgcttttgacatccccttcacacatcttctctaagatattgaagttgtattgaaccaacatcatcatcaaatgtcaaattacccaaagacaaacattagatgtttgtttttcctttaggaaaatctttatatttgagattattagtgaataattattgatacacacacattaatttttttgtttcctgaatcagtttgtaaaaa

SEQ ID NO: 74711 - DNA, 498 bp, Carica papaya
  Intron number 2 from transcript evm.model.supercontig_46.1 65 (locus evm.TU.supercontig_46.165) derived from phytozom e v7.0 (chr-ID supercontig_46; pos 1611262 to 1611759 reve rse strand)
gttctggctggtttttttctgggtatcactggaatgtaagtcagacaagattattgtaattataattataattgtaattacatttaaacccattttcagtatctattaagaacatattatgaaagacttgattctgttctctatatatatatatatatgtattatgtatataaacgttttgttcgtttgcatgtggtggatcttctattgataaaagcttttaatgttttttactttggtttttcatgttattgaatttgaaatgtagactatatatatatattgatgtatataatgactgtcaaaaccgccggaaaaagagtaaactgctggcatatctaggaattaatatttcattttcaaaaaaaaaatcctaattaaattattttgagagtactaccatatttttgaattttgttatacacgttacagtagatatatatatatatatttaatttttgctaaatatttatgtactacagttttagcccaggagct

SEQ ID NO: 74712 - DNA, 497 bp, Carica papaya
  Intron number 1 from transcript evm.model.supercontig_21.5 0 (locus evm.TU.supercontig_21.50) derived from phytozome v7.0 (chr-ID supercontig_21; pos 679321 to 679817)
ggtaataaactcaacttttattatatatttccccctttttatgtatatttttttacttgatatatatatatatatatatatatatgtatgttatatgagtggttctttatatccatgtttatatatagactaatcaattaattaataaattttttttaaaattttgatcatcaaacttgttagcatattatttgataaattttttaatattaatagaaataagatctaaaatattaaaaaaaagtattcaataaaatatataattggtaaggtataatagcgcaattatttaatattgacttataacagaggtgttattccactaataataacaaaaagtaattaataaaaattattccccattttctttttataaatttatatatatattttatgccattaacattaaaaataatactactatatatatatatatatattgattatatttatttgacgatgcatttttttcttctctgtttgattattacagaacg

SEQ ID NO: 74713 - DNA, 647 bp, Carica papaya
  Intron number 2 from transcript evm.model.supercontig_8.71 (locus evm.TU.supercontig_8.71) derived from phytozome v7 .0 (chr-ID supercontig_8; pos 466640 to 467286 reverse str and)
cgaacgaagaggttgattttgagttctttttgagggtgagtttatcagatattttactcttctttgttttatgcttctttgtaactgacttatagagatgaaatcagtgccatctttttattgtttgaccatacaggtactgctcttcaaatttgaatcggttgtttactgcgtttgactttcatttgaaatttacttttcctctgtttgcttggctgcaacctgtagcgggaatcttatccagagcgtttttttttttacttttcatttcttcaaatgacttgatctatgtttccatattgctacgaatatgaaggcagagcaaagtccagtttcctactgtttttcgcttgtcactcacaagcaaattttagtatagatatctgttttattctaacgtcaggcaaaaacgaagtattaccgtttagagctcaagctttttttttttcttgctttttttttaggataaagagaataataattttttatcttctaaagaatcaaataagggggatatgaattacgagagttcaatttctgactggtgtaggatgtgatcctgaatttaaagtggatttttttccctaattggggcgatacttctgctatcaggtttatttgaaactccacgcgcacgtaagtgcaag

SEQ ID NO: 74714 - DNA, 977 bp, Carica papaya
  Intron number 1 from transcript evm.model.supercontig_16.4 4 (locus evm.TU.supercontig_16.44) derived from phytozome v7.0 (chr-ID supercontig_16; pos 885014 to 885990)
cagcctgatcagcgtagaaaggtaatgaaatataaaattttataaagtcgttgttcttgacgaaagatctgattggtatttgtgatgtttctttttcatgtgaatctaaactgaagtctgtctcttctgttgatatattttcctggcatttgtttattaaatttcatccttatgttcatagatatgtttttgtttttctgtggtccaaagtagtggatccttttttgtgttgtgttgtgctggtgtaattcctgtattctggatgggaatgaacagcttgtcatgttcatgcctaatctctccctatgccacgtgcttatgaccccacttcgcgaatttgtgggagtggaggtcccagcagaaggctgcccttttgtagttttctcggcttgttgttcagggtttattaaccgtaaacttgtaattttattgacatgggagatatttacatacatagtacatatatatatatatttatatatatatatatataatcttcttttgatagcactagaacattagtttgatgcacctgccatgagcaaccaattctgatgtctacatggtgatggtgtttgactaagttatttgtatcccaattttactgcagaatcgttgtaagagattttgctccatctaatggtgcagacatcttttccgatagtatctgaactttggttttttgttgtgttgagggcaactagaaaccgagtattgtttgtatagtttgctttcatggaatgatgaaatatttgatgtgtctatctaaagtaatcattcatctggaattagttcagcaggtgttaggcctaaatattctctctttgtgataccgaatatgtttacaatggttgaattgctgtttatattggagttgaagctgtattgagtatttgcttttctttgatgcgatatttacatttggtgttatgtcaatcacgtgacatgttttatatttgtgatgcagtctactgtag

SEQ ID NO: 74715 - DNA, 1056 bp, Carica papaya
  Intron number 1 from transcript evm.model.supercontig_80.8 3 (locus evm.TU.supercontig_80.83) derived from phytozome v7.0 (chr-ID supercontig_80; pos 617215 to 618270 reverse strand)
cttgggccactgtcaccggttttgctttcgtaactgcctgagacccattcacttttcctcttcctctcccgtgattgtatatgtacgtatatgtaccaaaaatacactcagattcatgtatattcgtgtgtgtatgttcatggaatcgtgtgtttcttcatgaaaattaagagaaacgttttgtcaaatacctgagaagcataattttgaccttttttgagttttcgtgggttaatgatgaataagtgtgttctttctctgtttctctcccgagcccatctttcttttcttagattcatacccattattttgttcaagaaattttagggacccaaaccctgaaaatgaaaatttagtggagtagagtttctccatgcaagtaagaaaagggagaaaagcttggtcgggttttggtgtttgtctgttacttgcctttctacatcattaggtatttttgttttatatgtatctgttttattttctctggacggtaaatgcaaattaggagaagcagacaaagaagataaagataatggcaatcagtaaacacagccgaatgatttgattggttagccgcaagttcttactagtccttgcttccttgatgattgatgactctctcattatctttctttatgtttaattttcattaatcaaacacagtttcttaatttcgtagtcttgcaaatagattagtattaactcttctttcacttcagctttgtttatagggaaaattggttttattttgttgtgcaatgtccagccagtacaattgttttacttgttggagtaggttgcatgccgttgttgactttagagccttatattcatctcatatgtagctaagttgagcagcaaaatttatgcacttacaatgatttcttttagtaattataaagtgttctataagcacaaataaattggaaagtctttataaactttaattttcatgttaagactaccacttcaatgcagactcatacttttgcattgatttttttttcttgtctaatgtcatacttaggtagggttaagtggagcattggagactct

SEQ ID NO: 74716 - DNA, 406 bp, Carica papaya
  Intron number 2 from transcript evm.model.supercontig_570. 2 (locus evm.TU.supercontig_570.2) derived from phytozome v7.0 (chr-ID supercontig_570; pos 884 to 1289 reverse stra nd)
ctggagtcaagtggatcttctccgagtgtgagtgtggtttcatcattagctttgttttctttatttatataaaaaataaaacttagtgaaaatcatttgaattgttgccaaacttgattgattgtaccaaaactgtttcaaattggagatcttctgaacttcttaagtgcagtattttttggtgtccatatgctaagaacagagcagatttcaagaaacaccactagggataactttttacctctccttggatatgaggtgaaaaacatcacccttatgttttgtgaatattgagcatttcctctccatatatggtttgaaaattattatctattcaaatttgcattgttgctatcttgtcaacaatatagtacttttttggcgtctggtttgttggtgtaccgga

SEQ ID NO: 74717 - DNA, 815 bp, Carica papaya
  Intron number 1 from transcript evm.model.supercontig_85.3 4 (locus evm.TU.supercontig_85.34) derived from phytozome v7.0 (chr-ID supercontig_85; pos 219884 to 220698 reverse strand)
ggcctcactgttccggttcttcgcttcttgcgcaggtgttttatagctccttttcctgaatcttttggttacaaatttatgatttttggcggtttttattgatagattctgcactcttgctatactgtcatcaaaattgtgattatgttgaacctgttggaacttaagaacagaaaaataagaataaacttctgtgcttgagcttcgttttcttgacttctgtcaatgtagtacctgctgttctgctattccagaaacaaccatagtcccgtattctttggatattagaaagttttccataagcatactccaatggccataatgaccatcaaaacatggaattgctggctgcacaaagctttcaaaagctatttgtggtttgctatataaagctgctgctttttacttctgagaggctctaaagaagagaaaaaataagaacaaaatcagaagagaggagaccagaaaatcatatcaatatctattttctcttctcctgtcctctgagtttattattattttttctcttccttagttccaacagaacctaggtgaagacagtttatcctgtaattgtgggggtgattagttagagagcttgtgaaatggtaatcatggaggtaccaagctatttctgatggctgcttgttgtagttttgttgcatatctgcctctgtataagatcaatggatattgcattttgaatttttcttattgtaagacaggactttgtagaagattttgtgttgatggggaaaaaaaaattttatttccatgtaggtatccaactcttttccgtgaatttccacacgatc

SEQ ID NO: 74718 - DNA, 821 bp, Carica papaya
  Intron number 2 from transcript evm.model.supercontig_2.37 (locus evm.TU.supercontig_2.37) derived from phytozome v7 .0 (chr-ID supercontig_2; pos 703193 to 704013)
gcccaaatcaagtacgttcgtcgttgtgaaccatattgttagtgaacctttccctgcattgggtttttttacataatcgtttaaattttctacattgcttgtcttgattacatgcagtaattatttgacaaatgtaattctgaagtaaaaaaaagtatgtagtaaaaattatcaagtaaaaaggcaaaggaaggaatcagcttcctgatttttatgacttggtatgttctgaggttgcatgatcattatcttgattatgaagtcacttacattagcttgatcatgacatggtatgttctaaggatgacaagcacattgcttcttgtatgacacctgctacagatgcatatcaataataaaggggtgttggctccttcagtaccaatctatgttgtgctgaaacaagcagcttgtttttactcgtatggatgtgaacctgaatattgcctccaaagcaggagacagactagggaaaacaatgaattaacattatgtagttctagtgctacatgttagatctaaatattgttgtccagaaaaatggaatgattggtcagtcaccttattctcttgtacagaaaattaaaatattttgatactgaactcaatccaagagagggagataagaacagtgggcttggcactcacatgacaaacatacatggtagttgttggtatttgtatgtcctccttggagatgctatatgttacattaggtttttttcatcaaggtctttcagatttcaatattcagctaatttgatctatgattgctcatacattgtcctttacaatatttgcagtcagattccacgaccaac

SEQ ID NO: 74719 - DNA, 492 bp, Carica papaya
  Intron number 1 from transcript evm.model.supercontig_282. 11 (locus evm.TU.supercontig_282.11) derived from phytozom e v7.0 (chr-ID supercontig_282; pos 44277 to 44768 reverse strand)
ttcagcttggaattgaccacatcttgttcaaggtcattaaatacccacaactacttctttttctttttcgtttttgatttaatttttcataagaaaggaacagaaggaattaatggggtactgtttatgcacgtgagattcacgtgtctcaatgcttcatcccaattgccatgttcatgttgtatatgcattcagtttgtatttttttatttttattttttgagggtgataaggaacaggaaagtttgatggttttcatgattgacaacatgggtttggttgattaatgctcgagtctgcaacttttctgaatactcagtgaagatgatggatggggttcactggcaatctgtcatgaatttgaaaacatttgttattgtcagcattcttggtatttttaggataaataataaataagcttacaactgcttaattctcaaggatttgaaggggtgaaaatgtctaataattacaagttttcttgcagacacc

SEQ ID NO: 74720 - DNA, 731 bp, Carica papaya
  Intron number 2 from transcript evm.model.supercontig_28.1 03 (locus evm.TU.supercontig_28.103) derived from phytozom e v7.0 (chr-ID supercontig_28; pos 1484027 to 1484757)
taaaattgttagcgtcctaatacatcttttacctggtaagttatagacattcttcatccattacctgttgactagaaacttcttattattgattcttgcaaaagttacaagaattggtattttactctctgcacaatacatctggaagatagtgataaattcgttatacctagtttacactgatatttttttcttacgctctaaggatggaaagcactttttgtaagattttaacgtaagcactctttagagtgtttggaagcatgaccgctaggcttttgtctctggttcagtttaaactgttagttagtcatggtatattttatcttagatatcatgatgttgtttgttattgacagttatatatatatatatattttaatgtgaatggagaagttggtaaaaaatagtcttctagggtattttttatgtttattgtgataaattttatctaaaacaaactattattctgcttttgtgttaaatataagttaggcgttctcatcttatgctttgacaggcatttatcaaaagtagatttgtaataagagttcttgttcaaacagtagtcatatgctgcaattaagttttgtcattaaaaaagtttggtacctggggcattatgcacagtaaaagaggccaaattaatgttctgcccattttgctacaatgtcatttgatttgagctttctaatacttgtcttctcaggacttgtatttttcactattag

SEQ ID NO: 74721 - DNA, 380 bp, Carica papaya
  Intron number 2 from transcript evm.model.supercontig_2.33 8 (locus evm.TU.supercontig_2.338) derived from phytozome v7.0 (chr-ID supercontig_2; pos 3943841 to 3944220)
cttcaatttccagagaagataccactttgtttctggtaatttttctttgtggaatgatatttattattagcttaattttttttgggctgatatacacaatttgtttttctggattctggtgaaaaattgtgttacttgtacattgagtagtagctcttaagagctaaagctttgctctttggcgattgatccatatggtgaatttgttaaatttaacttaaatagtttcatacaatttttgcttagagatatgaagagagccttgcattttcctgtttatatataattattaggtagttttcaatttttttttctctttccctcgttttttttttccacgttcaggatatagacggagaagtggtgcagcacttgaaaag

SEQ ID NO: 74722 - DNA, 986 bp, Carica papaya
  Intron number 2 from transcript evm.model.supercontig_91.4 1 (locus evm.TU.supercontig_91.41) derived from phytozome v7.0 (chr-ID supercontig_91; pos 484667 to 485652 reverse strand)
tttaccaacacaatttcggacatcgtccctaccaggtttttttatctctcttttcttcttcttgttccttcctttctggttacttactatttgaatcaatatcttggttactctttggtataatcggagctgtgaattgctactgtgaagtaaccctcttaggataacatatagataactgaaattttagatgtgagctggtaatttattgtttaaaatttttggatttcgtacttttgtgatgtaacttaatgtagctaaaccattttaaaagacatatgggaacaactgttactcgtgctagtgcagttttctatgtgcattaattcgaatttatccatgttgctgagtcttgaatgaaaattcctgtctcacgctctgtgttatagaggtttacacataaagtttgtttgagggtttttgatatttgtttctttaggatggtcaaagactgaatttcatttacaactatttgatttgagtatttgaaggattttagcatctgttcacctcagctaaaataagattccctagttcttttcggcaaaatttagtgtgtggaattcttctttttaggctatgtttggaataaatttagaaattttttagaattatatgtaaattcacactttattagaagatgataaaaaaagggctttattctgaatttcatgtataattatttataatgcatttttaattttgtcaaattgatagagttttgaatacctatgtgaaatttcatagaaggtcagtgtttggcacttagagagcgtagttttacatttttcaagttgaatggatctcaaaaaaattctaaatttattgtaagcacagaattattctcttttttcttccctattaaaacttcttggatggaagtagaacatataaatatatatttttgaggtaaatggatgaaagtagaacatactgaagcttaaaattttttactgacttatcttgttgacatagggtaacatcca

SEQ ID NO: 74723 - DNA, 759 bp, Carica papaya
  Intron number 2 from transcript evm.TU.contig_33984.1 (loc us evm.TU.contig_33984) derived from phytozome v7.0 (chr-I D contig_33984; pos 1680 to 2438)
cacaaaacaattattctcccatatttttgcaggtatgtgcatcaaactgtcacttttagagctccaaccctactgtcctctttataaatagtctccctttctttttgatgttataaactacttttttcccttatttttagaattcaatatcacttactttttgaactaggatttgagtttagagtgaggtacaaaggaaaccacttggccataatgtccatgtgtggttgggaagagttcattatatcttcatctttgtcaaatattacccaaggataatgtagcgtactaaggcctgtatctacttttgttttttaatagccaatataccagtaatgcaatatgaatccttgcacgcatatagagcattgaatagggaaggaataatatggaatatgttttctataatacaaatttgtgaggggaggaataggagcataaggttttatagaggggaagccttttgcttggttatggatctcatggttggaattaatgctagaattttcaaacaattactttcaaacattatggtttctttgggagagggtgatgttctttgcctcgtcactggtcttaagtaccatatttcgtttaatttgtggttttgttagtacctaatcatgttatgcatgatccctatgtggctaaagaaaattacttcaaatattttattttgctagctttttagtttattaatttgtttcatgtatttgaacttgtgcacagtgggttgattgtgtttcacaactgttgcga

SEQ ID NO: 74724 - DNA, 447 bp, Carica papaya
  Intron number 1 from transcript evm.model.supercontig_47.4 5 (locus evm.TU.supercontig_47.45) derived from phytozome v7.0 (chr-ID supercontig_47; pos 633693 to 634139)
ggaagctgttccttcttcgttatctggacttggaggtagaatttgaatgtggtttcttgttgctttcctgaaatttgaatagtttgtgtgcttttctgtaagccaaaataggaacagttagacgtccgctgtctaggttgctgattaatataggatggagattgtaaaatctagtcgatttactggtcctttacattattctatgagaataaaagttagaatatatatacatacacatatatatatatatatatgtgcaaaagcaatagttgggcgagttggttgaatattttgattcctcacataggtgactgaaacttactcacttcacaactagttggaagctccttttgcgtatcttcttgcactttcttggttcaaaatagacactgatgcccaattgaaatgttacatatgcagggttcagtttggccattaggcttttta

SEQ ID NO: 74725 - DNA, 945 bp, Carica papaya
  Intron number 1 from transcript evm.model.supercontig_19.7 1 (locus evm.TU.supercontig_19.71) derived from phytozome v7.0 (chr-ID supercontig_19; pos 494073 to 495017 reverse strand)
tggttgttaaggacacaaaccatcaagttgagaaggtacttcccttatttataaacctttctttacctctagttggcatttatgttcattcttttgaaagatgattactgaacctcctgaggatttcttacctaattttctatgatcttttgatgaggtaatttttgtcgtttcttttaaccttagattgttgattggcatcttcatcttttggtaaatatatttctatacccgtgtgccgtgtccattgcctttattgttttatgagattgaaaatttgaaaaatgatttccattttgaagtatcaaatacatccataagtggtttaagcttcatatctaactgcttgcgtatcattatcatgtgcatgctctcacttttttggttgtttaggtactatacaatgtgtgagatctcccggattcagtactgaaagctttatgatgaaagctaatagtcttgttggtactttatcaagaatttattatctagatatgtccaaatggttattcactctgctttctattgtgtagatttattttggtgaacatcagcaggagtataaatttcccttttagaatacaatatccaatctggctctagcagttacatgtacctgttaaaatttaagggtggcacaaatgtgccattagtttgttttgttctctagaaaatacagaagtcactttcctctcaaatacaaattagtttcattttatgtacaggattatttagtatttttattttggtagtggcccattataatgagaggaacactgggtggatgtaatattggatttggacccaaagctaaagcttatcaggaagcatgttgtgccaatggaaccacaggttccaggaacaggataacttcagtttaggttgttgtgggtctgttaaaacaatttatgctattgaattggtagttgaactatttgcaggctg

SEQ ID NO: 74726 - DNA, 818 bp, Carica papaya
  Intron number 1 from transcript evm.model.supercontig_46.1 02 (locus evm.TU.supercontig_46.102) derived from phytozom e v7.0 (chr-ID supercontig_46; pos 956633 to 957450 revers e strand)
tgtacaagagagaccctcacgagaacctcgggattgtatgattttcctttctcttttctctctatctgtgtatgtttactttccatttcccggaatgaattcgtcgctgggataatttttaaataatctgaatttgcgagtggatttggtttgagttgagagattttagatgcggaagagtcagttggtgaacttaccgtcaaagttgcttttagctttttacaatagatatgaacttaggagaaatgggagaggaaagagaaatgagagaaaatcagcccactgtttgatgggaaagtaaattaaatcgatgaaggaaaagtgaggagggagtttggagctggagacaaaagtattagataattgcaaatcacgcgaatttctaagagcttaaatgcgagctcttaagacatacctgcttcgagttagtttcaggaggcagtctattatgatatctggagtgttatcagtttctgtctctgtgtaatgaggttgagaaataagatactatacttctcgtaaactttggcagctaccccttttaattttgtttgaagtggatgcatgttaatttatcgcttcatatgttgataaattatatgatcctgttctggagttttgtgattccttgattgccatgttggaattcaaggctcgattcagttatatggtttcctgactattcctaatcttttaacttcttattttttgtttcctgtattaatatgctatatacctaaatcttattgttgttgttgttgttattattattattattattatgttttttgcttcagaaacctatcaggaggggtgtt

SEQ ID NO: 74727 - DNA, 890 bp, Carica papaya
  Intron number 1 from transcript evm.model.supercontig_1691 .1 (locus evm.TU.supercontig_1691.1) derived from phytozom e v7.0 (chr-ID supercontig_1691; pos 9956 to 10845)
gatagacatatttgagatttatcgaagatttcgtggtaacttcttttactcattttcattttatttactttcgttttgtagcatctgctgattttcttttttgttcttaattttattttatctgttttaaccttggcacttatgtatatatggatatgtgtgtatatatatatatatatatattatcttatatatagagaaagatagagaaaaagatatttgattaatcttctttcccatcgatttcaggaaaatgtttctaggaaaactggcaatcttgtatttcagttttattatttctattttcactagaaaaccggcaatctgggattatgtcctgcctcttttatatttggaccaattatttgaagtatgctcgactagattgcttaattggttgcagagcaacgagctcagactaaaaccttgaaaatggtggttctgttttttctttttttgtcttagttttttcatgtgggccgggttaagtgaaaacaactattcttttaatatcgtgcatcgcttatgattggtttatatacaattacaacctcaatgcatgaggtgctttgaattatgttcttcatttatttatcgtattagatgctatggtacctgaaattaaagaaatcttttttgtcttgcctaagattcccctggtacatatctctctaaaaaaggattgatagacctatgaactggttcagtttaggtacgtcattgacttaaaacatctaatggtttaatcgcatttatgtttggaagaaaatatagtaaacctgttcaattttagtttgtgtatgctgttggttaagaatagtttagtaagtttgagttttctttcttctattgcagatattaggtcaggaaacacatattttagcagggaa

SEQ ID NO: 74728 - DNA, 925 bp, Carica papaya
  Intron number 2 from transcript evm.model.supercontig_70.7 0 (locus evm.TU.supercontig_70.70) derived from phytozome v7.0 (chr-ID supercontig_70; pos 463971 to 464895)
ttgaagcaagtgttctaatcttcacctttttcttttaatttttataattattagttcgttgaacacctccccccccccccaaacaaaaacaaaacttggctggttgctggaagtgaagggtatatatttatatagatggaatctcatagatgatctggtagtttgatggtgaagaaatgagaattgaaattgaaccaaaagtgtcataatttcttaatgaccggaatgagaaagttcaaactcgaaggacagagagatatcttcttttcttcatcaaaattccaacattcttattccaattcattctctatgttgctcctttataatggttactgtttgaatcctcaccttttactgtcatttactctataaattttggcaagagctgttggacgagatgctatttgttggtgttctaagatttgtgttatgtcaagcataatcgttttttcaataaaatggtttctacttgataaatatggaattctggtgccaataaactggtatgatgaatagatatgagagagctgaccttaatagataaaagcatcccatctcttgacctaaaactttagagtggactcttttttatggcagattgcttcctttcaattgcacgtgcatatgttgtttaagagtgagctgctaaagaggggttagcttttcttaggagtacatgattgatagcttttagttgacagggctcaacgcatgtgaaactttcaattcaaaacttctcctgttttgttgttataaatccaagcttttgctaccgcgatgcagtcatattctaagattctaaatcaattggccattacatgagctgacagattattcttagcctgaccatctataactattcatttccagaaaatgtgtctctaacttttggtcttcctttattaatgtaggcatttttccagag

SEQ ID NO: 74729 - DNA, 576 bp, Carica papaya
  Intron number 2 from transcript evm.model.supercontig_16.4 0 (locus evm.TU.supercontig_16.40) derived from phytozome v7.0 (chr-ID supercontig_16; pos 820891 to 821466)
tttgtacccttcttccaacactcttaaatgtatataattgtttatttatatatgtgtgtatagaattcttacagacgaatgcttgtactcttgggatgtgcttgtttgtccatatatggattttgcatttgctttgttgatctccagagactgtataatgtatgcccataaatcttattgtctttctgatacagatgggtaatttggatgataatccttaatgtttctgttggttttggacctctattttctccttttctttttgtcattccttcatcaagaattttctggaattagagttggttttagtggtaaggatgagaacttttatttgaattgagaatctatcatccaaattccttttcacaatttttcatgagttcaaaatttttatcacattgaatagaattttaaagttttcaaatgaattttacagaaattcttgatttgcttcaaacatagcattagttttcgcatgtttttctttacaagttgacaatctttatcatatattactatctaactttatataataactcgtctttcctgtagggtttgaagctcgaaacttgaggt

SEQ ID NO: 74730 - DNA, 793 bp, Carica papaya
  Intron number 1 from transcript evm.model.supercontig_3.44 6 (locus evm.TU.supercontig_3.446) derived from phytozome v7.0 (chr-ID supercontig_3; pos 3214375 to 3215167 reverse strand)
cttcttttgctactgtaactggtttttccttcttggtgggtcaatggctcttcctttcttcccccacatgcacatacacgcacgtagatccattatattttctctatccttactgtttttggatgataatgattatattattgaatgttctgatgatggaagtttaagttatttccacctctgtgattttttcttttttaattgtgaagtaaatattgcacagtaggtgtttgaaaaaattcaaaagagaagtacaaagaaacacgaatttcatcttttattcataccggttagttgtttctcactgccaagtttcaatttcatcttttattcagtaagatatttccacccctgtaatttcatatggttggataatcaataagattacatgtgaagtaagtagtctgcacagtaggtatttcaaaaattcaaaagagaagcacaaaacttcatcttttattcagactgattagttgtttctcactatcaaatttgtaaaattagcactaattaactttcacaggtttgaaatgttttgaagaaaatatcttggtcctagggtaatttgcctttgctatgaccttattttgtttttgcatcttaattactcagtaggtttgaattataaattatatactctaagtaatttggttaactctactcatatttccaagtacatggatttgtattatgacttagtgatgaagaaatcataataatactttatatgatattggatatgaactgacttaaaatttaataaattcttccttgttggcatgaatagcttgga

SEQ ID NO: 74731 - DNA, 1050 bp, Carica papaya
  Intron number 1 from transcript evm.model.supercontig_1400 .1 (locus evm.TU.supercontig_1400.1) derived from phytozom e v7.0 (chr-ID supercontig_1400; pos 4669 to 5718)
tacagcctgattcttcaaccagagaatctaaaagggtaactatcagtctccttttttcaacagatcatagtcgaggttttctctactctctgtttggttcttgagaaagtgaaaaagaatagcaagaaaatgtctacttctgattctttttctttttttttttcactttcactaatctacttcagtttggtaactttcaattcactccttcatctatctagggctactttttcctctttttttttccagttcctgtttctttttcgtctccttttctctctctctctctctctctctctgttttattttgttttgttgtagggaagtgtagtatattacttcttttaaaacgattttttttttaatatctatttttagtttttacactgttttattaaatgtcctgtgcaaaatagaaacagagtttttcgctgtcagccattaagcaaaaggtgcaggtgggtctctgcttgtatatacgtatgtttttgcatatacactttttggttcatattaacccccttctatttaaattaccctgtttcataattttatgctatgtttctcttcttccttaatttttcatattacctgttggtataagatttctactcttctaaataaaagtctaaaatagactgtttaatactatgtacatgttcgtgttgttttatgatgcatggaggattggacaagaaagttccaaatctaaattatgtttgaaatgaactggtttgtttttgtttttgtttttttcctttatctgtttttgttttattactattatttttttgcatagtagtcccaatagaataatactctttttggacttttgcttttgattctttttcttttagaatgctgctaactctcttctttcaattttgttttattatattattcttccttgatcgttttatccacatgttctcctctttgttaccttaactacttttaagaatttagtgatcatttgaggttgtcaagattgtgaaacttgttttgattgtggcagaaattttataggacgactctctgtcttgcttatca

SEQ ID NO: 74732 - DNA, 566 bp, Carica papaya
  Intron number 1 from transcript evm.model.supercontig_337. 7 (locus evm.TU.supercontig_337.7) derived from phytozome v7.0 (chr-ID supercontig_337; pos 118770 to 119335 reverse strand)
ttcttcagcttaaactggtttgttttgttctccaattagctgatttttttttttcgatatttagggtttttgctaaataaggatttcacaagttttaaccttaggcttgtttggttggatttgtgatcttgatgggtaagataaggttttcttagtttaataattgctgttgttgaagtttggtttgagttcggttacgtttatttgcatcgtttctttttggctttagttcagttaatctgtgcagtctgttctcgttattgccttacgtttaccccccgaatcgattttgggtttaatcagctgaagatcgatttaattttgttgttttgactggttaataatttgtgttgtcaattattgaacatgctgcttgatctttcatggactcatgactgtgtttccttttgcatattatagttttggatctctataatttagtacacaggcctcacgcttgtgtagtgttggataatttatacaaccatggtcatcacttgatccattagtacgaatttgttgattgtgcagattgggcagagccatccaactgggttaacagcgaa

SEQ ID NO: 74733 - DNA, 545 bp, Carica papaya
  Intron number 1 from transcript evm.model.supercontig_3.44 3 (locus evm.TU.supercontig_3.443) derived from phytozome v7.0 (chr-ID supercontig_3; pos 3196426 to 3196970)
gagtcgtctacaaggccatcgatactaaggtcagcctaaactttgtacgtcatttatgtgtaactagggttggatagaggaaatttttctatgtggtttcaaatggttttttgtcatcttttttggtttgtgagagacatgagcgaagggaaattgggggttatatctgacagtttagttgccaagaaagttaaagaaaaggaagagaagaatccggtgcttggtagaggaggcaaatgggagttttgttgtttgtgtgtctgtttaagcaagctagagctagatgaaaagaacatagcttcaggaacgacatttcttttccaatggatatttgactgctgaattcatcttcttgatttttggaattgcctgtaatgaattctttctattgtaatgttgaactatatatttgtttttgttgattatacattcgttcatatattagtatttatagagaatggttttgtgtatcgtgtaccataattttatatttttgtttcatgtgtacagactagacaggtagtagcaattaagaaaatacggct

SEQ ID NO: 74734 - DNA, 626 bp, Carica papaya
  Intron number 2 from transcript evm.model.supercontig_26.4 2 (locus evm.TU.supercontig_26.42) derived from phytozome v7.0 (chr-ID supercontig_26; pos 408084 to 408709)
acaaaaagaggctttttgctgcaagctggaattaggttagtctttcttcttcaatgtatctattgggtttttgctttgatttctaaaaaattgtggagaaaactctcttgcaagagtgttgcttttatattctttacctgttacgaaaaagtggaacaaacaggaaaaagttcaagaattggtttcgtacatgaacatgcggggaagtatttcattaacaacattcgtatatgcttatatgtgaacatgctttttatggttcgtatgtgtggtaaatttttaccaaaactaggtaaaagaattttttttttttttttgtacttttcaaacatattagatcatcatcgtcatcaccatcgtcaatatagacatgtagaacaaaaaagaaaagaaattagaaaatattttcatgcccaagcctctctactgcttgccactcgagtaactggtttctattgcaagacttagactttacttgagaatgttattctgagagtaataaagtcaaaggcaattcggatgagagcaatttgcaattgactgaacctttttgatgatttgaagttgacttctgtcgaataatttctttaagctttttttttttcccttggcagagcacacagagg

SEQ ID NO: 74735 - DNA, 463 bp, Carica papaya
  Intron number 1 from transcript evm.model.supercontig_33.6 5 (locus evm.TU.supercontig_33.65) derived from phytozome v7.0 (chr-ID supercontig_33; pos 618401 to 618863)
ctataattgatcttcctctcatcaaagcgtatcaggtaattagtttcttcttcttttgaattttctcagaaaaaaaatcaaaaagaagattaggattaggatgaggtcaaaaggctcaaaatcagaaaggcaggatttgatgattggtgaggattgagcataaggtataggtggagtgaccaatcagatagcgacacagcagagcatttgaataatatctaatattggttgtgtttttaattaatagttgaacttttctttttgttttttctgttgagtagtatgtttagttgatcacctttttcttactgaattaaaaattgaaaaatttttaaaatatacattaaactattaaatgatgtatgacctatagataatgattggattcttatcttaatttttttttttttttttaaaaaaaaattcagacagtggtatcgaacctcggagaaaacaaggtgat

SEQ ID NO: 74736 - DNA, 995 bp, Carica papaya
  Intron number 1 from transcript evm.model.supercontig_9.23 1 (locus evm.TU.supercontig_9.231) derived from phytozome v7.0 (chr-ID supercontig_9; pos 1525955 to 1526949 reverse strand)
gccaaggtaaatgatttctcctgctttctatactgcttctatctttcaatgcagatctttgacttggtttggatgctgagtaagtgtaagtaggagagaaaatagtttttattttaatattaaggaccattttttgaaaaaattagctatcggatattatatattatactaatttgagcatgatattattgtatcgtcaatttcttaatttctttttctttcaaatattggatttgtaataacaggatgttcattatgtacttcttaatttggcatgcaatttatcttcgtctaggtatggatttactttctcgtatgatgcaagtagatggcttcctttaggttgtgtaaatttggaaacgtgtctttcagttttcaattcctcaatcaattattctagggatctcatgggaagtggctttcgtgtgagacaaatgtctggaactatgttgaacattcttttgtttgttgcaatcagctgaatattttgctgctgtgatctgctactgtgaggaaaaatgttgaagtcgcatatctagattcattttattgaggctgccttttgttcgtgaagtaactatttgtgttctcatgttaaattaaatcattctttttgcatctgggtaggcaggggcttttgagagttccctcaacctgtacaagtaatggtttataaacgtcgttaagaacatcactttctgggttgcacatgatccttctgttagttttcataaatctaggcaacaatgtgtcttaaatgttataagacatttggaaatggctctattaagttagacatgggttcaacattttgtaaaattgggagttgttaaatcttatatgctgaatgagaatgaatgacaaatcaaattctgttacctagtaatagataacattagtcttgtcaataattacctaagtaaatttgtcaatcacctcattggagacttaactgtagttgatttgcatttctgttgtctagagatcttaccggc

SEQ ID NO: 74737 - DNA, 664 bp, Carica papaya
  Intron number 1 from transcript evm.model.supercontig_62.4 4 (locus evm.TU.supercontig_62.44) derived from phytozome v7.0 (chr-ID supercontig_62; pos 332236 to 332899 reverse strand)
ttggcccaaacaccggtgtgcctctccattacaaggtcacatctttctccctctctgtatatatatctttatatatgcatgtatatttgttttcgtatatttgtatatctacttgtgtatttttgtatgtgcacgctgactgtacttagttttgcttttggtgaaaaagaaaagactgcagtgtcattggaggtgcgccgataaaaagatgacttctctgtatttttttttttgtttctgtttgaattttttcttcatgtacgattgccgatcttattttttcccggtctaatcatgttctggcaagcactttttgaaggttttggggatactattatgaatatctacctgtactgttcctgttcttatctgtttctgaaatgtttattcatcttggccccgtgtgaaatgatcttgatgttctagataattcagctgaagtatcattacaatcttgtctttacgtattgattaggaagttgagagactttagtttgttctgtagtttattgcaaacagatcggtagttttgatatattctactcgaatgtatagcaattaaggctggttctaatacaactttagcttagtaacttagcttgtcttcgtatattgatgttctgtttcaggggattcgttttcatcgtattattaaaggttttat

SEQ ID NO: 74738 - DNA, 578 bp, Carica papaya
  Intron number 1 from transcript evm.model.supercontig_36.8 5 (locus evm.TU.supercontig_36.85) derived from phytozome v7.0 (chr-ID supercontig_36; pos 659382 to 659959 reverse strand)
gacttggtcagggtttaaagtaagtaaaaagaggagaccttttaacctcattccttatcatttttttgggtccttagttgagaaagaagcaatagtatttaaggacatttgctctcctttcatagaattagaggttattgcttcccatccctgaatattttgttgacaggatatcctaatcctttttggggagaacttggggaaccttactgatgttttggtttctaattttgtaaaaatctcttgtacatgctggcaccaccttgttgcaatattctgtcctctctttatctaagaaaataaatctaggcatgatatccagctttggtctctaatttctaggcggacatattattcctaatttgtcttccaaagtacatttcctgcagactttttctaggattttacctaagcacttatttttgaaatttgattattattattattattattattattattatcatcatcatcatcattagtgccatcaccttcaggttgacttagtctaaagttaactaatgactcatatctgattggcagtttaatattttgtttggatttaggtattgggagag

SEQ ID NO: 74739 - DNA, 600 bp, Carica papaya
  Intron number 1 from transcript evm.model.supercontig_18.1 62 (locus evm.TU.supercontig_18.162) derived from phytozom e v7.0 (chr-ID supercontig_18; pos 1459202 to 1459801)
gcagatacactcggtgaagatttcacagaattcgggtaagaagaaaggatctccatttagtttttaacctaaatctttttctttaataaaaaataaaaatattttacgaaacagttaatacggacaaataataatataattaaaatatttaaacagcaacctaattaattaatgaattaatattcaaggatgcaaacaaatagaattaattattgtcacgacaaaaacaagacagatgaaataattcaataactcctttactataatcatgcatgcatccaatattacgatgtggtgcttcatatggatataacatatgctggcattggtggagaattaatgttttctttcccaaatggaatatatatttgaatttgaaaaaataatttttcgaacaatatctagttttacaacattatcaatatcggtatatttctcaaatcataatcgtttaaagtgatcatatttttcaataacgtacaaacgtacgtacgtacgtacatatatatacaatatattataaggtatttatcttcatttcttgacttaactatgattcgtgagtaaattagaaaggtgtaccaagaatactgtgacgaa

SEQ ID NO: 74740 - DNA, 544 bp, Carica papaya
  Intron number 2 from transcript evm.TU.contig_37405.1 (loc us evm.TU.contig_37405) derived from phytozome v7.0 (chr-I D contig_37405; pos 724 to 1267)
ggtactccattacagaacagtgtggaagagctgtatcattcttttcatgcaacttctggttgttgtttcccattcatttattattctgtttctttttcttagttttctacctgatggttcagtcagactatcggttttttttgtgtcattttgatctcttgattatcatttcggtgatccattttgttggttgatggaagaaaacatatttcgtgtatggttataattaattttctggaaaccaataaatatgctttggatgctctgttttcatttttgctaacatcaaatgctagcttctagctcatattagtactttatgtttttgtcatgctggacattgtatggtagcactagatagcataagtatcagatctatcatggtgattgtttatagaaatcttgcatgccagtaaagagttgtctatttcagctttgaggaaatgtttatgctctcagactcgcagaaaaggatgcatctgtagttgttttttttatcataatgacagggctctgcttcatttccttgaccgtgacaaattta

SEQ ID NO: 74741 - DNA, 634 bp, Carica papaya
  Intron number 1 from transcript evm.model.supercontig_264. 13 (locus evm.TU.supercontig_264.13) derived from phytozom e v7.0 (chr-ID supercontig_264; pos 140878 to 141511)
accaaccggcttctgtctagaaaacagttcgtgagttattctttttctattatgtatccgtacttccattatttctcgaggtttgcttgctgcttttgttgtttttatttggttttcttggcatgtacaggtgtaggtttgagttgttgttcgtttttttttaaatttttgtaatatattgaatggaaaccctaaggagaaaaggaaggaaactatagtttttttttcattggtcgtatcgtttgattttcttctttgatttatgtttcgtttctcgttgttctaacggcgtttattcagatcacagaagaggataaactattgaattagtatttagtttcagtgttgcttactctttctaaaaaaaggtacttactattgggtttcgatattactctgagatcttactttacaaaggaaagtaggggttactgaatcgtgattttattatttgtagtttcactggaatgaattagacataggggattgttgttgcattgttggctgtttcatttgggtttgttgggttttttttttttaatttttcttaattcgatttgtttggtgaatgttaaagaactttgaataagacatgggtttcattcgtgtatttggttaacaatgcaggttatcg

SEQ ID NO: 74742 - DNA, 834 bp, Carica papaya
  Intron number 3 from transcript evm.model.supercontig_3.10 7 (locus evm.TU.supercontig_3.107) derived from phytozome v7.0 (chr-ID supercontig_3; pos 851656 to 852489 reverse s trand)
tgaagggttagttttgacatgtcttttctgtctcttccagttttctttcattaacttgtacaatattccaatgatgcttgtgttgctgctgaatattcggtgagtctgatattgaagtcaatgctgaagttgtctgtggtgatggttgattgtgctgcttttggaaagagcagttctgtcttgcgcattcagcttctatttactcacatgacctgcacaagttaaaaactgtatatggacttaagtcctgtagagcctgtgaagcattgctattagttaagaagtatgcttacgaagtagttaaaaaggtttttctctaaattctagtttttttttttcaactatactcttgaattgatgctaactaaaattcaaactatcaaattcagtttgggctttaagttggctgctgcgtagctgcaccaaatatatatatatatatatataatattttgtcgttttgtttaatcacatcggtttaggcaatttggtatgcagataattatgcaattttggttgttaggaatttgtatcttctacctttcttgaatcattgagatattgaaaagttataaacttgtaagttatgttgctgaaatatcttcagatctgaaagtatggtggaaactgcagttttaattgagaaactgtctggttatacttctgctgattctaaattgaaacctattatgtttatgaattttatacatcattcctgatacttgaggaagttgtttggcttaataaaatttagttgaatgaatattccagtgttttagtttgtttggtactgtggcagatagtgaaggtcgaaccccgttgcactgggctgtg

SEQ ID NO: 74743 - DNA, 325 bp, Carica papaya
  Intron number 2 from transcript evm.model.supercontig_3.10 7 (locus evm.TU.supercontig_3.107) derived from phytozome v7.0 (chr-ID supercontig_3; pos 852572 to 852896 reverse s trand)
acttgtaaggttcttagaactcagtacacaaggcccatgtttcattgatgtattttctgtctgaataactgaggtattttgttttgagttaccttgatttgaattgatattttgggtatataatgccttggatatgaaatcagctgttgttgaattttcatttctgtaatcatgtggcaatttgtgcaagacattgcagtgcctgcctatgcatggcttaaaaattttgttaaaattcctttataatttttccatattcagtcagcagataatgtttattggaaaagaaattaacagtgcaaaaatgttgtttacattcaggaag

SEQ ID NO: 74744 - DNA, 364 bp, Carica papaya
  Intron number 1 from transcript evm.model.supercontig_239. 6 (locus evm.TU.supercontig_239.6) derived from phytozome v7.0 (chr-ID supercontig_239; pos 116722 to 117085 reverse strand)
attgggtctctttcttctctctgtctagttttatgtgtttttctctttcgttttttccgcattcttttgttttcgtcattttatttcatttattttgttcaatcagcagttctccattaattattccttgttcgaattcgaagtatttgttaatctaatgtcaaattggaacttccataagaataattcagtttcactcggtcaagtttcttgtctgcttagtgaattttgattcatctgtaatttcagattgcaagaatcatggcttatgaggagactgagatgtgtattacatgctacgcgttatatttcataacaatttgaccgtacctgcaggaatttgatccattttcactgagtattg

SEQ ID NO: 74745 - DNA, 718 bp, Carica papaya
  Intron number 1 from transcript evm.model.supercontig_192. 12 (locus evm.TU.supercontig_192.12) derived from phytozom e v7.0 (chr-ID supercontig_192; pos 188944 to 189661)
aggtctaacagagcgggcgttcaggttagtgttaaacttgatttatttccatggctttggctgtctattattccatttgcttctttgcgtcatcttgattaatttccgatcgcattctttggaagcagaagttgttctgtcgttgatgtttcgtttttatttttggttattcaatcggatgatttctcttgttaatatatttgtttgcgatgtcccagttttgatagctgaagattctcaacctatactgctgttcaattatgtatacatcttcaaacttcaaaagcaatgtgaaaaatgggcaagtgatttctgtcttgttcagcaaatattgatttataataataaatactaaaaagtcaagatttagaatattgtttgtacatgggtggtggcccttggagcattggttagaaagttgtaattggaaaactaggccagtgattaatcttatgatataaactgcctgctttgtagtttggactcataggaattgcatctcttactatcgtaactttattgttaatagtaattatgttagcaaagagtgattttaatatgctttgattctttgattttttggttattggttcatttgtttcttctatgcaaattactgttcttggtagcttcattttcttcccaccctcactgttcttatttattctgtcttcttttcttatctttggtttgaaggaaccatatatccgaggtcgtt

SEQ ID NO: 74746 - DNA, 978 bp, Carica papaya
  Intron number 2 from transcript evm.model.supercontig_2.23 8 (locus evm.TU.supercontig_2.238) derived from phytozome v7.0 (chr-ID supercontig_2; pos 3176504 to 3177481 reverse strand)
tagcagtcgaactgaagcgcggtttcgctcctctggtattgttccttttccttttcatttttggttctcttgctattttggaattgtggaagtggtaatgttgatatatattaagatttactttttttgctatattttggtcatttgtgtctagggtcatttgctcactctacagaattgttgactgataattcttttatatatcaatttagcatatttggattcctcttatcactttgaggattacaccgaaggtcagaaatcactttttcaggattcctgaggttaagtgcttatgcattttgcaattcaacagtttttagcgttcttctatgggaggttttctatagagtttagcatgcaggagtatcattgagggttcaaattagatcttggagaggcatttttaagagtttttcctgattacagtgtatcacaaactgatataatgcaggttttattagttttcacgaatgtgaagtttcttttttgttttttgtttttcatttcaaagaatttttcccttcatttaggtaaagaggtagaaatgggaaaaccatcattcctcttgacataactgttatttactcagaatcatcagtttcatcaatttcgtaatgtagttcttgaagtcacctttaattatgcggtaactgagaaagatagtttgtcagaatatagtcattgtaaatatacaaaaggtctatttcttgtgataggtagagaagtctacgagttcggcttgtcaactcctaaagtgaaaattttctgttcatttgttccaaagtggcctaaagttctgttgctcgttcacattacttgtcaccaaaattgagacgcacctttgaagcttcactaaatcagagttaaatttgataactgttcaatcaagatgcaacttgcatctgcctgcttctgaactccagttgatattttttccatttgatggtttacaatcctgtagggaaacaaattttg

SEQ ID NO: 74747 - DNA, 452 bp, Carica papaya
  Intron number 1 from transcript evm.model.supercontig_78.2 5 (locus evm.TU.supercontig_78.25) derived from phytozome v7.0 (chr-ID supercontig_78; pos 306474 to 306925 reverse strand)
tctggccctttcaggtcgaattcaattccgacctttcttttccccttcgttattggattctttttaatgtgtattggtgtttgtggctgaggaagatatggaaacttttgcgtcgctggggttttgaatagtgggatcttagatgactgacgtgtgccgaactggctaatggagaagatactggagccttcgagtaactgttttgattaccaggaaggagagaattacagagctgcttaattaactttgaaattcccatagcttttgttttgtttttatttaattgtggatttgtagctctatgttgcggcattgctgctgattttgttggaagttttattttcttgtcttttttatgggtgtttaacaggctcttaagcagagctttaccgttggaatttctcatgcgttttgcagttttggcaagaaacagataaagcagcttatttatt

SEQ ID NO: 74748 - DNA, 611 bp, Carica papaya
  Intron number 1 from transcript evm.model.supercontig_6.26 4 (locus evm.TU.supercontig_6.264) derived from phytozome v7.0 (chr-ID supercontig_6; pos 2070353 to 2070963 reverse strand)
tcattgtggcaagtgactggtaattcctattctgtcttcatgtccatcttagaactgacatctatcatgcttgtactttctgctaagatatgaaaagaaagagggtcactgagcactatgaagcagtatttcttaccatggaatatgctgcaagtgcttcattattgtcaatgggatacttctattattgcataaagaaaggttatggtttatatggcacttaaacaatcattacgtgtaagtgctaatcttaacagatctaatcattgcatgtaagcagctattcacatccccatatttatcttttgctgaaccttgtttcttttgcattcaacattttggcaaccgaattaattagatgtttgggtgatcaaaaatcatctttaacccaaagtttttagtggcggaagatgtctaggtatctatgtctcttcattggttgacagagggcacttgcgccgtttccttaaagcatgaatgttcacatgcaggcacatgatgatgtgattttcttactgttatgataattttttctttttggtttgttttgctgaaattggcgggtcatatccacagcatatttttcaaggaatttcacaaaagccttgcta

SEQ ID NO: 74749 - DNA, 797 bp, Carica papaya
  Intron number 3 from transcript evm.TU.contig_31534.1 (loc us evm.TU.contig_31534) derived from phytozome v7.0 (chr-I D contig_31534; pos 5233 to 6029 reverse strand)
atttgcttagtggaaagcatacacctcctagccgcgtaagtatcttgtatttgtcagaatgcagaagtcatattcaatgaccttattggtcgaaaggttaaatgcctattcttctgatggcatatatatatatatattttatttctggttttccttttctaaattgtgcatgtatctggtttaaaccagattatcaatttaattttgttgctgaggtatatacagggaatataagagtgttagttgtgtcccaaagttaattatgctttaatcatagatgggtcttatgttgtatgaatgtcagatgtggtatacacatctaatagcattgttgtttgatttatatgggcattcaaaataatgccataatcatgaatgttgggtgataaatcttatacttttgatgaaacatacatgaaataatttctcgcagccaactatctcaaaagctcaacctagtaagaataatccaatatattattcatactcttttaacaagttccttcatggcaaatgttaggtcgagagcgtggatcaatcatggatttattatactttgtgctaacatttacttaataatcgattgttgcaaaatattctaaaagcttaaattaatagtaaaggtcccaatctattagttataatctaacataaatgctatctaaggtttttttttcctttgtcagttatgtctgtgcaagatgttataataagacagttataatatgcttccttttttggctccagttttattcaacgcaaaactcttgtgatgcttgtgatttcaggctcttgat

SEQ ID NO: 74750 - DNA, 252 bp, Carica papaya
  Intron number 1 from transcript evm.model.supercontig_19.1 75 (locus evm.TU.supercontig_19.175) derived from phytozom e v7.0 (chr-ID supercontig_19; pos 1253090 to 1253341)
ttctttttctttttggagtactggttctcatccaggtaattttgatttcatctctgtttgtttccctgggtaatcgaaaagaaaacgaaaattgtcgagaaacagaggcaatttttttgcttgtttattatatatatatatgtatattattatatccttctttttcattgtctctgactatttggaagattgtgttatctattaatgctccaattcactttcttttttccttatttaagaatcgactgagcg

SEQ ID NO: 74751 - DNA, 627 bp, Carica papaya
  Intron number 1 from transcript evm.model.supercontig_19.1 35 (locus evm.TU.supercontig_19.135) derived from phytozom e v7.0 (chr-ID supercontig_19; pos 879832 to 880458)
ttcgccaacacctatcaactgtctcaaggttcgccgttttactttctgctcatgatcatatagatataattgcgattttgtgcgtgagtctttttctctccatctaatcggggtttgggtttagctttttctggtttcgattcttttgccttagttaatttcataattagcgcatctaacgatctgctcgtaagcgaatgttacgtgcttcaacacagagagaaccagatacttcggttttcgtcgttgttgaaaattgaggaaggaaaggggatgtaaaattctgaattgtcttttggttgttccggttctgttgtgctagttaattttatcattcgtgtttagcgatctagtgatgctggcttttaggtgtgtcagtatagtgagaaccgggtactttggttttcgtcctctgtttggttgccctgataatagagggaaaaaaaaattgggataacattttgaattgtacacattcgtttcttctttctatcataaaaatggaatttccgtttgaatagatcctaagacattcattaattgcttagtattgttgttatggagaagaaatgagctcatagctattttactaattgttcttgattttggaatattttccgtgcagat

SEQ ID NO: 74752 - DNA, 545 bp, Carica papaya
  Intron number 2 from transcript evm.model.supercontig_998. 3 (locus evm.TU.supercontig_998.3) derived from phytozome v7.0 (chr-ID supercontig_998; pos 8084 to 8628)
gacagtcttctggaaaggtatattaattacagtaatgtaaatctattcccttaaactgagattttactgtaataaaattacacccagcagccgtttaagtatgtcagaaagaaaaaaataataataatagtaataacacccagcacgtgtgagcggcttaggtctaggaagtcaaaccttttactttttataaaaacttccgctttaaattcattgagaaatgagtactcctgacctcccagtataatgaacatacagggctgtcattgagattggaaatttagttttgagttttgaagaaaacagcgaattggtaattaaaatagagcttttatagcatatattcatatatgtaaatagttctttgaatttatagttttacttttgtcaatactttattacagtgtggttaatttgtcattagcttctttaagctatttttggttgttgtcaacttagtgagtttgttttttctgtatattgatatgggtgcgtaatatatatgcatacatgatatgggtagtagccaagtgagcaggacacat

SEQ ID NO: 74753 - DNA, 763 bp, Carica papaya
  Intron number 1 from transcript evm.model.supercontig_43.3 5 (locus evm.TU.supercontig_43.35) derived from phytozome v7.0 (chr-ID supercontig_43; pos 340541 to 341303 reverse strand)
gttatcgcccagtccaccaagctctttacctcctggtatctctctctctctctctctggtttcgaggaatttggatcaatcgagacattctttttcttgtgcatggaatgggatagttgtttttttttttttttttaatgctttctctaattgttgaatcgtgaaattttcggatcaattttaacaccgctgcttttttctttttcctattctcctttaagatttcatttattcaatattgttattgagctaattgccttttcctttttgcataatttcttccatacatacagtattttcctttttacttagcttatgaccaagtcagtctttcacatgcttaattccataggcatcgttctttctgatgggatgagccacggttggttgcagttttcttttacaatgttgaatatgacaaagtcaatgcaatatttactgaatttaagtaggtttttgagttatccctaactaggtttatcggatttttcctttcttaactcggttaggtgtttctctctccatttacgctttcatctgaatttcctaatttctgatggggtgaggatattatttgtaataacatagccctagtaagtagaagcagaattggttcagtggtaatcaaatgtaacaacttgtacgatcttattctacatattttaaatattttagtaattaagcaaaacaaatagaataatggaacaaaaaagtagcctaagagtcttatactctcctagatctgcaggtacaaagaaagacg

SEQ ID NO: 74754 - DNA, 822 bp, Carica papaya
  Intron number 4 from transcript evm.model.supercontig_33.1 62 (locus evm.TU.supercontig_33.162) derived from phytozom e v7.0 (chr-ID supercontig_33; pos 1639182 to 1640003 reve rse strand)
ctgccggtgccaagattgttaaggtgagtcttgtcacatgctatttttgacgattttcagtgtgggaaatttgttcaccattgagatagagtgtagcatgtggtagttgcatattcaccttttgctgaatgtattaacttcctaaatgaataaaacattaaaatttaaaactgaatgttagatatttaaagaacttcatggatactttctttcttttcttttttctgaatagtactcgttttttttttctcttcatgaagatgttaataacaggtgaaaaaatgttttgcatctaattgggtacaattttttttgtctactaatattatatttaatgggattcgaaatattgaagttaaaaattgatgataaatttatggcctttgagttaataatttatatgtaaatgaaaattttttagtgttctaaactttataaaagtttaatgctacagccaaccaagctccatatctttgcgtggcaagatgttgtacctgtaaaaattacattatattattcgaggtatttagttgattattttattccctccctatgtgtttgtttacaatttaggtttggtaaatgaccatattatcattgacttggtgaatcagttggtgtttaatattgaatcagattgtagatttcattgcatatgatttatgtttttacatctcttatctatcaatttttttttgttgcacaacaaaaacatataagtacgcattgtttgaatagtgatcttggaatgcatgccttcttaaccttgtttttaatggtgaagtaggtttatcctgtttcggcattaggtggtgctcaata

SEQ ID NO: 74755 - DNA, 884 bp, Carica papaya
  Intron number 1 from transcript evm.model.supercontig_9.26 5 (locus evm.TU.supercontig_9.265) derived from phytozome v7.0 (chr-ID supercontig_9; pos 1768391 to 1769274 reverse strand)
tcgcgtgactctcattatcggcgagactggttgcggtacggctttgttgtttattcatttgcttggtttttggttcttgtatcattgatcagggtaatatcgtgtttgtttgagtaatctaatccgtctcatttctccatttcgattgtggcttaagctgtatctcttgcatgctaagaaagcgggtgattgcttagttttggctgcaacaccctgtttggttgcaaagaaatatatgggaggtttggttgcaacaccctgtagttttctgcttggttgcttgatcgttgagaaccatggaaaatgttaatcatcctattttctgacatggtatactggggtgacgaacaaccaacgaaaagaaaacgttaaagactgaatttaaaatgttatactacctgtatgagagtttttaggttgcagcttcttatcttattctcgtttgaacttgaaagaaaattatatacaaatgtacagagggcaggcacaatttgagggagatatattaaacccaaatccccaaagcaactgctagaaggccagggagaacttggtagtgtgattcttttgaatatccttgtgggccttttcatcttcagtgggaaagattattatgttaggtttaagaagtgcaaagattttaagaactgatgcattttcctcttgctttgggtttgaggatgagaaaatgctatctcaaacatggtggatcgctgtttggtcttttccaattgttcttttgtttttaatactaatgaatgttaccaactgtcaacttgaaactaaggggtattagcagccattaccagctgctgctcttttctaattgtctatttttttcctttgaaggtaagagctctcaagttcctcaatttctcttggaa

SEQ ID NO: 74756 - DNA, 922 bp, Carica papaya
  Intron number 3 from transcript evm.model.supercontig_233. 1 (locus evm.TU.supercontig_233.1) derived from phytozome v7.0 (chr-ID supercontig_233; pos 5191 to 6112 reverse str and)
tagaagagaaggccagagtagaaaaggaaggcaaggtaaacggcttagttttcttctctgactttttaggttttttcattttttaaaacgatagctagggttttgttgcggggcgtatataacgtgcgcttggggtgcgtagtatattaaacgggtccacgagatctaggcatcaaaatggttctaaagtgaaacgggaatcaatggtgaaatttaaagaatcttaattaatgatccgaatcccaataaccaacaaagaaagaagaagaagaagaagaagaagaagaggaagaagaagaataagaagaagaagaagaatatccatacgtccatttcaacggctcagatcttctgggttttcttcttcttctttgaaaaacacagacgaccattagattttgccttgtccactatactgcctacagtgcccatttttacagtacttgaagaacgcttttgttacttagtttttgttcttatttatttttggaagattctaacatatgcttttgatgtttctttatgtggcatgtacttatgctccccgtggatgctcacattatatcattatcatcattggaattcttcagtttatttgggtaagtaactacttaactaaacatactaaacatagtacttaatctatgccatgcaataattaagatcatcactatatcatcatcatcgcagggttttgattagtaataataaaatgataattacgataattaataatgacatcataaaattccaggtaggattagacttggacatgcatgcatagattctgtaaatttggtgacttttgcagaggagaagaagaagaagaagattcttttctttcatgcatgaaagtgtcgtaagctaaaagtcctgtttggattctcttaaataattttttattttttctggacagggggtt

SEQ ID NO: 74757 - DNA, 750 bp, Carica papaya
  Intron number 2 from transcript evm.model.supercontig_19.9 4 (locus evm.TU.supercontig_19.94) derived from phytozome v7.0 (chr-ID supercontig_19; pos 646971 to 647720 reverse strand)
tcctggtatattatctcatcattagatacgcatatatagaattgtataattaagagcttagttgggtatttttgttgatcatgatgatcatcactatgattaaattaatcttctttaatgttgcaagtccaccgtgcacaccatctgtttggttaattttccagaatacccacttgcaaaaaggcccgttagattcttctttaatttttgcctaggaaccacttttgttatattgcctatctacgtggactgtaatcactatataattatttattaattttaattagctgcaaaattttcctctccacaagcttatagcttgtgactttcttgtcatcaggtccacttatgagtacatggataaaactgtactcctgtggcactcgctcaattttctgggaaaatgaaatttaatagattggacaagacttttgtttttggactcatccatgaatacaaaaacaatattgatttattattattaaatacatttttgtatgtactccttagtatttggagaatttgtgtcagcatgatcatgaaactgattgtttatatcattgaactgttcttactttattcatttgtgacattgaacatgtaaattaacatatgatttggataattcttttagatgggagagggttatgattcaacttgagtcatcaaatccatttgagttacattttgttagccaatataatttgttttgtagtaattagtgatattgctgcaaactaattacagggt

SEQ ID NO: 74758 - DNA, 342 bp, Carica papaya
  Intron number 1 from transcript evm.model.supercontig_81.9 1 (locus evm.TU.supercontig_81.91) derived from phytozome v7.0 (chr-ID supercontig_81; pos 388999 to 389340 reverse strand)
actgctcttgtcacaggaggaacacaaggaattgggttttgtttctctctctctctcttctctcccccttatatgggattacatattattcaagtatctatatctatatgctgatttcaaaagctatatatatatatatatatatagaattatttgagtagaaacttctgatggatatgataataagcctttgtaagaggaagtagtaactatctgaacttaattttaatagctaaatatatagttttggacctataatttcttttttttttcttcttgaatttgaattctatgttattgtaatattctaactttgattttgtttatcataaatttgaaggt

SEQ ID NO: 74759 - DNA, 774 bp, Carica papaya
  Intron number 1 from transcript evm.model.supercontig_27.2 46 (locus evm.TU.supercontig_27.246) derived from phytozom e v7.0 (chr-ID supercontig_27; pos 2260101 to 2260874 reve rse strand)
gggaatttccattccgacgaggatccgacccaaaggtatggttctcttcaatgatttctctgtcattgcagttcgtttttctcttttaacctttgaatttgagcctccatttgtcggttattctggtttgctggggcgagttttgactgttgcatctttcaatagttcgtatttgtggattattgagctggagcagaaatgtggtttactgtatgtccgttaatgaaagatttggtgcattttgaaacggatttatgggtaattaggcgtaatgggggttagacttttaaataagagttcttagctactctatgtttttcatttctgatatgggtttttagcttgggttcatttgaatggtccgtattcttgattgagtttttgacttcttgccctattctttgttgaattttacccattgtgtttatctgggaatctttttttgctacagtgaatttggagattttgctgagtactctctgttcatttcaaactaatcttatttgtcagattgttattttttttaaattaaaaaaaaaaatcgttacctgtcaatattccggactgccctctatgccacttccagtcattgagctcaatttagtctttttctgtgatgatgagtctttttctcaatctacatagttttggctacaatcttgcacaggtttcatgtctttctttggaatgacactctgtttcatttcctttactcatcaatttagtgtcacctgaatgcatgttttaattgatgcagatcaaggagaaagaaga

SEQ ID NO: 74760 - DNA, 563 bp, Carica papaya
  Intron number 2 from transcript evm.model.supercontig_165. 23 (locus evm.TU.supercontig_165.23) derived from phytozom e v7.0 (chr-ID supercontig_165; pos 146290 to 146852)
tgcaaactggagaggaagttgctgttaagctggtaaatatacatcatatgcttgttctttgttagaaggatttaggaaacgtgttccattcggttgttgtgggattgtctcctctaattatattggatttgttttttagaagcttgtttttggactgcttaccgaaaaggctcttggatcgggctatgaacatgtaatcatgattttttttagggttcttaaatatttgtaaaagcattatcagagttcagcacttgcttttaccgatgcttttcactcaaaacctatcaatagttcatccttctcaaagagaaaaaagcttctatcaaaagttcctcatgcttcccatgcatgataatttgtcaacctcttgttgcttcctattgcattgttgcttgatggtacttattgttaaataagtcttcagtttctacagttgtggaatgatgctgtgtcttattcatgatatgctggctctcttttcccttgtttttttcttccaaactaacttctttttctactgttcaggaatctgtgaagactaagcatcctcagcttcacta

SEQ ID NO: 74761 - DNA, 399 bp, Carica papaya
  Intron number 1 from transcript evm.model.supercontig_391. 3 (locus evm.TU.supercontig_391.3) derived from phytozome v7.0 (chr-ID supercontig_391; pos 11900 to 12298)
caaatagtaaatcctttttctaatcaataattttttcctttgattgtggatcctcctactgtgaaagcaaatttttatctactgcatagctaatgagcctgtaaaagccaagatgagaatgtcgtggacacagtttcagttcttagtgctaccaggttgccatttttttcctaattcgatgcatcttgaagttaccttttcccacaatttttctttttctttgttcgaatgctgtccttctttctgtttcttcttttattcacagcatttttttagattcctatgtgatttattggtgttgccttttgatgttgaatttggttacttttgcatcttccttcatatttatcttgatgagatccagtaccttatacacttcgaaagtgctaacaaatttgt

SEQ ID NO: 74762 - DNA, 528 bp, Carica papaya
  Intron number 3 from transcript evm.model.supercontig_17.4 3 (locus evm.TU.supercontig_17.43) derived from phytozome v7.0 (chr-ID supercontig_17; pos 511010 to 511537 reverse strand)
tagtggttttgcccactcgtgatttagccttgcaggtaaatttcttcaaactctaagacatgtaactatgtgattgttgcaaatatattctatttctatttacttactagatttgatagtcataatttatatatttaatgcataattaaatcaatttcattggcatttttgggttcacttccatggattttgaattctacatgggtaaaaagaaccacaaaattgcttagcttattgtgcatgaaaattaattgaagttagaacctttttttcttttgcttttcaaatttttatctcatgaaaatataatttgtatatttatgcattaccataaacgcataaatgaacaaatagggatgtgaggaaggtaatgcattactagaggatatctgtcctttgaaggatctcctacgatatttgggttctaattatggttgacttgcttaagtttagaggatatttctatatgtttgcttttctttcttgtattcaggttagggaagtttttgctgcaattgcacctgctgt

SEQ ID NO: 74763 - DNA, 690 bp, Carica papaya
  Intron number 4 from transcript evm.model.supercontig_16.1 34 (locus evm.TU.supercontig_16.134) derived from phytozom e v7.0 (chr-ID supercontig_16; pos 2060069 to 2060758)
ccactggtgcagaaaaggtctgcttatattttatcttaattactttctctaccatgctatgctaagatgccatccaacttctcctttatttgctattagttactgattgttctgaaaccttactaatctaaggtgctcacttggctgaatcttaggtgcttttagtcactcactattctctggaatgatattctagggagcttaagaggcatatgtcctgtttttgtttatgtattaatttaaattaccgatttgcaggttactaatttgttattatgccatttttatggtatcatgtatccatatatcagctgtccatgcatacaagtggtggtgatatttacacctctatttcctcttttagtgacagtgagctcatcatagttgttgagaatgatgtgattaattaggatccttctcaaattcaaaggaaatccttttttatggcatttgttattcatctctagaatggaatatttttggttcaattatctccatgtatctatattaatgttgctgcgaagttgttagttattctgttatattcatgtaagttgatgctaaacaaatgtattaagactgatctactttttcttcattttgactctaactattggctttttatagtcttccactatgtaatttaatctgtccataatgctaataaatcttaaaattgtcctttatcag

SEQ ID NO: 74764 - DNA, 648 bp, Carica papaya
  Intron number 2 from transcript evm.model.supercontig_44.7 7 (locus evm.TU.supercontig_44.77) derived from phytozome v7.0 (chr-ID supercontig_44; pos 917260 to 917907)
ttgagaatcctcaccttctttttcttggcaagcaggtatctactttttcattctccacttcttttttttttctaggaaaattagcacataataaacttgtttgcgtttgaactcttattgtgaatttgatcagttatttttttaatactaatcaattgtgtacttagtaggtactgcgtattttatgcttcaaattcactttctcatttctagggatttgttgtcaattagagggttttggattaatcagttgtaaatgaagcaatgagtcaattaaatttcaaaatttaggcttgtttgctggaatgtttcaacaaaatacatatacatttagaaaatgaaagctataaatggtaaaagctataaatggagcctgaatacttcttagtacttcttcgtcaccaattgaaatttatctcaactaaccattggaagtgtaggaatatctaatggttttttgaactttttaaatctcttattaactatcaacagtgtagacactccctttacttcaaaatgacacacaatcctttgattattggttttagttctgcgtgctatccttttgtattgatatttttgaggcttttttcgtttttaaataaaagtaactgtttcttattatccagattgttgtgtaggcaattg

SEQ ID NO: 74765 - DNA, 915 bp, Carica papaya
  Intron number 3 from transcript evm.model.supercontig_36.1 65 (locus evm.TU.supercontig_36.165) derived from phytozom e v7.0 (chr-ID supercontig_36; pos 1213740 to 1214654)
agcttgatcgaatttcatatcgggcaatgtaagtaaattatctttagattcacttcttcctgcttctgtagtgatcagatttataagagtatttgttcaagtctagtcatttgtggaataaaatgtaagaaatatagactacctgcagtttttgttgccaaggtgaagtcatgcaaattggtctgtttttggttcttgattcggcttttcagaactatacaactctttcatcaacatcaactgctttccaattttcctgtgtcacttgcaaatttgaatctgtatggaatgattttggagttatgagtgtgggtagatatggtcaattttttttaacatatgacgccttttgcccaactacttgtgccaagggctgctattgaaagtgctttgaaaatggtttgaaaatggtttttaataaaaatattttaagataaaagctgaataatgtccgaaaaaacttgcatgtttaataaattaagttctaaaattaataataaaaattgaaataaaaaatgcacaaaaataaaagaacttaattattgtaattatttaaattattttatttttttataaaaaaattactcttaatattttaaattatctattttaatttaattattttatccaaaataaatgttaattttaaatattattgtcatttctcagaagtatttattttgaatccttaatttcacctttactagaagttcaaggcagaagcagataccttgccaaacatgaacatactcttggaattttggcacatttgatcattttctttcgttttgatggtgtatatggtcactgagtctatgctaatcgttttagtatttgttttgtttgtccaaatacgtgttagtggcagaccttatctaaatgaatttcatgactgcaggtgttactgtattttgc

SEQ ID NO: 74766 - DNA, 601 bp, Carica papaya
  Intron number 2 from transcript evm.model.supercontig_49.2 7 (locus evm.TU.supercontig_49.27) derived from phytozome v7.0 (chr-ID supercontig_49; pos 150350 to 150950 reverse strand)
agctctaccaggtagctggtcaatttcatcgattttttttttttctttttctttggaagctctgtacttgttttgcaaaattctactttttcatgacaaggatactttgggacaaacgaagtggcaatacaagatggaagcttttgaattttggcactcatgatagttctaacgtacgagatgcttttttgttgtagacaaaaacgaaaaagagcatgctccaaacttcggggatccgcataatagattaagttgtcttcaacaaatatagaaactgaaacattctttaaccactggtttcctacccttttcgagaaactcttgttagcaagcacttaccactccctttgcgtccctttttcttttcatctacaagagggttgaacatgccagggatgaacttcggatttcagttttttcttcacaagcttttttaagtgtcgagttgttattaaagcaatttctggttctactggttttgttatcgttttttctcatcctttctttaatatgctgaaacagaaagcttgggacatggaaatacttaaaatctttttatttttcagcgcaaagaactgtgtaaacttcgtgcaagattgga

SEQ ID NO: 74767 - DNA, 528 bp, Carica papaya
  Intron number 1 from transcript evm.model.supercontig_17.1 93 (locus evm.TU.supercontig_17.193) derived from phytozom e v7.0 (chr-ID supercontig_17; pos 2346306 to 2346833 reve rse strand)
gtggcagaacaggtttacaaactgcaatataaagtgtgaccaccgaaattgtaccttctaacaaagctgtcgaaggttcttcttattacctatactcatctgacaatccaggtttgattttgtcacacatcttcttagtgaaaatagagataactatttcattttgagatgcaattttataaacaggatttcattctaaaaacaaaacttgttttttgaattgagtgattaaaagacctgatgccaactcgccaaagtttcaatcttggatgccacgcaatgcagttgttttgtcttggttaacaaatgcacttactaaaaagcttcagggttgtgcggctcatgtcgagacaacaagaaaggaatgagaagatttggaacagggatttacttgaggcataggccctagagtatatgagttgaaattagcaataacgctctacagcaggaaaagtcctcgatttcagcatattatggaaaattgaaatctacttgggatgaattgcagagtctcaatccaactccatt

SEQ ID NO: 74768 - DNA, 270 bp, Carica papaya
  Intron number 2 from transcript evm.model.supercontig_5.25 4 (locus evm.TU.supercontig_5.254) derived from phytozome v7.0 (chr-ID supercontig_5; pos 2211018 to 2211287)
actgcactagccttgttatatttcacagtcctcaggtgactcactactcattatcctttccttcatgaatcaaataaagcttatgttaatcaaagtaaaaacaaaatggatgagtaaaaaattgacgttaggaagtgtgagttcttagtggtgccttacatatatctgtttgtgtagctgttttttctttcttgtacttaggattctgctaaatcttgattctgacaaacaagtttttcgctaatttcttctaccagtttcgggactttg

SEQ ID NO: 74769 - DNA, 904 bp, Carica papaya
  Intron number 1 from transcript evm.model.supercontig_205. 35 (locus evm.TU.supercontig_205.35) derived from phytozom e v7.0 (chr-ID supercontig_205; pos 284207 to 285110)
tatcaactgcaactgtctggtatggatttcctttcttattttttctattatttgcctgatttagacgggatactatggcagcttacagctctgcaatgacaagaatggctgaatatttgtttgttctatttatattttcttcctatttgactgagtgctaaattgtggcacttcctaattgcttcattttcatatatcccttgtgggagattgaaatatttgcttgtcactgatgctacctcacatattgcaaaatagattgcttcaattgttgtttggagctcaaatgattggtgaggaaactgcagtaaagctctcgatattaagatgttatgaacattctgacagcatctttgaaacaattctaatgttaggcggatactgatttgggtttgtgattgacagttgaagtcacacttactatttatcattttttatttattgcattctttatgtttgaatttaatacatttaattctctttgagctctatcctatgggtgaaagctcatggctagtttttggacactggtctctaggtgttacataggaattggtaggcattaatcttctaatgttttggaatatggacactatactcctcttgttggtctttttttttttgttttctcatttgttactgtgcttcttctagttgaatatgcgaggaggatgtcttattcttcacatttgtaacttctttctcttcctaataattcttctttttctaaataaaaaaaaaatctctttgagttctattggcttaaaaactttatatgtctatctattattgcatatgagcaaatgatcgaattggttataggagaaggaaaatcataaaattatatcaccatgatgttaccatgacagtagaccttacattcctttctaacagggtccacagt

SEQ ID NO: 74770 - DNA, 857 bp, Carica papaya
  Intron number 2 from transcript evm.model.supercontig_380. 4 (locus evm.TU.supercontig_380.4) derived from phytozome v7.0 (chr-ID supercontig_380; pos 17982 to 18838)
tcatcgaccagaacagagtatgatattatctgctcgtgtgatctttttcttttaagctctaatgattgaagtaccttgaatgttttgggccctttagatttgaggaaagattaatttaattaaggtcgataatggcgatttaaaggaaattcggtttttgatctattttagttttttggttatgtcctgggtattgtattaaaaggctgtttcgaggctagatcatagagaaatactggtattaggtacagttcggagcagataatattgcttggtttttctaatattttcttatggacaaaacacagcatagcagttggggacatgagttctttcctgccattgaaaactattttctgcttgtttcattttttttgttggtcttttaccggtgagaagtacttgaataatttttttaatcttaacatattttcattttgttagctcctttgagagaacaccagatgttaacttgataggcattaagatttttttaagagaattcagtagttattattatagaattatgtatccgtagaaagtttttaggtttgttgtttgtgcaattaagtatgtagttctagtaggagtttgttcggttaataaacactttctctagaataagttcttttaaacaagaatgcttttttggaagatttgtctaaatatttctgttagaatgaaatgtcctttagtacttcaagtgtttgtaaattgacgccgggtgtctgtttttgtgggaggacacaaatgcaacttttttgcatgttccaatatacatccaactaagaacacttgcaaatgttaactgagcatgtgttaatgtggtcttttggccttctgacaggctcttgttg

SEQ ID NO: 74771 - DNA, 828 bp, Carica papaya
  Intron number 1 from transcript evm.TU.contig_44263.1 (loc us evm.TU.contig_44263) derived from phytozome v7.0 (chr-I D contig_44263; pos 349 to 1176)
agctaagcagaacagttcgttcaagcttccgtcaggtaggtttcgttccatttcacctgttatctgatctgatggtgctaaaacagtttcagtttacatcggttggatcgaaggctgaacaatcagcaacgaagatcgacctcattgttgttctgtggattgttttcttcagctcttgattgatgtgtttggttgatgtgaaagtacagggaaaagatggaatttaatatttggatcctagttactttattataatcagataggaatactctaaattgcttgttgagtcgttgactcaactcagagttaagctgaagggattcactgaggcagcaattcaatttttgatttcttttggtttaagacataagaatttaggcttcatcatgtttgttctgcgagttgatggattattaacgaaattaaggtattcgaatttgaacacaggatccctgagatagcacgtaatcgttaagacaaattaaggaaataaaaagaaatttgaattaatttattgaagtagattctctctcatgatggtagctaggcagactctttgtagttttgagcttaagttgttaaactccaatttaatttctgaaagttcaatggttttgatttggaagaagaatagatatcctattacctaaaatgagctatatattttacacttggtgaatttacagtagctagttcttcatttttctttccgttgatcttcattttgtacttgcttgagtttgagattcaaaaattctgggctgcatttggaattttaacacaaaaatttcagggatatttacaaagatactattggtattctttgtt

SEQ ID NO: 74772 - DNA, 482 bp, Carica papaya
  Intron number 2 from transcript evm.TU.contig_35655.1 (loc us evm.TU.contig_35655) derived from phytozome v7.0 (chr-I D contig_35655; pos 939 to 1420)
agctgttcgtggaagccaacgagtaacagatcagagtatggaccttatttgtagtgtatttttggagtttggtaatatgacgtgtctacatcacagaagattggtagttggcaatatgcgttgtttgttgataatgcgcatctacttgttcttttcagtttatgcaaagacaacttgtttctcttagcagccatacacccatcgttgaattcgtagctactatgcgttttacaggtttgcctgataagtaggatctattcaatgagatttaagaattttggaataatctaggctgctaagttggatgctatgtttctaatgatgaattttttcatcagggagagcaaagttctcttggactttaattctaccaacacaagttgttttgagttccaactttatgccatatatatctaggtatctttttagttaatccttccatttacttgtcagttttttaaatgtagatccggaaggaaaat

SEQ ID NO: 74773 - DNA, 526 bp, Carica papaya
  Intron number 3 from transcript evm.model.supercontig_1603 .2 (locus evm.TU.supercontig_1603.2) derived from phytozom e v7.0 (chr-ID supercontig_1603; pos 12045 to 12570)
cgctttcgttgattattcagacatccctgttaaaggcaattcttctttaactatacattttttacaaagaaattgatatgaatcagctgggctaaattggaaaactagttccttcaattttactaaatggagacttattttgccatttaattctttatttatttagatgtaggctttactgttcggcttgtcgatgaagtcagaattccaaagaaattcctttgcatctgtatctggttgctttcaaataataaaatttcatggaaatgcaagcttcaactagacaagaaatatttgtttctctttataaacaaaggaagtagaggtataagaaattatcttctgaagtggatgaaattagtgcaatgctactatttaaacacaaatttagaagcaccagagcctttagtttgtatggttatctttgcttttggtgaagttaatttatggggtttgataccaggtcttaccaaaaagaaaaaaagaattcacatttaggagattttcattgactctatacaggagc

SEQ ID NO: 74774 - DNA, 745 bp, Carica papaya
  Intron number 1 from transcript evm.model.supercontig_91.2 7 (locus evm.TU.supercontig_91.27) derived from phytozome v7.0 (chr-ID supercontig_91; pos 274805 to 275549 reverse strand)
actcaaaccaactgggaagctgataaaatgtaagtttttcttatgcatcattgttttcccagtcttctactttcattttcttctctgggttttaggaaatttcatgtcttgctaatgctaattttctgctctttttcttgcttgatttgggttctgggtatgtggggtttccttattttcgcattttcttttgttattgtatggaaatttatttcttcgaagcttattttggcacgcatatgtgcatattttggggtttgcccatgtgaaaatggatgttgggtggtggtgttttttggtttcagtgttttcggtgtctggttcacttgaggtgatttagtctgttgatgacccttttcttcattgtacttcttttttggcgatttatcttctttttcagttgagcacctgttggataaaaaggaattgcgtttatgaactggttcttcatcgtcattattgttattaatcagatgaaagaactaagggctgatttattgttatttgctactttttttaatataatattgtatatgcttctggcacttgttaactgtacttttacatgttcagtcccctatttattgttagggttctgtcatatgatacttttatttattgagtttgttttacctcactaatttttttgtagccgttttctctttgaaatatttgtttttgtttgtatcagtgatttcaatgcaaaatgatatttttttcttttatttttgacattacaggttag

SEQ ID NO: 74775 - DNA, 386 bp, Carica papaya
  Intron number 1 from transcript evm.TU.contig_40334.1 (loc us evm.TU.contig_40334) derived from phytozome v7.0 (chr-I D contig_40334; pos 750 to 1135 reverse strand)
ggccgtcaagaagaagagtaatgtctccatgtcttgatctcttgatagttaactatctatccattgcatagtcctcaatagagtttactactatttgcaactatgcaaaacttggggtgacaaggagccaagccaagccaagccaaatactcttgagtatctatctcactttgattttctcttatactgtcaagctcaagttcaatcagaagtttattcaaacttcattttagattcgcgcttggctcgtttaaagaaacatagagtttaagctcgactttggtttatttagctattcaaaattatttccgacagaagtgggaggatgacattttggctaacaagcttctttgctgtattttggcagacgcttatcaaagcttgaa

SEQ ID NO: 74776 - DNA, 916 bp, Carica papaya
  Intron number 3 from transcript evm.model.supercontig_5.99 (locus evm.TU.supercontig_5.99) derived from phytozome v7 .0 (chr-ID supercontig_5; pos 747323 to 748238)
taaggaatcggcttcctgctggtgtcatccatcaggtactttctgtatggactctgctgactgttggtgacgtttttctgtgggatcaaactttcaacaatattaaatttgatttttgcctgcactcccttcacccttggctctagcttagagttgaactttcgtgaatgacctcatgagagtaaaggaattactgatggtgccgtctattaggtactttgtctatggactcggatgactgttggtgatatttttctgtggaatcaagcgttaaacaatattaaatttgattttttttttctgcactcccttcacccttggctctagcttagagttgaactttagtgaaagatctcatcaagtaaaggaattactgatattacacatgtaatgttttacctgtagcattcagagccttgtggctgcaaagatctattctgctgcttgaaatgtttataaggttgcactctctcttcaacagcattggcttaaaatattgccactgacatgataagtactgcaaatgcaatataaacttggaaatgttgctgtggttgctcggaatgttttaatattgagtttgattctttttagtcgttgaatttcttagtagctgatggattttttccatgttaatgaaggtaattgtttagtaaaaatcccatggatattgaattactaaagaaaattctcaaatattcaattatgtatacatacagatacatatgttttaaggaatcataggaataaatgttgttcattgtttctgttataatttctgtccagggtgaaagacagtttactgtacactgaatctctctttgttcaattattgatgttattttctggcaatgtgctaagaattttttatattgaatcagtttgccccggttgacacccccaaagctattgacac

SEQ ID NO: 74777 - DNA, 477 bp, Carica papaya
  Intron number 1 from transcript evm.model.supercontig_65.1 49 (locus evm.TU.supercontig_65.149) derived from phytozom e v7.0 (chr-ID supercontig_65; pos 1311310 to 1311786)
attatatcgtctcggttattactgaaatttgtttgtcactttccctattttagcgtgtgtaggtgtgagttatttggttcacgatagcaataaatttagaagacaatttaattttggacgttgggttgttcaaaatttttatttatcaggcagcaatcaatttttaatgagtatttttttattattgggtaattggaattcgtttctattttcacatattgaattctgctgcctgtcgaggagtcagaaattgatgtcaaatgttgtttgaagtgaaactattggtcgtataccatggtgatttctccaagaaatgtaatcattctttgattttggtataagtgattttctttttatttcgttttgctgtctatttcttggttgcaccaaaggagattgggtttctccaacttgacttatattatgcattggtttggaatagtggcctagcacgcaattacagtgttcacgctgcta

SEQ ID NO: 74778 - DNA, 679 bp, Carica papaya
  Intron number 2 from transcript evm.model.supercontig_65.1 49 (locus evm.TU.supercontig_65.149) derived from phytozom e v7.0 (chr-ID supercontig_65; pos 1311792 to 1312470)
ctgtctgcaactcgtgctctggaatcatcggtatctatctttgaattttgttgccatgaaatagaaaagggactcactcaggtggaaactaggagaactggttataaccagccccatggtcttttaacctggcgttcaaagagcaagcatggttttgacctttatgtcttctcaaaagtcttttttcatatcccattgagttgttaaagatggttatatattggtgggttggagaatctatagcagtttatggtgtgtattttaggttttaatcatggatatcaatatatgctaattaagattgccatgcgggcttcatctgtgtaattggcatatgctaatagaaactttgttttcttttcctcctactgtcatgtttctgattatcttctctagtgtcccctctacaagtttgtggaaacattaaaaagtgccacatctgttgttggtgtatgaaattctttagaagaggtcgcctgtgaacagttttcattttttctccacccaacttgatatgtgtaatgctgggctttctatgtggaatgcaagacttatagtttctctagactaattttaaacttgaaattatcatcatgttgttgcggatatgtcttgatatctctagaagttcatggagaagattgattaatgcttggtcttatggtgcagtcttttgatc

SEQ ID NO: 74779 - DNA, 791 bp, Carica papaya
  Intron number 3 from transcript evm.model.supercontig_29.7 3 (locus evm.TU.supercontig_29.73) derived from phytozome v7.0 (chr-ID supercontig_29; pos 649406 to 650196 reverse strand)
gcagagttcataagagcctccagtgcaggtaactagacgttcctaatttttctgtgcgaggttaatactgcttttcttttcactgcaagaaaaatggtacaattagaaactaatattaaggttgaagaattattcatttcgtttaacattggcacttaagttttgcttatgtttgatgggttcagttgacttaagctcagatagtatgatgaaaatttatttgttggtcatgacatatttctctatatgagagcaatcagcataactggtttatgcgcaaataggaatacttaatctaattttacccacatttatccactctgcaattcttttatatatatatatatatatatatatatacttcctacagttaagagttccataagttttatgataactacctgaagactacagtcaacttcgatgggagcttctttaaaggcaataaatgctacaaaagactctctacctccaactgcattatagagtacaaaaagaaagtgattctttcatgtacttaaaaaatcctatcattttgatagtttcaattacatggagaagcacaaatatcttgattagtccacctgttaacacatagggtccccattagcatatcttgtgcccatttggaaatggggcctaatagcttgagatgagattttcctcttgagcctctggagataaaggttaaaagtcccttctctttttaacagtgttacattttgctattttagcggtttcatttcattgcctgcagaattaatcatagaccaacaaggtcacgaattgga

SEQ ID NO: 74780 - DNA, 293 bp, Carica papaya
  Intron number 1 from transcript evm.model.supercontig_23.4 7 (locus evm.TU.supercontig_23.47) derived from phytozome v7.0 (chr-ID supercontig_23; pos 508238 to 508530 reverse strand)
atgtaggagatagacggctgcttaactttgcttatagaaaaataaacaggtgtcagataagttatacttattctctactgttagctttgtttttggaggtgtagtaactaatataacacagctgtaaaaacattaacaaaatggaaaactggtcgacaactaagttattcagttaaaataagtggcgccgggcgtgtttatcttctgtcacttatttttctaatacaaaaacttatgcttgtatgcttttgaatgtagagagctgctgaaacagagttgcttacaaaatttcc

SEQ ID NO: 74781 - DNA, 575 bp, Carica papaya
  Intron number 1 from transcript evm.model.supercontig_37.9 1 (locus evm.TU.supercontig_37.91) derived from phytozome v7.0 (chr-ID supercontig_37; pos 718949 to 719523 reverse strand)
gccaagttaacgagaactctggtggtcgacgggtattgacactaacacttctttttttgcttaatttttcttttttgtgttagtagctttttcctgttttgaaggttttgttttgttgatgaggaattttgctttactagaaagggttttatactccgcagttgattcagtgcgtggtattaggttaaattttctgtatgtctcttgctatttgggttttttgtcatgaatgagtcttaaattttatcatgttatgcgttctttatactttttgtccaaagagtggttaagcttgttccatggttgaaattcttttgatggttcattgtatcaaggagctgtgacataggaactatatcctcgattgtgcgaggaaaaatgaagaactaataacattggcctatttcgtcatgttcaaacttattggttgcttatattcaaaatgatgaatattttaatcctcaaaactcaaaacttgtcctttctacatcatcaacgtattttttgcacggtgttaactggtatgtgtatacgtttcagaagaaaatttttggactagggaaacgtaggctgaa

SEQ ID NO: 74782 - DNA, 668 bp, Carica papaya
  Intron number 1 from transcript evm.model.supercontig_64.1 68 (locus evm.TU.supercontig_64.168) derived from phytozom e v7.0 (chr-ID supercontig_64; pos 1183915 to 1184582)
tgatcttcttatatcatctcctcattttgatttcagtaaacacactcttctctctatgcgtagatgtttgtatatgtatgtttccacgtatctttttagcgctcgctgtagaaagtttatccttaggttttaggttcagtttgtcttcttgttcttgtcaaatttacagagcgagatccttttttctctggttgattaatttaagtctgtgtttccaacagattcagaaatggcgtggaattcatttgtaaatctagaattaaaataggataatgtttaaattgtgatgggataataacagatttacatatgaagtttcaaattgaaacgatgtattctaaatttaaattgataaaaattagaatgtattattttaattttatactcaaatattttttttttttttcatttttaggtagtactctcgctcaccattttatacctaaatcctattttgatcttaaatgtgtgatcgtgaagtgattctccacgaatcatagatcaagtactttttgtattataaaagttggtattaccaatttttgcactctccgactatccagtgaatttcatttttaaataaacttctttaagaaaaaattgtcttgaaaagattgttttcactttgatcaggagacggtgcaaaatctcgtggccaatccattgag

SEQ ID NO: 74783 - DNA, 874 bp, Carica papaya
  Intron number 2 from transcript evm.model.supercontig_21.1 04 (locus evm.TU.supercontig_21.104) derived from phytozom e v7.0 (chr-ID supercontig_21; pos 1250462 to 1251335 reve rse strand)
cagctttacaaggtaaatagcgatcttgaatgtcacagtttcaggactttcaatcaaaatagggggtctcattttgcattttaaggtagtctcaatcctcagaacatgcctggctattttgatggccacagcctatataaattgggttttagcctttgtcaacttttaggagtttaggctctatttgttaaataaaaatatcttcatatcttcatttccgaactttagtatgtttatgtataaaaatattaaaaagtaattgaaaaaaaaaatatttaggaaattataatggagtttgaaaagaacaaaaagatctgtttgtgtttttacggaaattattatcttaatacttgattctccacaaatatacatactaccaaacacgttcaagaatgatacatgtataaacttggaaaatgaaaattaagaaatctcattgctcgaacagcctcttagaaaggagaagaaaattttttagaaaaagaattggtataatgatcccaacctgacgtgctgcccctgccatcaggtgtttgaactttgaaacccataacaatagtttgtgaccactctgcttcatgggagcttattttgctttgcgttaatctagatgtcgctatctttcttgttagccatttgattgcccgtctaggcttttagctgatgcatctatgatccaatagccgggaacatgggagttcatttctaaaacttaaattgttatctaatgattgtcaggttaccgtttctgtgcatgcactgcataaaatttctagcttcgtggtggttggctgataattttcatacttaaatactcatatctggctcactgtcccggttattgtttgacacaggtgaaagtggtgaagagatc

SEQ ID NO: 74784 - DNA, 685 bp, Carica papaya
  Intron number 1 from transcript evm.model.supercontig_33.4 1 (locus evm.TU.supercontig_33.41) derived from phytozome v7.0 (chr-ID supercontig_33; pos 250505 to 251189 reverse strand)
gccgtctcgtcatcgacttcatcggtaagtacgtatggtcatcttacatatcattcttctcgttgatctcattgttaattaaaatcatagcgcatttcttttttcgatttgcagcatcattagcggtcattaattatatatttgtataggtttagataatctgaaaaagagagagagatttggagaggaaaatctagaagtgtggtgtagagacatcagacacggagtgggaatggctgaaaaaatcatgtgcagtggttttgtctgttagttatttggatttgaataaaagccaccgacgattgagtatccagacaacaatcgactgtttcgtatgccattgggtccactttgcggatttcaacgttaagcctaaaaacacgtgcagacaggacgaacttctctgtttaaattattgagattcaatccagaaaaagaaattggagtattggaacatatccaaattaatttctagtttaaggctatttattagtataataaatcaaataattttgattagttaatattggatttgattcataaattgcggatatcaaaacgatttggtggattatgaatgctgataattacgaggcgttttttattttttttgccaaattatttgattatggatatataaatgtatgcagcacaaggtctgggattgccgtatttaagtgcattc

SEQ ID NO: 74785 - DNA, 675 bp, Carica papaya
  Intron number 1 from transcript evm.model.supercontig_4.10 9 (locus evm.TU.supercontig_4.109) derived from phytozome v7.0 (chr-ID supercontig_4; pos 2124515 to 2125189 reverse strand)
aatagaggaatttacaagctattcactagtcctaagtaagcttactcaacaaaattgattgttaacttgttgggataaaaatatgcttacatatgatagaaaattagaaacattttggggcttgaatattcaagtttagggtagttttgtcattatacttggtcaatagtaatctactttaggtggcttatagctcttaaaattagctacccctacaggcttataaaataagctattgcaaaagcttatagttcttcatcctatgccaaacagctctccttgaacccaaaaaaagaaaaaacaaactaagacaaatcccttattagtaagtgttgcaattttttttgttggttaaaatttcatatttatgcctgaatgtaatttgctccaaatctgtaggtgtttaagactttgagtcatcaagcaattggatggtgaatatgccctgcatattcccaggcggatttgtttgtagccttattacctgactacttattttaatatttacgctctcaggttgcatctcttggagaaggtatatcactggaggccaaattattgagtaggtaagggttattagtttgcatgcaattctttcatttattattctgaatgtgaacttctgcattgtcttttacaggaaggaagcagccttacgtcaaagagaggtcagct

SEQ ID NO: 74786 - DNA, 870 bp, Carica papaya
  Intron number 1 from transcript evm.model.supercontig_546. 3 (locus evm.TU.supercontig_546.3) derived from phytozome v7.0 (chr-ID supercontig_546; pos 26166 to 27035 reverse s trand)
aaacctacaaatcagcacccgtttctggcaacgaggtaccttttttattccaatacgttttcctttctcttcttgttttttttttttttttctttccctctctctttttcttgtgcatgatccttttcatgggtgtttgttggattatgggattgtttgcttgggttttgattacttcttgaataatcaatattgcagaatgagatgtgtaaatgtattctgtttcggtttagtcatttggatatgtgtttattgtgttatttttaaccctcattaaagatatttgtatctctaaattttttatacgagcagtcagaaactgatgatcagatacacacaaatacatatgtgaattgctctgaataaaatttggagccaattgttgtcatgttttgtttcttgtcttcaatttttagaaactgttataatatttcttcctcttttgtggtccaacttgatatttaataacctgtattcttgtatgggaatgatattgcgtatatattgccacaaacttacttttgttcatatatagtgattgatgattgaagcctgccatgttgactcacttatatttattggcttttaaagaacagccagcaatttttgagcttctttcgtccctaatcttttaatggcagggttgtgaagttgattcaacggttataggctgaagtcatcaaatacctttttatttacctcaatccactcatttaactaaattaatgttctacttggatgataatgtcgcaataagctcttgttacgtgatggcaatgagcattcactgtagaattttgttctatttatttaaccaaaagctttctttgctcaggaaccggatagaagtgcaactttagacactttcat

SEQ ID NO: 74787 - DNA, 521 bp, Carica papaya
  Intron number 1 from transcript evm.model.supercontig_53.1 52 (locus evm.TU.supercontig_53.152) derived from phytozom e v7.0 (chr-ID supercontig_53; pos 1254741 to 1255261 reve rse strand)
ttcaaaggtaggtcctttctagctccagtcttctaataatgggaaaccacacaactgggttttgcttgttttatggttttccattttgggtttcagctagagaaaagaaagagaacttttattcagcacgttttagggattttccccaaaaatttctctgttttgctctgtctcaaaccaaaatcccccatgggttttcgtcattttcaatcagggtgttctcaatctcaaagctttcaccggaaaatcccgatttttttttttactcatttcagaattctacaatctggttgttcctcatttgttgagatttttctaaaagacactggaatttcttacctttcactacaccagtcagagaaacagagcatcatctctgctctctctcattttcaacctagcagcatctagctttgttcttcaaaaatgctgcattttttattttcatcaatggggcgcggtcacaccatcataattttattgcaggaaagtcaatacctccgtctcaagaaggcaacttt

SEQ ID NO: 74788 - DNA, 330 bp, Carica papaya
  Intron number 1 from transcript evm.model.supercontig_70.3 0 (locus evm.TU.supercontig_70.30) derived from phytozome v7.0 (chr-ID supercontig_70; pos 248413 to 248742 reverse strand)
tctccaaccaggctctcgtcccttctcctcaaaaggtttctctctgtttcccttacattttgacttctactttcagctattattttctcattccctggtagttaatggtcgttgatacgtacgtgtaagtccctgcttaaatgattggcattctcctttttctttttatatcgttacccttttctttcttcctttaccttttttttggaaccagaaaagaaagaaggttgcagcatttacttctatgtgattattagttttttgaaaagagaaaaaagtgagattgatatagtttatatgattttggtctcgggagatcagtacttagag

SEQ ID NO: 74789 - DNA, 874 bp, Carica papaya
  Intron number 1 from transcript evm.model.supercontig_18.1 91 (locus evm.TU.supercontig_18.191) derived from phytozom e v7.0 (chr-ID supercontig_18; pos 2083239 to 2084112)
tgccagttctgtctctcgttcgtggcgacattttggtgagctgattagtgtttgtgttttgatatatggtctggacaactttccagggaactccaattatgtttttgtctattggcctatggttaaaggatcacgcacttgacatttttaagcatttagaatttattcttgatggaattgttgaaaccacccagagcttggtactgttttttattgagtttctatgtatctgatgcaacacttcatggttcctctatattgcaagttacatataacctggatttttttccctagtgaagcttcatatctttagtgaaaaatttgacataggaggtttaggagagtttccagcagagtgcccatttaattgatgcccttttcaactaatttcagtcaatttcccccgctgcagggctgctgctattggcttatctgatataaatccaatttaccgtgatgaactttcactttaaaaaaaaaaaaaaagaaaaaaacttttttctcctcgcaatagtttgtttccttgctctaagcatgagtgcatttggttgatgggaactcccatatatgatcttgggatattctaaaaattgtttgaaaatattgttatttcctccttttttgggagaaattaatttgccctagtcatctcctctcacccctcccttctaggaagattgtctttttgctacctcagacatcttagtttatctacctgttaatttcccgttattatttgctacttgcactcattatctgtaacatggttcatcaatatttaatgacacaagtgaattgtccttcatacggcgaaaacatttgcttgttgttgaaagatattgacggggttacatatgttttacagtgattgcaa

SEQ ID NO: 74790 - DNA, 875 bp, Carica papaya
  Intron number 3 from transcript evm.model.supercontig_44.1 (locus evm.TU.supercontig_44.1) derived from phytozome v7 .0 (chr-ID supercontig_44; pos 4309 to 5183 reverse strand )
cagcagccacattgcttggctgttccatgtaagttgcttctgtttctcatcatgttcattcggttatcaattctgaagctagtattagagctaccatcgttgctttcccatatccgacagagactagatgaatatggaaatggaatttatttcattccccagatgttatctaaagtttaatcagatttctcttgaaacatactggggatatggttaatgttctaacgttctagctttgctttcttttctttaagtcctgcaccgggtctcaagagtttcatgtctatggtgcctattttaggggaccactctgagtttggttcatgttctaattctatggatagcaatgagaatacaaataaatgtacaatagaaatataaacaaaaatagaaatataattctaagccaattctaggtccagtgcttgttagttgttttcataatttatttaatgacatgtaggaatacgagattcatgtttgtaaaaattgagatatgaatgaagtttatataattcttaaaattttagttatatgctatgtaaaaataagaatataatagatttgaatcaaacacattataattatttttcagtcgcatttttcatcagtgtattttgaagagttatcatggattggaattaaataattgtgatcttttcggctcttgttactcaaacctgctgatcagttgttaacaaaagaagtctaggtatttttatttgcttcagtttaaccaatattatctacatgtcagcattcagtactgatggttctaaattagttatgtgctctgctacttattgttttttctattcttctttgtcttaaatagtcacttttaatcatttaattcttttgcagatttgaagagt

SEQ ID NO: 74791 - DNA, 880 bp, Carica papaya
  Intron number 2 from transcript evm.model.supercontig_70.1 05 (locus evm.TU.supercontig_70.105) derived from phytozom e v7.0 (chr-ID supercontig_70; pos 799666 to 800545)
ttcagttggtattaatttttccttcctgtatttctgttcctttttctatctataacctaatttcaaaaaaaaaaaagaacaaaacaaaacaaatctccggcgaggtttaagctctttctagcttcttgtccttttctttttttttttctctgttttgaagctttggatttttaatggggccaagaaaatgattcagatcttgtaattcaattaaaagttgattattatctgttttaaatatcaaatgttcactcagttggaattcttggggaaatcatggacccgcatcattgtacggagtgcgttgtacgctcgccgcgtatgacaaagttctgtcaacttctttcgcttcgggttcgggtacccacgtgggtgcaccgacttggtattttaggaaattaataatttctttttaattttcagattttgagctgatttttttgggtaaatagattttatctccaacctttttttaggaggagaattttcctccgtgttttagcgttttactattatttgtctcaatttttagttcagtgttctctgttcaacttatgttattagaaaaaggtttttttttataaaaaaactgtgcatatgaaagaaatacataataaataaattcaagtcaaactatgaactggaataatgattgatacttattatactgctgcttttgaaggagatactgattgtgttcatatggtttttgttttttttttctcaaatatgtaggggtttttttttcttgatttattttgaaaaataaagctttagattgaaaagaaaaaagtatgaagatcaaaagaatgtggcttatgagccgttcagtggaaagtaaagaaaaggaaccgttctggttttttgtaggtgacaaaag

SEQ ID NO: 74792 - DNA, 534 bp, Carica papaya
  Intron number 1 from transcript evm.model.supercontig_7.12 0 (locus evm.TU.supercontig_7.120) derived from phytozome v7.0 (chr-ID supercontig_7; pos 1122830 to 1123363 reverse strand)
agttcccaaggaattgttattgggaaggtttgtgaaaagtggcgagttccatattgttattttgaagatttgcatcaaagttatcagtttgactttgccttctgttgataccctgtattagctgaactggcaatgatatctgatatgccatacctctactgattgttgttctgtaattggcttttctgaagtacttgatgcttcagaagcagtttgttttttctttatttcacgagcatgctagtggcatatataagattatcattgtgcaatatagcttaccctggaggtccttgtctctctgaaggtgtctctttcgcaatcttctatactctcttgtacggggatggcacccgcttgatgtgttgtttataatattatatttttcttaaaaaaagtggtggtcttgtgattctttatgaagattacattattagtttgcagattctgtgcattatttgtttgcaaatttggaacacgtaacggatagcttataactgacttctttacttggcaggaacatttgttaatagt

SEQ ID NO: 74793 - DNA, 431 bp, Carica papaya
  Intron number 1 from transcript evm.model.supercontig_6.31 (locus evm.TU.supercontig_6.31) derived from phytozome v7 .0 (chr-ID supercontig_6; pos 172124 to 172554 reverse str and)
ggtagatagaatctcgagtaaggcaaaaagaggaggtaagcagaaaaagaatagtggtagtagagaactcaagagagtagaatgtatggttaatttgcaattcttcttgattgatcgtattctttttggaatacgagaagcatcaacgatgccgggaagagagctattattaaagaggttctcagttaggaaactaaagtggtgaagatgtatgattttctagtgagtagcagatggggacgtgcatgaagtaagatgacttgattttctacaggaggaacgactattggtattttgatttttttttttgtaagatagtaaaatgtagtatgccagaagcatcagcataacagtatctatttcttgtgagctccttcttaggggctcaaacttgtgctggatcttcaccaatgtctatggcgggggtgagg

SEQ ID NO: 74794 - DNA, 1024 bp, Carica papaya
  Intron number 2 from transcript evm.model.supercontig_16.1 13 (locus evm.TU.supercontig_16.113) derived from phytozom e v7.0 (chr-ID supercontig_16; pos 1754082 to 1755105 reve rse strand)
aacgtcaaactgctactgctgcattgaagagtgaagtgagctttgctgcctttaaatgcatactatgttctgtctctttactgtttcttttatgtacttttacctggaaaactgctttcttcattagtctacctctagaacactagaaagttagctttttatacatataacattctgtttcttgatggttgatgtgatttttcatctatcaatatgaacatgaaattccataactaggcctaagatggggcttttaacctcatttcttgttagacagttatgggatggatcaaggccactggatattattgcatctttcaatgcagtctgagaattactttcattgctgaagcttctagtcacattttacgcaaagaaagttttccaaaagctgctatattttgattcttacatatacttttaaaacattattatagtttggctgaaaatgtctttgcattttaaaatgattttcatggaaaagaactgctgcatcttttgaaggagcataagcatgaagaagaccataaggctgctatagtcttgatgtttgttctagtttccatgtcgagaacgaggccatagtatttggcaataaggaatttattttatcttgtggactcaccaattgtagtttgtatctgaaatttctccaaactgttttccttggaatattttttggaactcatagcaaatacaaaatattcattcactgtttatgggttcaaactcgctgaatgagaacactcaaggttgttttatttgttgttattgttgttttttttcttcttaaaggctcctagctctgttggttgagcatgacctattaaatggtgaattgctagtggatagtgttccctttccaagaccaagtttaatggtttggttggaaataaatattgatttgagttctgattgacatgtaaattatttgagaaaagctttcatgttggtattccataaacattgatgttgatatctggtgttctgatccctttcttgcagttctttacaacaaagcctt

SEQ ID NO: 74795 - DNA, 642 bp, Carica papaya
  Intron number 1 from transcript evm.model.supercontig_55.1 5 (locus evm.TU.supercontig_55.15) derived from phytozome v7.0 (chr-ID supercontig_55; pos 94058 to 94699 reverse st rand)
ctagtatagctctctcccctctcaatcttcttcttcttcgttttcttatttcatatttttgaaatttctgttgggttttttttcttaagatagggacttcaagttatgcatcagcgagttcaaacctcataaatattttcttgtttgaacgaaatcgtgttttgtgaataggtctcactggtttaattttactggtaagagtatacccaatatgccgataaccgactttgtatatttctcaccaagcttaaaaatctgccgtcccgggaggggaggggggaggtgtttggtgtttggtgttcatttttttttttttttttgtgatcgattttgtctctggttgccgagaaataaatcggggggaaatgcgaagaaaacatggaacggtgaatctggaggttgttttgtgttattttttctgtatgagtgtgaaagtttgagctgtgtgtttctgataggcatcttgcttctcttttcgcctttaaaagccatgatttcaaaagcaaaaatccattcgctctttttattttctcggacattttttcggcaaccaaacagacgatgttagcaaactccgaacgtttcttttctttcttctttttggcagggtggggaaacgttccaaaaccccaagtattcttc

SEQ ID NO: 74796 - DNA, 484 bp, Carica papaya
  Intron number 1 from transcript evm.model.supercontig_19.2 87 (locus evm.TU.supercontig_19.287) derived from phytozom e v7.0 (chr-ID supercontig_19; pos 2465850 to 2466333)
ggcgccatatattccaagacagctacgcttgcaaggttttaatccgctacatttaattcacacccctttaaaaaaataaataattaaattaaccgcctgatttttgcaatttcaatctctttaacgttttattaacgccgtcttcttcaccaaataaaaatccgccacgaggcaccaatttcttcgttgtcctcacgctaaagcggtgtagccgttaatacgccccttcccttatattcctctctctgacgcccttccttttccccatccgcaactcctcccttctcgttcccttttaaattttcttggattctccccgaaatccttgaaggtttttctccccaaacgccaccgcagttcactttcccgtgggaaaaatgttggttttttcatggaattgaaccttttttgtccttcgcttttgattctgtttgaatatctgtaatcagatccgcaagaaaacaggagaaaaagaaggaaagag

SEQ ID NO: 74797 - DNA, 941 bp, Carica papaya
  Intron number 1 from transcript evm.model.supercontig_776. 5 (locus evm.TU.supercontig_776.5) derived from phytozome v7.0 (chr-ID supercontig_776; pos 16248 to 17188 reverse s trand)
cccttgcaggtgcaatttcaaaggcgaaatcagaggtcagttgcttgaacaatagaccatcagaaagaacttttcatgtatcaagactttccatgtgagaccacaacaatgctaaatttagaatatacctattgctggtgtaatgtgtggtttccagttctgtcaaggaccaaaaacataaatgatattgcttttacaataaaaatcaataaatgaagttgaaggtcgagtgagagtgataaagtcagagttgatttgtggatgagtgaattgctgtctgtttttcttccatgatgctttttacttctaaagttcacaaataatctgtatgaccaactaccgtattaaggatcttatgcatttgacgaggaagcaaggttttgatggcatgttgctcgctatgttgctcgaagtttgaaagcctgtatgcatgcttcttgatacttgaccagaatacagatttgtgtttggtggtatctgctgacaagggggaactgccctgttttttggcacatcgttgcttgagtaccgtgggtgttttctgaaaggttttcatggcattgtaattttacaaggaatagaatataactgcaaatttggagtgaattatgctgaaaacttaaggtggtacgctgtgttattgatctgtttgaatcttctaactgaattactgcatctatgttgatatggagtcaaattttactgggattacacaattctccaaataaatattgagtatgaaatcaagtgaaagcatccaatctggccaaaaaatgcgtgctcaaattatttatacttcaatagaccaactttaacatgagatatggactgcaaaacatggtctaaatgtttttaagtggcttattttatcgggaattaagtattgcatctcatttttcatttcaggaagctgtgcaacacttggcatctattgatctcaa

SEQ ID NO: 74798 - DNA, 959 bp, Carica papaya
  Intron number 1 from transcript evm.model.supercontig_277. 5 (locus evm.TU.supercontig_277.5) derived from phytozome v7.0 (chr-ID supercontig_277; pos 21248 to 22206)
cgttgcacctcgcggtggctcatagacaaaccgaggtgtgttctaattaaattattaataaaattaaataatgactattaattttttaaattaattactaattggtattatatgatataatttattaaggtttactaattttcaatatttttatataataattaataattcaatttttcaaatactattttaaaaaattatataataagatatttgagtaaaatttatatgatataaatagtaaatattcaagtcttataagcaaatttgaataaatataaagttgaataatacatacttatacctaattattaagtaatagttttttaattaagctacgagagattagtcagtacaaatattatgaataataattaagtaatttacggaaaattaaacgttattatgtacgaaagggatagtctccttcaaactaaatcaaaatattggctagatgggatgtacttataatttacattttctacatgttcgacatatatttatataaaaatttacgaattcgaatcatattgtatttatatatatatatattatattataattatttaatttatatgatacgattaataaatatatttaatcttatgttaaaaaaagtgttatacaaaaaataattattattaatttttgggtactaattttttaagcttgtggtattatattacattgagtaatttacaagcaaggaataataattttatataaagggtgttttatttgatttattttcttgtcacatcaattcgtaagctaatttaaatataaaattttgactttgtatttttatatttttgggaaaatatttcaagtaatttatatatatatatatatatatagtgttctagcaaatttacattttgtttcttatccggcaccgtttttgtcaaataaaatcccatgcaggctataaacttcttgatttcgggtactgcgattga

SEQ ID NO: 74799 - DNA, 542 bp, Carica papaya
  Intron number 2 from transcript evm.model.supercontig_51.6 5 (locus evm.TU.supercontig_51.65) derived from phytozome v7.0 (chr-ID supercontig_51; pos 633021 to 633562)
gaaggatctgttgtcaaaggtgtggtttttgtgtctcaagtagctgcagccattgcagcattgcacgaaaggtcccttcttgaagaaaagatcagggaattgcggtttagtcaaccagtaacgagataccagcggttcgttatctttcttttatgattttctcttatatatgctttgctttatttactttgtgaacttttagcgtttattttcgtatttaaatgatgatttttcattttaactgcttgcatgtagtttatttagcactgctacaaatgcaaatttcatgtttactttattctcttacttatgataatggtattgtttgaaccattaatacttgattgtaattggacaactaacttttctattattgttattgctttgtaatactgatattgtttagaacatgtacatcttgtaatattttgagttgtaaggaatatactcataaatgttggttgccttgattcttagaatgactgaacatgatattctatcaatcagagctgaagaggagcggaaaaaccattccaattata

SEQ ID NO: 74800 - DNA, 512 bp, Carica papaya
  Intron number 1 from transcript evm.model.supercontig_179. 39 (locus evm.TU.supercontig_179.39) derived from phytozom e v7.0 (chr-ID supercontig_179; pos 274974 to 275485 rever se strand)
gtcttctcacccggtaggattacagcaatactcaggtcatcccttctcattttcggttcctctcttcattttccaagcactgttcagcatgctacgcttcaattttcattttacaaattttacaacgtttttcagaagtctgcttttttgctcaccgttctgtttggttggttgtcgagaaaatgaggacagaaaatttgatgataaaactaattttattatccgggaaaaattgttttgttttttcttcatttgcttccttcgcttcctgtcttttaactattccgtggattgaagaatgaaattcttaggggtctttacgatccattctgtgcagatctagagggcaagtaacctgataaaatcttgattaacatcttttgaacttagaaatgtcggtagcttgtttgttgcagcgaacacaatcagttccatggacagagattatgaatttctgatgctgcaatttcgtttcagctcctgcaaaagcagtttataggctttcaaagcct

SEQ ID NO: 74801 - DNA, 762 bp, Carica papaya
  Intron number 1 from transcript evm.model.supercontig_3.19 7 (locus evm.TU.supercontig_3.197) derived from phytozome v7.0 (chr-ID supercontig_3; pos 1447296 to 1448057 reverse strand)
gtttccacacctactcgctggaccggtttaataaggtttcattttttcttgctcttttcacttttataaatacaataataataatagcctatcaaataatccaaaaaaaaataatgaatttattatttttataaaaatttgtaatttttttattgtgtatatattattaaagtaacaaaatttatcaatttttactgctcaatattaaaggtaaattttaaacagtgaagagtttttttttttttgaaataattcattaaaattttctgtaaaataaaaaaaaatatatatatatatatatattagttttgtttgggacaaattgctggttttatctggagtcggcggacttcgtcatcaatcgtaatctggtttctcgtgaaagcgactgaagatgcggattggtcggtcagcaaagaaaataaacaaaatatcattttctgataagccacgtctacagctaaaaatgtttgccgttacttttcttttaagaaaattaccaaatcttgcaatgggtaaattattaaaatctcaaattcaaatattaaatttataattttatttaatgtattaaacttgaatatttaatttattagtatgttaattaaacaataaaattatttataaaaaaaagttttataaattggcgtttcatgtttccacagaggatattaaaaattattttgtacaatttaacatgagtaattaatttgccgttaattaactttggcggctgattctccagctgttcagcaacctcac

SEQ ID NO: 74802 - DNA, 765 bp, Carica papaya
  Intron number 1 from transcript evm.model.supercontig_186. 15 (locus evm.TU.supercontig_186.15) derived from phytozom e v7.0 (chr-ID supercontig_186; pos 468044 to 468808 rever se strand)
gccatcgtcatcagtgtcagctccaatctgaacaggtgacttgttcatctatttctccttttcttttcgtcatgcttgcttgacgttgaatttctgctgcatttcaattcttggattgttgaggtggtgtaatatggaattaacattatgtttgggacttggcaaggaaagtaaagttcgggcgttaaaaggaaagtgagagaaagtagagtcgagtaaacaaagagttctaattaaataaattatgaaacctctcaatgtttaatttgggttggataattgaggatgaagagaataatttaagtgatctataaacacagattctgtcttaactcttttaataactaccaacttgttatcattcatgctctatcttagttatcattcatgctctatcttactttactcactctccttactcaaattagtctcacaaacaaatggagttacatcttcccatttgttgggtctcatttatttaaagagccttgctttgaattattttggtatgatgagttctttgtgcattaagtgctatttttcgtttccattacatttgcttagtgacattgatatattggatggaaaggaaaacagttgctcttgtggcctttcagtgtaaacaaatatatgtgtggtagtaaagtttgagttttagactagttctttttcatggaatttttgttcagctgcttaaattatgggtgaaagacctaatatcagcatactttttgggcagaaacggaggccattttctttgaaaga

SEQ ID NO: 74803 - DNA, 403 bp, Carica papaya
  Intron number 1 from transcript evm.TU.contig_44085.1 (loc us evm.TU.contig_44085) derived from phytozome v7.0 (chr-I D contig_44085; pos 687 to 1089)
tggaggtgcattattctcgacaccatttgcttcaggtacctattcatcctaggcagttttaaattattgcttggtcttataaattatttagatacacaattaggaccattaatatagtgcaagtagacaggtcttctcagcttataagattgtagctgatttactacagttcagaggttatggaaatctggtggcttaaataaaaaacttttgcggacagacttttgattccctttacttggaaggcttgaagtttttttttccgtttcttcagaattgtgttatcgcatgaatgtttattctttcttgaaataataacgtatgttatcgcatgaatatttattgaattctttactttcattttgcaggtgctgcaactggctctggggcaagctttggtgct

SEQ ID NO: 74804 - DNA, 763 bp, Carica papaya
  Intron number 2 from transcript evm.model.supercontig_60.3 2 (locus evm.TU.supercontig_60.32) derived from phytozome v7.0 (chr-ID supercontig_60; pos 432302 to 433064 reverse strand)
gacggaaggaagtaattcttattccttttgggtaatagatagaatcaaatgcctgagcattttttcctctagcatatgtgtaacaggagccaagcatagtcacaattggctagacaagcttctccatgctgcttaatctagtgtatgataataatatatgataaaatatatgacagcgtaataattattaggaaattaagttattatgtccataatcaattagttacagttctattctgtctgcccattctgcttgtgaaatatcttagtgctgcagccggtgataggtacattgttttggaccatccatttgggatgcattttgttttcctgctagcagacacccagattatataccatgttcaattaaaatttgttcgctagtagttttccactagatcaccttgaattttgaagaaattgattgaaggatccactaagacaatttaattggtgacagaagcgagtgttcttgtttatgatagcttaaaacaaaatgaagctaatttccctgttgtcctgcagttttcctcttatttatttggttcaccgactctcaagtgagctggcaattgtgtatatccatctgggacaagataattagaacataggatgaaacatgctgttattaagatttataatggattgtctagtttagtcatgattcaatgaagagaataatgctgttgatggggttacagtttcttattcttttgtttttgatgtagctgggtctataaatatcagcaatattctgactgga

SEQ ID NO: 74805 - DNA, 457 bp, Carica papaya
  Intron number 1 from transcript evm.model.supercontig_285. 4 (locus evm.TU.supercontig_285.4) derived from phytozome v7.0 (chr-ID supercontig_285; pos 25342 to 25798 reverse s trand)
gcagctcttgcaacttcattacggtatgatttcgcgattttattgcttcgtttttttcttgataatggttattcatattagttgctcatgtagtgtttataattaggtgttaacagcatcattttttacttctccaatgaaaagtacaggagtacaagaacaataaaatagtactaggtgtagtttgttgttattagtcattagtaatggtttacagatagggtttgcaatcaaacctgaatgattaagatatattgactcgcgtattcaccatgaacgtccgaagctgttttgtccacctcccaaccaagttggtgaaaaataatttgttgtgaagtgaatgaaaggaagaataattttaatgatgattattcagctacctacttcacgtacgtttaagcattataattgatgaatttcttttaacgtctacaggatcggccttcaacgaaggtcc

SEQ ID NO: 74806 - DNA, 593 bp, Carica papaya
  Intron number 3 from transcript evm.model.supercontig_3.49 6 (locus evm.TU.supercontig_3.496) derived from phytozome v7.0 (chr-ID supercontig_3; pos 3542176 to 3542768)
aactatgtaagtattcatttatatgatgcagcaagttagtactgtaattgttgcctaaactccttatcttataatgttcagcatctgtactgcacattttctgaacctgaggattgtgatgaatttgataatcagaagagtataaacatagggtcctgggcattcattttccttataaaatgattgatcaattactggaaatgagccttttgtgatcttataagatatgttaaaatcattttagtaattcccaaataattgaattccgaacagtcaacatacttgaaacattgcagttggtttaagtaaattcttattctattaattgattttagttattttccaatacatatataatcaaaaccaacttcacttatctctttaaatttataatgatgaatttataaaacacttaacatgaattgaacatataatttatttggaattagaacactattatcattcaaaatttctcatgtgcattatacttccatttttattctataagaagttgaagtttaaaccatattagctaaagatgtcacttttttatttggtttttacaggcttggacactttataaagacgggaag

SEQ ID NO: 74807 - DNA, 672 bp, Carica papaya
  Intron number 1 from transcript evm.model.supercontig_18.4 0 (locus evm.TU.supercontig_18.40) derived from phytozome v7.0 (chr-ID supercontig_18; pos 271256 to 271927 reverse strand)
ataagttggtggagaggtagttatgcttctcattttattttaattttagaacttcattgtgaaatttattccaaatattcaattttcatgcatgtatgttcagataagtagtttacccaagcttaaagatggtaagagtccgcaaacctttttcaaatcaatgtgtactgatgtattctaacactcttctatcggcactacctagatggatgtcggaaataacataaatagtattcttaggaatttggatacaagatctaaagactgtaagtagttattcctagagtttaatatgactggggatagaccagcaggatatattgggtccatagttttgtacacatattttgaggccaagcttgtagaaagctcctacttcaaaatttatgtgtggatatcaacatgttctttgttttgatttatattaatatattttatcttctaatgtttgtttgtttgtttatctttcccctgttcctgtctttctttttggattagcttatcctcctatgattgtacttcctctttccttatctaaaatatttcttttcctttcaaaagatatttaactcatttcttcatggtgagtcatgctattttcttctgacttatcaagttgccattttgttaccattaggtatcctcacatcgagaaggatcacttggtaaagc

SEQ ID NO: 74808 - DNA, 858 bp, Carica papaya
  Intron number 1 from transcript evm.TU.contig_28291.1 (loc us evm.TU.contig_28291.1) derived from phytozome v7.0 (chr -ID contig_28291; pos 6493 to 7350 reverse strand)
ttgattggaggtaggggttgtaaagctgaggtcagtgtgcgatgcgactgcaaaagaacaaaatcagggaggcagtgattaggagaacttgcggcaacgagtaacagtatcacttattgggctagagattcggggagttaagtggtgagacttcatggagttgcttattgggatcttttacgactggagataagggtggtggtcaactggctgacagtttttaaggttttatgtgtgcactacttttctgtcattttttttgcctagacagatctgtgactgtttggggcgtagtactttgtgaatttagtatagagcttttagttttataccaactaatatatgacaagttaaggataatttgcctacttgaagatttggtgatacaaacttagactttgcatataagaagtcttaaacaagatttgattacatcacacaagaaaattaagatctctcattttagtttattgaatagttgaactttatttaaaaatgagattacatagatatttataatgcttcgtatggaactttttataaatagggttaaagtaagaaatactgatactaataagatttaagtaaataaaatagtgatactaaatgctgaaaatattaaaattctaaaatcacttaagttataatatatataattttttgaaataaactaaaattataataatagacttataaagaatataatagttttacatttaacaaaataataatttctaatatctttacgcagtcttaacttaagccaatatatattattaatgctctactagtttgaataaataatcaatacctttttatgcttacttttcgtatttcagagtttcgaaagtagcaagc

SEQ ID NO: 74809 - DNA, 741 bp, Carica papaya
  Intron number 1 from transcript evm.model.supercontig_22.6 0 (locus evm.TU.supercontig_22.60) derived from phytozome v7.0 (chr-ID supercontig_22; pos 1371231 to 1371971)
gctaccttccaagcctctccctcctgctcaggctggtaagctttttgggttgcctgtttctcttcttttgttttgggatcttttgtgaactatatttggtttatgttctttttctgattatgtatttgttcgtttacgcttttggtcgttcttgtgttggacgagtaatttgttgcttcagcttttcgtgctctctttttgggtgtattttcttgtctgcatactcctattcaagtcctgttacgtttcaagtgtattcagatgcttgttagttaattatctctaaaagtttatgtttgctgtaaaaaccaaattgaaaagtattttcttcctcttcctttttatgtaaaaaatcttgtacttaacggttaacctctgtttctctctgtagattttgagattgttctaatccttgatacagcagctggaaaaaaacttgccgttattgttgtagagtctttctctttagagaatttggaaaatagacacgaagttggattttggaagatgttgattttttctgctagatgatattcatttattattttacatgcgcaagttgaaatgttattagtgtgcggcaataagttctttgtttgtttctctttaattgtctgtggtatccatgaatcttggaaagcattatttttggtgcatcagtattatctctctaatcgattggggtacttttccttgatttgtttgttatcccttctattaatatagtgagggaggcaaaga

SEQ ID NO: 74810 - DNA, 695 bp, Carica papaya
  Intron number 3 from transcript evm.TU.contig_30463.1 (loc us evm.TU.contig_30463.1) derived from phytozome v7.0 (chr -ID contig_30463; pos 629 to 1323)
acgactggaaattggtaaaagtttcaattgcttttgcttttttctctaagaaatgaaacatacattacgatcggggaacatctggatattcaatcaacatgttatgttttatcagcatgagaaattgggattaacccatgtagtacaacttgtttttgaattatgggctaagattatgtatactggatatgggtgagttttggtggccatgattcttgaattatgttaggatttgggtgttgatgtagctgttagaatgcttgtgcttctgtgtttgtcatgattgaactgtaaatttgcttattatggaggcatattggttgtgttatgtggatgaatttcatggaagataaaacaggacagtatccatgatctgaatccaaagctctcagttgatcagcttatagttaaaaggagtaacaacccctcattcttactctttctagccagtttctctgcttacctatcgaacaatttttctctcgttctcgcatactttgaggggaggattcccctaactgatttcctgatctttaaacacccatacttccaatcgataatttcatgtagttgtcaagtattttaattaattatatgacatattactcagtttacaagacatttaattagttccattttgtatctttcagttgacacctttttataattgctgcagattggtgttgtttcagatt

SEQ ID NO: 74811 - DNA, 917 bp, Carica papaya
  Intron number 1 from transcript evm.model.supercontig_152. 56 (locus evm.TU.supercontig_152.56) derived from phytozom e v7.0 (chr-ID supercontig_152; pos 496409 to 497325 rever se strand)
gccatacccttcggtatctacatatacatacatatgcatacactataacctcaaaattctttattcacttgtcttattgcatgtttttcttgtagattttcgctattttgtgtgtcggtagtgactagctaggttataaatctaaccgttcctttaacttcaaatcttacaagtctaaatgttaccttatggaaaacgatatttgaaatatatatatatatatatatatataatacaacattatgtataatggtaggttacgaataggccttcttgcccttgcccttgcccttcatctcaacccctaaaaagtgttggaactccagaagagaaaataagaataaacttgggagagatgagagaattagatattgatatgaattttttgatttaaattttcagctaactggccagcttttaaataaacagattacgacaaaaaaatagacccgaattcttaattatcataatcctagatgataggcacattcttatagatgaggtttagattatagttaagctttatgaacttacaagtgtttcgttttgtttcgtagggagataaagttggaataatgctctgggatgatgagcagaaattgataaatgtttcaaaactttttcttttcgggtttttgcttggcatagaatatatgagttaaataacttgttaactctttagtagcatagttattggggtattttggcacaattccaattacttagaaactatattagtctatttacatatatgcattataagaatatagtttataagcccttttatgcatcttttctcgggtgtctggctaatctaacatttggttgatcttcctgatggttctaaaacatttatacattgaatgtcaatatgatcggcaggagcaacagaagctcgcccttgcagaatcaacggg

SEQ ID NO: 74812 - DNA, 938 bp, Carica papaya
  Intron number 1 from transcript evm.model.supercontig_18.2 08 (locus evm.TU.supercontig_18.208) derived from phytozom e v7.0 (chr-ID supercontig_18; pos 2325627 to 2326564 reve rse strand)
ggtgagcttccctatttattcatccatacttgttgtcttgtttatgttgaatgagaatatagggtgtgtttaattattatttgcaatttagcatttcggacaaagttgaattatgaagagcaaaaggaaatagtttctcaattttgggtctggaatcttgaaaaaattaatttctctaataggaaatgcattaatttgaaatcagaaacgtttagaagaattaattctctagatatttgatacaaaattcatgtccctaagcttagtaggccaaatccacaaccacttaactatatcttgcttgtattagttccattctatcggcgaagagagcctctcattcttttgttgttcctatcttacatagtctaaatggactaggaatcagaatataatatacataggataaaatttgaatgaaaacagtagtataattcaaagataattacatattcaattcattttaggtgctttggtaatttcttccttgatatgagagaataggaattagcggttatgaaattgaaaatttgggtaacgtttttctaattatgcgttacatgtgtaaataatgattaacatctatatatcacataattagaacctaatacttgaatgatcataagatgggtttgaacaacgtacagtgttaatgagagatttgagtgaagtttgttcaattatttatcagatatataaattatgacttacttttatatttgacataagtaagatgcaaaaattgaatatcaataaaaaagtttgaacgggctgcaatgttagtatatttagtacaatacatatacatattttttattgcttatgcagctatgaatgtggtagagaacttgtgttcttaggcaaacatttgttgggaatttcatcctttattgcattttgtaggaggataacaggtcctactagaagatcaactaagg

SEQ ID NO: 74813 - DNA, 668 bp, Carica papaya
  Intron number 1 from transcript evm.model.supercontig_5.39 (locus evm.TU.supercontig_5.39) derived from phytozome v7 .0 (chr-ID supercontig_5; pos 213576 to 214243 reverse str and)
ggcaaagtaaagaggccaatttttaatgagtgcagatgttgacatctcttgttccaactctgtctcctctcttttatcttttttacatacaaacattgcagcatttgaatgctggggtggtcctaaaggaattaaatagttcttggtttttaaattatcttgttcttctttgttagtagtttctagtatcaactatcataattgtattctatcaagggagaggacaaggttgcgagaaatcatgaaggcacattattacttgttgcataatctataagttgcttttgacctttaaactaattcggctggctgtgctttcctcttgtatctgcagtttaggtgtaatttctttaaataataatacgaatttatttgacttctacgtagatatcagtatccaccattttgtttttcttctttatgcatgtattgtcatagatattctgggtatcattttaaagtattccttctttttgtatgtagcgtacgttttattagatatttatatgtagatcatgtatgctaaatataatgtttttggaaggacctaagatgttttgaagtagctatatgatgatttatttggtaataaaataactgtttctgatgctgttttgtcttttttattttcaggggcataactggaagtcggaaaggtttttcatagt

SEQ ID NO: 74814 - DNA, 844 bp, Carica papaya
  Intron number 4 from transcript evm.model.supercontig_26.2 48 (locus evm.TU.supercontig_26.248) derived from phytozom e v7.0 (chr-ID supercontig_26; pos 1742726 to 1743569)
agctgaaacacataatcctgacccacctactgaaggttagttaatctctcagttatggccaaattttgtaagaggataaagcgagtataaccatacaccacagatgtttgatttaatttttctggaccaaaattctctgcttagtttatctcttacttatgaattatgataccatggaattacatactcaatgctgacttcttatatgtatatatatatgtacatatatgttttatgtgcatatggatttcttaatcccttttcattagggtcccactacatttattttgtaattctcatatgtgactattggaatcttttgtactaatgtttttcttttttcttgtattggaaaattttgtttcttttttatgtctttgtccatagttgaatggtttatattttgtattgaaagcttagcaaaagctttgcctgccttgaacttttagtgcccatttgacttggcattaacccatttttctccattttatgtcatggggcctcaatgttcctctaccttttatgaggaactggtagtagtaagatagaatttagtgtcgttttcagtctgtcatggagaagaatatgcgaaatttcaccttttcatgtcagaaatttatcatcaatgtttatggagtattatatctatacattaagatctgattgtggttgatttttctagtagaatatttgttttgatcttttttaaaggtaatttaaggactttaggccacagtaggtccttctaagataactaaacaggattgaaataatactgtaattgatttaacacaaattaactcgagaattaaaaatttcaatcaattatctgtgcaggttcttc

SEQ ID NO: 74815 - DNA, 729 bp, Carica papaya
  Intron number 1 from transcript evm.model.supercontig_43.1 16 (locus evm.TU.supercontig_43.116) derived from phytozom e v7.0 (chr-ID supercontig_43; pos 1467890 to 1468618)
tctgattccgttgctctcttctccgtcgcaaataggttcgttgtccttatggacgattaatattttctttggtttttttctatttttataaatggcatcctaaattgatttattttatctgtttggctgcggaggaaagctgaggaaaggaagcaaatatgtcggatatgttgtttttccttctttttcactactgagaatagtgaagtctctgcagattagctttaatttaactaattttatttctgttatctgtttgaagttccagttattgcggtcaagatttggcctttttagatatttcttactttatatggttatggttctatgaatataaagaaagaagaggaacgaagcacagtgaatactagaactaaatttttggttgtttgggagatgagaaaagtggaggctcttcaggtgtaatcttaactacatgaaattggaaagtttggctgctagtttgcttctgatttctgacaaagttgacgatgaaaataaggaattttaataattgtaaagtattggaagaataattttttggttgcagttgcgtttccttcagattgttccagtgaagtagctcttttcctttattttgctatgttagtaccaatggaaaaatcagactcaaaatgttaccttcgttttagaacttctttgtttagggtgtggtttggttgattcacgttcttttttctatccaaattttcagacttgaaaagcttt

SEQ ID NO: 74816 - DNA, 840 bp, Carica papaya
  Intron number 2 from transcript evm.model.supercontig_65.9 5 (locus evm.TU.supercontig_65.95) derived from phytozome v7.0 (chr-ID supercontig_65; pos 997706 to 998545 reverse strand)
tttctctctgtggtgtcaccggtttcagtcttaccgtgagctttttcttgatcttcttctttcttctctttattactatttcttcgttgtatagttcattcttttcgccgcttttctctcgttttttgtttttctaaaaattcttgattagtttcttcctggtcggttcaaatttaatgagctcgaagaatttgcgtccaaaatccagtaacattttctagaataatttttgtttccttttcgagaaatcaaaatgtaagtgaggcagcaagatgattgggaatttttctggtccatttctgatcttcgtaattagtacgcctaacttttaggctatacacatttagttatatatacagacagatgattaatataggccacccatctctaagtggtccttaaatgtcattaccactgattttgattgacattaaattagagaggaagataactcaattattttttgtcgtcaaccatcagctccttgtagtcgaagttcatgagaataaaatttttgcgtttgttttttttaaataaataattgtttagataagttaaatttttattgagcaaataatgaattgttagtacataagcatatatttacattctagtatatatatatatatatgtatatatttatatagttattttaatttcgattaaattttaaatattttaataataaaattttaaatattgcaaacattatgatttaatttgtacgtaaagtttctctttaacaaaaatctgttaataattttttaaaattataaaaaaatgcatcatttctaattctctacgcgacgtggttttgtatttgcaaaaatgtagttagga

SEQ ID NO: 74817 - DNA, 1017 bp, Carica papaya
  Intron number 1 from transcript evm.model.supercontig_26.1 06 (locus evm.TU.supercontig_26.106) derived from phytozom e v7.0 (chr-ID supercontig_26; pos 814162 to 815178)
tttttcagacttcattgtatttaacattaacaactgtaaggaatttaaagatttgatttgtatcgataattgttcggtaccaaatagcatcatcaaggcacttccacttgtgatcattaaaaaggtcaatatcctgccaaacacactttaaagaattgaaatagtttgtgactgattcattaccttgacaattattactaagcttcaaagtgggttcatacactttggattgattgcccaaatcagagtacattttaggtaacattatcccagagttctttggcagttaatgtaacacatgttattagaagcaatatcttcttccatagaattcatagtctatatcataattgtagaattttatgcatcctgggttgctcgtgatggatttgtaatggctagcttttgaataacacctataaaataactaatttttcatttttttctaatgtacatatagactaactgtgaccagcgtataaaattgtcaccatttagataaatggtgctaatttgtacgggtgagttcagaggaaactcaaggattgaacattaggtggaggcaaggagcgagtggtcaaaattcctgacatgatagatgtatattgatgttatgattgctataagaacagctcttcagagtttggcgaaaaatgacgaaaaataattttattatgataccatgtagattgagaataaaatgagtagaaatattctaattttaattttctttaatttttttttcgtacattataaggtcttctatttatagcataaagacattttatataaaatgaaactaactacaccaaagatcctacaaatctttctactcaattttttttttaattactaatttttatagtcaattattacatattaattatagaaatattattagatactaatttagaaaataaatattaagaatctacaaaatatttcaacagtatttttcttttagattgatctaaatatttagaaggaaggcctcggtgttaagttgaggcgagcaga

SEQ ID NO: 74818 - DNA, 462 bp, Carica papaya
  Intron number 1 from transcript evm.model.supercontig_60.3 0 (locus evm.TU.supercontig_60.30) derived from phytozome v7.0 (chr-ID supercontig_60; pos 332302 to 332763 reverse strand)
ccccggcggcgccgcttgcaggttttcattctttaattattattatttttaattctttaattattttagttttaatttctacctttgtcttttggccatattgttccaaacgttgcaaataaactgaagactataaattgttgttgatgcaattttttttaactaatagagatataagaacataaattttttattaaatcaaaatggaatattttacgtatacaacaatatatgatttatatataagaagtaaaaatgacatattagtttttctttcatttattctatttaatggttatttaatttttattatttaatttatctttattttattttaattttttcataatattttatttataattttttttaataaataatttataattttacataaagaaaattaattaacgcaaaatggatgcagctgcgtaaaaactgaaacggggagcggggtgactc

SEQ ID NO: 74819 - DNA, 587 bp, Carica papaya
  Intron number 1 from transcript evm.model.supercontig_62.8 (locus evm.TU.supercontig_62.8) derived from phytozome v7 .0 (chr-ID supercontig_62; pos 53882 to 54468)
gtggcttggtttgtttcataggaggaagcatcaatgtaagtctttttcccttcatatcgtttttgagtcggtttgatctggttgtggattctattttttgtcttttcatttcttcttataaaaataaagcatttgagagtttcgtttcctcatagaactcatctaggttaagtttagaggctgtggagtttgattaatcttcttcattaggatttaacatgtccttttcctcagataaggagaaaggaaaaaagtatagttctgtagcatattccatgaaagggatgaaccgagttctttttactttttcagtttttgtaacttataatgtttttttgaaaagttcttaaaactctaacggctgaaaatccaagagaagctactcaacttcatctctgaaagtaggatccagaactcgaatttagaatctttataaatgttattgtctcttcagtcaagaatacgatacatttagtcacggactgatttgctttgagtttacttattttatagtaatatgatagagcaacagtttagccatccacctttttctcctaatgaaatttgcttaaattgttgatgggcag

SEQ ID NO: 74820 - DNA, 636 bp, Carica papaya
  Intron number 3 from transcript evm.model.supercontig_25.2 03 (locus evm.TU.supercontig_25.203) derived from phytozom e v7.0 (chr-ID supercontig_25; pos 2097850 to 2098485)
tccaagttacttacccgtcaaggttttcatttagttttgtaattgtaaccttttatatgcatttatgatgtatggttgtgtgactgcaatgctcttggctttattgatcagattgagcactttaatgttatggttgtcttacaagaggccctacattcgtcttcttccagtttatcttgcaattttgacttcgattatatctgtactgatgttttacattagagatattttcattagatgccttatcaccctggtttcttaacataatagatgatgtgctttccagggattaatagcatggtacattgtatttttttctaaaaaaacatgctaccataactttttgtttggccccatgttagctctttgtgaaagcacagaaactttgatggtgtttccgcataggtcgttatttactgtagaggcagacttggatgaacttattttatatttaactgtctcccatgcattattaagtaaatcttttctagaagagtcctctttatatctgtagaaatctttgcactagaccactaacataagtctataattctggcataagatttcatgtcattctgggtctttgtttcaaatttgggcatcttaatgataatgtttgacaaatttgcagtttaa

SEQ ID NO: 74821 - DNA, 614 bp, Carica papaya
  Intron number 1 from transcript evm.model.supercontig_50.9 8 (locus evm.TU.supercontig_50.98) derived from phytozome v7.0 (chr-ID supercontig_50; pos 929438 to 930051 reverse strand)
aggaaagttcctatcccttgtagcatcagttgtaggtaaagctgaattcaattgagactgtgacactcttgagcataaaatttctgtggcttttaccctattggacttctgagaagacctttcaagtggtggcaagggtttaggccagccagaaacttgaagagacaattatcctctaccatcatcttgtagtggttgcagtattaaatggatttctattcataatcattattagatccaagtctaactaaattacagctgtaattataactagtgaggaaatatcaaaataataaaatatgaaatttaaagtttctgaaattccttaacgaaactcaaaatagaccaaaaaggtctagaaatattacagatgataattagaagacacttgctcaatacttttttttttaaaataaacacttgctcaataatgttattgttccaatttaagatcttagttttccatctctctgatagtgcactgtgcttgatattttaattactggaattttaaaatttttaagcttcacacatgcatttttcttcattatctaattattcagttatttgtaaatgcagtgattcccaggcccagatcaggggactgtcaaaat

SEQ ID NO: 74822 - DNA, 364 bp, Carica papaya
  Intron number 2 from transcript evm.model.supercontig_46.5 9 (locus evm.TU.supercontig_46.59) derived from phytozome v7.0 (chr-ID supercontig_46; pos 528080 to 528443 reverse strand)
gacttgaggtaattcttagttgaattatacaaaatgtatttttacaaattgcttaattttctctcagttgaaagcaatggtttttttgcatgttgctacatatgattgccttcatataattgattcccagggtaagcatgcatttaaattactaactaaactgcttatatttgcagtagttgcattatatagacatgcctgtttcttctgttgtttattaaaattttaactttttgagtaatcactatatatcttcacactcacaattatgcatgaatcaaaatgtgcaactggattttgctaaaatatgctccacttgctaaaatcagcacaacaccaagtactactacaagatcggcagcgg

SEQ ID NO: 74823 - DNA, 957 bp, Carica papaya
  Intron number 1 from transcript evm.model.supercontig_48.7 8 (locus evm.TU.supercontig_48.78) derived from phytozome v7.0 (chr-ID supercontig_48; pos 469615 to 470571)
gctgcctttgcttctctacgcctttgtatcagcaggtgtttcttcttctctgcactatcgtttccaattcatgtcgtacggatccagcgcttttgacgcggctctgtagtttcctccacttatcggcattcatttcctagtgtgttaattgttatgtgaaatgtcaacctttttgttctgtcgtggaaatttactttacgttgctggtgttgatctggagctaggtttcgacgttttatgtcagtgtagtttgtggaggtgttggcattgctttgcgttagttttaaatcgctgctagtcgaattattgttatttgtttatattttggccaaatagtattcttgaacattaggacggatgcatttcttttcggcagtttttttacttttccttgtgatgttggtttttagtgaagactgttgtgaaatcttgtattactgaggttatcattttgtagtatagctatttggtttcgtcttggagggtttttggttatttactgttgtaattttttgtggctagaacaatttagtcagatctggtttttacagagtgaaattatgccaataaggatggtgatctggttgtacatgtggtttttgggatggttgctgaaagaacactgcaaggaatatggggaagttcaaattatgatttagctgacctcttataaattgatgatcaattttatgtcgtgttttcaattgctgaatcattgccagcagtcacttgtggggttgttttagagtatatgttcaatctaacccttgtttgaggaaaatatttggatttcatctgacatatggactcaagttgctccttaaggcaagagttgactgttgtggatctcatctcactatggcattaatcatttgatctgatagcatattttactgatgtttggtttctactatcctcacaggctactgtaggaccgtgcaatattccaaagcctag

SEQ ID NO: 74824 - DNA, 621 bp, Carica papaya
  Intron number 2 from transcript evm.model.supercontig_3.69 (locus evm.TU.supercontig_3.69) derived from phytozome v7 .0 (chr-ID supercontig_3; pos 503305 to 503925)
atagattgaaagaggtgatttgattttttttggtggggttttttttctcttgtctcttgatttgtctatttgtcccccccaaatttcaataattatctgtctgtgaatcaagcaaagatgaagatttggtagataataaatttatgaagaaaataagaaaaaaattaaccttcatcctgtagtaaaaacgtggcgtaaaaatgccgaaatcgggaggatgtcacgatttaacttttacaaaaataaggtagagcactatttgtttgaagttttcttttgagcttattgcggaggatgtctaatcttattggggaggatgtctcattctcctttgcttgtattattcttctttccatccttcataatatttcttcttctatctaaaaaaaaagttctttcaaccttgtccttcccttcctacttgtgcatgtgaaaagttctttcaactccgccatcccagtcctatgtgtgcatgtgaaatgttctttctactcggcccttccagtcctatgtgtgtgtggtaaattatttttttccttggaattggcttacatcttcttatcttcatgcactgttcaatgtacagattcgtgaataccatagaaagcatcctgctgctcg

SEQ ID NO: 74825 - DNA, 340 bp, Carica papaya
  Intron number 4 from transcript evm.model.supercontig_199. 7 (locus evm.TU.supercontig_199.7) derived from phytozome v7.0 (chr-ID supercontig_199; pos 61933 to 62272 reverse s trand)
tcggcccttggtcagcttaatagtcttcaatacctgtaagcattttgaaatgttagtttgtttcctgtttggttgccaagaaagtaaagagaagagaaaactgaaaataatagctgttgttgattaggttgagcagttgtagagaaagatactcttgtttgatcctaatataatattaatggaaacccacctgtattttgaattttatctttatatgacaatgtttatgatacctttgttttacaaatttgggtttatgatttatatctcatgtactgtttatttttgtctggttttgagagtaggaggctaaacaacaatagcctttctgggcccttcc

SEQ ID NO: 74826 - DNA, 313 bp, Carica papaya
  Intron number 3 from transcript evm.model.supercontig_199. 7 (locus evm.TU.supercontig_199.7) derived from phytozome v7.0 (chr-ID supercontig_199; pos 62347 to 62659 reverse s trand)
gcggcaattggaaatcttacaaaccttcgccaagtgtaagacgaatatgtatactctgttttggctggtttattcaatttcttagcaatctcaaattaatgagttcatgaattttttctgcaaaccaaacagtgagatagaaatcacacgtttaacgtcaaaagtagtttctaagttagagatacgagaaacctagacttgcattttattttctctttgtttttttgcttcactaattttatgttttttttttcaaattcttcgccgtgaatttgaaggttgttgcagaacaataacatctctggcgaaattc

SEQ ID NO: 74827 - DNA, 867 bp, Carica papaya
  Intron number 1 from transcript evm.model.supercontig_58.2 2 (locus evm.TU.supercontig_58.22) derived from phytozome v7.0 (chr-ID supercontig_58; pos 260450 to 261316)
ttgccacgtaagtgacatcttttaagtttttttcatttggtgcataagcctgtgctttttctattaagttatccaagcattgaatggataatgctgttttttctctctcatcctatacacacacacacacatatatgaagcggactggccctaagacaataaattaccggagcattgttacctaatcaaaacagcatgtctcatttttaattatcttgtgacatgtaatggaatgaaggcctcttttgctaagtttaaaaggcttcctgttacttttttcattgtctttgaggtttcccattcaatctcaggagccatcatgatttaaaattaaggttaattactgcactttttttactggaaagtgcagtatagttttatggaaagctctagtgttcacataagataagagaacttggtgctcttaaagaacgagaatatcagagatttatggtagtcatttattattgaagggcagtatttgttgtcctgtggaataacctagaaaacaggaaaaagctgtttgaatgattagtattcaagtgtttctagatggaataggtttggtagcaaagcatattttttacaattaaggctttcttatcttatgtgaacactagagcttctacttagagcctcaaaatagaggtgtagttttatggatttgatatttgtttctgtagatatctaaatccaaaggctatttttatggaagtctctcaattttcttttggttgaattgttctttgctgcatgctcatgtgctattcagtatttctcaggtgtatatttttcatctttctgatgaattcatcttctataacttgtttaggtttcttgttgtgcttcttctatcctgcttctcct

SEQ ID NO: 74828 - DNA, 679 bp, Carica papaya
  Intron number 2 from transcript evm.model.supercontig_285. 6 (locus evm.TU.supercontig_285.6) derived from phytozome v7.0 (chr-ID supercontig_285; pos 36991 to 37669 reverse s trand)
ttaagcaatcaccaacattcaataccccaagcccggtaattcctcgactttgtattgaattccaaattcctgataaacaactgatggttagagtgatttttagcttaatcaaatcgtggtcctatatggacagactaacaaacaaaatcccgtgccaaggtcaattttatcttatgatattgtatttagatctcgtaatccatcgtggtatttggaatccagaagcatgtacagtttctattgcttagtaatttccatgtttaacgggtatcgggaagaggatatgattggtttagtggatttctccttgtgttggcatactgtaaatcctggatcacttcaaatttttaaaatagtcttgcatttgatctgcatttttaagtcgaacagagtacatatcacttgactcacagaatatcaggttttaacgacatcgtaaatgctggcatttgaattacttttcctgcatgataatggcttcttttgcgtatgaacagtgatgcttgatttaaattgtttgatagttgacaaggcaattgaaaaagaacacatggatctaatcagttgatgctgttaaagttctgtttccgtgcactgcttgatagtacatactttttaacatatttcatctttttatttatgcccttctagttttctcggcgggaactaggagtaaccc

SEQ ID NO: 74829 - DNA, 479 bp, Carica papaya
  Intron number 1 from transcript evm.model.supercontig_58.6 2 (locus evm.TU.supercontig_58.62) derived from phytozome v7.0 (chr-ID supercontig_58; pos 678198 to 678676)
atcaagacgttgcaggtaactctttctttttctcttttttccttttttcttttcttttttggcattaacttcattttcggcttttgcttgattgccattaacgtggaagaaagcaaaacaaaccttggttttatgtggactttgtttagatttatgcaatttagttattcaagtagtattttgtttgttgattgtgctcgtccagaagctgtttgtaaaaaagtctaagctaacaaatggggctgccaacttgttgtcatcatattttaactttgtcgtttataattcagtattcaatttgaatgggaacaaaatttcagaatttgaactttcattttaacgctaagagaagtatataaatatgtatatgcttaataaaatataagaatcagctgccgagcttgattgctatatctaatttctgactatgtatagtgtcatgtttgatattatagtgaaagtgttggactggggagaag

SEQ ID NO: 74830 - DNA, 353 bp, Carica papaya
  Intron number 1 from transcript evm.model.supercontig_77.3 3 (locus evm.TU.supercontig_77.33) derived from phytozome v7.0 (chr-ID supercontig_77; pos 311558 to 311910)
ctgctcctgcaggtgacgatttttagctatttttctttattattcttttgggttctttttgatctgtttgtttaacggatttttactaaattcttttcttcacacttttgttgattctcttgtttgggtattatcaatacccctttatgaaactcaactttatagtcacattttcctgcttttactgtaactttgcatgagtgattactgtttcagaaagatactttgattgctgagatctaattctccaatgggtatgcttgttatttgcttttagcttcactagtaatgccatgggtaaactctgattaatttcaggtccattgataaaacacttgtcttctctactcaaa

SEQ ID NO: 74831 - DNA, 789 bp, Carica papaya
  Intron number 1 from transcript evm.TU.contig_34487.1 (loc us evm.TU.contig_34487) derived from phytozome v7.0 (chr-I D contig_34487; pos 2436 to 3224)
aatccaatccccagcccaattacgcttcggtaatttctttttctcgttttttttttcttttttttttcctttatacgcgttcggttcgtcgcatgtatctaggtcaaatttgttgacgcagttgctaggttttgctcttgctgtgagaacactgtgattgggaatcggatgtgtgctcgaagaatttagtttggtgcatctgtttcatattcatgtattttgtttgataatatctttgtttggtacataagtttgtaatacaacattatgatgtttgttttctacgtccttggaattgctgaaggaagagaacgtaattagggctcttttgtttttgctaaacgaaagatttggtaatgtgagcactaaaaagtgtagcttggaatggggttactctatcaacttttttttttttttttttggaatagttttgatgtttccatttatcatgcatcaattacccaagcaacatttttgtcaacgagaaaaaagtcttattgcaagactcggtcatgtttaattgaaaaaaattaatggttctacgggtgtcaaaagttttttccgttatatttgcaaaccgaaattgaattttatatctttatctctcaactgaagtctaatatttgttatacttcttgatttgtttggtgtaaatgtttgggacaactgaaacttttcaattgcatatatcaagctaagacctctctgccaaatcaaaaggagctgtagtcctacaaaacatagtgtttgaataaataataatttttttctcatacatccctattcagg

SEQ ID NO: 74832 - DNA, 677 bp, Carica papaya
  Intron number 1 from transcript evm.model.supercontig_67.4 0 (locus evm.TU.supercontig_67.40) derived from phytozome v7.0 (chr-ID supercontig_67; pos 562245 to 562921)
agactgagtttcaggtcagttcaatccctaccgcatatacgcttttgtttggattttgtgtcatttttgcggattgttgtgatgaatagtggttgtggtatttaatctacagaaaatggatgcgctgaaaattgatggttgggggcaatctggttgtattttcaatctaggtcaagtttagttcaaaaattatttgtataaaataggaacaagaacgaaaatatactacaaattagataaaattttgtttttgttttttttttcaattctaaacttaattttagattcagtctgtgtttcttttcttgataataggaatacaaatgtgcataaaaaaatatgggtgattataatcaattcaattatgcataaatgcttaaatccttattgatttcaacatgtcaaataaggtgaatataataatatttgaatcgagcacaatattaaatattaattattcaattaattaatatgtaaaattagttagcacaactgaaccaattgctctcaaagtgtcaataacacaaacaaaataactgaacttgaactgaatatagaattgatttgtaattagaattgaacaatgcatgtgtttgaataaaaagaatgtgataattagaatgatgggtgcggtttaaacaggaagatttgaagtttgtgttgaaagtaggaggtgg

SEQ ID NO: 74833 - DNA, 671 bp, Carica papaya
  Intron number 2 from transcript evm.model.supercontig_27.2 30 (locus evm.TU.supercontig_27.230) derived from phytozom e v7.0 (chr-ID supercontig_27; pos 2156787 to 2157457 reve rse strand)
tggatttcttttcttcagcaagtttgacaataggggtatggaatttagaaactttaatgtgattcaagttggataataatgaagttgctgttatatcaactcttgacagccaatagaggaagaaattttagcctgtttgtctcaaaatgaatttgctttaatcgcaatttcagaagagtatgaggggataaagttatattctgtttaaaacaattgtgtagttagctaatatctcttgtggattatatgttttgctttatgttgattggagctatcttactgatagatagcatacatggggagtcaaggtttaatgccagtttcatacagatgggggaatcaatccaatgtatacatgtataatatatatatatatatgcgcttgtcatacatggggaaccaatccaatatatatgtgctggcaatgtactgcacacttctgtttgctatagtccctgaaatatcaaaactttgttatatgcatgacataaaagaatcttgaagaaacatgtgcttgcctctctgtcataatctctgaaccagtaaggaaggaaaagaaaagtttgttttggagtctgattcttgatatgattctcttgaagcaaacaatgtggttttatctgtttttatgtgcaggtcatcttcagaaagtgataaagaaacgtcatcag

SEQ ID NO: 74834 - DNA, 523 bp, Carica papaya
  Intron number 2 from transcript evm.model.supercontig_51.6 (locus evm.TU.supercontig_51.6) derived from phytozome v7 .0 (chr-ID supercontig_51; pos 103539 to 104061 reverse st rand)
actaactacaagaaaggtaggtttaagatagtaaaagggcatagattttttcactttgttacggaatcaaatctttacgaagcaaagattgaaccatatggcactatgaacttatgatgtgtttgaaccatatggcactatgaacttatgatgtgtttgtcagttttctttagcagaataaaagctgaacttcaattctttatctttgaaataacttcttccctctgtttatttgctattcaaaagagtttaagctagaggtttcgaacttcatttgttaagcatgtaccaatgttaaacgcaatttagttagatattcattttccccatgcttcatgacatagatatatggttttgatttttgtataccttgttgttgctcacgctcccttgactaaagttgaccaagaaaaataaatatagttctttctctctcactcaattgtctcaatttgtaggttatagcagtagtagattatggtaattaatttcgaaacttttttcggtgcagttgtatatcttg

SEQ ID NO: 74835 - DNA, 651 bp, Carica papaya
  Intron number 1 from transcript evm.model.supercontig_51.6 (locus evm.TU.supercontig_51.6) derived from phytozome v7 .0 (chr-ID supercontig_51; pos 104163 to 104813 reverse st rand)
gtgtctccgattacgcgaagaagctcctccaggtaggaattacttttcctgtttggttcctggtaaacttgatgtaaaggacgggaattgtttagttctttctttattctgttttattcgtaaagaaaccttattttttactaaaaaagaaatgagtttctgtatagttgccgggaaattcggatatgaatttttcttgtttctatgctatatatggtaattgtttacaggaaaactcagttgagaagaagtagatgttagtagtttgattatttatattttgaccttttttccaggtaaggaaatgcatgaggtttatttaacgaatacttcatttctgagaaaatagagaagagtaaattagtgaacatttatctgttgtgtttctttgttttgcatttagcttgaagctgataggagttggttccagaccatggttttgttgagtttacgtggtttgatgatttggtagctgtatattgtttatgctactatctagacacatcaagtttctttcttttatatatatatatatatatatatatatatatattttttttttttggacctgaaacagaaattacacaatgggtttagtggaagatacgatcttttggcgatactgacaattgtatttcattttgcaggctg

SEQ ID NO: 74836 - DNA, 959 bp, Carica papaya
  Intron number 3 from transcript evm.model.supercontig_74.4 4 (locus evm.TU.supercontig_74.44) derived from phytozome v7.0 (chr-ID supercontig_74; pos 390442 to 391400 reverse strand)
agacctgtgctgaggtcaattcacatctttatcaggtgagttgaagtaggaactttatttgtgcgtcttttctttagtttagagcctggtgcagttgtgtggtacggcttgaagctgtttcaatgtgactggtcataaacaattatctatcttgaggagcaaatgtaaagggataatatatatcttatatttaaattttttcatagtttgtttatatctttaatattatatttttggtgttattaggagtttacaacatagtagattagaactctacatccttctctcctgtaacattatacataacatgtacgtatgaagaagaaaatcatatctgttctgttcaaaatggacaacgggctgttgcagtcaattttatcatcttttctaaattcttcattgactggataaaaactattctaggaagttgcaccattttgcacactgttaaatgatctatacatagtaggatatatattgaattataagttatctgagagcttttgttctcagctgtaatgaaatacaagtatttttatataaaccaacgcaactgttacacatcacaagtgtgtgttatttgttaaccttgtatatcattatttcacttgtcaggcgctctttatgcagattcactatctgataagatattgaaatttctctcttccctttgcttctatctattctatatacgctgtttaagaagtatactctttttcctgtagtatttttagctggcaagagcgagtttttgatgaaagcaccaaactatatacaaatttgttatgtaattcacattttcctttatttatatttcacttgaatcaatatgaatttaggttttcatccgtattttgattttattgctgatgcaactgctatttgtctttcttcttgagcttcatgaagtgaacccatgcaagtggttttttgaccaggtgaaagcagttgcaaccgaa

SEQ ID NO: 74837 - DNA, 687 bp, Carica papaya
  Intron number 6 from transcript evm.model.supercontig_37.1 30 (locus evm.TU.supercontig_37.130) derived from phytozom e v7.0 (chr-ID supercontig_37; pos 1055247 to 1055933 reve rse strand)
ggcaatcaagcaaactgtgaacgttatacaggtaccaaattcttcctttttgtttctaaaaggaacccattgtttatctatactcttccagcaaacgaaaggaaaatttttttcttaaattgctaggacataggacatccttcatctattcagtgaaggtgctcttcatgtgtacatctatgtgaaacttgattgccatacccaatcatactaatctacattgcgtgtttatgcatcacatatacatttgttgtccatcagttaagttgtgttggtattttgtttttctgctgaagatctgtggtgatctgggggaattattcactaaaatttggttagcatggtaaataacaatttacaatgattcttctgcattattgtcaatttgtgctctagggatttagctgtaaatagtataaatagctatcgactctggttccagtttcatgcatatttggacattttttaatcattgttgaatatttcatctgtcaattcaaatcttgtattacaatacgattgcgtgaagttgttcaaaatatgataaaaattttagtttgcatggcccactaacattctcttcgattgttgtttgatctgttaacttctatgttcacgtttttagattgttttgatcgcatctttacctctattctttttttttttgaattcatttaatttttacag

SEQ ID NO: 74838 - DNA, 984 bp, Carica papaya
  Intron number 1 from transcript evm.model.supercontig_3.60 (locus evm.TU.supercontig_3.60) derived from phytozome v7 .0 (chr-ID supercontig_3; pos 414161 to 415144)
aatttccggcaggagaagtttgtgaggttggttccttttcattgatttctcatgtttagttatttccatgttggtgatagtttcagtttgtgttagatctaaaagagagtaaaataagaataaactcaggcgagaggagaagaaaatttgatactgatataaattttatgatctgaattttcagccaattagctaatctttaaataagtaaattacaacaaaaagacagtcaagaattcctatagattaggttcagcataaaatccttatggattaggtaattcaaattaactaataaggctacaaataataaaacatttaaaacatgcaaattcattcaacagattgataagttgtttaatgaagtgtacagactatgctttttagacattcttgaatctttaacaagtgtattgctttcttaagcaaaagcagaaaattcattttcttcatttttgaaattcatacttacgagcttgatgcaatgagtgtccttgtttccatgctacttattactaggcccaatataattatcttgcctgttatggaatatggacaacccatccaagattgatgttaccaactgcacccatagtgggtttttcttggtgaataaccaagacattcgagttagcaactcttactgcctctgaaaaaacaactttctatttgtttgcatgtagtacctccactaatgttgctgctactgaatgattgttatctcccatgatctaaaatgttttttctttaacaaattgatacaagccaatccacatgtagaaagtgatggatcaaatttatatagtctttctgtgctttggagaagtatgttgcaaaatttcattatcatcttttgcttactattgcttcgtgctcttaagatgtttttccttcatttgagcatagagtaatgtcatgatctgaatatcgaagataacatgtttttcaggttccaggattggaactcggagaagagtcctgaag

SEQ ID NO: 74839 - DNA, 340 bp, Carica papaya
  Intron number 1 from transcript evm.TU.contig_28580.1 (loc us evm.TU.contig_28580) derived from phytozome v7.0 (chr-I D contig_28580; pos 10586 to 10925 reverse strand)
ttcttctacatccaggtccatctcattctctcgttctccccgttgtctgttattttactttggttaatccagtttatactcgtttcctttctttttccccattttattttaccattgaaagatacttatggagctcatggagatttatgtcatttatttgtttttttttttaaattttgaaaatcagctgatgatcatgaatttactccttagctacaaggcactaaaagcgttaattgttaatgcctctttttctttttatttatttatttcttctcttaacaactttgaatcttttgtggtagctgcggcttttcaccacgcaatcagaatacgctga

SEQ ID NO: 74840 - DNA, 162 bp, Carica papaya
  Intron number 2 from transcript evm.TU.contig_32888.2 (loc us evm.TU.contig_32888.2) derived from phytozome v7.0 (chr -ID contig_32888; pos 2840 to 3001)
atcaaggtaatttcacttttctgaaaagaaaatttctcttccttatctacattatcatcaatttttggcctacaattcggttgtgtttttcaacataattaatcaaaattatgacataattttgcaggagtctgcagattttaaagacataccggtagtgat

SEQ ID NO: 74841 - DNA, 894 bp, Carica papaya
  Intron number 4 from transcript evm.model.supercontig_54.4 0 (locus evm.TU.supercontig_54.40) derived from phytozome v7.0 (chr-ID supercontig_54; pos 856761 to 857654)
gccattgaggttatggatagaataatgaagaatggaaagtagggtgttgtctagtactagacatagaaaaagcacatgaccatgtttcttggagtttttgtttaaataatggagagattgggttctagcaaaaatgatgtgacaggatgaagcattaccaattcttccttcactgtaatggtgaatagaggtcaatcgtcttttttaaaagcttctagaggtttaagacatgatgatcccttaccaaattgtggaatggaaggtgagagcgattcccaaagtggcgttcttagtatgggaagcagtttgagaatgtattctcactctagataagctgatcaggaagacaagatcctagttaataggtgttacttctacgagagagaagctgagacatgcaatcacattctcctttggtgtccttttggacactagctatggtctttggctttttgttttgtgggtctaaattggtttatagtgggggttgtaagggaaaagttgtggacatggagaggcatccagagtgataagcacagacaatatggcttatcccatccgttactttttgagttgtttggaaagagataaatatgatggtttttggggggtgtagatgttaatttttgataaattgaagagactcttggttcttactgagttttttgattaagggcattcaagtgaggattaaggggacctttttgacattttactagacttgtaaatttttataacgattgctacttttggtgcattgtgaaatataatttgtgattttaaagaaaaatgtttgtgttgtgagacatgctattgttagttgtccttactgtatattttactgtttaatttataatatatcctgatttcacattggacattgacagactttag

SEQ ID NO: 74842 - DNA, 715 bp, Carica papaya
  Intron number 2 from transcript evm.model.supercontig_157. 3 (locus evm.TU.supercontig_157.3) derived from phytozome v7.0 (chr-ID supercontig_157; pos 14631 to 15345 reverse s trand)
atcgagaccattgaagatcgtaattgctggcgcaggtgaaagaatcttatcttctacctctgctagcacagttcctttactctttttaggaatttggtgatgtttctgattgtgagtttttgtgtgttgttattttccgtgaactcaagtatatactgctgctggttgccctgtttttgacacactgtgtgaagtgcatgatataaagattcttttatttcttggatatattgtttcccctctttaaagttctaactcaatcattacgtctgtaattgtctttgaaatcttttgccttcggctgataacaatagggacaaacatgctgcaaattattagtaagtgtactcctcaggccagtgaatttttaagcattttgacatattagcttttccatataagaatgcctttccagttagtttatttgctctacgcctctgaattctaggttcctgcaatttgagtttgactttttttgtttacattttttcttcatgttgttgattgccttattcccaaaagtttgtttacactttatcctgatattagtgatttttgcagaatgtagtgaagttcattccaggacatagattgaacgagtgatctgcctttatgttctatctccttttctttatgtgtctagttgtgaaatttaacaagtgactgcaaaattatttcaggtttggctggtttatcgactgcaaaatatttggca

SEQ ID NO: 74843 - DNA, 765 bp, Carica papaya
  Intron number 1 from transcript evm.model.supercontig_217. 10 (locus evm.TU.supercontig_217.10) derived from phytozom e v7.0 (chr-ID supercontig_217; pos 132629 to 133393 rever se strand)
accttgcatcttctttccctcattattgctacaaggttcttcactatttctctttctgttcgtatatatgtgtgggtatgtttcgatatatacttgtgatgtgtgcataacaagtctacgtttgatgaataaaggaaaacttaactattttttgatttccgtgtttctggttcatgtattaaagtgcgttttaattggatataatttagaatcaccatgaacaagtaggatttttcttctatatcttttttctcttctttttgagcattgattaatgggaaatatggggtttggagttttcagtttgtagcttttgcaactcttctttggaactggtggagaaatgaacatttatcaaccttgattattctctgaagaacctgttagttgatttatgtttaagccttaccgcccttctgaaactggcaaaagtcctgtcaataggaaaactgctctttttgtcatgatagattaagctttattcatcttgggatcttgggggtaatgtttttgcattagggtcaatgcgtgtctttctacaatcgggtttgagagtaatgttttcgggtcaatgttaatctttctaaaattgtgtttggttaataataaattcaaggtgtgtgatgatcactcaatacaaaatttgtatataccaagactcaatatgaaatgaatcaaacgcaggctatttgattctgtttatctggtcattttgttacttctgctgtagtcatcttcactgaggctcaaccagaagaggaagac

SEQ ID NO: 74844 - DNA, 769 bp, Carica papaya
  Intron number 1 from transcript evm.model.supercontig_17.1 06 (locus evm.TU.supercontig_17.106) derived from phytozom e v7.0 (chr-ID supercontig_17; pos 1307493 to 1308261)
gtaaattcagagaacaagttgccaagcaacagcaggtgataatccgctacttttctcacttttcatttctgaatttcatgttttggctcatttattactgaggagccttctgtttggtgagcgaggaaaatgtagcgacaccagagaaaggtaaatgaagagttggttttatagtatcttctttttggattgaagttgagatcagaggtgaattgtatactggtgtttccttatcataactatgttatgatttcacccattttgattttctggatcacaaaaattgtgatttcgttaaatcttgtggactctgtggtttaatgttgttttgggaagtggaaaccagcttgttataactttttactatatgcagatattttatatcagtaattctagatttagaaacgttctataaactaatccgtctgtataaggggacattcaagtgaaccaaactactcaattgtttgatttgcatcattttgtgcaagagagtttatggaagtcttagccaaagtgagagtaaaagcaatcttaaacactaggactcgaaaaacattaagatatctaaacaactagtaatcattaaaatggaaataacctaaatcttaattaatgtttaacactttctttatgctcctgcatcatgattagtttctgttattgccaatttataattgctttgttggttgtgaaagagagtaattgttaataatgttgtgtttatatggatatcaggctgtaataaaacaattcgggggaactggat

SEQ ID NO: 74845 - DNA, 652 bp, Carica papaya
  Intron number 2 from transcript evm.model.supercontig_17.1 06 (locus evm.TU.supercontig_17.106) derived from phytozom e v7.0 (chr-ID supercontig_17; pos 1308319 to 1308970)
tggagaaattgtatagatctactcgtgcaggaaaggtagaaatggattttctgtttatatatggatttgttgaaattcaaaattacgaaggagtttcctttgttctcttgataaataaacaacagctgattgggctttcttttaaactaggataaagtttttattctagttgaattaaccataaggaatgtatgtggaatttttcattttacttttaaaaatgtaaagaaattagcatagaagtacaaaaaagttgttctagtgcttctatcagtgatttatagcgtggctagaaaacaagtgctataattttttgggatcttgcactcggtgaacccatggtatggaaaataagatacaaatgtgagataaagtagaatatctgatgctcagaaaccaactattcaacttttcttcttatggcgttcttttactttctgggtcaatgattgttacttggctcactaatgtagttaggttttctttatcatttcctattcttcttatattggctttccaatatctgggatttgcttcattttgtcttttatttttgataaaaaagcttcttgtctttattagattttcttatcaatgttactcattcgtaatttcaggatttccagaaagatattgtcaaagcagcagaagc

SEQ ID NO: 74846 - DNA, 873 bp, Carica papaya
  Intron number 1 from transcript evm.model.supercontig_39.2 7 (locus evm.TU.supercontig_39.27) derived from phytozome v7.0 (chr-ID supercontig_39; pos 517519 to 518391)
cctctcggtggcgatagccttgccgagtctgccgggttcgtccttcccccttccttcgattttgattttctgttgtcgttttacgtgaagtaaaacgagtgaattggattgttttgtagccacttccgttgctttctattgttttaattctcttttgcataggtatacgtctatacagttacgtgtatatatttgtgcgcacaatatgaaatttgatgcgtgcataactttctttaatgaacgaacataaatgcgttttatcctttttaagttagagatgtttgttgttcgaaattaaattagcaagtcaaagagatgtttgattatcatgttgtagattctgagatgtcttaataatattaccttattcagctaatggtagctttggctctgaactttctattatagtaagttatcgatttctttttctttgcataacaagtttgcctgagctagaagtggtttcttcaagaaaatgcttctatttttcttttaatttaattttctgtaatcattgtgatcctcttttatctaaaaccttttttaaaaaaaattattttacggcttgattttagtgttcttttcctgttccatttgttggaagtcaatactctcaccatactgatactagggcttttctccttttgaactttaattaatactttgtagtagattcaattctctagagactgctgatacaaaattcataaacagttggaaagaatttactttgcagttgatgcttttttttttttggggtcctggtaaagattttaaggtctaatggaagtcttcattttccattatgatattttcttactttgctccatcgttttaggctatactttacaaaaattgggcttggatctccat

SEQ ID NO: 74847 - DNA, 894 bp, Carica papaya
  Intron number 1 from transcript evm.model.supercontig_191. 8 (locus evm.TU.supercontig_191.8) derived from phytozome v7.0 (chr-ID supercontig_191; pos 105786 to 106679 reverse strand)
gaagattctaaggaggtgactctctctccctctctctctgttattctatgttgtttggttgctgggaaaaagaaaagctgggtggaaacatgaggcaactttatgaaagttgcgtttcttatgtggtttgggtttttacaaacaagtttcctggttttccttccaaggtttcttctgttttctccctaaaatctcctctactttctccaacaccgaacagccaattttaatttcagaattgagtgatttgggcttgtgcataggaaatacgttaatccttctatttttattcattttacttgctacgcccgctctggttcttgattttagctcttataccgttatatgaggttttgtttttcctcccttttgggattatttgttgattcatcttgattcggaataattttggatctaatttagctgaaatttccatttacgctttattatgttctgctattccttctatgatccacttttttcttccatagatagcttactttttcaaagcttaggaacagtcagagctgtctctttactttctttttctatatttgaatttccgttacacagttggtcagagttttcttgctttatttctatcccactcctaattgtttaggtattcacagaagaatgattttcaacttgattgtttctaggaactcgagaattttccgtgtttgtctttgttttacactttgttaatggctctactcttatattatataatcaatctacagtctaaaaatccattttcttttctactttttcaatggtatttttgatagattagttgggtaaactcattgatcgccagttaagatcttcttgacttgatctactacatatgaactctttgtcattcatatgttgtttacagaaaaacacacc

SEQ ID NO: 74848 - DNA, 568 bp, Carica papaya
  Intron number 1 from transcript evm.model.supercontig_25.1 30 (locus evm.TU.supercontig_25.130) derived from phytozom e v7.0 (chr-ID supercontig_25; pos 1354924 to 1355491)
gtcagaatgtaagtctatttgctgaaagattgtattttgtttttgttttgttcgtgacattaactgtcttgcttattaaatgggtttttgctaaatgttcttttcttttcttttcatgtgggaagatgcatgtggttttaattgcatgggtagacctgttttattgatttttgggtttgtttgtaacagagctattttgaggctgaaaaaagaaattttattaagagttagctgctttaagtttcttgagcactagatgctgataaagaaaataaaaaattaagcaattatgttttgggtaaaaggttttgcaatgaataaatatttcttgcttttttgtaaagataaaataaatagaggagataacccggactgaatatattaagaaaatcaaactgaacattaagaaacttttaagttaatgcaaaaaagttagaggatgttttcttcatgcttgtgagggttttttatttgacttgccaatcatacatgtgattcttgaggtacttctttcctatttgtatattatgtagttgggaactgcatattctgggacttcagttggtgg

SEQ ID NO: 74849 - DNA, 1010 bp, Carica papaya
  Intron number 1 from transcript evm.model.supercontig_25.9 8 (locus evm.TU.supercontig_25.98) derived from phytozome v7.0 (chr-ID supercontig_25; pos 1017277 to 1018286 revers e strand)
gggtggtacgtttggtgaggtctataaaaggtatcctgtcgcctgtaattctataatgatctcattgtgttattcggttgttggttgtgggttttgattgttttgctgaatagtcactctcccagttgatcagatcatcagattgtcgggaacactttctgatgtacggcaaatgcgtcgttgactgtgaagagggaaaaatgaatagaaagtgttaaatggtactttgtgttcttgatggattataatatgaaaaattgtatggagggtattggttattgatatgataccaaaaaagaattgactgagggataggagttgcacattgaagaaacagaggacagtaattttatatgtgacacaagcaagtattcgcacccctgctatagcaagtagttttcatgtttctaacttatcaaactaacaatcatctcatcattacataccagttgaagttaattagaagacaacatttgttattaggaaaatcagagtctagttcaaagtcagtgcacgtcatggttgtatttgattactgagctagatcttcttgaaggatgaccttggctttctagaatattgacacttttaaaatagatttaggtcgcttggtgaagctccaataattgaaccaaaaagctactactccaaaactttaaaattgtagacacagagtggattcaagtagatgatttattacattaacaacttaactagacattccatttgggaattttgtaagcttacttgcatttcttatactgaaggaccattattgatgacttaccaagagaaaggagaactatgaacggaaaagagagactaaatgaatcccatcaaaaaattttgcttggtgaagctccaagttttgctttggttctattatcatttttttattattgttttggattaaaattccacattcctttgttgctttttgtgttttaaggcgttgaacgtctcttgtcgggctttcctaatgtttcaggcctctgtgctgggtagagcac

SEQ ID NO: 74850 - DNA, 875 bp, Carica papaya
  Intron number 2 from transcript evm.model.supercontig_157. 69 (locus evm.TU.supercontig_157.69) derived from phytozom e v7.0 (chr-ID supercontig_157; pos 440832 to 441706)
ccttcttggacattgttcttccaggacgtaatacatatacacacttggaactaaacgtcaaattatgcttacatgggcacacacacagatacatacacgtctttcctatatgagtaatatttaacccaatacacgtacacatccctgtgcgtgcatgcgtggaagaaactcttacttttcccacttaattaattttgctcaaggattgtcatttcttttaaaaatcaagtttgtcattggctgaaagggagaaattcagtctatatctctaggttccagaattgggaacattctttgaccttttctatgaggtttactgctctttttattttatgtctttttcatcagaatttcatttgttcatctaagaggaaccgcaaaagctggaaagatattttcctgtttaacatggatagaagggaactgttataggaacaaacccttaccttgacagccttctcactcctcaatactcaaatcacctttggagcttgaaggattcattttcactggctatgttcttaaggtttccttaagaaatgcaaaagaaaagtaaatagaaattccttggatctgtctaaagaaaacatgcaagattttgctagttaaagaaaacatgaggttgctggaattttagttatgggagatggataggtaaagatcagttacaaaatcccatttgtcaaaatgtttcagaagctacttcttaatcttatattttgatgcatctttctcatgtgtgattaactgctgctaatttgtttgattctgcaacttctatcacatgccctatttgttggatcagtttttatgcgttctttttttttttcttctgcacagattcacatcccaagcctgtggaggaaaaggtagtt

SEQ ID NO: 74851 - DNA, 434 bp, Carica papaya
  Intron number 2 from transcript evm.model.supercontig_48.1 16 (locus evm.TU.supercontig_48.116) derived from phytozom e v7.0 (chr-ID supercontig_48; pos 675956 to 676389 revers e strand)
ttgagtgggtttggttttgtcatacgctgaaaccggtaagcttgattcagtgtaagcctttactctttctcttttttagcctgctttaatgtttggttgccgagaaagagtggaaaacaatgaaggaaggaacttttttgtgacgggtatgaagctttggttttggtattctcgtttcaaacgtttgctatcaagatcttaaaagtagtctatgaaaattttaagctaatacatagcttatcttctgaaaaggaagaaggaaaaaggtgacttcttgctttcgtttccttttattttttctttttaaaaatttcccgacaagcaagcagaatgtttaaacaataaaaccctctaatctccttctctttctttacagcgattaacaatactgttattcaggtgggttacaggcaatattgtgaattaaggttctc

SEQ ID NO: 74852 - DNA, 725 bp, Carica papaya
  Intron number 1 from transcript evm.model.supercontig_1652 .3 (locus evm.TU.supercontig_1652.3) derived from phytozom e v7.0 (chr-ID supercontig_1652; pos 8205 to 8929 reverse strand)
attctccagctagtgatattactgattcaggtaagtccagtgataactctttctctttttgttctttttttttttttttcccgttttggaatctctaaccgaaattatatctgtgatttattgagagatgatcgttttcttgtttttgaatacctgatgttcgtgtctggtgtttgatttgactgaatgtgaatccaaatttcattgaatttgggtgactccaaatccgccggaaaagcattgagaggaccatcaaacctcttaattcgaatacgattcctcagttttgtttcttcggccttgacaatcttttttttttggattcaaggtcttcacaattttaatctatgattaatttggccatccaattctccgtgataaggagctcaatcaatgacaaaaggacaaagcattgtttttttttttttcaaaataatgattgaaataatcttttctttggtttttgagaaaaaaaagtgaggaaaaaaggaaggtgctcctgaaattctacggtgttccacttccatagaggaaataaggaagagcactcatcagcttcttttcagagttttgtttcttttttgtttttggtgcttttgaaaaactgtgagaaaattctgttattttcatcattttctcacattaaacaaacagaaaccgtgcttttctcctttgtattcgagatttcagctaccgatcgagaatttctggctctgaactcaaat

SEQ ID NO: 74853 - DNA, 818 bp, Carica papaya
  Intron number 1 from transcript evm.model.supercontig_69.2 8 (locus evm.TU.supercontig_69.28) derived from phytozome v7.0 (chr-ID supercontig_69; pos 374608 to 375425 reverse strand)
gcaacatctatctggaccaggtaactactataaattttgctttttagtttttctctcgtcttttttgtttcaacataaacatttctgaaatttgatttttgaactcagttccatttgtttgtcaattcagattgtggaaaatgatttaacgtgctattttaaagttatagacgctgaatttcacagaattttgcgtcttcttcttccttttcttccccttaaaatggttccttagtgaaagataaaggagggaggaataacttgaaatcatcgaaatctatggcggactaagatacggaagctgtgtagactgttaagtcgaaagagttggaaagaaaacaagagtgagagagacgtatatttgagaaggacaacctaactgttcttttaaaactaaaatcctgttgtcgtggttactatttgtgttaaaatttcttttggaattattcttgaggaaattctatctgaatattccttctatcaaatctgattaaaaggctttagtcccgattattctgttgattatcaactaagtacagtatatgtgtcacttattattgtaaagtttgatagattccttctctttaagtacactgatagtatctttgttgtgttcgcaatagtacctcattgctcctttcgtggaataagctgattgtttgagtgcttttctgtactactactctacttttaggaggtttctttttccgttgacttgcaaattctggtactccattggaataatgaataataatatagtgttaatttttcttttgcatgcagctgtcattgaaattcattgatacggaacagtttca

SEQ ID NO: 74854 - DNA, 631 bp, Carica papaya
  Intron number 4 from transcript evm.model.supercontig_48.1 44 (locus evm.TU.supercontig_48.144) derived from phytozom e v7.0 (chr-ID supercontig_48; pos 852729 to 853359)
aagtagaccttgaatctcgcttgggtaaaactcaggtgagttgcttgattttcattttgctgtctactttagcacactatttacctgatggatttctgactagtaccaaaactcatttacattgattggttgtatcgatgacaatgattatgcaatgcctctagtatattggaagattgattttagcagtaataacttggtgcatgccttccagccctagtttgctttatgcaaagggttgtttaatcctcaagaagaaattttgatgactaattcttgaagcttcttttttgtagacttgagctgctacttgcatttatctggtaaatatattagaaaatccaaatctaagaactctaaatttcagtttttctgttcacatggattgaagctttgctttttctgtctcttctgcgtcactacatatttaaattcatcatgtgcttttggtcaaacatctttttcatactaagctagttattgaattaccatattcaaacgatcttatggtatatcatggtttatgaatgcaaatttttatttcttgcggcatgttacagtttattcacgtacttcagtttatatgatcttcgcaggtcgttacacctgtagcacctttgagtcagcaggt

SEQ ID NO: 74855 - DNA, 1024 bp, Carica papaya
  Intron number 3 from transcript evm.model.supercontig_8.80 (locus evm.TU.supercontig_8.80) derived from phytozome v7 .0 (chr-ID supercontig_8; pos 515182 to 516205)
gacttcttcatcatcgaggttacggtggctgcgtgagttgggtgtatttccatttattcacatgtcttcttttgtcgctttatagtacatcagaatggatctgtggttgacattcatttagatcctttttattttataccagttaggtgcccattcagattgtattctcatatcatggaagtctgctaagaaactctgaataatttgaaaactgacacttgggatttatttgatattttctcaaagtatcctttttaggaaaagaaatggataaattggtgagtaggttttattagtattttctaattttatgcccgaaagcatgacttcagaagttgagcattcggtccaactgaatgacaaaggtgtttgagttaaaagcattgttctttaatagtagatcgtatccaagacaattaaaacatgttctatgggagtgagggcataaaactccgtgaagcaaataaatttggattagggatgtactcaagaattatattgtcagcatttttcttttttcttcttttttttaggatacaagctaaatattagtcttttaatgtttgggtaaacattacgttgaaatgaaaatctcatgttcatttaggggatcttatagatgatgaaatgtacagatgatgcctgaatgagttgcatagcaaacggagaaggctagacaagaaatagtagtttatatcagtcaggacagacatattccaggtcagatgattgttggggcaaacacctacaaaaagacacggggccctggactatgtactcattctgctgatattgaactatagctgaagcatattgcaacttttaactattccctccatttatgattaagctaatcattaagtttaggatttaggacttgagttggatgatactgcaaatgttcattttctccagtaagatggttaaatgtgtaaaatgctcaaataatttatacttgtcaatatttgtctgaagttgagcagccttatatctatatattcacttacctgttattgtagacagg

SEQ ID NO: 74856 - DNA, 596 bp, Carica papaya
  Intron number 1 from transcript evm.model.supercontig_832. 3 (locus evm.TU.supercontig_832.3) derived from phytozome v7.0 (chr-ID supercontig_832; pos 15374 to 15969 reverse s trand)
aacatcttcaagaagaaaacttcccctaaaggtacattttttctcttctatttacattttttttcttttccacttcatttttttgaagttttttttttcttggcaagagtttttgtattttccgtagaaacaaacaggatttttagtatatagtggaaggtagtttcttttttgtatcgagaactgaaaatctctgtttagactttaatgtattttatcaaaatcttcgacatttatcgaaatggacgtaaagattgtcttccacttgatttttcttgtccttcaattttcgagtatgaatctaggggttgtagtctatcccggcgtttttgacccgctcttttttgcttcttttttgtttcaaatttttttctccgttctcttgtctggttggttgaaattgttttcagtccggtcccggaaacttaatccatatattaaccgttctctagcaaccagaagaaggggtagggatttgggtagcgattctggcttttccagtggttattgtattcgcttttgttatttcagtactacgaacacatcctaatttaacaggaaagaagttaaaaaaaatgaatttcctgattttacag

SEQ ID NO: 74857 - DNA, 791 bp, Carica papaya
  Intron number 2 from transcript evm.model.supercontig_21.3 5 (locus evm.TU.supercontig_21.35) derived from phytozome v7.0 (chr-ID supercontig_21; pos 516445 to 517235)
tgggcaaacaaggtttttttctttctctgatgttattttggacctcattgagatgtatgatttaatgcaaaatgaccacatttcaagttcatggttggatgctatgtgaagtggaaactttactattctcatcatgtctgtcatctaccagagttgattgtttggattgagtgattggatttaatcactctctctctgacactacacaaacacaaacacatgctacatccatttcaattgaagatctgattgcaccctgatcttcaatttttacatgagtttgcttatcattttataactggagatcccaacttttgatcactgttctagaggacttaagtttttgtgagctgcaatcttgtggatgggttgatatgttctatgatgcccttcactgtctaacaacgtagcgaacagatactatcaagccttctccttttttgatgatttgatcttcctaacttgctcgcttgatagtgattcctgtcttttttgtttttctgcaagatattgaattgtattgatttccaggaatttgtaattagtcttcattttaattctctgtcttgtttatgttacttaagccaatttcttatctatgcttttcgtcagttgctttttaaagtaaagataaattcagcttaatgatttcttttatgcaagcttaccttcatacgtattctcttgctcgtaaaggtatcttgagctatctattctgattcctgtatttttttgtcctgtttgttgaatatgcagggaacattgagagatctcagtaaggggggaaggaa

SEQ ID NO: 74858 - DNA, 691 bp, Carica papaya
  Intron number 2 from transcript evm.TU.contig_44787.1 (loc us evm.TU.contig_44787) derived from phytozome v7.0 (chr-I D contig_44787; pos 492 to 1182)
catctgtgaagcttccgctgctctgattagaggtacaagtatctaacttttcacttcatataactcatataatgctgaatcatggactaactttgctttaacaaataattatttttcttgaattgcagtgtgcaaacaattgctctggtagtattatcttaggctacaattgagaaaatattcatgttattggttccaaactattgttggctattatctatctctgagaaacaatctgaatcctcgaaagaggatgaacatgacaccctcatattgaaatcttgatctcttcagcatttgatgtttataaaatgttttttacagatcaaaattatgttctaaatcttttataaagaaagctgcaatattttgtaaaattatcttctctaaatctggaaaatatggtgttacatctttatatgataggttgcttaataaagctacttacctatcgaattattttccttactattccaaaattgtgatgctcctaccttggccttggaaaccaattgaaactccttttgcacattcattgcttttaaaatcccttattctgtaaactgcatgatgagaatttttcatatgtagctccaatattatttttattttggggagttacacaactgagaagatattgcttttcatggctaaaggaggagaaacattagggactgtagttggagctctg

SEQ ID NO: 74859 - DNA, 939 bp, Carica papaya
  Intron number 2 from transcript evm.model.supercontig_2660 .1 (locus evm.TU.supercontig_2660.1) derived from phytozom e v7.0 (chr-ID supercontig_2660; pos 5718 to 6656)
agatcgctgtaattgaaaacttgggcgctactgaggtgcttattgtttaaactatccttttataatttatgttgatacatgaaacagaagtagcagtcaagtaactatagcttcctctgttagaatattttgcttttgcttttttttttcccccaattattgtggttctcctgtgtgtcgatggctgcccgactccccgcaagtggctaatgccgcaagttttgttggttgccattcatgacaggactgccatttcattcatcagtgtgatataactatttgccgtgaactgcgtacatatgttgatgggttttatcttgcatcacggtcttcctagttcccattgcactcttgtctggggtgttaacttttaagttattcaaaattctgggtcctattttatgggagtttgacaaatgaggtaggatagagtaaataggttcacaattgaactttaatctggaattcattgtagtatagaaaatggagagttctaatcctacccttgtctaattaattggatgaaaatatttgcacttattaaaagggatgaggaaacattagaaaagtatggttggatggttataaaccctttcaaacctctgactttggtggcgtaatatttaggtgcttagaggggttataagattttaactgaaggagtaaatattcttattttaccccctttaggagccatcagaatttacctttactcattttatccaaaagaaataactcttagcaacctctaacctctaagattgttcattaagttttaataagccagtgcttccataatcctattgtgtctctcatagtaaagtttttctattgagatggatgctttatattttaattgctattgtagtaattctgaagtcatcttttgctggcttgtttgtaggatcaatttgatacaattgatttgtctgacaacga

SEQ ID NO: 74860 - DNA, 882 bp, Carica papaya
  Intron number 1 from transcript evm.model.supercontig_55.2 5 (locus evm.TU.supercontig_55.25) derived from phytozome v7.0 (chr-ID supercontig_55; pos 151629 to 152510 reverse strand)
ttcgatctcgattacacactctggccttattactggtatgataccttctagtttcttcactctgattcttcgttcgaaactctgaaacttcccttcgaaagtagattaatgtcattttgggatttgaagcgatatgaaattccttgttttcactttgtggattctggagattatatttgtagcttgttgattggtagtacacttaatcaggctccagtttgtatgcattatggatcttgttgtgattatcaacttgttatccatttttctgactggttaacgagaattcattgggatataaaagaaaatttggaatcttaaatccagaatcacgacgatgaggggaagagaaagtgatttagttactggtccaacaagttttgaattaagcctgaattggaatgagttgcaggaaagtacaagtctttaagaaaaggaaagtttattatttcttttgggtttttcaaaaaaactttaaaaggaaagtaagatttcttattctataaaagacactttctggtaatgtaatttcaattttctgtttttcacaatgctcataaattattcgagattattattctttcaagtctttagaatttttggggcttcagctatttcaatttattgtcatattcaacataacactatacaggtacagatttgtagtaatctgccattttagttttctgtacttattattactgagaagctggttttcataaaggatcagtgagaaagcatatctatctgtaatctgtcatttacctacttggtaatggcttctttggaaattccttttggctatgactgcgaaggcatctgattatctttcctggttccttgccagtgagtgctgctttgaggatagcactccgtatttgt

SEQ ID NO: 74861 - DNA, 716 bp, Carica papaya
  Intron number 2 from transcript evm.model.supercontig_27.5 6 (locus evm.TU.supercontig_27.56) derived from phytozome v7.0 (chr-ID supercontig_27; pos 533125 to 533840)
tggacgacgttacttcagaaactcaacactctagagtgagtaaccatcactgttacttttatttttacatatacagagaatgtagagataatatatagatagagaaatatatatatacaatgcatcttttcatttattttggtgggttcttcttgaaattatagtttagttttttaagtccaaagctacatagcggctattagatattctgatctttgaatcttttagttccactgctaagaagactaaagccattcccagggaaaattttctgaaactgaatagtagatattgtaaaatttttgtcttttaagttttggttatacattacttcttttttctaaattaattcagttgcgtgtatgtatatgaaacaataaagtaattcataatttactgcatcatttccatgtttggtgattttgtaatttgcggagtaattaatctcgaccttagattggaagaaaactattttgacctttataaactgtttatcccaaagcatgagcgggctgcagggagatttatagaatggaaaaagatactccaacgtcatatcattttctctctctctctctctctctctctctctctctctctctctctctctctctctctctctctcagtatgacagtatgaaccaagcactaattaattgtttcggttgcatatatgtataggaaaaaactatccaaataaaaggattgaattttga

SEQ ID NO: 74862 - DNA, 812 bp, Carica papaya
  Intron number 1 from transcript evm.model.supercontig_178. 26 (locus evm.TU.supercontig_178.26) derived from phytozom e v7.0 (chr-ID supercontig_178; pos 246914 to 247725)
tcaccactctccctcctcctccttctgccctggtaatccgcctctttcctttctcataatctctacttaattaatttactttttatttaaacatcacttagtttttttttttttttggtttaaatcatgctcaggctgtacttccctgtatttgattgatctccgatggtgtaattttcgcttatttgctcttgttttatggagtagaacttcactgtctctcacatcgtcaatcatcactggttatgtataaaagaaaactcaagtgtgaagtcggttatatatgtgatatattcaagggagtttatacagtgcatgtttagtcacaaaaactacttgtagaaatagatgaagaatgtactttttcaatttctaaataaattttaggaaagaattcattcttaatggactttacgtttggaataaaatataagtcttcgttgcattttcttgcagtgcacttttagccgtagtggtagtgttaatttctttgtatatcagtataaatggtaatgatgtatagtatgtctgttgttgaccattacaacttacttccaaatctcattaatggaactcaaaattttcagttatctttagaaaattcatttgcttatgagttttttttcaaagtataaactttgattacaaatttgtttcaattttttaaagaaattcatttattacaaacatcctatatgaatttaccaaaatttatatttatttattccgaacactgtagaattttacagagatttacgtttacttatttgatttcagatattagcccctcgaattggttatctgcctctgtt

SEQ ID NO: 74863 - DNA, 665 bp, Carica papaya
  Intron number 1 from transcript evm.model.supercontig_66.8 2 (locus evm.TU.supercontig_66.82) derived from phytozome v7.0 (chr-ID supercontig_66; pos 762221 to 762885 reverse strand)
tccaagttcttcaaggtcagtggcttctttctcggtctgctgttgaatgtttcctctaatgctagaaaattgattgttatgaaggatgagaggaaaatcatctgctgcattgacttttttttttttttgtctctttctgattttttaaacgattgagtggaaattacctgtattaaaatgaagaatacaccgagcaggaactcgttttaacttctttgcagggctaagaatcgttcgaacttctgttgtaattaataatccgattcaaacttgtttaggatctcaataactcaatcgaaattgtttgagaaattgataacttacttaatgttgttcaggataatcaaattctaggaaacagccaaattattggctcgtaagaatgcttttcatattctaggacttttggatgttaacacaatgctaaccttggaagtttggaacactttgtcttgtcaagtaatgcaatgatattcttctcgtctttatcaaatatgaagttctgttgtttctgaagtaggaaactttcaatatcattaagcctgatttgctgcttgtcttaggagatgtttctgcaatcatattcttcttgtcctttaaccaaataaaaatctgttgtttttgaagcagaaatcgttccacagagttaagcctgatttgctact

SEQ ID NO: 74864 - DNA, 511 bp, Carica papaya
  Intron number 1 from transcript evm.model.supercontig_76.7 (locus evm.TU.supercontig_76.7) derived from phytozome v7 .0 (chr-ID supercontig_76; pos 153404 to 153914)
gcaaagaaggtttgtgatcttgtaaagcaaaaaggttgtttgatttacgtgtctggctttctttgagcaaaaaacatgacaaggaatctccccttgagaggattgctgctcagttgcctatatgtctgccaattcaagagtggaatgcagatgacaagggtgatgatgacgatgaggaaatgcaaagaaaagattatctgaaatagaaactatcagtggctatttataagaagaagtgtcttctaatcttggatggagtttctaaggggatgaaagtagatgaaattgtatcaagatttgaatccttggttcctcattttaagcagccttcatttacagtcttaatcaccagaatagattattttgaaaatcctattggtctttacttgaaggttttggagatggaacccttgtctgcagcgaagatattctctcttttgaatgaacaaatcagaaatctagattttaaaggactatttgaaggtatctacaaggaaagcgagggtacttg

SEQ ID NO: 74865 - DNA, 938 bp, Carica papaya
  Intron number 2 from transcript evm.model.supercontig_33.1 43 (locus evm.TU.supercontig_33.143) derived from phytozom e v7.0 (chr-ID supercontig_33; pos 1450227 to 1451164 reve rse strand)
ttccatcccaggtaagatccagttctgcctatcatttactttgtcaatatgatcctgatgcttttggcttgttaatctcttcttatcattgaccattcctgctgataagttctcagattcttcagatctggatatttttgttaatgtagaaatagtttgggtactgaaatgaggttcataatgataaggtgcttgtgaccgacttaggagttgcaaattctattaaagtaagcagccattattgattgctgatttatcgaataaaggagaaaaaataatgaaaatgattttgaaaagtgagacatatactggataaactatgtttctttcagagtttggatcctgaaatttcaggtggagaataaagctatctttgagaattgagctccattgcttaatttctgtatgtcaaattttctttgcaaggaattttgcatataggtggtctctttgcctctatgtgcttgctggaatagatagctggtgtgggtagataagtctaaagtcaaatgagatgtttcttttcatattgtattgtctacttgttcggggttctagagattagtgtgagagaacagtaagtagttgatgtgacttggagactaagtttgtaaagttataggagctatgctgctttctttttggcgggtggaggggacataacgtccattataagttggaattatcagattatgattctaatacttagtattgtctccaataaagtcattagtattatggttatggggtgctcgtattatttctatcaaatgaagtttggttgtatttaattctagtgcagcacaccttaatccatagcgacaatgaagaacttgataataaagtgttcaaattaaatagtaatggagccattgcacccgactgtcacttaagatttatgttacgtgttctgttacctaaatgtatgcagattctag

SEQ ID NO: 74866 - DNA, 465 bp, Carica papaya
  Intron number 2 from transcript evm.model.supercontig_177. 8 (locus evm.TU.supercontig_177.8) derived from phytozome v7.0 (chr-ID supercontig_177; pos 235260 to 235724)
tggcccggtagtctggttcaggtctctcttttcaggtaaatattgggcatgtcgttttatcagctgtcagaggagaacaattgtcgttttgacttttatttttggttcactgattaatatccagtatgggggactcatgacaagagccagagtctgagtcaaaagggtttgacttgtaatttcacgaaggattattgtaattagaatagtttatatactataattacgcttgaggcatatcttgaacctttacttaatatttgtagaaacgaaaagatgatttgcttaagacaatgaaagagaaaatatattctctttttttgacataattaaaattaaaaaaattaaaaatgaagaataattataattttttttctttaaattttaattaattatgatatcagaatttaatagcatcaactgtgtgacactaacagggctttacacgagaaagatagtgctcgt

SEQ ID NO: 74867 - DNA, 465 bp, Carica papaya
  Intron number 2 from transcript evm.model.supercontig_91.7 7 (locus evm.TU.supercontig_91.77) derived from phytozome v7.0 (chr-ID supercontig_91; pos 848803 to 849267)
caagggaaggaaagtaaagcttgctctttgtgaaggtgcttgtccacaactttagagctttcatagattgatttatctctacctttttgtttgtattttttttcctcggttgggaaggggctgattgttagaatagtttgtggtttgttagggtgtccctgattcgtgcacttgcaatttgtcgtttcttctctggttgtgatgataacatatttctcaagacctgcacatgcagatatagctaaaatcagaaagttcatcattattctttttccttctttttttgagaagaaaatttatgatccttgttaatctggggaagagcaagttttgtgtttccttttgacttattattcctatatggttgcatgcatctaagggttttgggctgtctatttcggagatttcttatatagtatagcttgagaggttatctaactcttaatatctatggttcagagcttg

SEQ ID NO: 74868 - DNA, 410 bp, Carica papaya
  Intron number 2 from transcript evm.model.supercontig_67.2 3 (locus evm.TU.supercontig_67.23) derived from phytozome v7.0 (chr-ID supercontig_67; pos 470403 to 470812)
ataaaaaaaatgttagaggaagaaaattctgtaaggaaggatgctttgccagtacatttatgcaaacgaaccaatcttggaatattctgagcctcaaatatcagagctcaacacaagtttagtttgtgcaaggaaaagaatgaaggctcgcgcattggggtaaccattatgatcctaagagaataatgaagcaaactatgatagcaagaatgacaggaagtatgttcttaaagttgcaggtttgaattcatcaagaacaaaagaaaattctcttatctcatgaaattgtttctccaaagaatttaataatcctagtcaacaagatgttgatgccagggttgaccacactttgcctaacatacaaaatgttgaaaccaaccagaggaagaacaaaacaattagaataaatc

SEQ ID NO: 74869 - DNA, 1051 bp, Carica papaya
  Intron number 1 from transcript evm.model.supercontig_1524 .1 (locus evm.TU.supercontig_1524.1) derived from phytozom e v7.0 (chr-ID supercontig_1524; pos 1028 to 2078 reverse strand)
tttctttcaagtgccggggcttaacgtcacccgaggtatgagaagtttctatataagggtcttttttaatgtgtcaaaatattttgcctttgtatgaaataatgtggatgtccccgcattcccatcccctttgtcctttttctgttggtcagattttcactctttggtgtcagttttgcatgtgcatttcaaaaaaagtttttcacgtgcatgcaaatttttcttcttgttaatgtggttattgactgatggcaacggttctttaaatctttgaatatatacatagtacttgatcaggttttggagacttgatatcatttctttatcacttgataatgtcagtatagtttgcacaaattaataaaaattgcaaggaaggctaatatgtgaaccagaagagtgtttcatatccccttaacaaaaattatcaatcgattttctgttaataggcatagagatatgattaggtacacttggtggaccaaaatcaagagaaaattgcagtcacaccgagaaggcagcttctgttgattcaagggaggcattatatgcggatgagaactcgggtctgatacttaagatgtgtgaatcagtgcaagaggactccagaaaaacagccagatgcttctgggacaagacattgatttaaattatactgtcgctaaaaaaaagattagccagcagctgttaactccattggcacctggcctcctgtaaggcctttgatgtcatgggtttttacctggtgaattatgcccatgttttgggactacccgagaaaaagataagaaaaatatggagtatgctcaaagatacaaaaatatggagtatactcaaaaaagctattctgttcaatcattttcccatatgatgtaaattactgattctagtgttacctatttagaacatgcaatatggtgatgttttttattttgtacttttcctatatgccttcttgatctagtgttcattattcttaccaactcatttcgttttaactttgatgatagtttcagagccatctccaccatcatctacccctaaagtttct

SEQ ID NO: 74870 - DNA, 944 bp, Carica papaya
  Intron number 2 from transcript evm.model.supercontig_62.2 (locus evm.TU.supercontig_62.2) derived from phytozome v7 .0 (chr-ID supercontig_62; pos 8514 to 9457 reverse strand )
ttgatcctggttcttcttttcttgagctctcccaggtttctcttcctccttccccttttatgtttttgtgaaaaaaatagttttttgataattatgtttcttcttgtttttcgtgttatagccggtcatacagaattcataggtttgtgaactgcaatttccttgattcttaatgttgagggggaatcttgggttggtaaaagaaggaagttatggtgtcttatggttctgaattgtgaaatgattgctggtttttgttgttttctcttggaaagttcgtctcaatgattgtatggttctacggaaacctcagtttagctatttaggatttgattgaatctttcaccggaacttttgttaggactatccattttccaactggtccaacctcaaaaatatttgaaagttcaacaatgctttttcagaaaggatgtggatcaacaagatgactacgacttagttaataatatgggtgggatatgctaggctttattagagtttcgaaatgcatctcctgcttctgaaattttcaggaattttatctcaactggtgcttcaagaagatgttcttctctctggtttttaggaagttatagaaagggggaacaagtagttttattttttcactgacatgcattcactttcaatttcaagccaatttctcttctgccattttattttccaggaggtcgggggcatatttttattgtataatcttatgtgctgttttagggttgtcgggttgagccaatgatcagaacctttctcagacttttgtcaatttacttggactgttatagttgagaacctttttgatatttgcagttagatcttatttgttggtttcttctagtgattagtttggatttcatccatacagtcacaatgtttttgttgtgtctgctgcttattgtatattattaaatggataaagcttgcaggac

SEQ ID NO: 74871 - DNA, 380 bp, Carica papaya
  Intron number 1 from transcript evm.model.supercontig_9.37 7 (locus evm.TU.supercontig_9.377) derived from phytozome v7.0 (chr-ID supercontig_9; pos 2639222 to 2639601)
ctccgatccaggaccacatcaatttcacccttcaggtctcctctctctctctctctctctctctctctctctacatgctcatagattgaaatttggatttttagggtttcttattgttctttgcttatgaggtttatttacaaacggaaactgaagcaattcattatttgaatttagtatttgggaagataaatgcaagtactaggctcagtttggtgatgataccaacaccttcaaattcacttttcgtttgtgcttttcctttttgttgctattcttcatttttatggtcaaattcgagtatatttaatggactgtgttcatgaggttaaaaagtatatatatatatattttgcagcaagcatacttcaagtgtgcgt

SEQ ID NO: 74872 - DNA, 609 bp, Carica papaya
  Intron number 1 from transcript evm.model.supercontig_478. 1 (locus evm.TU.supercontig_478.1) derived from phytozome v7.0 (chr-ID supercontig_478; pos 27479 to 28087 reverse s trand)
gctcaagtaggacccttttctgggaagtaagtttcaggcaaggttaatgcaatcgactggtttttgtcccccccactggtccaacacgttagccttgggcgaggcttatgtagaaccttgactgaggtttgatgttcatttccttaggccaaggcttatgcggtccatttgggttaaagcacatggatgactgaaatgcaagccttgagcaaagcttagttggtaaccgccaaattgctacctagacatcgctatttgattaacccttgggcaagggtcagcatatctgtatgagccttgggcaagggtattcttcttctcatgatatgagttggggttcatatgatccttgttcaagagcttagtagccttgagtaggtcttttaatggcctgtgacaaggaagaaaagcatgagttaaagttgcattaacagttggtaaaaatgaacaataaaagaaagaagaaaaaagaaaatagaaggaatgaagaaaccaaatggttgcctcccataaggtcccttatttattgtctcaggctgaatgtagtttgtggcttgtcggtcattatctgcaggattctcaaggataacttcttcaacttgttgttca

SEQ ID NO: 74873 - DNA, 506 bp, Carica papaya
  Intron number 1 from transcript evm.model.supercontig_53.1 19 (locus evm.TU.supercontig_53.119) derived from phytozom e v7.0 (chr-ID supercontig_53; pos 1005255 to 1005760 reve rse strand)
gtacgctaattgtggttcttgattttcttttttcaaaaatttcgcaaaaattagggtttgtgcagatttgattgtttctctttatttatttcaattgactaatttcttgtgattgtgcttttgttccttgtttgaattgctgatattgttatgcttctggagtcttgaagaatttcgagcataatccccaataaaatttggttttgatctatggagtatttgtgatatcccttctttagaattttgctgtattaacaattgtggatggtcatgattctttcactttaaattaagagttattctaaccatcctgccgattactctaccgggaagaagaaggtttttttttttttgttaatgttagtgggcgtcttttcttcattttcttccaatcgaaaacgtgttatgtatctatcttgcatattttatagaggtcttctaaacatctaaacgattcttttccgtttgcagtcttcacttgcagctgctagggcagacaattttta

SEQ ID NO: 74874 - DNA, 786 bp, Carica papaya
  Intron number 2 from transcript evm.model.supercontig_476. 2 (locus evm.TU.supercontig_476.2) derived from phytozome v7.0 (chr-ID supercontig_476; pos 9535 to 10320)
aagctaaggtattaaatctatcatcttctcttactttttccttatgccttttttataggttaaaatcataaatatgtctttaaatttcttctcgaatttgtctttctttatctgcaacacctaaaccccctttctcattcttcccaagaacgtccagaaaaactctggttcctcccctttctgttacccatttctttgatacaatcaaatccctgcttctaataaacccatcgcctgtaaatttatatttcccgtcaaatccaacaagcttcaatttcaggtaactgtatgcatatgtatacgcacacaatcagaggcataaatacgtttatcttctagctcttatttacttttatatttcctctcaaatcgtatttatagtatatggcaggaaggtgtatctcttggaaacctaagagaggaaatgaatttgtagtaaagagtttaagaaaggaagttgacttttctttttaatgaagagaagtaaagaggcgaagagggaatctctagtaattaaaatttaaaaggagttgatgtaatggttattttagcctttttctgcatttctgcaaccgtgagttagctggaaaaattgccttgtaatttttgaaaaataatgcagttagttgcgattagacctgaaacctaaaaacatactgtaatttaccgtttctttaaaaatcttttaatctatttatctgttaattttagctgatattgaccttcctgtggttgttttgtacatgaacagaactctctggagtctgatccccttgatcggcacga

SEQ ID NO: 74875 - DNA, 699 bp, Carica papaya
  Intron number 1 from transcript evm.model.supercontig_165. 15 (locus evm.TU.supercontig_165.15) derived from phytozom e v7.0 (chr-ID supercontig_165; pos 97141 to 97839)
tcgacatccatccagctgttaatcatagactaaaggtaatctgagaagaagtatgactaaactgctttagaagtgggtttaatcgtgggctttacattctttctgttatatggtaaagaaactgactactgataggtatttgtagttcagcaaattgaactggatggagtttagaatatagatcgatgatgatctgggtaaaggtcatgcgctaagttttgatctatcagttgctttttttttccttcaagtctaaagaaatttcggggatttattataaatgccagttaagttgctaaatttttttgtgatacgccgatcaaggtatattttcttcttgcattcttgttgaggaatggaatcggtttcacacttcagcataagaatgagtcttctttgttatctttttttaattgatctgctttttttgttaattccaaatgtacggggacatatttgattctttgtcaacttgcttcacttgttttttttttttgtcttttttccctcctatctcgaactggagttccttttcttagtccttctactttaggtcgtatgcaacaatggatctttcattagctttagtccatatatacgtgtgtctgtatatatatattgcactatggttagcaatgcgggttgccctgatttggctattcttttggggtgcataggaaggtgaaaccatccgaataa

SEQ ID NO: 74876 - DNA, 798 bp, Carica papaya
  Intron number 1 from transcript evm.model.supercontig_26.8 1 (locus evm.TU.supercontig_26.81) derived from phytozome v7.0 (chr-ID supercontig_26; pos 612910 to 613707)
tttggcgtccgccacaagacccagaacaaagaaaggtaagctttatttctctttttgattgtttttaattcatttccatttttgtttgggttgactctaaattcaagctgctaatatatatggttgaaattggatgtgttttctatatacccaaaagggatgcacggaaattgagtctttgttgggtttaagtcgtgaaaagacatgtagtgatggaagtcaaaagtggaaacctataatcatattactcaaataatttcgtggctgagtttaagtagccaaaagacaggcgagtgatggaaggtcttgatgtgaatattgctatataaacaagcctgaagctaacttagtgaaaactctatgttaggaaggggattctattttttttccccctgataagtgagggggtaatagtctttgtgttctggatattaatcatttgaatcagactgaaagtaagaaccaaaatttcaaattgtcttcctattggttttttttccccaaagctgctagtatcgaaatttaatttttaatagatgtatttgtgcagaataaaaaaagtggtattatgaagaagtataatgaattttgattctctgtttcttttatatctaaaagaaaattaaaagaaaatggttagtttagagtacctgattgttatattatctcagttattctgattttctgtatggttgttggttttccatcctatgtagatattttttttctaattattgatggtaggtatacattttccttttatgttttattggcttgcgtaggctcaaactgctgctt

SEQ ID NO: 74877 - DNA, 682 bp, Carica papaya
  Intron number 2 from transcript evm.model.supercontig_156. 17 (locus evm.TU.supercontig_156.17) derived from phytozom e v7.0 (chr-ID supercontig_156; pos 491357 to 492038 rever se strand)
gcagtagaagaactaaagtctgctgttgcctatcagtatgtaaatcctatgaatttctctacggacaaacatgaaaaggtttatttatttgtttacgatcttcccttatatttaagtattaaatattgtatgtgatttatatgtagaatatttcccttaactattttatcttctcccgatttttatgccaacctgcttatcattaagtgatttatttgtaagcaaacaagtccaagattcttacaggttttggatattatcaatgtgatcatttgtgccttctcatttatgggtttatagcttaaaacgaactttacatagtttgacatttttagggaagattaatgctgttgcaatgtggaggtggggaagaattgacacgtgtgcacaaaattagatggaggttgcagtgtcattaagacttaagtggttttactttctgacagattttttgtttttttgtgaagtgcttttttctcttgtggaacagaaaagttagccatgagctgtgtaatatcttgtgttcaattgttattcccccctaatttgtgcattagattgttcatttgctttgattctcatcaggggcttgaccttatagtccttaaaactatccttaaaaaggaaaaagaaattttacctaactcatctttattgcttaattgttagaggaagaggcgca

SEQ ID NO: 74878 - DNA, 165 bp, Carica papaya
  Intron number 3 from transcript evm.model.supercontig_15.1 41 (locus evm.TU.supercontig_15.141) derived from phytozom e v7.0 (chr-ID supercontig_15; pos 2444137 to 2444301 reve rse strand)
aagcaaagaagtggtgttcatataaagaagtgcaggtagaaatgtaattaacaattattttgaagaaaccatttttcttgattccaatcaaaaatgattatttcagataattgattattttgcttttccaatcgaaggtacttagagaacagtggctgtgttggg

SEQ ID NO: 74879 - DNA, 733 bp, Carica papaya
  Intron number 1 from transcript evm.model.supercontig_37.9 4 (locus evm.TU.supercontig_37.94) derived from phytozome v7.0 (chr-ID supercontig_37; pos 733365 to 734097)
gttgttatcagtggcccgcaacggtagctagtctatggtggctggctatgaaggctgccttaactcttttagagttttgttccccctatttcagcaataaaggccaaatagggttttaaaaaaagtgtagggttttttaacatagagttttggtatcatattaataatgatttgatgtgtgttttattggatattatagcgctatatagactttctaaagtggaaaaagaaataaacaattaattataattaattatatatggtgtaatttaccctcacaccccctaacctaatttatcatttctttaacaaaacctcactctattccccaagctgactcgcaacctgatgcaatcaaagaactgatctagattcactactataaaaaaggcctatttctcttaaaaaagcaacataattacgtcacccctgatcatgttttatcttgggaaagaaagtgtccttgctggtacttgctgaagtggttgtgtcattagtttgtatataatctgcttacagaactagccttccccattgttgttgaaatgaattgtgtagcatttctttttccggattatgcctagctgtgtatgattcttaatgtaattatttttttggggatggtctttaattttgggtgagttgtgcatgtttataaatttcttttctattattaatttctatttcatgttttttaggtacaaaggaggacctgcaataccgaggaagttga

SEQ ID NO: 74880 - DNA, 421 bp, Carica papaya
  Intron number 1 from transcript evm.model.supercontig_277. 16 (locus evm.TU.supercontig_277.16) derived from phytozom e v7.0 (chr-ID supercontig_277; pos 76675 to 77095)
aggaagccatatagtcctgcaaagttcctgtacaggtttgtggtgatatgtcttttaagttctatgtggcttcaatgtaataaaagagttcaatttggggtctgttaatggaatcatttaggtatagttttgttttttttgggagtttggaactggggggctgggggtcggaaggagagctggtcaaagtgaatgaagtaagactaacattttattatacagtaaatttgtggtttttgggtatgggccatattactccgatgtcatcagttacgttttaacctatttcagttatgaatgtaaatttttagtttcacttctggcgttaaattttaggtttttttttttttttcaccctgttgctaattaagatcttctatttgaattttgagtaatacaattctttgcagttggtggcaac

SEQ ID NO: 74881 - DNA, 1024 bp, Carica papaya
  Intron number 1 from transcript evm.model.supercontig_80.2 4 (locus evm.TU.supercontig_80.24) derived from phytozome v7.0 (chr-ID supercontig_80; pos 129522 to 130545 reverse strand)
cacgagtattccctacgggatgtgagtattctctcttgctttctttctttactttctgcaatcggcttcttgcatggagaatatatatatatatatatatatacacacactgtaattctttcttcgatcttttacatatatatatatgtatcgtttctataatttcttcagtccgagttttcccatgccccgaatcgtaggcgtaattttttttttttatgttatatacatgtgatactcttactttcttgaagttctttgatcagcttcttgcatcgtatggatatagttatagtagttctttcttcgttgtttgtatatatatttatatacatatacgtatgtttcttttatataatatttcttgcattgcaatcagcttcttgccatttgccactgagattcatgaatattcaagacttttgtgggaagatgctgagttcttgttccaggtcctcaatagaaccatacactacttgtccgccatcatcagctgctgcacacataaacttcaagattttattttcttgctctaatccttgtatgccatctgtttcttgtattggtgaaaaatatatatatatatatatatatatacatgtatataggtgtaaaattagaactaatgtttcttttctatatatatattatattatatgatatgaatcacttctataatctatcatctgaaggttcagattccatctctatcagtttccatgcatacgtttgcaagtcttttattaccatttcttgaatctgcatgaacgattcaaattttatttgtgaataatgttgggagaaaatttaatttttctgttatatgtacacttttaatgctaatacgccaatattaatttgattacagtaatattaaatttctatattcattgctttatattttatattaaaaatattttttaaaagttttatttgaaattattatcaattttttaatatatatatgtaactttttttaatttacgcagtcagacgattacgtactctgcaaaattagaaacaa

SEQ ID NO: 74882 - DNA, 831 bp, Carica papaya
  Intron number 1 from transcript evm.model.supercontig_6.61 (locus evm.TU.supercontig_6.61) derived from phytozome v7 .0 (chr-ID supercontig_6; pos 472335 to 473165)
tcaccggggaaagattttttggggtatgcattcacattttctgacttgataactcgttttctttaattatgacagattgtagattatcagtgtagattttccctcatttccttcgctctgtcaaaagaaaaaaaaacttttgactgtgaaacatgaacctgtcatctttaaaaggcattacaaaaagcttattaaattttttgttatgctacactaacatatgacatttgcgtccaactttaatcgtaaaagcttttggtcatgcaatgtgtagctttcatatggatcttttacttatcaagggcattggttggaggaataggtttagactttaatctatgccttgctaaaagcaggttttctaaatcctccatggggttttgtgcaacagcatgaattgcatcaaataaatctgcagctcctatgaataatagaagaagaagaatttgtctaaaaagtgttattataactcagagattgaatatttttttcttaacaagttctttttacaaaggtttccgcaataaatccataactacatcccaatttagagagaattatctaatcctaaatatcaagaaactgagattacggaatagaatagaaatagagcagaatcaaagcaaaaagaacttacagatttctagtcttttaggtaattcttataatgcattaggcatttttcattggctttccaacattcctgtcctagcatttgtatgtataatactgctcttagtgaatctatgatttgatgaatgatgatgtgcatcagttattgacttatttcagttctcaccagggatctctgcaggaaaggcttgtcttgcc

SEQ ID NO: 74883 - DNA, 599 bp, Carica papaya
  Intron number 2 from transcript evm.model.supercontig_21.2 06 (locus evm.TU.supercontig_21.206) derived from phytozom e v7.0 (chr-ID supercontig_21; pos 2091754 to 2092352 reve rse strand)
cactcctcactaaacccaactccacctcctacacggtatgctaatttcttcgtcttcttcttcttctctgtctctccaatattttcatttgcatgcttgtttttctctgtaaattttctctcttttttttctttaattttttaatgcattccaattttctagctttacaacctgccagtactacccagaatcttttgattttccattttcttgacttaaactatgagtaggtagatcaaaagggaaatttttggttgacaatctgttttttttttcttttttaccattaaaagatttttaacccataataaatttgtttgtgggttactcaatttatcacctaatacgttttgacttacaatttatcagttctgctctgtctcatgatttggctgtgttctgttgacccatctggaaaagagaccaaaatctgaataattttcttctcttcattagaaatttatttccattcgacatttttaaagctcaaaatcttctactcaagatcaccattgtctcatattcaagctttctgatatttcttctcttccctaaacttcacagtggcacccatcacgacctggtttcttctacttctc

SEQ ID NO: 74884 - DNA, 767 bp, Carica papaya
  Intron number 1 from transcript evm.model.supercontig_4.16 2 (locus evm.TU.supercontig_4.162) derived from phytozome v7.0 (chr-ID supercontig_4; pos 2978491 to 2979257)
accttgtcgaccttccggggccgtttgtattgcaggtttgctgcattttctctgtgcaggttcaatttaatgttgcctgccttttctgtcagttcttgcctatgtttatcggtttgagtggctgcaagcggttttctagatgtgattctatttaaattgttattgaatgtaaaccatcacgacattattctattataatcgttgtttttttagacggttattttaattattgctgactactcatgttgatcaaatctttacgcttagcatatgctacagaactttagtcaaaataatggaatttccgtttttgagtttgttttttggtgcaatacatatggcagttttatttcctcgtcatatattttggaatttgataattgaatgtgatattgtttcagagtaatttgataagcaagggtgagtagctttttatgtcttagtatgttatggtttcgtaatgcttataacatttagccaacttcagcaatgaaaatttcgaagaaagtaatcctattgactaggtaaatacaatttatatctctggagtctggtataaatgcctgaagcaaacttttgcatgaaagacgttgttctttcagccaattgagaatcaatcagttgaaacattttattttcctttttgtggttggtagaagtgtactgaaatgtaaaatgaagtcttatgctaacataaaacaatggatttatcagttggagaagaaacttttttttgagaagaatttgcttattatttgtccaggttg

SEQ ID NO: 74885 - DNA, 640 bp, Carica papaya
  Intron number 4 from transcript evm.model.supercontig_48.6 (locus evm.TU.supercontig_48.6) derived from phytozome v7 .0 (chr-ID supercontig_48; pos 33843 to 34482 reverse stra nd)
tgcaagcacaagcccatccacaagcgagacaagtttgtactctctgtaaatttcagcttgatttgaggtggttgctttctgtttattttcgtttctctttaaaaggtgcttccacattcttagccattgtccataattttaaatggaactaatcagacatgatatgttccattttagtaagaagcggtataaaagatttggagaggacaagcccacaaatgtatgggaacattgatgcaatatgtacttcttcagccaatttgattatcgatagatattcttcggaagaaaaactaatagttttgtgatcagaatgcttttgattatgccaaaagaatgcgaaatgatggctgaagatccacacacatgctattatatagtttgaaaggatttatcaattttaaccataaccaattatttataatgctgccgccaagaatctgcaagtttttgtttttatatgtattaacatctttctagattgtttctcacactttagatgagatgggctgcaactctcttttttgtgtgaataaaagtttctacttgtgaaaagatccacttattatatgttggatgtaaatagtaaaatgattacctgttcctcttgtcatgtttgtagagtgctcttaaagtgtca

SEQ ID NO: 74886 - DNA, 539 bp, Carica papaya
  Intron number 1 from transcript evm.model.supercontig_48.6 (locus evm.TU.supercontig_48.6) derived from phytozome v7 .0 (chr-ID supercontig_48; pos 34860 to 35398 reverse stra nd)
tatcagacggttgaggcacaggagttttcgcatctgtgagtacccacttcatttttaactgtcttgattagttcctggggaaatatgtgaaaacgagaaggaaattgtcagatttttttaattaactttgagatttgttatactcgaaaaagaaaactcgcttctgcgtatggttaatctctgaatatggttctcgaaatttggaaccttgaggtgttctttagctgagggcttcttctttgattctctgtttccctgctgagaaaatgaagaaaaagaactacgagaatctttaggcacttcattcaaatgatgtttattgcacggtccattttttgtacgcctagtcagattaaagctgcgaattctgtataaaaaaggcttcatttttcatttccgtcttttccctgtgttttatacaaattggacttcaaaaaaaaaaatgctcttcatttgcttggcatgaagttacttttttttgacatcttgttcattatttttcagtactgggagctcgaggagttacttccctggtcttt

SEQ ID NO: 74887 - DNA, 886 bp, Carica papaya
  Intron number 1 from transcript evm.model.supercontig_146. 60 (locus evm.TU.supercontig_146.60) derived from phytozom e v7.0 (chr-ID supercontig_146; pos 341400 to 342285)
gggctacttttgctggttcattggttattttgtaggaacgggatcatgatttttcaaccattgtttcaaccacatcacatggtttgggctaggatctttctttccttcaatatgggctatggtgtcagaggggttttttttttttatctattttggatagaattcaatcgctattttgtctttaaggttttgtatttctcgattttttggttttctttggaagatatcttccccacttttgtacattccctttccctttagtaaagcttcttttgcaacaggaaaaagaacaatgaacaatttacattcttttggagtctcttttatttaggaaacattttcttcctgaccaacaggacttcctagtattcattggattcttgtctcgtagaccgtttgatacatctatgcctcctgcttggtgctttttaatataatttcttttacctagttttagaaaaagtgtgatctacttgagagtttgatatctgattattagtatgtaaatgcaaaggactaaagaaattactgtgtaaagatcaaacagatacatgaagagttggactaacaaaattctcatcctattgatataagagactctgtgagggatcggttggaattctattggcgataaccaaactagatgggtagagagactttttgaggactgagaaattagaaatgaagtttgggatctctggatggataaagttcctgacctgataaattttctatcactttcttccaaacttgcgggacttgttttccatctccttttcaatatgctatgatatctaagtttctaagcgggcagaaatatccttattcaagatttttttatgtgtgtgcaggttgtttcacctgaattcaccttctacgatagtac

SEQ ID NO: 74888 - DNA, 688 bp, Carica papaya
  Intron number 3 from transcript evm.model.supercontig_30.6 7 (locus evm.TU.supercontig_30.67) derived from phytozome v7.0 (chr-ID supercontig_30; pos 977530 to 978217)
aagactccagaaaggtatgcatttttttcttgtaatgaagataatttacttttacctcatcaaaaacattacatggctacatatctttatcctctgtcttgaggagcaggattaagggtatttttatgagagaattgttaatttcttgaagaagtagagtttcattttccctctataaatacaagatggaagtccatgaggtaaagaaaggtcaacctttgtaatgtttgggattctttataagtttgaaggactttgaggatcaagaaactagcatcttgacatatttaattctcgaggagcagggtttcttgtcgtatttttgtaagagaaacattttttttttaagaaatggatttcaaacttttctacatatatacaagaagaaagtccatgaagtataggatggtcaacatcataatatttgggatttgtggatcaacattgtaattggcatttttatgtattcgataaaaaaaagaagggtattttgatatttgatttcagccttgaccatggtatttcaattcctattgctggaagcatacatataatgattcatgacttgtattggatcaatgagctgtcatgttttgtatgtggattttcttatcatgaaccaaaatatacttcaaaaaatacatatgatacagtaacatagaatttgatatatgttttgtttgtctag

SEQ ID NO: 74889 - DNA, 954 bp, Carica papaya
  Intron number 2 from transcript evm.model.supercontig_333. 5 (locus evm.TU.supercontig_333.5) derived from phytozome v7.0 (chr-ID supercontig_333; pos 28669 to 29622 reverse s trand)
aagaaattgtccatccatacgaacccagtcaagtgcgtccacaatctgcatatatatgtgcatagatatatatatatatatatatatagatatcaaattttttctaggttttttagattacagcttgatgtgtgtaggggcaccagcagcaacctaagaaacgacagaaatgtccagtagcaggaagagccacagtttcttttacccttccagaggatcttctggtcttagctgataacatccaactggttagtaaatatttctgtcgcttaaatctctcgtatcatcttgtatgtcaaatgggttttgtagaaaattggtaaatggttaattttcttgatggtagtatacttctgaccaactcattccacccaaaacgagtcatcggtacacaattaggcaaagaaccgaagggtggactatagagagacggcgacgtgcaactatgagatatgattcagtaagtcccattaattttttgaactgaacaagctggttttttcggagcatgcatctagaaattgagaactctacacatggtttcccaagaacattgacaacatttacttgatgtgttactgcagtatttcattcatagggaatcacagggattattccgatcagcggtggaagtcacggactttatactatatgagctctacccagagaagccgactcccaagccaaggaaggaaaaggcagaagaagggagtggttctccagtgaggaagaaggtaggcaggccgagaaaaaataaggtggatggggaacaaggaagtactccggtaagaaggaaggttggcaggccaaggaaggtggcggatggggaaaaactgactccttctgtgtgttgtttttcagtgtatacagtggaaatatcgcagtcgcaattaattttctaatactaaaatattttttctagatttctcttattcttttttgctgcgcaggtgg

SEQ ID NO: 74890 - DNA, 560 bp, Carica papaya
  Intron number 1 from transcript evm.model.supercontig_72.5 7 (locus evm.TU.supercontig_72.57) derived from phytozome v7.0 (chr-ID supercontig_72; pos 1149456 to 1150015)
ttagtaatctccatctcagccgaagctgttgtcaggtaacttattcaactccaatttttattttctgatatttcttcttcccgctccttcaatttttttttttttttttctttttgggttttaaacatacacaatcggggtttaatctggcgcgtgtaaatttgttagtcaaagagtcaaacttccgctccaagcaaaaaatcgactcttgaaatactggtttcctaaaatcttcctatcagtaacggctagttttctgccattcggacagttccgtttaacctccgatgatctctgttctttctgcattatttctttcacaagcggtagcagagaaagaaaccttataacctctttcagccttcttttccgaggaacagagaagtgagaagccctattcttttcttctttctccaatctcttaccaccatcttctccaacattctaccgcgagaaacagaggaacccagttacttgtttcttcattctcccacaagaaacccgtttctttattctaatatcttctccttagtttcaacaacaatcttcaatattccatc

SEQ ID NO: 74891 - DNA, 726 bp, Carica papaya
  Intron number 1 from transcript evm.model.supercontig_40.8 3 (locus evm.TU.supercontig_40.83) derived from phytozome v7.0 (chr-ID supercontig_40; pos 1554731 to 1555456)
cagttattggccaggtgctctcttgtcaatagattagacgctgggtgtttattttacttagacttgactgcgtgtcattatatgagattggaaatgtggttaaggtttatctgtttacatgttgcttttgtgtaatgtcttcatttcattaaaactttgaaggcaaatgttgctgtgaatttcaagtattatacaggtgatagttaccaactttttctggtctttgaatattgaaggtgccaatatcttaatgattaacagaacttgtaccaaattactggcagagtttagccttgctttggtcgtgcttaatttatgattgcaaagagtgttttcatagcccagagaacatctggaagtctgtctggagagagaaagtatcaaagtattgtgtctctcggtctgattattgtcttccttatgccagtttctcctctgaggagattcctgatcattgagaggaagtcttttgagctttctcttgatggtggcttttggccagtcatccttgcagtacttgaagtacagtggcttctatgttaaagggtcattttggattagaagcaccaggaagggaggaaaaattttgtgggttgccctcattccaaacgagggtaagtatttgactattattgagccggttgctgattcgcacaagaggatttatgttccatagcctgatgggtgttagaccctcttgtttgccttttggggagtgaccaagaa

SEQ ID NO: 74892 - DNA, 698 bp, Carica papaya
  Intron number 1 from transcript evm.model.supercontig_27.1 15 (locus evm.TU.supercontig_27.115) derived from phytozom e v7.0 (chr-ID supercontig_27; pos 1274543 to 1275240)
ggacaaagaaagagaaccgattccatcagttactggtattcctcaaaaactgtaatactactagattgaaatatgtatgatatactttaagttatcatcaaagcctctgttgctggctttcaagctggtactcaccaagttccagcttcactttccaatttccttagatgggagtctcacatattaatgtccttgctgccaattagttgatgtgatagtgatatttatattgctgaattatcctctcaaatggacgagatatttccacacaccggtttgatgtttcctcactgcaggacatgatgaataagacttgaataattgttgtctagataattttaggctttaaagaaaaaaatgtggaatagaatttaaataatttcttgttctaaaaaagttaataggctttaaataatttcttgttctacatataggatttgtttttttataataataacctggctatccacattatgtcatctaatgcggatgcaggaagtaattattttgtatgctttgcataattgtagtacatacgtaattaatgaattctctgtaggtgtatggaagacatgaacctgcagtttttcatgcacgtgcttattatgtccctggttatatttttcatacaagcttaacttcatgattattttgttgtaaaaattcactcttcttttgaatctatgcaaggaacaaca

SEQ ID NO: 74893 - DNA, 509 bp, Carica papaya
  Intron number 1 from transcript evm.model.supercontig_46.1 17 (locus evm.TU.supercontig_46.117) derived from phytozom e v7.0 (chr-ID supercontig_46; pos 1026901 to 1027409)
aaggtctttttctttcccaccttcctttttagctctctatttctttttttcttttctgtgattctttttcctcaatctttttttctgtggtgaacttttaaaagtttaatgtcaattctgctagtgaatcccctgtttcaagtatctgttacatccatttttgacgactctgtttcgattttatttttcatttattaaattcaaattctcactttttgattggataaattttcttgggtttcttttgacatatcagaagacttttgatgatgggtcgttatcctctttggagtttcagttttcaatttgagttctttatgcgtctgtttcaagttttcaacccttgaaaagtgcttctttcaaccagatttcctttcggctgtttggctgtcgagaattatatgtgaattaattatagagtatgccctttttgacctctttttggcatgtaatttatggtattatcttttgtagtgacgacggccaatcaggcaattgaagcactgaaa

SEQ ID NO: 74894 - DNA, 487 bp, Carica papaya
  Intron number 1 from transcript evm.model.supercontig_18.8 (locus evm.TU.supercontig_18.8) derived from phytozome v7 .0 (chr-ID supercontig_18; pos 32982 to 33468)
ataatcttcactctcacaagcgttatctcagcgaggtttgttcttctaatctccagaagttacgatttcttccttcttttttaacgctttattatccacatgtaattattttccacttcccggacatggaattttctatctctgagattttcttgtttctgtttctttttcaaattttgacgggttacgatggcatataactttgaagaagcacctccccgctcttcctccccaattttctgctcagggtttccaattgtgcacttttgaattcgccttgaaataaggcggctaatttcaattttcgtgtcttcttttgttatttatataaatatatgtatgtatataatacacgcaccctgacattggattattttgtctgattaccagtattttttaatcattcttagcttttgtttgtatctgtgttcgcatatgagctcttcatttcgtaaaaaaataataacaataatctctggtacagata

SEQ ID NO: 74895 - DNA, 976 bp, Carica papaya
  Intron number 1 from transcript evm.model.supercontig_7.26 (locus evm.TU.supercontig_7.26) derived from phytozome v7 .0 (chr-ID supercontig_7; pos 332301 to 333276 reverse str and)
gtcaagatttcaaccttgatcggtaggtgattctacggctcaaagtatgacaaatgtctccctgtattcacaggattatgacacgtggttagggctccttaagtccacccactcctttgcggatggttccaccatgctccccatgctctcattatgcttccctgctactgttacctctctgcacctcttttgatcctctgcctccctgctgattttctcttgattgcacctggatccttacacatcccaattctgatgaatctcaatgagagcatggttggaataatgtccacgagctttgacccatgcattagccaaaaatattaatctatcccacatctcctgaattgatgagtagcaatcatccagaattcttcgattccattgaagccataaaatccataaccctgtaataatggcccctttccaaagggttttgcccctattcgtactccctccccctgaatggtagcgtgcatcaagttttccactgcgagaggagtaacccaacataaacagaacatttcaaacactgtagtccaaagtattcagggtgtctcgcaatatatgaacaagtggcaattgtgttttctattgtctataacacagaatacttacaatcctactggttttcatgctcattgtcctgtaactcgatccatcagtagggaccacaacaatctttaagtttttgtttgctagtgttcaaataacataagggcatagatggagcatggaaatctacagttacagtaaaattagcaattcaaagcaattttacgctatttttttttttctttgaaataaaccattttacactgttcattagttgacattgagttgattgtaatagtcggtgggatataaatttttcttgatgtattttcagaatttcatttccttaactggggatgagtgcatgattaaattttaattttcaggattaatcattcttcctttatatcccggactttca

SEQ ID NO: 74896 - DNA, 771 bp, Carica papaya
  Intron number 3 from transcript evm.model.supercontig_21.2 23 (locus evm.TU.supercontig_21.223) derived from phytozom e v7.0 (chr-ID supercontig_21; pos 2305472 to 2306242)
aaaaggttggattctccagaatttattttcaaattttttcagcatattctctcttattttctacttgctttcttgtaacatactacaatacacttaacttgaagcttatattttaaggtaacctgtggaacacgataacagctgaagataccatctttgagtttctggctaaatgtccgaggatagcagaaaatattgcctaattttatgaaagttgccagatctagttgaactcaaattcatcaagtttctagtttagttagactaaatttacatggtaaaacctgtggagtttttgttattagagattgttgaaaggtggatcatttttcactaagaactgggttataagatactgggactaactattgagctgctcgccctttgctgcattttatgctgaaagctctccttgggtctcccaggtagatctgagggcagttatcatgtgagctagttctaccaaacaagacattttaaaatattggtggatatcattaagctcggaaacaagtttgggatcagtgaactcctctgaggccatcttatagaaactgaacgtaactgtggtacaaagaaaaatgttatcttattacttgattaacatttatattgatgaaactattttatgattgatggttcaattgagcagcagtctggtaggttcagtttggatttgttgcagacaccatgatatctattgaagtttggttattttcatgccctgctgttacagttgatttctgcattggaccggcatagacaatcagc

SEQ ID NO: 74897 - DNA, 806 bp, Carica papaya
  Intron number 2 from transcript evm.model.supercontig_67.5 8 (locus evm.TU.supercontig_67.58) derived from phytozome v7.0 (chr-ID supercontig_67; pos 842730 to 843535)
cacacaggaggacctgaccagaatattggtgtaagctggatgaaaggccaatcttggctgttggtgatcggcaactagtggtggctgagatgctggaaccagcaatgaaggctgctttttatggcttgttgccggtctgtggtgaccaactgttttgctaatggagggaggtgcaaacggtagttgccttccgtgagttttttcggtaataaaggtcaagtagaggttgtaaagatttcttagtgtagggatctgatattattttaagaatttattgaatatcacattcttatatatataggttatccagagtataaagagaaataggtaattagttacacttaactatatagaatgtactttactcttctaccctttaatctaattttcataaaatacatatctttaagagtgttattaattaaaagctacctcccatatttgattttagtatagaagtggaaatgaattcggcgaaaacagaaccctatcagaagctgacaagccttaaatattatgttttggttaacctgcattttcaaaataatcttttaaggccttctatgtagggcttgaacatcttaatgtgttttggaatgttacacttgcgcgtgtttgttgaacctgaacgttttgttctaaatcttacggtatgcttgtacttcttaatatgtgatttctttcaagcattttcagttgccatttgattgccgtcttcttcatctcgttaactgtgtttcagtatagaatgcgtaatgtccatcacattatcaatgtatcacaactgttgtatctttattacagtt

SEQ ID NO: 74898 - DNA, 956 bp, Carica papaya
  Intron number 1 from transcript evm.model.supercontig_19.8 8 (locus evm.TU.supercontig_19.88) derived from phytozome v7.0 (chr-ID supercontig_19; pos 591082 to 592037)
ttcgaaaccccaaattactcgctgttcccttggaggtagttcccaaactcggtctcacatgggttggtttgtttttccatttttcagaacctattctctatgcttggtctggctgccgggaaaatgtgggaacttggaaatgaacatgagtcaaacttcctgctttctgggatttttcatcattttggaacataatttctgtattgcttagctgagctgtattagatttgatttcactacttttctttgcaatcaaatgcggtatgaagtcgcaatttttatttcatttcctctttgttaagtggctagagctagttgggtaagatttattacggttaattgggcttaattgtgctcaagcaaactctattttgagtataactcattcttatgtgaattgtttataaattatcctggggaaaagtatgttcattcttttttttttcaactttcaagaggataaaattttactatagttagacattacagttcaataagaaattattttaaaacccttatatggtgaatgattgcttgggacttaggagaatagagaagggtattcaatgaaattgttgatatggtttgtgggcattgttgatggtgatattttatagaaaatgaggcttacttatttgagtaattggtttgaataggtatgattttgctagcgtatcggtgtagcataacaaagttgtaaggttgtacataaagttgttagctttagctacaaattaggtggtgggaaatgtctaacctcattgcctatgcatttccaactagcatatgttgcgggtttcggagtatgtctgaccaattgtgttcaagaggttatcatgagtatttgacatatcacatttactcactattcatcatgttgatggttgtggcttctaaccatctatacaattctgattatagggacagttgctgaacctaaagtcgtttctgtagct

SEQ ID NO: 74899 - DNA, 446 bp, Carica papaya
  Intron number 1 from transcript evm.model.supercontig_33.1 57 (locus evm.TU.supercontig_33.157) derived from phytozom e v7.0 (chr-ID supercontig_33; pos 1608567 to 1609012 reve rse strand)
gacttgcagtaagcctcttttttgacatagtagattgtactttataattctgttgccttcaacacagctcatctgtagatagatctgagaaataaagtatgtgctattaagctttgcattgtcctgaatatgatgccataggcatgctttttattctgaaagcagctccttataggttaaagggaatagaggttaattcttaacatattgaatgcatctgccattaatctttatttattagattgtgactgttatagtattctcttcccgttatgtgaattccctgataatcgagaagtatttgggacagctccggaattataagttccttttttcaggttggcatacttgttccgaatgcaacaaaacctcaaagtttctttgcttatgttgccctactggcatatgtagattctgcattcgaactgcttcttttgcaattgtca

SEQ ID NO: 74900 - DNA, 670 bp, Carica papaya
  Intron number 1 from transcript evm.model.supercontig_58.2 (locus evm.TU.supercontig_58.2) derived from phytozome v7 .0 (chr-ID supercontig_58; pos 12207 to 12876)
tggctcctgaaccggtccaatctagaaccacacaggtaaactcaatgatatgatagaacttagcccaaggtgaccaaccttttagtttttggagctcgcgtggtagcatagcaatcttgttcctctaacaacagccatccaaaacataaacatgagtaaaggggatcttccaccagctttcttatgaagatgaccagatccaagagaacaaatagggacaagaaacagaaatcttggctttctgttcaggaaagatgatacaacttgatcccgtagttggtaatttacttttttttttaattttacatagtcaatgggctcaaaatttccactttgacaacgctgttgataatttgatattggttatacttccaatggatctccacaggcaggtgtcttcgctctcagctattatcatggtcagttttctcagctaataatttctgcttggtaattaagtttttatgcaactgtggatgatttgcgtgcatgatagaatatagaatgagaagatggatgctgagctagcctcatgtaagattactaatattggataagatgattatgattatgaaaacttttttattgtcctaaaccatcttcccagccacttgacaatgtctataatttcatagccacttaacaagcatcccaaaggcctccacgaatt

SEQ ID NO: 74901 - DNA, 390 bp, Carica papaya
  Intron number 2 from transcript evm.model.supercontig_55.1 84 (locus evm.TU.supercontig_55.184) derived from phytozom e v7.0 (chr-ID supercontig_55; pos 1113832 to 1114221)
ctcttcctcgtcttcctccatatctccctccatatgtaagcttggttcagtgtctcccattgtttttagatttcagtctcccattctcaatacattatatccaaggcaaggcagaaatttcatgtaatttatttgcaaaaattctcactgaatttatttcaaatatagcttaaattttgttattgagaaatatagcttattacattatactgtttgaagaaagaataggaagaaccagatgaacccaacttgtaactataattaaaaattgaccttttaatctgtcttgtttgaatcaagaataattagtttttttttttttgttttgttttttttttctgttgggttcttttagactttagaacttcttgctgaagtagccgttttgga

SEQ ID NO: 74902 - DNA, 1018 bp, Carica papaya
  Intron number 1 from transcript evm.model.supercontig_7.20 7 (locus evm.TU.supercontig_7.207) derived from phytozome v7.0 (chr-ID supercontig_7; pos 2067379 to 2068396 reverse strand)
gactgcctctgttgctaggtaatcagtttgccacaactttatatctaatagtaataaaaatagaatagggagtttggctaatccggttttctttttattctttatctctcacattttgtggtgaaatgatctactaaggattttatgtttttaactcatcatcttcgttgtaaatgtaattcatggagttttttaaatgaattctagaacggaagctttttagattttttttgcaccttgctgtgaaaagtgttcgcgttcatttccactattttcttggctagaaattctttcacagatttgtttttttaacttggattcacattgtattgtatttatttttctgttcaagatttaccattctatcaaattggattcacattccgttgatgttcaagatttgagatgataagatcttcttatgtttcgatggtgtcaatttttatccagagcagttttacattatttgaaaggcacaataaactatataatctttaagatattatcatattaacattagtaatcctaggattcgatatatatatatggaaatggcttcttcaaatcttttgaattgcttcttttatggagagaatggtgggatatgcaggacttagtagcagaacaaaattgctactctatgacgcacaattataaaaaagctgagtacaattagatgaacaaacagaaccttgtctttatgatgattctttattttacaaacgcaatttatctcaaactgaatcttgttgttctgatggacaaattacaatattgcttttgaagagttttacttcagattcaaaataaaaaaaaaaaaggaaaaagacctttagctttgtcatttcttttgtttgtttgtttggtctttctcattttttctgctattgtcatttctttcgttttggtagatgcaaggtcttaaatttttatagagtttgttaatcaccccagtttcatatcttctgcttcacacattgcagtggatatactttgttgcgagacccacaccacaaca

SEQ ID NO: 74903 - DNA, 681 bp, Carica papaya
  Intron number 1 from transcript evm.model.supercontig_201. 12 (locus evm.TU.supercontig_201.12) derived from phytozom e v7.0 (chr-ID supercontig_201; pos 280447 to 281127)
gtcaatattgtgtgctttgcattaaacccaataaggtgataaaggacacatgctataaatgcttgtatttcatgtttcatgcccctgacaaacccttataagtatttatatattatgataacctgttcaaggaattatagtagcaatgatcatgactgttattggcatgcattacatttctgcaaaagaatctcttttagttagttgatgaatgaccattgcagtcctaattgttagcatttccatgagaaatgtatgtaattcctccgtggtaatatgaggaggctccataagataaaggattttgtggaggaaaatcccttttgtttctttctttcttcagctgttctcattgctcccatactgctgctcaaaattagtttctaatcatgcttaacactttgattggtggtattaatcttttgtcatcccttattatgattttttcttcctatttttttgttattcttgctcctttaattctcattttatatgctttgagtaaattttttagttctttcgcttctttgatattccatcccatcttatgtcatccccatagagcaggaatggaacttattggtactgggtttttaggaattttttattgttctttctaaacggcaattgactatatttgtcttaatatatacagaggcattgattttgcagttgcaaaca

SEQ ID NO: 74904 - DNA, 890 bp, Carica papaya
  Intron number 2 from transcript evm.model.supercontig_55.8 2 (locus evm.TU.supercontig_55.82) derived from phytozome v7.0 (chr-ID supercontig_55; pos 509914 to 510803 reverse strand)
gcggccagagacgccgttgctctggtaaatttgttcattaacacctctgaattcgatctccattagctttttattgacccagctaagctaacattcacacacacacacacacactcatatatatagatatatatatatatatatctatgtatgtatatatgcatccaaactttacactgagacacgctcttgttggctttgaggaatgaacgccgggtattcagacaagtgtatcctttttatgcaggctttatcgagcaggccgattcctgaacttattctgtttgcctcaatgataccagtctttggtttttgctctctgtttaatttttcgaaaagaaagattgaataggataatgggtattgaaaaaatgcacgccttgtatattatattatacaagtccctaggcttaacattagtactttgactggtttgtggcccttgtatcgggtttatctggtattcagaaagggttttcttcttgcgtgaaagagcagtgaccattttttctactattgaataattcaatttcgctttaaatggatttgtccactagcaagcaattttttatttgtttttctgaaaggaagctagtatgtgaatagcaaagcctgctaaaaaagaaagttcaatatctctgttcctattagttagtggcaacttgtgaatgaggtaaactcaattcaaggatttgtatagggctatagacaagacttgaaacacagaattctgattagtacttagtacttttcctgcaaagtagatgatctgggtggggtttatgcttggtaatcaattggtcttcttttgtaatgtactgaacaaggtgaggattctggttgttgttgaaccagagtggaggaccagattgggaggtgaagctaggaag

SEQ ID NO: 74905 - DNA, 779 bp, Carica papaya
  Intron number 3 from transcript evm.model.supercontig_59.5 6 (locus evm.TU.supercontig_59.56) derived from phytozome v7.0 (chr-ID supercontig_59; pos 587151 to 587929 reverse strand)
tgtcatcagagataagtcaaagttcaaagctcaaggtaattaacttggagtagacttatatggagtgtctaccacaaaagagaaacctactcaaatttctttagtgtttggcttatagttgtctaacgtaagttatttgataatatcgcactgagaggacatgttgaactaaagaagcaattatgttagtagtttatttttgaaaggcgccaagacaggtgggtaactttttgatactgattagaagggtaaacttttgcaaaggatgattttttcttgttagtgcctatgcatttataactttaagaatatgaaatgtgccacatgtgcatgcatcctgttttgacatgctattggccatcagcatgaaaattttttaaatggttggatagggttagttagccagcaagttatccagaaacggaaaaagaaagggtgatctctgagcttgttataaagaccagtttatgtattgcagatatatttgcatttcttgttttgcagctgtatgtctctttaggcataagaaaacatgctgtacgatcatcatccgagttttctatttatgtacagtttgaccagaaggatgggacttcaaaaagtcattgttttggagcacttacaagattatatttgttgtaattttttattatacataattacatttattgtatgctctatccgcatccttaatgtttcatcttacatgttgcattcttttctggttttgttgcatgaatgaaggagtttaacaaggagttatctagaaaacttgaagc

SEQ ID NO: 74906 - DNA, 653 bp, Carica papaya
  Intron number 2 from transcript evm.model.supercontig_45.5 4 (locus evm.TU.supercontig_45.54) derived from phytozome v7.0 (chr-ID supercontig_45; pos 1504700 to 1505352)
aagtcccgaagttgcagaggctagccatcaaaaaggttagaatttgccattttgacgagtttttgttgattgtatcatctttatttattttgtctctttcttttaggatacatatgtctgaaaattatcatatttgctagcacgatctatcagttgaagatatttgtttgaaattgtgtctgatatatgaacattatcgtggaacgaaattgtgttgttcaaaaacttttttctcctatttggatttttattttcgaagagaattatgtttgtaataaccaattctgggcttaatatgattgatttgattaatcaataatttgaccatatttgcctgtatcaaagattaaaatcaatctatcctcgctatatacttctaagctttcataggtatgtgatctaagggaagcaaatcagtaataaccagatgtcatgtgtacaagagtaaaaaaaactttgtcactgaaattgtgattgagtgtctcattcccatacatttcatcattgtagccaacaccacacatgtatatggttgactagatctgacttgtttctttccttgtgtgtcattggattttgcaatatgctcatttgtcccaagagatttgacaatgacaggttaagggactttcaacagaggagtttgctgctcg

SEQ ID NO: 74907 - DNA, 879 bp, Carica papaya
  Intron number 1 from transcript evm.model.supercontig_96.1 8 (locus evm.TU.supercontig_96.18) derived from phytozome v7.0 (chr-ID supercontig_96; pos 374430 to 375308 reverse strand)
actccttgcctgccattgccgtcgtcggtggccaggtcagatcgcgatctcctcttcatctcttaattttgaatactgagcttctttctcattttttttttcctgtttttttaattgcatatctacagttgcatttcattattaaacaacatctcgtcactcctgttttggatccttcgtttcatttatctttttcgttttatcctttaatttttcttgttgaacccgagctggtcatttatgtttgattgcattctgaacgagttacttgttgtctttggcccatgtaaccctgtcgtttattgattatttatctgcttctcatatcgattgtgttatgattccattttcatttgatatacattcaaagttttaatatataagtaaaaccctctttcattatgggtgagttccacatacttttccttttctgttctttgattgcaaatgaaacaatcgtccaaatctttcggttcatttaacatcttctagattctaatggttgttgaaaaattctatatgcaatgcttgaggggtatatttgggaaatggttgtcggaaaattctaatttttgcgtttgcatgctatttgttcacatgaacattaggccgccttgaaaataattatcgcctagtaggtttattagtgattttatgctcatatcacgttcatagtgtgcatgcacatgcacatgcgcatgaatacaaacacaaataggaagatgtattatacacacacacacatcaagcacacttcttttcttattccttcttctatgtttgggtggcggggagaagagggtaatatctgatttaattgtatagatttggtgatgctttgtagagctctggaaagtcttcagtgctagagagcatagt

SEQ ID NO: 74908 - DNA, 668 bp, Carica papaya
  Intron number 2 from transcript evm.TU.contig_29173.2 (loc us evm.TU.contig_29173.2) derived from phytozome v7.0 (chr -ID contig_29173; pos 8980 to 9647 reverse strand)
taaagagaaagaaccctcaacgttggaagatcttggtacaaaaagcttttttcatttgcttgataaccattctgtagttatagattttattattttgatgtagtccttaagatgaactgtgaagttgttatagtgttcagaaaaacaaagtggcaataatcaataatctttcaaaggatagtggtgtaatcattaaaaaaggtcatgaagagtgcagtacctctaataattaatcagtttcaataatgaaaatgaggttcccctctgaaaggaaagtaatgaaaatgaggtaaacaatagaatttattgaattcagatgactaaaggtgaaaaaactaatatgtgaatttgagaagaatgtagatatagaataccaagtgaacttttgtgggtttctttaaatacttcttaataactttagggttttttaatgtgatcgatgccatatggaaagatttatgtttaatttcatggagaacaacaaagatctcagaaggtgcttatgttcagtttgaagaacacttttcttatgttaatactgttgatcaactcaatcgacaaagtgttgcattacagcttcttttgtcaactctctttcaataccttttgtacattgtgatcttatttacattgaaattaaatcaacagctgtagctgcaagaggtggc

SEQ ID NO: 74909 - DNA, 932 bp, Carica papaya
  Intron number 1 from transcript evm.model.supercontig_66.1 23 (locus evm.TU.supercontig_66.123) derived from phytozom e v7.0 (chr-ID supercontig_66; pos 1190598 to 1191529 reve rse strand)
gaaggtgcgtccctgtgttgtgcggatattttatgtctttttttgcttagctttttgacttttctggattttcattttttcattgttcttttttcgaaatttgatagtatgataatttgtttctgtaacttgtaactgattcttagaatgagaaagagatgagtctctggagctagtttcaggatttgaaggcgataaatggttatttttgccgttgtttgatgttttgtttcttttctgggtttaaatctgggttggtttttctcccgatttctatgcatttttatgtttagattaaacatgataatttcattgagatgcgtattgatcttttaaagtacacaacagagaaaaatctacaaagttgtacccgttatgactttacttgtgatgagcttctttttctttggattctctgagaatatttccttcagacaactgcctttctttttggagtatgcctttatcaaatcctgcgattatgactctaggtttactatgtatttctactttccgtatgttttattgacgactggatgatactgtgaaggtggcggagagtaatcaccatttttggcattttcaaccgttccttgcaaaccgtctttaatttcctgaaaccttactgtattatgtcaactgttaaaagcgcatgttatctcatgaacattgccgtttctttagctagccatctcactactctggaacacgtgggatttacattcagcataacttgctgtaatttttaaagaaagaaaagtcagctttttttttttttaaaaaaaaattctttaactctggattgttaattggttttgaagttaatatccatcagaagataatcataatttgtcatttgcatataggttggccctgagtgtggtttcttaattttggcccctgttgtctttgattgcatattgaaacaggtg

SEQ ID NO: 74910 - DNA, 835 bp, Carica papaya
  Intron number 1 from transcript evm.model.supercontig_3.13 0 (locus evm.TU.supercontig_3.130) derived from phytozome v7.0 (chr-ID supercontig_3; pos 992663 to 993497 reverse s trand)
tcttcctcaccagcttcttgttcttcctctgatcggtgagtcctttgtctcttctcctaaacactcctcttatttagttgcttagtaatgtttgttgtttcctattcagatcccgatctttaggcttgctccacattgaggaattctttattatcattgtttttacttcattcattactgattagttagcttcattttcagttctgattcatctgcctcgcttacattgcatttctttttctcggttcctcgattttttgttattttgtagtagtcaattactcgtgtcttccaatcataggacaccttcacactggagagttgactttgcacaagtatttctttcttagatttttctaatttaccgaacttgaaggaatttttctcttagtcttactcgtcggaaatgctgcttttatttcttttttcttttttgttatctctatggtagatagtttatgggatcttgttattattgagaatttcgttaacctgttgatacttgatatccatgttatttggttctctttttttggttaagaaagaaaattatcttacgctggtactgtaagtctcacttgttttatcaggtgtcaatcctaacttgtaattaagtggcatgttaaactcagtggctcattttatacataatgtagttttgtttttcttctggattcctacatgtgtataacatgttggaatttgcaattttgggtactcattgttggatttctctgacgtgcttgtttgttggtttgtattcatatcagctctggcttttatgttaaaggattttgactgtgcctttcactttcaggggtcggctcaaatcacc

SEQ ID NO: 74911 - DNA, 954 bp, Carica papaya
  Intron number 1 from transcript evm.model.supercontig_23.2 4 (locus evm.TU.supercontig_23.24) derived from phytozome v7.0 (chr-ID supercontig_23; pos 173758 to 174711 reverse strand)
cataaggtgcgatgtccctctcgcttcttttattaaaaaagaaattagactgagttgtcttaatgaagttgaagtctgttctgggaaatgcatgtactgtagatgaggaatttgtccttgtttctgataaatattacattgggtttggaaagtagtcaaagtagattagattggttactgtattctgattgaattttctttgttatttgatttgatttgattttccttcagtaccgagtatgaagttaaaataagaaatcagaggtttaaaaaacaggggaaaatgggtaaagatagatataattcaggtggtggcttgggatctggttctgccattaaatggataaaattcgcgtatgcttatatgggaatgattttaatttaattgagaatagataaattaatttgtttctaaaaaaaggtatatttcgtgttgaacgagaatggatggtatcaacgaatgagggggactgagatatgttactcattatctccttattctgtggtctgtagctaataaagcctcatatggagaagactaccaccaaccaccacatcccttccatgccttgttgtctttgttatttgccatcaatggctctccacattagagcccaaggataattctatgcactagattgggatttatgacaacatttactttatatatgagaatcatgtaagagttactcacattggtaagtaacccggctttgacatgcaaaatagtttcaaacttctttttctttttctcatttaagaaagactgctaaaatttttgggattttcaatttctggtctgacttaccatgtagtggatatttattcttggtacgacatatatacatatatatacacacacacacacatatatatatatgttgttgcatttgtgaacgttgtggtgattacatgtcaggtgacacttgaggtgaagggagaagcccagatttt

SEQ ID NO: 74912 - DNA, 641 bp, Carica papaya
  Intron number 1 from transcript evm.model.supercontig_151. 6 (locus evm.TU.supercontig_151.6) derived from phytozome v7.0 (chr-ID supercontig_151; pos 55271 to 55911 reverse s trand)
agttaaaacctattgctgacgtggattatctacaggtgtgaaatctttttaattttgaaaatacaggcgcataactttgctttaaaaattgctattcagttgtcatgatctttttctctccgttcatttatgttgaggccgttcaaaaaaggattgtagattcccgtcctgtttattaaagtctatgccatgtctggaacacacagcaatggtggttcaagcaattgaaaattccttgagtctattttgacttttgagctgtgctctgtcctgtgcactgggaatctatttattgccccagaagattattaatataaagtctgggatccagcatcctgtaagacgcctgtacatgattgtacatgccaccatataggcgagatatttatttaatcgaattaagattgttagggaaaaatgtttgacctgtttttgatgtttgcagtatcacatgtaaattgccttcagtcagattatgctacatgatctatactttgggtccagagtcttgcaatttgtgaataatcatgattgctatcctcatacccttcataggtggcactgttccaattaacccctaattttgcctacatatgtttcgagcaggaattgttggctattcaacagcaagggcctagatc

SEQ ID NO: 74913 - DNA, 973 bp, Carica papaya
  Intron number 1 from transcript evm.model.supercontig_58.7 6 (locus evm.TU.supercontig_58.76) derived from phytozome v7.0 (chr-ID supercontig_58; pos 785300 to 786272)
ggtcgaggatcctatatcccaagaaaggtatctccagattctaattgagtagcttcttaatttctttttatttgttcttttaaataaaatgcaaagcaggtacaacagttttgctaatgagttgctgggaagttattgtaggatgcttgctgtattgattaaaataataccttgttgggattttggcctcttgtcaaagtaaaaggaaaaaaccaaaagcttaggaattctctaagtttttctgttgggtgtttatttatatgcagaactgctgctcggctctgttgatatatgtgttactgaagctatgtggattgtttgaacagtctttcatcaggcagcttaataacgtattaaactaggaataatcttgggaaacctttacaaattggttgatctgataaattatcttttggttacttggttaaggaaaatcatatgaatgtaattgctagagagagatgtcaagaaaagatgaatgttgcttttggtgtatttggacagtatgttagttctcttttagaattattaccatcagttggttcttttaaaagcatttcttgaattatatttggattcggtcaagattgactttatactagaaatgcttgaggacaagaactgcaatggacttcgatttaaaaattaataaaactgatattgtaaccaattcaacagattttcaatctactgaaatgatcaaattaaaaaaattaacagatgatattttatcacaaacatactgttaagatttcatgattgtcattttcactgtctaaattttgtctaaaatatctatggattctcttgttgaatctttatcgttatgtttaaaaagtcaaccttttcagttcagcagcaattataattaaatgaggatttcctcttatgttcagaatatttatttcctttctcgtcttcccaagattattcttttgtgagtttctcatgactttcttatgaattcagtcta

SEQ ID NO: 74914 - DNA, 799 bp, Carica papaya
  Intron number 1 from transcript evm.model.supercontig_90.1 9 (locus evm.TU.supercontig_90.19) derived from phytozome v7.0 (chr-ID supercontig_90; pos 374948 to 375746)
aggtatattttttgtttcgataattcttgattgactgctggcgttatgtggtgtattgtcaattatatgatctaaggtccagtggtcttgtgatggtttgttaaggttctcagtatagtacttgctctgtctcgctacctgagttccagcattttcttgatcatgtttgtgagattgttaggatactcttcttttcaagtatctttcatgagatttatcaaggtcccaatttcaagaacacaacataaataacacaactttgatatggagtgctactttatttttattatttttattttgttctatttgaggaagctaatacctgtttcttaggcaactaggaattataaatttttgtctaagaaattcaaggcagtgatggaaatagttcaaatatgaagtgatgattcacttctatacattgagactagtttagtacttaattaaaagtccaagataggatgagaattggatacgaattggattaaatggctattctataatttgccaaggacattaatcaatatatatgtggtttgggaaactttcttattagtagtaatggtggactaagtacacattcctacttgtatattgacaggtctttcaaaattctcttttatcttttggttttcagtgccaaaaagtttcaggaaaagatcaatgtggaacacattgtttcgaattagtatttgagaactagtcttttgtctgcatgccattgctagtgaggcaggaattatatactgttcttggattttagattttctcatctactaaattgttgcagttgcttgca

SEQ ID NO: 74915 - DNA, 912 bp, Carica papaya
  Intron number 2 from transcript evm.model.supercontig_9.28 5 (locus evm.TU.supercontig_9.285) derived from phytozome v7.0 (chr-ID supercontig_9; pos 1969306 to 1970217 reverse strand)
ctggagaactgcctatagtaaatatactcagtgaggtatgttcaaattacttggcaaaaaatagtattaatttcttgtctgattatttttactggtgtgagtcagatttaggcactgcagaactcttcttgtggatcttactttattacttatgcccataggatggttggaaaataaaataacaaagatagtaataacggaatttgacttaattcccagcatttgttgttacagcatgttattcaatttagagggaggaaaagctgaagaccttgttcccctacaatagaaggacagtattaagacatagaaaaatgattttgtcttacagatataccttgatttgctattaatggatgtgctattacattattattaatagcttcataggaatctgaattgacttgtaatattcatccagtaagatttgaatcagtccatgagaatgacataccatgttatataaaataatttttcaaaagaataatatgtatgttaggtacgtacagattccaatgggttgagctattttaacatttctctaaaatttctttctgctacttttctttcctgttatagatgctcggggtcaggtaggtggaaagctacacgtccatgtacccctctctttttacagatcccttttagtctccaagatacgaggttggcattaaaaaaactagtgaattttttagtgaagtggctttttttttgttttggagtaacatatggtgttcttgtttgcacatgtctcgactattccaagaagtgatatcttgcatgacacgatagctatacttagttgtatacaaagattgtgtccaaagcttgaaatacatgggaacagttgttgtgaggatttgtttttggattctatgcaggaagagaaggataagaaaatacaggaattat

SEQ ID NO: 74916 - DNA, 531 bp, Carica papaya
  Intron number 1 from transcript evm.model.supercontig_57.6 6 (locus evm.TU.supercontig_57.66) derived from phytozome v7.0 (chr-ID supercontig_57; pos 1008931 to 1009461)
cctcgccgagaagcccaatctcatcgttttcaccggtaccctttcttgttttctttaacttttttctttattgatggattggagattactgtttcagttttcagtcttcagctttgattaaacacttgtgttttcttgcttggctctgctttaggaacattcgatctttttaccgttacgttagaaaaaatttgtgtcccagttttacagcatatggtttcttttttcttgggctatgtgtgggagaagttgagagggaaaggggcccatgattctgatatcatattattcaactttagattttgattcttctaatttttttgtttgaatactaaatgttaacccgtgattcttacatgtgataaccagcacccgtgatttataacaatccaatcagtttctggattaaggaataatcacttgagactacagcttcaagctttaactgctcttgttaaaaccccttttaaagaattaaaatatggtagaatccaagcttatatgggtgtttatttacaggggataatatat

SEQ ID NO: 74917 - DNA, 671 bp, Carica papaya
  Intron number 1 from transcript evm.model.supercontig_18.9 6 (locus evm.TU.supercontig_18.96) derived from phytozome v7.0 (chr-ID supercontig_18; pos 725768 to 726438)
gtgtcatctctctcaagctccaaggtgagtttccccttttttcttaatgagttgatttgttgattttttagtataatcagctgtttttgtcacacacactgaatgtgtaaccactgaggtggatcagattactatttcgaggtgcaatttgttttgtgcttaaaatttggaagttctggattgactgatgaaattcagtgagaatatgatagatggagatgagtatgttttaaagggagaataaaatattccagttgaaaggaacagaaagaaaaggaaaatgaggggatagaaattagaatctacaaggaataggatatctttgtggatttgaaatagccctgattcaagaatgaaaacaagaaattctaatttcagttgaattttaagtagaattaaatctatatatttcaaattatattatagctcatggaattgggaaagaaattagaatgttttgatagaaaagttcgctcttttattatttggtccatacctttacaaaagtatttatgctaatttaaatataaatgacttcacaaactaaaatttccaaataaattatataaaaataggttaacttgaatatactattagtctttagatacatgttcttccatgtatctatgcctacgtctatgtatattttatgatgacatattgcagcgcat

SEQ ID NO: 74918 - DNA, 864 bp, Carica papaya
  Intron number 2 from transcript evm.model.supercontig_25.5 5 (locus evm.TU.supercontig_25.55) derived from phytozome v7.0 (chr-ID supercontig_25; pos 722016 to 722879 reverse strand)
aactacagcacaagtaagtttgaataatgtctcttacactttcttggctgtaagctttttgtttattcttatgggtttattcaacataaattaatagattatcattttggtccgtttttaatggaagaagcaaaaaactcttatttcaggaagaacagaaacatttatattgcctttcctaactgtttggtgttaagcattttagtagttacaacttttccctatttagtgagaatccagcacctttacaactgtactccgcatattagctgtcatttgatgtatagttctatattgttaagaaagaaagggaggaggatagtgctgattggttaagatcgaaatggaattaagtagcacttagttatatagaaaagtagagcgatactatgccaatatatcttgtatcagaaagcaaaagagtcaggaactaatgatcagcagaagtattttaggacctaaaatgtttttatttttgtgtcaccatgaacttgtgttttctattcctttatttacttgcactaaaaagagatgttttcgtctttttctgtaaattttatctataaagtattgtgaatatcatcctagggagcctgtttcgttaacatctacatatcttatgcattttgccaaaggctctgctcacatttaataagttctaaagtaatgtgaaacttttccatggagcaactcatgctcaatttgtcattaatacaatctagcatatatcttcagttgaggtcaacacttttacgtgtaactttttttactgaacaatcttcaagcattaattcctcttctcattaattgatcttaaattcttcattaggtctgagatcatcaaacgtagattcacaataacaa

SEQ ID NO: 74919 - DNA, 741 bp, Carica papaya
  Intron number 2 from transcript evm.model.supercontig_142. 18 (locus evm.TU.supercontig_142.18) derived from phytozom e v7.0 (chr-ID supercontig_142; pos 190038 to 190778)
tgcaacatcagtttgtggagaagaagtaagtgcctagtttgttgtgttgtcttggttctatttattctctctggtcatttataaacttttttgagaagtattagaaagctggagaacttttaaaaaggtcttttacgagaaactatgagtttccaagaatctacatcagatttaagggtttaagtaatttcacatgggaaggaggccaagtcacattgctaagtgttatttttaacgattgtcttaaagttaagtagtagttattgaatctgtgagtttacctttgagatttatgtgatcaatttgctattcaaaaacgctagtctgttgagaataagatatgcagagagagatattcttcagtaatttaattgggttctttcttgatgagcccaagcacttaatctgaattggtcatgaaggagggaaaaaacagagacattctggtttttcttatctgatttttagtttacaatcacctaaaactacatctggggctttggaacatatcagatgttttcttgcaaaaatggcaggtgtgctgaatcatatgccaagtcatacttagatctgttatgtgcctacagtgggaattgagaatcaaaagtattgcagaaaatgtgaagtttatggcattttttccatttcctggatgcgcagagtgcaaaaaatgttggttttgcatatgttctgattcttgtattttgttatgctctgtagatttgctactttactccatca

SEQ ID NO: 74920 - DNA, 762 bp, Carica papaya
  Intron number 1 from transcript evm.model.supercontig_1688 .1 (locus evm.TU.supercontig_1688.1) derived from phytozom e v7.0 (chr-ID supercontig_1688; pos 2608 to 3369 reverse strand)
atactcttgtggtacggttttgtttctgttcgtcttccaatcgtattttttgttttctatttgtttcagtggtttgcacgttataatgttttgtgtgaactgtttcattgatccttccattattttgtgtttggaagtgataatttagttccggagtgaacattttagggtttcaaaaatttggttattggtggttactattctaggcaagccgtgcggtaaattggttttatcgtttttctggtcctcttgttcagattgtagttccttttaggtttttagtaagctttgtggcatgagatagtatctgaacctggacttgacagcatgatccttctgtgatattggattgcagagattgttgatatatggttgttttggccctagtttggaaagtatctagagctagtttatatgcttttctggggccaatttatctctttttgaagggaaatgtattaatatgttttttgaagctatttgtcctggtctttgtacgtgtttgctttctttgttatttccattgtatgctactaagatacaatttgctttctgacttgaagtaacttagcaagcaaggacagggttctgaacatttgggttaaactgccacttaatgtagtgtttagtattttcatgtcatacaatcctagatagatgttctgttcaaaagtttttaacatgtttagagcatctcaaataagaataagatttaaagctaagaatttcccaatgttttttttggtgtcttttggcaggaat

SEQ ID NO: 74921 - DNA, 370 bp, Carica papaya
  Intron number 1 from transcript evm.model.supercontig_232. 5 (locus evm.TU.supercontig_232.5) derived from phytozome v7.0 (chr-ID supercontig_232; pos 124706 to 125075 reverse strand)
attgacctcttccacaactccatcccttctttcaagtcagtttctcttttattctcccttttccttcttcgctttgtgtttatgctcttctttatgtattttcttccatttttttttattatttttcggttaatgggccttagaatttattcatttctttcagagtttgtttttcattcttttgattttgacttgtcgtcctgtatatcagttgagcttttcagttttagggatacatatatttaaatcttgtattagggaacttcatttaggtacaacgctcacagagaagaagatgatttgctgaaaggcatttattatttgtttgacgagctacttgtactttgttgaaggaaacgtgcagagagcg

SEQ ID NO: 74922 - DNA, 512 bp, Carica papaya
  Intron number 2 from transcript evm.TU.contig_42295.1 (loc us evm.TU.contig_42295) derived from phytozome v7.0 (chr-I D contig_42295; pos 111 to 622 reverse strand)
tcgtggcaggctcatttgacggttgggccacccaggttattccctttgctaatcagtactattatcacatacacagaaacaaaccatgagttagagggaagaataaataagattcctttggccttcctggagtactttggtctggtgcaatcatcataatgcttttcgcttatctgtggaacttaccagtagttttagacatgctcacattaataatttggcacatgcatttggtgttagctgtttgctagatatttatatatttaaagcaatatgctattttcaaagatatatattacaacttcatctgcaatcatattaagttcactcaaaagcaaatacccaaggcagacatcaccttttttaaagaaggaatgtatgacaaatactaaatgaacagtcagggtaggttctgcaggcggtctgcttagctttttaagggaaggccttgtttgttcctttgagatatctgcttaaattaaattttaccttgtgatgcttctcagagaaag

SEQ ID NO: 74923 - DNA, 420 bp, Carica papaya
  Intron number 3 from transcript evm.model.supercontig_847. 1 (locus evm.TU.supercontig_847.1) derived from phytozome v7.0 (chr-ID supercontig_847; pos 3734 to 4153 reverse str and)
gtgaggctgctaggaaaagcagactgaggaaaaaggtatttcggttttttcttctatttatttttagactcttcatttcctctatttgcctccgttattagtaggatttgaatgttttcgtggaattcaaacgttgttggtaatattgtaattaacggggggttaccttgtgtaacttttcacttgattttagtagaatcgctggatgataatacaaacccggttaaagctaaacctgactagttcctataggtttattttcaataaatatctttctagaaagatggttgtggaaggatttgatcttcttccttgtgcttcctttatgtgaactattgctacactaatttgtatggcacatttcacatggatatgtttcctttttatctaattagttcttttcatacttgttgtaggcat

SEQ ID NO: 74924 - DNA, 437 bp, Carica papaya
  Intron number 1 from transcript evm.model.supercontig_70.9 6 (locus evm.TU.supercontig_70.96) derived from phytozome v7.0 (chr-ID supercontig_70; pos 688838 to 689274)
cgctccagattctcctgtcctcctctttttgcccggttggttattgatttgttttatgtgcaattattagttcttgtttaaatttaaaaagggaaatcaatggttaaaagaattttttgaacaaactatttcttcaaaagctagctgaaatgtactttttggagcgtaggaaatgcaataatgagctttttgattaaaaaaaaaactctaatcaactagtataatgatatttaaccttcaagtccccttcaacaaaaatgaatatgaaaatacttgcaaattgaaaatggaggaaccttgtctttattacaatccaaaagtaatgtaacagagtgttcttttctgtggcaaacaaaaacaactaattgggtctcattagatctatttgaatttccctttccagtttattggtaacagatgaaattttgcagggattg

SEQ ID NO: 74925 - DNA, 237 bp, Carica papaya
  Intron number 1 from transcript evm.model.supercontig_35.1 0 (locus evm.TU.supercontig_35.10) derived from phytozome v7.0 (chr-ID supercontig_35; pos 285683 to 285919 reverse strand)
gcaatcaccttgagaagtgagaagtagttggcatatacaataatggatgaaggaatcaaagagaaaaaattaaaaaagagaaggtggagcaagaaaatgagaggaagaaagtaatgctcaagccctatgtgccacccattccatttccataatgcctaaaaaagcataatgaagataagaatttccttaaattttttgatatatttaaaaaacttcacattaatattctttttgtag

SEQ ID NO: 74926 - DNA, 654 bp, Carica papaya
  Intron number 1 from transcript evm.model.supercontig_41.4 4 (locus evm.TU.supercontig_41.44) derived from phytozome v7.0 (chr-ID supercontig_41; pos 1031516 to 1032169 revers e strand)
atcctaggagaaaagaacaaagtatgaaatgagatccaatctaaaacagaacccctacgttcaacgtggaattattctggggttgactctgaactatttttaagactgcaagtccatcgtagactcaatctttctcccaaaattgttagctgatggtgcttttaaggtttttaaggcttcaaatgtacactacagtctccatagcacttccaatgtcagatgcaggatgctatacaaattcaagctctaaacctaagattgaccaggaaaccaaatataaacttatgaagatgataacttcttctgagttcaactctaatctgcttaccatgtgaactaaaatttccctttcttttaaattttgaaattatgtttgtatataatatcagtgcaatgcatcttatcgttttctccattcagttttattattttgatacaaaactactaaaaaggattaattggattttcttttatcaatattttattaggatctgttaaaatttaaaatagaaatgtatttacttttccattgatctctgctgaatttgattaatattattctataatttagattttgctattactggttatgcattctgctgattagatcaatttgcagataatatcaaagcagtatcgagaaactcattgcca

SEQ ID NO: 74927 - DNA, 735 bp, Carica papaya
  Intron number 1 from transcript evm.model.supercontig_62.4 3 (locus evm.TU.supercontig_62.43) derived from phytozome v7.0 (chr-ID supercontig_62; pos 325938 to 326672)
tctgtgttgattcacggtacgaacttaatctgttttcctggctttgtttgatcgttgatccacagagtattcaaatggatgtaggttgtgatttgttggtactagaatgctggttttgcttgtcaaagttttcataaatagaaattggagaaagaaaattatgagggaaaattgaacttgtttgtgtttgttagggaaacaagtactcatattttacaagtctttggaactgttaagtttaacaaattagtttatttagccgaattgatgggacttaaaatagaaaagaagaggaaaaattgtcagtaacttaggtcttttcccttcaatttcccaccaattctcagttgagtctcgtagtggtttcaatctgcataattagaatataattattttattatgagttactgccacctctacattggacttcaattccaacctttcagtgtggaaactgaatttctcctatcaaagaattcaaagtggagttctggtaattcaaacaaccaattatgttataattctactgtaatgggactaatatgcttattagagctacaacttgtcctatgaattaaatggaagatgaaccaaaaataaagttagtactcgtaagttagaaaatgatggagtagaagcatgtcaaaataataggaaatggattggctcggtgacgagccaaagaaattattatgttgggtctgtgaatgatttatatgtcgttgtcatttacag

SEQ ID NO: 74928 - DNA, 483 bp, Carica papaya
  Intron number 1 from transcript evm.model.supercontig_8.30 8 (locus evm.TU.supercontig_8.308) derived from phytozome v7.0 (chr-ID supercontig_8; pos 2415856 to 2416338 reverse strand)
ctaatcgcaaatctcttctctctagacctctccaggtacacactctctctctcgcgcgcgcgcgcgcgttctcgtttcgttaacatttcactttttgtcgcgtcgattgtgcatgtatatgtaaatttatatgtatatcaaagctagaagagattcaatacgtgtgctttcatatatatataatatgcaattgattattttagatagccttggtttttgaagggcttttttctttcttttttaaactttttgaattttaatgtttttaagcttgtagcttttaaaacgtgacattcaattcatttttctgatagttgctaagccatttaacggatttttatgtgtactcttgaaaatataagtccagaattgtgaattttaagttcatgtccacttcttcctcgtttctctttgaatactaaattttttgcttactgtaagtttgaaatttttagagttccctgaatttctgcattgataaga

SEQ ID NO: 74929 - DNA, 765 bp, Carica papaya
  Intron number 1 from transcript evm.TU.contig_42989.1 (loc us evm.TU.contig_42989) derived from phytozome v7.0 (chr-I D contig_42989; pos 617 to 1381)
catcttaactttagaaaaattggtaaggaggagataaatttcagggaacggacatactctgatgctgtatattttcttgtggtgtctgtttgtgcattgcctttggagtttggctaatgggttgttgggtttaaattgagttattgctggatctgttaaagaggagtgattgtttaaagaggcattcaaggggataagagagtcagacttatcccccttggctatcttttgggtcacgtggaaggacagacatagaagtgtttttgagggttccaaatagaatcttattaactttaagatacatggttccatgccccaagctttttgaccaagagtcgtgctttattctagcgaagatcttaggttctctatagatattttgatttatttgtaaatttttatatatgggttgtacctattttggtgctcttaaatataatcaatattaccctaaataaacaaacaaatatatattgtaattcattatatttcattttaatccccatatagactttaatatcctcatctcattgcctcctttaacttaaacgtcttatgaagtcactgtgatccacttgaaagaatttcttttacttttttaattctttcgtggcatctgtttgtagtgcattataaaacaaatgtttcttcaaggagggaaatttctttttaagcactggggaggtggacgttaacttatacgtctttttccttttttactttacttgctgaagtccactttctttcctcttcaggaatcggaga

SEQ ID NO: 74930 - DNA, 624 bp, Carica papaya
  Intron number 2 from transcript evm.model.supercontig_235. 21 (locus evm.TU.supercontig_235.21) derived from phytozom e v7.0 (chr-ID supercontig_235; pos 222786 to 223409)
gaaggaaggtggagcaggcttggttaagtgtctaaatctgggaactacatggactacttgcgatgaacacttctttcctgaagagttagtttccaacttgaaccttgaggaaaatgtttagctgaaggggaaggaattgttaggatttcacggggagaataatttgaatttggaggattctgtttattttcctttttttcttgttttgttaccattaattgcagccttttctagtacattccatatggccagttggggtatgaattagttatcatggcaactacggtaccatgctcctatatattctgtaatctttcacagaagctatctacgaaaagaatttacacaatcattcgctacaaattctctattctactctctctctctctctctctctctctcttctctatcctttctgctgtcattctctactttattccttcttattctattatccagactgtcagtggtctgacagatatgtgagatgtgttataggaatgttgagacctatgataatctcttcctgtattttgagatgacttggagaatcttgtgccttgtttgggatacttttggtattccttaggtttcacctctgaaggtggaggtttcctctcttcg

SEQ ID NO: 74931 - DNA, 768 bp, Carica papaya
  Intron number 3 from transcript evm.model.supercontig_2399 .1 (locus evm.TU.supercontig_2399.1) derived from phytozom e v7.0 (chr-ID supercontig_2399; pos 3829 to 4596 reverse strand)
cacatattcaccggtcatactggtaaaaattccatgtattttctacgtatttctatggccgggttatttgtttttgtatttatacacacacacaaaaacatgatgaaatcaaaatgatggttatggaataattgaggagtccggtatagcttcagaagaagtttattgaatatcaatgttttgcacatttgcttttagataatagtgtaggccgacccaaacagaatctgaagtagcatgagcagaaattgtatgcgatcttgaaccttttactttccgttttgtatttacttgttggcaaggactacaaccttagtaggagactaagaatgcatttatgttcaatttctttttgttcttcctttgtatttgtaccgactaggaaatatttgtttaagtaaaaagtatagtattgaaaaacaccaaagggatgcaacccatataaaaaagctttacaagttcattattagccaagtctcttcaaaacaaaaacttagagtttggaactatatatccttgattcttttgaaaaacattatgccctcaaaaagctctttcgtttctatccttctataaaacccataatgtagccaagggtaccaactatgaaacattagaaggaaatgaatcattagtaaaggtcccagccccagtaattttcagaaattgatgtgcttgccatgattttggggcaaggcatgtgtttgttgctgaaaagtttatgatgttacaggtgaactttacgcagttgcttgtagcccaacagat

SEQ ID NO: 74932 - DNA, 452 bp, Carica papaya
  Intron number 4 from transcript evm.model.supercontig_9.33 1 (locus evm.TU.supercontig_9.331) derived from phytozome v7.0 (chr-ID supercontig_9; pos 2350627 to 2351078 reverse strand)
gttttgaagtgagatattttttctgatatcatgacaaactgaaaaatctcgatatgactgtaaattaacatgttattaatgttaagtttgaactttaattatattttcttggatgtttctcttgtatgcttctgctatgctgtcgtcatgtactcttttgttcggcactaattttaacaaaaatcgatactcaacattttgttgcgtgtattttaaatgaccttttagttgcttttgagtggttgctcatctaccatttttcatgtttgtctaggtagttttgtatattattctactgagagccagaccttatgtaccttgtctcttctgtcgaaggcaacttctactgatgttgattttgtattatttaatataacaagtttcaagtgtttctaaaccgttttccttcttctccaggaaacctttgaattccttaatattttacaagttca

SEQ ID NO: 74933 - DNA, 841 bp, Carica papaya
  Intron number 1 from transcript evm.model.supercontig_157. 9 (locus evm.TU.supercontig_157.9) derived from phytozome v7.0 (chr-ID supercontig_157; pos 132191 to 133031)
ggaggcaagaagaaggcgtggaggaagaagagaaagtaatcacgcctttctttctcatatggatctacgtttgttcgttttttctatgttttcttgagtctgttgtttggttggtaagaaaaggggagaaggaaaggaaaattttgatgtattcatcctccatcctgctctttttcagacttcaattttcactcccgagttacttgcttatccacctctctgcttggtctagtagcaaatgttagtaagtattcctaatattctccttcaaattaataatctaaaatagataatgtcgtaataatcgttgttaacgtttagatttttctcaattgcatctactaccgtcactagcctctaacaaatcaatggactctacaaggagtactgttataatagacgtcaaaatttaggttttttcctgtgccactactgtgactggactcgaaggattgaatcgcttaaaagtaaaaccttagtggtgatcccaaattctctctgaatccaatactttagaaattatgccaaatttcaaatttgaactagctattgcctaacctttttttcgcttttgatgaggaattatctgagattcagattatcagggcaatcagaaacctagtccttatcaagactggtatagatcaacaaatagaaactttgtttctggtacttcgcaaattgataaattgttgcaaaatctgcaggcctggagccagtcttgtttaattactggagtttctcctatcagtattggagctttgttttcttcttttttttttttttttttgaaaaggtattggagctttgcttaatatttagttctttgatggtttcaggt

SEQ ID NO: 74934 - DNA, 514 bp, Carica papaya
  Intron number 3 from transcript evm.model.supercontig_242. 3 (locus evm.TU.supercontig_242.3) derived from phytozome v7.0 (chr-ID supercontig_242; pos 17204 to 17717)
ggtatttataggtactattactaatactactactacaaatgctactactactactacaaatgctactactactactactactactactactactactgttacttctattgctgctactactgttgctactattgctattactactgttgctactactactactattgttgcattattaaccatcttatatttttttaaactttcttttcttgaattaattaattaatttaaatgaggaaaaaaagtttagttgtcatattaattcaattgaaaaagattttgaatgtaaaaatcaacctataaatggcaaaatgatcaataagcttgatttgttttgttagaaaaatatgaaaagataggctagctgaatataataatctattgaaatatgagaggaagaagtaagaggactaattgagaaactcaagttttgatttatggttgatactaaagacattcaagtatatcagtatttataggtactagtactagtgttagtattagtactgctact

SEQ ID NO: 74935 - DNA, 683 bp, Carica papaya
  Intron number 1 from transcript evm.model.supercontig_2.10 6 (locus evm.TU.supercontig_2.106) derived from phytozome v7.0 (chr-ID supercontig_2; pos 1724222 to 1724904)
aacagtacaaattggaggaaggccttgagaagtaggtgctctcttatcatttgtgtatagttcaccctatggtttatctaaacgtggttcccgttatggttatttgtgcatgatatatgcatgtagactgtagaagtgctctgattgtataacgataagcagatacagagaccgaacttttgttatttaaaatattaaattttacctctttttaactagtggttttagattgaattctcctcggggaactatggtacttaaccgtaggatattcatttttgatgcatcaccatatgaactttgtttcattatgtggttaatcttggaaatcttcctttggtcacatgtggtttttcaatatgcttcttgattgtatttttgggtccaaacagacttgttttgacttgtgaggaccactttgtgctctgctttgtgattaattagtccagtcccttgcacaagtagaaacaatttacatagcttcaattatcacttagaatcagagaatctttgacaaactgactgttgttatttgcctcatcttgtaattttgatccttctttatgatacagcatgaaatccttgtaaattgtttggttatcgtaaattccacttgtcttatctgtgatttaaatattgaagcttcaatttctattcttttttataattaaacagatttaaag

SEQ ID NO: 74936 - DNA, 991 bp, Carica papaya
  Intron number 2 from transcript evm.model.supercontig_48.7 9 (locus evm.TU.supercontig_48.79) derived from phytozome v7.0 (chr-ID supercontig_48; pos 482025 to 483015)
tgtaccagatcaactggttaaacaaccatctcgaggtatgattgcactaaactgatctttgtttattgctttaatgcttggttaccctgccgcagccagctatgatttgctttttattcaaaccttaaacattattaaatatctcagggagataaaattttctggattttcagtaaagggtcaatgcacaaccacagatatcttaaaagaaaagatctcatcattactgctttttcctttatctccatggaatttgggtaactgttgcttagtactgtaggattaaggtttaaaggctcaccagatctggactggttcttgcttatgagcacatataggaaattagaattcttaagagtagcatctaattgacatatagataattgaattgaagcaactctgcgcttaagtgatgctagtaattcttttttgtcattttctgactttaatgctgaagtgttgcgtgaagatatttagtgattacctctataaccaagcaatatcagtcattattttctaacattttatatgactctttacttaaatgttgcatgaaggtatctagtgattgtctggcaatctttatgccattatgttgttgatctttgctatatattctcaattttacattttcagaagacatgttggatgagatctttgcatttaagaacccctctgattgtgacatttatcaattatctggagcagacatatccgttaaggcattgaataaagttatatgatcttactcttgataggctacaagtggttttttcgatttttgttttctttgtttcaaatgtaaaatatctagttgatgccatcttattgtcttcatttgagtcttataagattacactgatagatgaaggcccatttattagtttaatgacaagtagatttctaaaaagtgatgcttccatcttatgttctaatgggtttatcaccttctgcagctcctttgagtggtccactcgtcattgcagaagct

SEQ ID NO: 74937 - DNA, 1028 bp, Carica papaya
  Intron number 3 from transcript evm.model.supercontig_73.5 4 (locus evm.TU.supercontig_73.54) derived from phytozome v7.0 (chr-ID supercontig_73; pos 795065 to 796092 reverse strand)
ctcctcacaagtgcaaccacccttaccggattgttagttcccaaattcgctatcattcattttcttaattaactttgcatttcaagtggtggcatgaatgatttcaagcagttgtatcacgggtgtgctaaatcttaattcatcagttattttcctcttccaaatttcaaaaagcgaacattggtttctggatgttcctagtatagtttcttcgtccatttcaacaattgaagtatttttttaaaacttgttagaaatatatttttcagtttaatttagaattcatcccaatggaatttgaaattagtctctagttccacttaaaattcattacagttgaattttcatcttttttggagtcaaatttttgtatctcatgattgaactaaatacagctattatgaactaagtgtatatttccaaatgaattctatattactcttaagttcaactgtaccatgtcacattgtgggtgttattactctcttcagcggagatggtgaaggggggtgggtgctggggactaataaataacatagaatttttgttccaagaaaaccaaataagcctagcagaaaagtcaaatgctatccaggctacagaacaaagaaaagtacgagctgataaattaatttgtttctatgcaagtgtttcaaaccttcacgaacagaaaccttatatttgaatgtcgaaatgatattggaaacaaaagataatcttcgtatgagtgtgttccaaacctacacaaatggaaaacttatagtcaaacacagatgaaattggaaacaaaagctaatctgcataacagaaatgaagatgctattccttctattcaaatctggataacaaaaattaaaatataaaaaatatatgtacttttacttccgctggtacatctttaggccaacttttagatggaattgtggaaaaaagttcttagaaatttgtgcttgtcatgcttataaattttctctgacattttctttacaacaggataatttatcttttccgctcatttgtccagactg

SEQ ID NO: 74938 - DNA, 692 bp, Carica papaya
  Intron number 1 from transcript evm.TU.contig_43582.1 (loc us evm.TU.contig_43582) derived from phytozome v7.0 (chr-I D contig_43582; pos 231 to 922)
cactctatacctgtaagtattttcatctatgatgtgtgagtgtccagtccatgaacaaatttctttcttggcatagaaagcaggcttgcttaactgaaatttggcattgtgttaactacaacagtaaacacgtttagatagactatctacactcacagagatatgcgtgtctgttggcttagataggctggagatttatattcattattgctttcttgggagttaagctcctgacctcagtccctgatactgaggtaaacccttttttgttcctctttggaggtttcatggtgttacttttttggtagacataattaacaggattcttacctgcataggcaatgatgcacaaggtgaaaactgaactctctttacaagagtgaaggaggataccttttcgccatcgatctagcttgattctcaacttgtttgttacttaataaaaaattggtcatcattgtgtgtcttggaagttttgtgttaatgtctgctagtaatattttgaattcatatagggtcatttaaaatttaaggtagctaaactgtattgttaatggtttgtaagagttggccgttttcccctacccctttttcctcttccaaaggcttttgcatattcttttacgttctggaggtctagataagggatatacatttcatatttaactctgatttcagacttattgtttctc

SEQ ID NO: 74939 - DNA, 1013 bp, Carica papaya
  Intron number 1 from transcript evm.model.supercontig_306. 4 (locus evm.TU.supercontig_306.4) derived from phytozome v7.0 (chr-ID supercontig_306; pos 14531 to 15543)
ccagtctccgctccgctctcacttactccatcggtgtaagccgtatttaaatttaacctgtacctagtttcttcgattttgtttttgtttaattgcgttttgcgagggtgtgaagtgaagtaatttgaaagactcgtgggagttttccatttgggtatatgaaaaattttcacttttatgggtgatttgtagctaagaaagtggttaaacttgtgttatccgatggagagtcagtttatttgagagacataatgaagttttccgtttgggttattaaaattgcacttttctgtgtaaattttagcaaaaaattgtgaacctgtgatggagaatcagtttatttgagagactccttggagttttttcgatttagggtttctcaacattgtcactttttttctatgtagatattggctaagactttatttgaaagactcataggaatttttcacaaaactgtcacttctctgtgtaattattagctgagaaagtcttgtgtaatatgatggagaattagtttgtttgagagactcattggagttttccatttgggttcctcaaaattatcacctttctgtgaaaagttttacctgagaaatagtaggcttcttttctttttcattaatcaaataactagagcgacaaagagttgttttttttacctaattagatcaaaaaagaagcagcaattactagtttacttgagcacacttacttgcaagcagaccaatttgtctctgttatgtctatgaaaaatatttgggactctctaacttgataagaattttaagtggaagaagcctaggtgttagtacaacccagaaaaggcagaaaatgaatgaagaattttgtgggttgataaaaatgtgggcttctgtaattgtttaattccatgttaaatcaactgggtatatccattgtttccttagttttctgcttcatgttatgaattatttgagcttatttgtgatcttataggtattggcgttaaggaggcctctcctccataaagt

SEQ ID NO: 74940 - DNA, 937 bp, Carica papaya
  Intron number 1 from transcript evm.model.supercontig_151. 8 (locus evm.TU.supercontig_151.8) derived from phytozome v7.0 (chr-ID supercontig_151; pos 73646 to 74582 reverse s trand)
atcttgtcgctcagaagattctgaatcaggtcagtttccagagttcacaatctttattctatttttttctcttgtatttattataaattagaaaatgctttctgatagctgaaaataatatttgtgccacgggctgaaattggtggttaaaatatgaggatgagcataacgtgtaatcttgaaatttgtgttggactgtctggaaaaatgtttaactgatgataatgcgaacggatgtatgtcaatgcataataagacaagggaagagacaaaatcatttatgagacggagaagctggccccaattaggattagagaactgggggaagaatacaactagtaatggactccagttgggcgggaaactcatagtgaaaaaaacaccaaaattaattgagtgcttagcttactaggctgcagaactttacatctattgaaatcgtgctctgaagcacagtggacattaacaatttatctgtgatgccctttgttgccacaagtgaatatgttatttatatcgatacaagtttggatttgagtccctttggttctagtgattgtggaattatgttggctccgcatggttacaatagcttgccatgtgaaactgatatattgttttgttgcttcggaacacttttaatatggtgtgtgcttgatgtttataaacctgctgagagtgggaagtagagaattgatttgagacagtattttggcctttaaaaggggtctttcctaggtcaatatttgatattattctccaggatggggatgatgagctttctctttagttttttttaattaatacatttaatgatcattgttgggcttatgaatagtatttggttctatttttggatgatttgttcttgcttttgaaatttctgtcaaagtgattttcaggttgaatattattttagcgatctaaacttggccac

SEQ ID NO: 74941 - DNA, 368 bp, Carica papaya
  Intron number 1 from transcript evm.model.supercontig_3.29 3 (locus evm.TU.supercontig_3.293) derived from phytozome v7.0 (chr-ID supercontig_3; pos 2059409 to 2059776)
tcctctttacgtcttcgatcaccgcattctctctcgtgagcactatattcatttttcaatcttcttttccaattagcaatttgatgcttttttaatttttggctgattattgagttctttttcctggtttcatttgaaagttgagtttcttgtttgtttcactatatgagtagagctcattgtggaatcaaagtccattaaacttgaatatgagcgcttttcatgtagaaagcatttatcgaatcaagcacacattatgtgactttctgttacaatgaagagtagacccgatgtcgtacagagaaaatgtgctttttcgacatgtatttgtttgctgattttggcaataatgcatgtaggttactctg

SEQ ID NO: 74942 - DNA, 395 bp, Carica papaya
  Intron number 4 from transcript evm.model.supercontig_54.3 1 (locus evm.TU.supercontig_54.31) derived from phytozome v7.0 (chr-ID supercontig_54; pos 777145 to 777539)
gaaattagcaatctcagaacccatttccacaaaatgttagtaacccattcaattaattcttagctcttttcttacatatatcaaaacatctattgtttttttattttctaaatctatatatatttttttttttcactaaggaatacaaattgggagaataatgataaaaataatggtatagccataaaattttcaaatgttattatatatatgtcctttttagaaaattaatttgttgttgctttggttattttataaatatgcaatttttactacctccaccttcaaatgtatataaatttagaaataaaaaattataagatgttttatgtattgaatagagctttttagttcttctgaatttctcatgattttatttcttgatatgcatgtag

SEQ ID NO: 74943 - DNA, 706 bp, Carica papaya
  Intron number 1 from transcript evm.model.supercontig_62.3 3 (locus evm.TU.supercontig_62.33) derived from phytozome v7.0 (chr-ID supercontig_62; pos 237940 to 238645)
gccgacgatctctgttttttcagcaaggtatgtttgtttcaattctatatgtcgtcctatatatatgtagctgctttatttacatggcagatgaataagattcagtcgttttatttaattatttcgggttgccatgtgaatgaatattctgatctgggtagagttttatttttattttttttcgaagggggaataataaagcatttaatttttttcctgttcttttggggcttgtgttgtctgtcaatatgaaggtcgaagcatggacagatttctatttttttttaaggaagtctgggttgattgagatattcgcaagtagaataacttaatttaattgagattattgatctgtgtgtgtgtatatatatatatatatatatatatatatatatatatatatatgtatatttatgttgcttgttggaaacgttcttctcattttatacttgtttaagctaaacctgattgtttaatcagtactcatgtcttattttgtgataatttactgatttagacatctgggtctgctctttctagggtggattacattaaatcattattttttttttggaaataaaaaggtcaactacattgaatcatagcttgtttgaaccaggttattagggcttctagattattttgatatctgggtaatttatcacttgcaggattcttttatctttaagtctcctaagaagtctcc

SEQ ID NO: 74944 - DNA, 613 bp, Carica papaya
  Intron number 1 from transcript evm.model.supercontig_5.18 3 (locus evm.TU.supercontig_5.183) derived from phytozome v7.0 (chr-ID supercontig_5; pos 1589193 to 1589805 reverse strand)
tcccaagaagcaacgagctctccgcaaaaatccaagtacgcgagctaataatatcatgtccttctttagttttgtttactgcttagaacttgcagctttaagtatcttaacttttttttttttgcctgtttctatatatttgagtgcacattagttcaccaaccattacattgaagggtattttctgtcagaagtttgtgttatatgtgtcatgattagcaagttgtgttatcattatatttgtagatattaaccaagtaataaactgtatgaatttccatacaaaaagtatgcattacttccgtccatccagttatctgactgctaaaatttcacacttgttggaagaagaaaaattgtggaattatgcataagattgaaacatgttagggaaaaataattatccatcaacatcttttaagggattaatggttcatatttggtttttggaattgatgcttaatttatggggactttgaaattctgatatcaagctggatatgcttagcttctttggtacttcatatatatacacctgtatttatatattttctcttatttcattgcttctatgttgaaatttttcttctgtgcttgctttatacaagattat

SEQ ID NO: 74945 - DNA, 756 bp, Carica papaya
  Intron number 2 from transcript evm.model.supercontig_48.5 5 (locus evm.TU.supercontig_48.55) derived from phytozome v7.0 (chr-ID supercontig_48; pos 308597 to 309352 reverse strand)
attcgtcgtgtaattcaggcttacgaggtaaaaagaaaattttgttcaatacttgtgcgcttttttaacagttgaaatacaattcttatatttttactttaacatgcttgaatcctttataattggtgctgatagttacttgtttaattttttattctaatttttcgtattagtcttaagatatgtcatcaaaaatataattgagtgaatttctaaggtatctcagagtaccctgcgtcttacccaaaaagaaattatgggactcggatgtgtattagaggaggtatgatgacagaggcaccagaatctcaccatgtaattgtttaatagctgtaactattttttgatggtggaaattctcagaactagaacttaactaggaattgaatggtaaataaaccaaatgcaacatttaatagtttttgaaattattgagttgggtgatgagttattattcagattgtaacaaaattatctcaagaaacaaagaagaccttgtgcttctctgtattcaagtaacagcttggcttgttgtataaattagctcttaccaatttcttttgctcaatatctgcagagcttttgttgtcattgtctttctttcgaatgaattgttagttatgttgatattaaacaaatgtgaaatttttgttatttgttgaaaggaatttatttataaatgctaaacttgacattgttagtgagaaactgaggctaggtgactgctgtgggataataatttaatgatgcgtgcag

SEQ ID NO: 74946 - DNA, 868 bp, Carica papaya
  Intron number 1 from transcript evm.model.supercontig_224. 10 (locus evm.TU.supercontig_224.10) derived from phytozom e v7.0 (chr-ID supercontig_224; pos 90060 to 90927 reverse strand)
acttctccagcttcgtccgccagctcaacacttatgtacgtattttttattctcattccgttattatttaattaatcttcctagctgattgctaattcatcgtgaagatatcagtgtcgataattttttttttttataaaatttctggtgggtatataattaattaattagaaaaggtactaagtcatgtctaattaaccaaacttggcttgtacttcttactgtctatattaatgggtgatctatataatgaattctttttattttcattgtaatttctggtaattaaaagaagtttcatgggttgtctgtttttcttcctttttcaaatatgaaagcaaaaagaggaaaagaagaaggaagtcagaagtttcatatatatatatatatatatatatgcgtgtgtatatgtaaatatatatgtaaacagctaggtagtgttgaattggaccaagtacactcatacagacacatacacatacatatagcattaatattattcaaagtttcatggtatgaaaaggttgttgaaaattggaattgatgttcattttccaatactaatttgcaaagtgatcctcaacttggactgaagtcaatatatttaaaaccaaaactccattaaaactaatagaaccaaaaacaaagttctcgtgactcattattaatgggtaattattagttcatacataaaagagttatatatacgtatacatgtatttatgttaatttatgacattaacatccttgattctagtagcttcatttttaccttatatctacatatatgtgtatgggtgatgtaaacgttatacgtgtatatttatatatgcgtgttatagggatttcggaaagttgcaacaagaag

SEQ ID NO: 74947 - DNA, 921 bp, Carica papaya
  Intron number 2 from transcript evm.model.supercontig_1441 .1 (locus evm.TU.supercontig_1441.1) derived from phytozom e v7.0 (chr-ID supercontig_1441; pos 5852 to 6772)
ttaacaaggtaatcagtttgggatccagaatgattgtatcaataatttaggctttagagactaagaaatgagagtgcagcaccatatggtccctgttgatggatctagttacgggtttatggatatagaaatcaacaggatcttcagaatgttttttgagttttcctttctttccctatctttatcctagtttaaggactcgttaaagagaaccctatgatctcttgagtaaaaaagtactcaacacttgaatatacttcttcattcatacataatctgtcttcgagaagacaggcttcttttaacaattatggaagcagttatttctggaattaaatttcatgaactggcctaatcaagactcatcctcccatattgcaaccccatcctacaactacctacacataatacatattctacatgataataaattagactacattccactagcaattttttatgcagaatttacaatataggctcaatctaacaatgaacaaattattttggacttcctgtgaaatgctatgaacagttttcagatcttcgtggaatatcaaatggccacttcatgttatggtcaatggttgtaggttgagatcaactgttttttaatgttgtgcatatatcatatccatagctattggtcacatacaccactaattcatgacatggcttggcataggaagattgaagaatggtgttttgttctcacacagcttctttgctcagttccttaatgtatattttagagactggcattttgtactgtaacttttgacaattcatattccgtccaaagttaggagttctttttattatcatgaacttgatagataaatagtataactagatctcctgtcatacaattacctttttctcatagccggtcagaacatcgattgcttcttcgatctgata

SEQ ID NO: 74948 - DNA, 764 bp, Carica papaya
  Intron number 1 from transcript evm.model.supercontig_9.20 6 (locus evm.TU.supercontig_9.206) derived from phytozome v7.0 (chr-ID supercontig_9; pos 1387964 to 1388727)
ttaatctgggcctgtctctattctccagaggccgggtatggataatgcattattaccttgttaatacccaaattgatttcagctgctgttgtgggtctttctgagatgggtgtgttatattctggtgattctggtataatatgtactaaaggcgtttcctttttttcttttttttttacagttctgaacgtatttgagttatttcataggtaaaagttagtaatagttcgtgcattttgtgtataactaaatctgagttactagtatatttagttctacttattgttatcatgaaaagaaaatgaataacaaaaataacttagttaaattgattataggtttagttggaattagaatagtactttccttcaaatttatatttgatttatatagtatttttattatagaattgaaatttgaactaaaatcaatataataattgaatagtatccatttgtaatatgaaatgctttagaattttgagtggaagagaagagcattttctttttttcctttttgggagcttttaattgtttaagtcatgataattgcctactggtatcaaattataagccaggtacccaattcttctatggattggcttcatttgttcataaagtttgtttggagaactaaattatatcaggcctgtgtttcttttggattctacttttatatcaacgttttctatttgttgttgactgaacagttctatgaagattgcaaattgatagggttcatgaaaattgattttcaggttaaag

SEQ ID NO: 74949 - DNA, 747 bp, Carica papaya
  Intron number 1 from transcript evm.model.supercontig_176. 4 (locus evm.TU.supercontig_176.4) derived from phytozome v7.0 (chr-ID supercontig_176; pos 66228 to 66974 reverse s trand)
ggtttcaggccactgcattcacgttacccattaaggtaatcatttttctcgttctgtcattttttttttttttcactatgtcgggctgtttgttttcccgggaaagcggaggttgagaattgaaaggtatatttaaatcttgctgtgggtaaccgattgtgaatgtactgatagtttgaaagaccaacactttagagcctctgattttcagtccgtttgactttctcatttagcagcttgccttttagttgtaaggaaggtggaggacaagaagaattaatgtagtccttttcgatcttctgtacaggataatgtattttgagcactgttttcaagtccttggttgttgttgcttgagtttaagtacttcatacgttctctatctccctaatttttgtgctttttggttaggagttcaaattggtgtagtgtttttttttttcgcgagaaaatgtgatagaaaaagcaggaaaatgaactttcatgtcagcaaaaaaagacccacgtgcataagatttccttcactcacactttctttgcaacagtttttgtaggggcttgaagtttcaaaataatttgttttgtaagccgttaaggtagctctaggggtttgatgagctattgaattctcatgctctctctagaggccaaaaaatgaatgaagtttgcattgtgtaatctgtatcccaataatatttttgatgtggttcaggatttcttgaggactagagaagttggcgaatttct

SEQ ID NO: 74950 - DNA, 680 bp, Carica papaya
  Intron number 3 from transcript evm.model.supercontig_83.8 9 (locus evm.TU.supercontig_83.89) derived from phytozome v7.0 (chr-ID supercontig_83; pos 851267 to 851946 reverse strand)
gaggtacttttacacctttaggttgttttcaaatagacatcttgaataattgactaatcggttaatctgtggggaataaaccagtttaaaacaactgagtcagtaattggctaccataacgttttgtgaatttctcctttagtctttggtttgttgtttagaatattgcagaaagaaaagcagctaaaaagttttgaacttgtccttttaagttgtttttatttgaaacctgatgtatttgtgcagtcaagcaatgagggttttgttaatcaagtgagaggaaatttttattttctcttcataaaaaaggaagtcctcagggttcaagtttcaatgttcataagggttctggacaaacaaattgagcttcgttctttttctcattattatgagaactagctattaactgctttttctttagccctgttaaggagggcagtaatctttttctatctctcccttacctgtttagtttgtttgctgctgttaaggaacctgtctattcattttttattcatattttctgcattagtaaaagtcctaccattgggtatagagtgccattgctgctgttgtgttttctctgtgttcaaaattttgaacttttttattcttatctttttcttttataaattgattttgcagatattcttctttgggatattgcttcaaggttagtc

SEQ ID NO: 74951 - DNA, 975 bp, Carica papaya
  Intron number 2 from transcript evm.model.supercontig_18.1 86 (locus evm.TU.supercontig_18.186) derived from phytozom e v7.0 (chr-ID supercontig_18; pos 2009445 to 2010419 reve rse strand)
atcgatttagtaagttcaatacctgtcctatctggcatgttattgtttgcatttcatttgagtactgatattattggtgtggcacttatgcaattagcctaggaaatgtgtcactgtgtgtgatttatgcctttctttaaaaaatctgtgctaattgtattcatctcttaagtctttggctttttttgatgtaaaccacccagataacattatgtgtatgcatatatggtttgacattaaggataaattcttggttgattacattactagtgcaagcaaattataaattacgttgattacacatgcaaacacatgcttaatattgcttacatacatgctcaaactaaaggtcaattatgctaacagattaatgtaccaatgcaaatgaattagtaaataaggttgattacacactttttcttttcttttttatggtgaaagaaaaaatataattatttacaagcaacaagggagtgcaacctgtatacaaaatttacatattgagcaaaatatctgtaaggtccccaaaatactctctagaataagttgattatacatgtttcagggttggtaaaaacaaattagtaaatatgaattttcttgtattaacatgcaatgtgtcttttgtctaaaatacatgtaggcttgcagttgcttgttattctattttattctctctctattcctctcgtggctttggaatttctaggatactgaaatgctgcatatcttattttttgaaataatgaaatactgtatatctttttttttttgaaagaaaaagttagagaaatactgtatatcttaggatctatttgtctaatttatccccaaaagttttttagttagtctgcccatataaagatttgaccttgtttaatatcaacagttctatatttgatgtgtttttgaagatttcctttttttttttaactttcagtggaatcgtatcgatcactagaaaaaaacactcaa

SEQ ID NO: 74952 - DNA, 926 bp, Carica papaya
  Intron number 1 from transcript evm.model.supercontig_26.1 86 (locus evm.TU.supercontig_26.186) derived from phytozom e v7.0 (chr-ID supercontig_26; pos 1362911 to 1363836 reve rse strand)
gtcctgaacttgaaagagtttgcaaagcacttgaggtgtgtttccagtgcttgttttttcttcagttcagttcagcttagcaagattagatgcttagaacgtatatctgtaaccttgaaactgaatatctatgatatgggagaactgccataatataatcctgacattttatgaatgaagcaagtgtaacaccttaacatatcatgtttgattgtctcgattttaatctctcttcttcaactaaatcttaattgtgctatttcctatggacttatcaattttataattacttaaactttgattgacggaattgatagctcgtatttctgttacttgcatttcactgagcgatgctgtccttccaagaagatacatgccataagaaagaaacagccggaggcaataccttagaattgctacaatacgatagatgattttatgatgcatccttgttgaattagaaagtatatatttgcaaatcttaaataatatgacgggtgattttacttagaaaacataggaattctgatactgaaattttgcaacaaaaaatgatattagtcattattatggatttaacctctgttgtgctggaaccatagagtactgcttttctttttagtaattcctcttatcttcagtttcatcatgtaaattataagaattagtttgttcttctcattcaatttacatgcattttctcaggcatttttcttttaaaacccagattctgtttattctttgcaagagtctttccatttcattttgggtcaactgtcaataacagatttaaaaataaattgtttactgctcaaaattgagaggacaagattctctgctcattgctaattttttctttctttcctaactgctggaaactggtacatgcaggctgttgatcttaggagttttgaaattccaagcat

SEQ ID NO: 74953 - DNA, 824 bp, Carica papaya
  Intron number 2 from transcript evm.model.supercontig_774. 2 (locus evm.TU.supercontig_774.2) derived from phytozome v7.0 (chr-ID supercontig_774; pos 8386 to 9209)
aggaaaagggtatttatctttttgtttgctaacctttcctgctttttaagacattcactctctctgtctctatgtctcctttgtctctttttctttttctttttttaagccataacttcatctttccttatcaatggtggatttgtttcttgctgataattgaccgacaaaaaatcggtattccaagttatcttcactgtagactcccttaacaaacttcttgtttgtacaaaagaaactttgtgcttcctgggattcctcgtttatagacaaagtattattttgcatattaaccgctatttttcaagttgccttaaggatagagaaaatgtaagcatcgaatagaatagttgttcttttagagttttcggaagctaaagtttgtttcatccagcagacaatttgagaaggttattgctttggaagaaacatggaaataatgatattgaacctgaatttaccattcttcaacaatcataattatgcatatggggaagcattcaccatttttccacttcagccattggatggacgtggagaagctgctaataatttatctaaatggttgtgcattaacttctttactattttagtatcaataggatcccattagtgacgctacgattaactgagttgcagcataaatatttggaaaactcaaatctccttaacctcatttcttccttgtccaatttaattaagtggttatgcattaaattttttactgttatcagcgcgctagtatcaagcaagaccccattaatgacactatgattaactgagttgcaggttgaagaacgagtccgacagaagggtaaagattt

SEQ ID NO: 74954 - DNA, 451 bp, Carica papaya
  Intron number 1 from transcript evm.model.supercontig_33.1 65 (locus evm.TU.supercontig_33.165) derived from phytozom e v7.0 (chr-ID supercontig_33; pos 1662783 to 1663233)
atactgcatcaggttcttttttgttaccttcttcttctgtgtgtgtttttgattgaagttaaacctcgttatttaatattcttgttattatgtcaaatttactttatatgaacagaatttttcttgagctgttttatttttatttttatttttttgtttttacttttcagttggtattggagtgagtttcagacaaatacttgttttatattttgcatgatgcttctcctggatactaatttaacttgacagttgaagatcagggtaaagcttggttctgtaggaagtgtgttattaactccctgtttctctgttctttttggctgtcaatgttgtatatacctagattcattataaaccaagtaaaatgatcagttaaatttaagaaaatgtgtgtgttattttttgttggccagattgaagccctcaaagctgcaggagtatctgaagt

SEQ ID NO: 74955 - DNA, 346 bp, Carica papaya
  Intron number 1 from transcript evm.model.supercontig_744. 1 (locus evm.TU.supercontig_744.1) derived from phytozome v7.0 (chr-ID supercontig_744; pos 12179 to 12524 reverse s trand)
ctgctactactactgtcactactattgtattatatgtaataccataaaaaattaatagtattattaactatcaaatattttttttttcagatttccttacttgaattaattaattaatttaaaatgagaaaaaaaagtttcattgtcatattaattcaattgaagaagaatttgaatgtacaaatcaacctacgaatgacaaaatgatcaattagacttgatttgtttttgttagagaaaatgaagaggtaggctactttgttgaaatatcgaacgaagaagtaagagagactaattgagaaattcaagctttgatttgttgttgatgctaaaagccttcaagtat

SEQ ID NO: 74956 - DNA, 276 bp, Carica papaya
  Intron number 2 from transcript evm.model.supercontig_15.1 6 (locus evm.TU.supercontig_15.16) derived from phytozome v7.0 (chr-ID supercontig_15; pos 393976 to 394251)
tttgaatctctcgatttgcctctcaatcttctcatgtaaatccgataataatatatttcatttttgtttttaaatttcttttggcagctaacaaactgttggaaaggggaaaaaaaaacagaatgtttaaccatttctcttctattgtttgaatttgcggtttattcgcaaccgacttacggttatttgagtacacataatgatttcttgattttctatttcattttttttaaaaaaaaaaaaacagaaacaacgcaggaaagttcgcacacgaac

SEQ ID NO: 74957 - DNA, 1023 bp, Carica papaya
  Intron number 2 from transcript evm.model.supercontig_41.6 3 (locus evm.TU.supercontig_41.63) derived from phytozome v7.0 (chr-ID supercontig_41; pos 1486167 to 1487189 revers e strand)
aactggaggaatttgagaattttctctctgtcagtgttcatttgagacactccagacaccctcatctggaaattgagtaaaaataacaagttttccatcaattttttctataaaaagattgttggtttttgggatcggaacaattctgatcagcaattatcatttccatttaaagttatatggaaaacaatggctctccctaggattgctttcttttcatgggaagcggctaaggaaaaaattttgactttggataatttgatgaaaagaggcagaaccttggtcaactgatgtttcctctgcaaatgcaatgctgaaagctgcaaccatattctgttatggtgccccttctctatagatttatattatatgatttacaggttgatgggtattaactaggtaatggcgggctaaagaacttttggcatgggaaggtctactttcttacaacaaagctacttgctttatccccctcactattttttgaattttgtggaaagagaggaataactgtgcttttgagggcattgaaaatactcttataaatattagatatgggtggttatactattttgacgtctcactcttgggtctcaatttactatctctagaagatattgaagcggttgttgatatgctaattgacatggaacatccttttgtatatgggcggtactcccttgctattttttaattcgaatattcttttattttaaaaaaatattttttcttgtaaagtctttttaatttattttgttaggcttcgaacccttgaattcacgatttgatatgcttgttagttcattttctccagtaaaatctcaccttgtatttcctttaactgattgctgcttggaatctttgactattttgtattttacaatgactaaaaaaattggtagtattgacagatttttcctaattttgatttgcatttcatgtaaaatctacacaggcaattgataatttatttggaataatttctgagttaccaagttttttacattatgggggtaaaggctg

SEQ ID NO: 74958 - DNA, 360 bp, Carica papaya
  Intron number 1 from transcript evm.model.supercontig_922. 1 (locus evm.TU.supercontig_922.1) derived from phytozome v7.0 (chr-ID supercontig_922; pos 1115 to 1474 reverse str and)
tcaaattcctctaattcccagtcatttaaattcctgtaaagcacgatttttcagaccctaccaatgctgttatcaaaagcttgctcaatgcacaatgcttataaattaacatgctatttcttttcctttaccctcaaccccccacccctcaaaaaaagaagattctggtcatagacttggtaaatgattcattaattcttgcatctttatccagcatttgaaaattagaaaattgttttcaagttctaaagaaatctaccagggaaggctgcttaatagctctatgctgttaatagtccttatcagatattttgttttttcacttatacttgcttattatgattttgcagcggctataca

SEQ ID NO: 74959 - DNA, 816 bp, Carica papaya
  Intron number 1 from transcript evm.model.supercontig_46.5 1 (locus evm.TU.supercontig_46.51) derived from phytozome v7.0 (chr-ID supercontig_46; pos 408019 to 408834 reverse strand)
tgacgtttcgcctctcctcgctgccgcttgcaaaggttcagtctctgaaattttctctatctacatatattttttccaaattcaaattatgattgctattagattcgatcatatttggcaactgtaaaaattcgaacggaaaaacagaggaagtaagaaattctgaatattttttgtttactactttctttgagtaaggtaactagtgttgttatactcgtgtcaggagatttgtaattttctcgcatttggttgattctttgtgtttgcacgtattatttataaggaagagggttttgttgtccttggtttaaggaggatctgcgggttatggctttaagtgactggtatattgatcctagttattggtatctactgttattgggatgagtaggtcaaaaattaagaactcgatactactctaattagtttgggttcttgatagtctatctattttaagtaaactctattgcacactcttatctccctagttaagacatgtttccccctcatttcactattttggaattgttaatgtccacactcacatgcaaattagctttctttactggcaggaaggattttgtgaagttgtttcatcctctttttcgtctgtataatgtacatatcattcttcagttgattgtcttgcattctcattcatctctgacattttgcatgcaagttatagttttgtgcaacttttattttcttaaagctttagtgaattagaggctggtatagcatgcttcattcgtattgattattctcccttaacattttacattattgataaatacattgcagatcttcgag

SEQ ID NO: 74960 - DNA, 442 bp, Carica papaya
  Intron number 1 from transcript evm.model.supercontig_2.84 (locus evm.TU.supercontig_2.84) derived from phytozome v7 .0 (chr-ID supercontig_2; pos 1408069 to 1408510 reverse s trand)
attactcttcctctccggtaagtttcctgattcattctctagtagttttttatttttaattaattatgcttgttttgttatctccccctgagattcaattaatcaacagatatagcgatgataatttcggttcgagctttaaaattaaagtcggcattgttaggaaaatggatagttttagccgattcagtggagattccaatacggattcttgaatatctgagttcaacagttgaaggattgctgtcaagtgtctacgtaataaatagttttgatttaggttttctgggcttagttagaaaataagttggcaaatataatcttctttgttcatttaacctttcgaactttcttattcatgttgaataactaattgtttagctacttctcctattaaaactatgtaggctaacgaggaaaacaagcttcaaaatatccttag

SEQ ID NO: 74961 - DNA, 550 bp, Carica papaya
  Intron number 1 from transcript evm.model.supercontig_48.1 30 (locus evm.TU.supercontig_48.130) derived from phytozom e v7.0 (chr-ID supercontig_48; pos 758190 to 758739 revers e strand)
tgttcgatttcaatctaggaaagctgacgaagcctgtatgatcaatcttttattattactttttttagtcttcttctttgtgcggatagaatgtttctgataatcaaattggtttctggttcatttatggacggaggatgtttcacttgaagtactcctccaattttctgctaagggttttgatttaatatgctttttctaggtttgaagtatagaattggacaactttctgtttcatttaagagtcaaatattggggagacaattaaatgaattgagtttcagaaatcctgtggttggaatagtaatgtcaatgcaagttttttgaatctgaggtatgcttatgccgaattttcaaacctgagtcaagatcatctgtgtatctattcatttattgtgtgatcgtgcattagaaattcttttcatcgtttgctaatatgagtctttattattttaaggaaattggaaaataacttcatatttcttggagaatttcttagtctaataaccttctgatcaatgctatcgtggatttgcagccttaagaagat

SEQ ID NO: 74962 - DNA, 764 bp, Carica papaya
  Intron number 1 from transcript evm.model.supercontig_46.1 3 (locus evm.TU.supercontig_46.13) derived from phytozome v7.0 (chr-ID supercontig_46; pos 133296 to 134059)
ccttcctgccctagatattgagaaacaggatcacggttagctcaactctctctttagttaacaagctaggacatcgattaggaatagggtttttttttttttttttggttttggtgggacttggagttttctttttcttttccttttggaatagaaaggcaatttgcgcttagacgaaagaagataaattgggccttttagggtttattgcatttaggtgcgagtacttttgccgattacgttggcatgtaacagtatttgattcttaatattgttatggacaaatgcctactttttagaagcattataaagttgacataaaatgaaattctgagaacatatttcattgttatttaacgagttgtgaagtcaagtattatgtcttcaatgttggggattttggagcggatcaaagtgttaaaattgcattggaccaaaacaagtctatgtttatggattaaattctttgtgctatctcatctaccgaagatggcagtgagaaattcttcttttggagggacagtctagttactattttgcttcaaacgatgtagccttagattgtttgttatcataagctgtctcgttatttatctgccggttcatcttttgcttgataatgataattttctggtgtgtatttgaaaaagacaatttttttggatgctatgttaaatatgcttgcagattagggttaaaacaactgattcttttatttacaaatttttatttgacagatccatttgacgctgacttgaagcacc

SEQ ID NO: 74963 - DNA, 896 bp, Carica papaya
  Intron number 1 from transcript evm.model.supercontig_56.1 09 (locus evm.TU.supercontig_56.109) derived from phytozom e v7.0 (chr-ID supercontig_56; pos 1301842 to 1302737)
accgaacagagtccgcggttgaaatttctcgccgggtactattgaacttcatactttgatttgtttcatgctttttcctagtatgtcaggcagtgtgtattttagaagtggagccttcaataaactgaagtcatccaatgacactgacatgtcaaacctccttagggtaaattttttcattttaaagaaatcaccttaatgaggtttgacatggctcaaactaattgacattttctctatttgtcaacgcgagatagttttgtattgatgtggttaataagcatgtggactgcatcatcgctagagctgagtggcctttattgccatttgaagcattcgattgaacattgccatctctgatccgcaattccataatacaaactatatctactttgcaactgagttccagttttgtgctctgtattgtgtagaatttggttcaatatcttttgcaaagtgaatgattttcttcttgctcacttctcccttgaccaacaaaatgaattttttcctcaaaaaactaaatcaaatgttctacatagcttattgtcgttgaggaaggtctggacctctaggccatcaaatattggatgtggtggtggaagcatgttgtttgactagcactaaaaacaacactccataattttgtaaagaacaattctatgatgatctttgtggagcctctaaacagcatgagagataagttgtttagttcattgtgcctcctataaacattaatactttgatggatttgagtattaatttgtgtatcatgctgaaatttctttctctagctgtagagagaaatattttttttcttcatatcttggtcttcatatataagtttgttgcttattttaggagcgtgaagaaagaaagaagcgtttgagaagtga

SEQ ID NO: 74964 - DNA, 543 bp, Carica papaya
  Intron number 1 from transcript evm.model.supercontig_229. 1 (locus evm.TU.supercontig_229.1) derived from phytozome v7.0 (chr-ID supercontig_229; pos 12249 to 12791 reverse s trand)
agatcatattctccacctcatactcctgctgcgaggtattctctgcgcatttgtttcgtcttttagggctcgctttgtgcttcagcaaggacattcatttctttatccgagctttagataagtaatcgcatttaattttccttttgcgtggaatgatttccggaacattaacgctttgttggtttctctagggttctttgttattgcgaatttttttttttggggaaaagatgtgaagtgtcatttcacgtgatttaaattgcgagggagtacgacgcacttatgtaatttgactacgtttttattattttttctttactgaggaaaaatctcaattttgttatttggcattaggaatctgctagaatttttgaattgggacatacagctcttctgtttgaatttcagtttagtgcgaaactataattagggattagttgttgctacgtgtttgtttttagttcgtgctagccttatttggaattaatcaggttttgcaacttaccagttctgcaggggcatcttctcctgctgttccggtta

SEQ ID NO: 74965 - DNA, 462 bp, Carica papaya
  Intron number 1 from transcript evm.model.supercontig_47.2 9 (locus evm.TU.supercontig_47.29) derived from phytozome v7.0 (chr-ID supercontig_47; pos 305657 to 306118 reverse strand)
ccggtttctgggacctttgatccgttccttgttgggtaattctcggggattcttccttttcttcattgattgtttgtctgtgttttgggtttttttttacatgggcttggatttgatttctggatgatgggttcctaaattttcgggttggtaacattttctttttccatttcggtctttctttgtttgtttttttcttcgttttctttgagattttctagcccttatgttctttcttgtttgtccctttgctccttttattttagtttatttggtttcgctgttcttttcatcttccccaaatcttcactcacatgattttggatttttatttatactaatttttagtttattagtttcagaattcagtccctattttgattatattggtttctttgcctgggtcggatatttgtttcatttgtaggctctactatacaaaactgcaactgggcagtcctc

SEQ ID NO: 74966 - DNA, 523 bp, Carica papaya
  Intron number 2 from transcript evm.model.supercontig_280. 7 (locus evm.TU.supercontig_280.7) derived from phytozome v7.0 (chr-ID supercontig_280; pos 193630 to 194152 reverse strand)
ttattaaccctgcttttcacctccaaaaactgaaggttcttctcttctttcctatagtattgttttctgctttattctttctcataagccaatcaaaaaatttatgccatgaagaagtgaaactgagaatagtaaatcataaaatccttatctctaagaaaggattagaatggaaggttgatcaaatctactagaaccacaagattccaatatttaaacccgatattcctatactgctatgttctattataacatatttaatataaaagaattacaacagcaacccatatatatatatatatatatattattaaatacttgttatcattttatctttcttctctgctactcttctctctgctctgcgtttctctgattctccagcttctctgtgccattttgtttcacaagtgtctgtctatataaacacacacacataaaaaccagtagccaatagatataacacttttaacacaatcctgttggatgactatcatgggatatatttttttggggataggaa

SEQ ID NO: 74967 - DNA, 461 bp, Carica papaya
  Intron number 1 from transcript evm.model.supercontig_78.4 1 (locus evm.TU.supercontig_78.41) derived from phytozome v7.0 (chr-ID supercontig_78; pos 491649 to 492109 reverse strand)
acagaatcacagcttcccgcctccaggctctcaaggttagtatcaatttctcaatccccggactggaatccctttcgattcggacgcgacttttacatttacaatcccgtggttttcatttaatctctcatttattttttcttctttttccttttttgactttcagtgatttttgtttttttgtgagtttaatgttagttaatcgttgttattttctgggtgctgatataaagcgattagcttgagtagatattataatttggataggtttttgttttctggttacaaaagctgattttttactctctaggatattcgatatgttgcacggttttctggttgagctttttctatgcctagaaaataacgcattcatttggtcgaagattggattggttatgaatagtttcctttgaaagttgtgatgtcagaaaaggccttctcttgaaggcattctcgtg

SEQ ID NO: 74968 - DNA, 561 bp, Carica papaya
  Intron number 2 from transcript evm.model.supercontig_32.5 1 (locus evm.TU.supercontig_32.51) derived from phytozome v7.0 (chr-ID supercontig_32; pos 659288 to 659848)
gagctggaaggggtttttctcttgaggagctcaaggtgagttgttcttttagtttttttacttagccttccatattttttgaattcaagttctttgtttgtgagtttatcgtgtgttctcatgacaatgtttcttggttttgatgagctatgaggtcctgagtctggatcggctcaatgatgctacctgatcttacacttactgctttctgtttgctatggatattgtataacatgcattttttccttctaaaaatgtataattatacatatttttccttcaaaaaatgtataattattcataacattgtaagtttaagagtgcttaattttttggaaggttacatttactcttcacaaggtgagaaacacgaacatcctcttagagtatcgttacctcttgatattggtgtaccatttatggcatttaaatactatcagtcttgtatgcatccattcagttttgtactttttaagttttttgtttaatttccttatttcaaagaaagtttttgtttactttccaggccgcaggtattccaaagaagttggcacctactat

SEQ ID NO: 74969 - DNA, 577 bp, Carica papaya
  Intron number 1 from transcript evm.TU.contig_28186.1 (loc us evm.TU.contig_28186.1) derived from phytozome v7.0 (chr -ID contig_28186; pos 7063 to 7639 reverse strand)
ttgttaaaccaggttctcgtcttttcttttactcattcttgttttgacgtttccttttttttttttttttcttttgacttatgtattggtttagtaaatagttgtggaaattccgaatcttggttgtctttgtcattactttcaaatgcattattcgactgcttctttgtgtgaaaaaggctgctgagtggagctgacatgagagtaccgatgaagttaagcatcaattcgaagaatgttcttattccgttctctttctcgatctgctgtttatttttttttcttttcttggaaaaaagcagaaacgaaaagtttttttttttttttttttttttcgaaagtttctttaagtttgggctgtataaatctttcttcttttccacggccttttcgcatacatgtaatgaatttttaacttttcatatatgtttgtgtgcgtttgactcccgccctttctcttcttccaagttcttgcagtgccctcgttaacaaattcgcttttgcaacttcactttgctaattcttgattaatagttttaaaatttctcgttttgcagggcctgtagttgctgaggct

SEQ ID NO: 74970 - DNA, 239 bp, Carica papaya
  Intron number 1 from transcript evm.model.supercontig_76.3 1 (locus evm.TU.supercontig_76.31) derived from phytozome v7.0 (chr-ID supercontig_76; pos 639959 to 640197)
gggtgagtatttctctttattttctacaaaatatagcttcttttctggtggtttgggttgaagacattggagagtgaagttcattttcagagaaatttgattcattttgctattattggtttatttacattattagttttgtttctcttacaaatcagcattgttgctcttctttacccttgtttatttgaactttttcttcaacttccagtttgaggcttctgacgacaaaggtgaaa

SEQ ID NO: 74971 - DNA, 774 bp, Carica papaya
  Intron number 2 from transcript evm.model.supercontig_76.3 1 (locus evm.TU.supercontig_76.31) derived from phytozome v7.0 (chr-ID supercontig_76; pos 640219 to 640992)
caaggtgcggctttctttataccttttttctagttgtttaatgttcctttagtataaacatttggctgcaagattctatccattactttttgaatcaagaaactactctaaatatatacacaataatgctgtttccttaatgttgctatagagtaattcttctgcaagcagcattctttctaccttcatatttgtttatattctagtgtttgggcaccatgacctggtccaccagtatagtcatcagtctctctgttaaccctctcttatcactttgccactcttagcatcaatgcctttaacattatgctaatgcatatcttccttctggaatagtgttgcagatgtttatcttatgctataactctgaaataaatataaaagatagtgtgtgttttctgcctattgaaattactttcagagggtagctagaatttgaataagctgttaatgagaatatgactggtatgacatggtagttatggttttatttcagcatttttcacataaatcatgtctcttggagtagtttttttctttttttttttttatggcaagctgggtgcgaccagtatgtttgaactctcaatctctatgtgagagataaggaggtaaccaactggattgtcgctcaacgtttgtctgttggactagattgataattctttgatgtgccacgtggaccattaggtctgaccatatagttggtgcttttttactttttccaaaatgacaattaattcaatttatggtctacttttgtgagtatcagat

SEQ ID NO: 74972 - DNA, 611 bp, Carica papaya
  Intron number 4 from transcript evm.model.supercontig_365. 5 (locus evm.TU.supercontig_365.5) derived from phytozome v7.0 (chr-ID supercontig_365; pos 13495 to 14105)
catcatttgagtcactggcattacctgagctgcaggtaggggtttctcatattctccgtgtcttatgattgaatagattgtgtaatgtggttgtggtttaggaccctcctggaaagggaaaagaggggatggtgaactttataggtcattcactctatatttctacttatagatttatccgaaatctgatttgaatccaatatagcatctattagtacataaaaaatatattaaatcgattctttttaatgaataggtcttatcgcaacttcgaatatggaattcaaatggttcaaatcggaaatgatactctgaatcatagaactataatgaaatatacgattaaccaacatttatcgaatttgaatggttcgattctcttatttttttttcttgaactgagatatccgtaaatcaggatcttaatgcatatagataaatatggtccaatgggagcaagaatttccaggaatgttcaaacaatacataacttctttgcttctggattgctcattttgttgagttgggctatcttccttcagtcatttatgtcattcttggatgtattttttgttatcagattaaagaagatactaatctcttcatcattg

SEQ ID NO: 74973 - DNA, 573 bp, Carica papaya
  Intron number 2 from transcript evm.model.supercontig_15.3 9 (locus evm.TU.supercontig_15.39) derived from phytozome v7.0 (chr-ID supercontig_15; pos 548377 to 548949 reverse strand)
aacaaaatcagaaacaagcagttgataggtaagtttctcacgttcgtttgagatttatatcacttcgatgtatgttcgaactgaaaaaaaatgaggttaattcacctaaaccaagctaacctgcttcagaccctcccaattgaggatgctattttttctttaatggatctggcagctttcctgtaatttctgaaagaagtcatagcttagagaaaaatggttagacaaccagatcacaaatttaatgtataagggattaccatttctttataaatgggattatgtaataaaaaagggttatgcaatcaaaagaaaaggattatacaatcaggctagaactttatcaagggaaataagaaattactttatgaatatgattacagttgtacttataaagaaatccttatctcccttgattctaagggttctacactcaagagcctttcttgttttagctatagattttcataaatgaggaagatgagagtgaaaatgagttcattgtccctgttataattgttcccaagtttgcatttaagtttgttaataaatttggcaggagctttgataatt

SEQ ID NO: 74974 - DNA, 935 bp, Carica papaya
  Intron number 3 from transcript evm.model.supercontig_34.1 94 (locus evm.TU.supercontig_34.194) derived from phytozom e v7.0 (chr-ID supercontig_34; pos 1762913 to 1763847 reve rse strand)
gaattgttggtgccctagagtttttgctggggaaagtgaggactagttgtcctacaagtgaggattagttatttcacaaaaagttgtgagctagagtttggttgagctcatcactattcgatgagaagcaattgttggctcaacttatctggagagaggattcgtggaactcaaattttggttgctagcaatttgtagggtttgtcaagctacaagtttttaagttagttaaagttttctatttactttagttcatctgtaacaaacttcaaataatgtaagcttcacctcaagggtgagtatttgagaaataggaatattttctatatatatatattttataagagaatggtaaactattttccttataggtttttctcacatagttgatagttatgtacatttgtttaaccaaacattataacataaggaaatgattatattgcataatcattttagtattacgctcttgttctgtcttagcaaacatggccattatatgtttttgccatggcaaacttgatctgaattggcatttctttaagtccgggagttggtaaaaagtttcatgtgtgccagattattttttctaaaatttgatcattccaagagcagaattagctcatatatatacatattatatttcaattcatcttcacattttgcttctggtggaaagttcatcctaagttttgcggaaaccccaatacttgaacaattggaataatccttatagactaaatatatcgaagaaccttgacatggataattgttgttggaacagtttttttaattgtgtctatactttcattttctttcttatgcagaactgagtctattctaaatgttgacagctgacaagtcaaactttgtcctcataaaaataaagacaaatcggttgctctttcttaggcagctgcaagtggaaacctaca

SEQ ID NO: 74975 - DNA, 624 bp, Carica papaya
  Intron number 1 from transcript evm.model.supercontig_1420 .1 (locus evm.TU.supercontig_1420.1) derived from phytozom e v7.0 (chr-ID supercontig_1420; pos 3747 to 4370)
attcaggtcacagtgatatcgtcaggaagctgctggtacataatgaactctgtttgatctggtgtattgacagagtactatattattttctattacttgttgactttttgttttacagttcttggcttctatatttattttgtgtgaattttgtttgattgatgaaggctttgtagtttaattatcatctagtgattactcagttaaaaaccagttaagatcaaatttaacatggcagaaaaaaattgttcctgtcttttatgctaactagcatatgttgaatacatcgactactagatagccttttggaatttagcgcgttataaaagataagcgatggtcagtcagatatgttggttttgtgttttgcttgacagacatgataaaattgtaaaagatagaatcaaattgtttaaaaagctttgatcagaacaaatataaatgacaaaattcgtttatcgtcctgctagaacagtgtattgttgctttttataaaatttttgtacttgtgcaatttatctagttactgtttatgaacttgtccaagaatttgttcactattttggtgcgctgtgccacatacttattctcttctgaatttttcattaaagtcagctggagctg

SEQ ID NO: 74976 - DNA, 707 bp, Carica papaya
  Intron number 1 from transcript evm.model.supercontig_4.12 5 (locus evm.TU.supercontig_4.125) derived from phytozome v7.0 (chr-ID supercontig_4; pos 2378111 to 2378817)
gggcggcagttttcaaatcgatatctcattgccaggtccgttcttcgctctccttatgcattgcgatacgcgggcatcaatgaaattcgtatccaattttcattctgttttctcgttcataaattgttcaaattaacttgtgttgggcagtttcctgctgggtttccttcaaattagtatttttcctatggggttttgttgtgtgggcttcaaaagtaaaccaagttctttgacattcaagagaggtctttgtttattcgtgaaaaagggttataacgtgatcctgatttctttgttttgaggtgataatgctctttattggtttgtgtattagcacctataaacaaaattgttcgtacaataggtgggttgtaggattggagatcatacccggttaataaacaggtcctggcattcaaaaccaacgcatttggtcaataactacactactaaagctgagctattaactctagtcattcccctgtttatgcttctttgattaattgggttaaggttacctactttctagtctgtttttcgtttgtctataatgcacgaatactcaaactgaccatcaggtcagttctgtttgaatcaaacttgatttcatcatattttgttctcctagaggaactcaatcaaaagaaaattgctcaataatcgtcttaactggaattttttggcaacgaacttttttttttttgcag

SEQ ID NO: 74977 - DNA, 979 bp, Carica papaya
  Intron number 2 from transcript evm.model.supercontig_4.12 5 (locus evm.TU.supercontig_4.125) derived from phytozome v7.0 (chr-ID supercontig_4; pos 2378847 to 2379825)
cagtttgcaactaaagtttggtatgaagaaattctgcaacattatacttgtttatgcagttatcattaattttactgtctatataatatacagaattatgtgaaatgtggtaatgcattcaattgtagaatataagggtatggatattattgttatttagaattatacggttggaaatgtgtttcttttttctcatcagtataatgatacaaaagctatattgtaaggagttggattgggaacacaactttttaacagaattcctgtttgtagtttcttttccctcagagatatgaagtccgaaggaaaagtacaaacatagaataaacggttaaattggtttcacctttctcgcacacaccctccccaagccatcatgcttgtgctcttgcttctcgatacagaaagagaaaatacaacacagatttttatggttgaaaactgaaatcttatcctggtttcctgtccttaccttggtaagcaaaaatttaaattacttgtgggaagggtttcgaactgctttccgcccaacatatatctcaattatgttgggagaaacatgaagctggaaaacctactttgttatgtggttgattgatatttaaattagattagtggagcatgctattgttttatctttttatcaaaagaaggataaatttgtggagtcagtagggttcaaaagattttaccttgccactttctaatgtgaatggagttcatggttatgccataagtacaatttcagactttatagtttctcaatcaaagttgatcaatggattggaactttggtctttgagttggcctgtgggtctttggcctttagattgttcgatgcatcaattaaaaaatatatattacttgatggataatgatatataacttgtttatgagatatcagatgattgaaaggtatctttttctttgatttccctatgaaggcaccccaatatcagcagccaaagtggggccatat

SEQ ID NO: 74978 - DNA, 1044 bp, Carica papaya
  Intron number 1 from transcript evm.model.supercontig_55.1 15 (locus evm.TU.supercontig_55.115) derived from phytozom e v7.0 (chr-ID supercontig_55; pos 686085 to 687128)
tcaattatagcaatacccgttagttccattttccctcaatacacagacgtattcacatctcttgtgcttgcttatttgcgattttaggtttcggacttatgtttctatggcatttttctattgcgtagtatttacatatttgttattttttatcggatgctggaagcattatataacataaagttggttttatggagactaaaattagtttgatagcatggtgtatagttcttattgttcactattgttatgtactttactgaggaaattacactgtaggcaacagtaaatttgtcttgtttgtgctgatccatatattaaatttggattaatttggtgaagattattcggtattaactggacttgtgggtaacttagatggtaccggatgctatctccatccaatggaatccaaacactggcttagttgaatagttgctgcattggcgtgctctgtttccagcttttcatcttgctctccttgcagtacgatatacactggtggtggcagatcttagctagtgcagttatcatctgaattttttcgttttttcttataagaaaagaaagtatgtgagagttgcttcgcccacataaattttttttttatagaaacatttatggtcagacaattgatagtatctttacttcactgtacctgctagaaggagaaaatgaaaccaatgaaagagatttatatggatttggaactgtgttaaccaagaagtgacataaatcaaactaagcctggcaagcttatgccgtccttttggaaaaaaaattatatgattggcacctgaaataagggtagttgtctttctttgtgttagcatatatgatggcatatgatcatgcaggatgtctttatgacgtatggtatccatatttctatctttcagttgcattatagttctaatttctattatttgacttgaaatcaagtattttaaacctcaacctttgctgacatgttctttttattatttttattgttttttcaacctggcagcggcacgggcattagatcttctaaattttacccct

SEQ ID NO: 74979 - DNA, 845 bp, Carica papaya
  Intron number 1 from transcript evm.model.supercontig_16.1 16 (locus evm.TU.supercontig_16.116) derived from phytozom e v7.0 (chr-ID supercontig_16; pos 1808859 to 1809703)
gccactgccaaggctcattacttgtctgcttttgtgtatgtttattttctatctctctctctctctctctctctctctctctctatttatttatttttatttttctcgtttaattttaaagattattcaattaataattttaattagaactagatacttactccttgatttatttttatgatgcaaaattttaaattttatttcaatttagttattttttttttagaaacgagtacacacagaataattaattgggtcatttttaaatttatgtattcacttgataattacttcctttaatttatatatacacctactatatattttcttaaaaaaaaaaaatcccaattgtaatagatctgttttttgagctttcaattatatgtaattaatttatttgaattttttatcagctaaatatttcatatagaatttcttagcaatttatttaatctttagatgataaaaaatattttctctcttaattttaatctgaggattcaaaatacatgtaagtaaaacaaaattttatatagtagtataattgaaattaaaaagaaatggagagagattaaattaatcataatcataacttgattttatgatttacgaagttatttcgtaaaattaaaaaagaattatagaaaaatcatgtttaatttaagataaattcgaccaaaataattaaaaaaaattaagattagtactgaactggtggtatacgtatgcatgtatatatgcgtacatatatatatatatatatatatatatatgtaggtattgcacggtatatatatatatatatgcttgtatatatgtgtaggtattgcacggtgataaacgca

SEQ ID NO: 74980 - DNA, 490 bp, Carica papaya
  Intron number 1 from transcript evm.model.supercontig_3.41 6 (locus evm.TU.supercontig_3.416) derived from phytozome v7.0 (chr-ID supercontig_3; pos 2948934 to 2949423)
gatcctcacaagaaggttttctctctctctctctctctctctctcttgttcgtttatattcattttgagatctatgtatattttgggtttggctcagatcccttcttgtttttctttttctttttattaagtggagggttttaatctgatttgattgttttttcttgtttgtttccttgttttgttttttattgtgaaaaattggatgggggttagtttgacgtaagtactatttggtttcatttgaagttctaatttcgtgtttcttcttctttctattcaatgagtttgaacaaatgaagatcgttcttgttagagtaaaaatcaaatcaagatgggttggggggcgggtgtatgtggttgattctgtttgattggtcagaaagtacaggaaagtaagaaatgctgggactttttctttctgtttattgattattatcgttgtgttttattagagctgtaaagctagaaagttttcccgggcaagcct

SEQ ID NO: 74981 - DNA, 708 bp, Carica papaya
  Intron number 1 from transcript evm.model.supercontig_179. 51 (locus evm.TU.supercontig_179.51) derived from phytozom e v7.0 (chr-ID supercontig_179; pos 336286 to 336993 rever se strand)
gttattcttgcatccaaaactgggctgatcatgtattctcttttccagttatctcctattcttttcatttttcatgctcattaggtttttgtcttataattaccatgtgaatatatgtactgaatatataaaataaattcaggattgtctgaatgtatgtgcattttcgcttttcatcaaagaaagccctaaattttcttttaattagtccataatttgttcagtgataccgagaatgtctttctgtttgaatttgggactggtgtcatatttctttcattaagttggctatttttcaattatacttcctaaattttaattgtcaactctgcagaattggaggtttagaatgtatccctgacattgaatttttagattttgttcttagcaaaacaacaatttgacagatgaagtcaatttttcctggtgtggaagcagtatgaacctaaattaacaacaatccaatttactgttttgattcttcaaacagtgcccggtttctggcaggtgtttgtattgagtgatacatgatatgcctctggttctttctcttttgctttttgttgttatttcttgtatttatttattttatggggagtgggtgaagatgaagagaataaccattaaaatgcttcctttctgctgcttcccttcccctgcataagaagataatgatgatattgtgtttcagaatcttttagaagttag

SEQ ID NO: 74982 - DNA, 568 bp, Carica papaya
  Intron number 2 from transcript evm.TU.contig_35430.1 (loc us evm.TU.contig_35430) derived from phytozome v7.0 (chr-I D contig_35430; pos 486 to 1053)
ttcacagtgtcagttgaatcgcttgtaagttgtgggtgtgcagatttatgaaagagttgagttgaactaaaatatgtatattgattattattatttttatttcatttcgaagaaaaaaaataatatatcaatatattatatttaattatttttattcaaaattcatgttttaatagatttttttctttgaggaagataattgaaaattcattcaaaaaaaaaaaaaaaaaaaagatgaaacacattctgtacaacaagtgggacaaaaaattaggaggtccaaacagtatttggatatatgtgtggtaaaacaagccaagtaatgccatatgtgagataagatcaaaatttggtgacaaatgaataaatatgtctaccaagtaaagttaattgtaaagaattggttgataatagaagttcgagaaagattcacttttgatcattgggtaaaataagtaagccaagtaaagctaattgtaagttgaagaaatatatttttttatgatttttacgtaatagtgtgcaatttgttttactattttagacgtaattgataggcggcagatac

SEQ ID NO: 74983 - DNA, 860 bp, Carica papaya
  Intron number 1 from transcript evm.model.supercontig_26.1 56 (locus evm.TU.supercontig_26.156) derived from phytozom e v7.0 (chr-ID supercontig_26; pos 1171730 to 1172589 reve rse strand)
gcaactccctgctcacacttttcaggtacagtctgcatttgtgtttccttggtaaagggttatggtctgtcttgatgcttgttcaaaatgtgggtactttacggggcaggaatcaggataattttgcgggctgttttagttgctaggttatgtttattcatatcttaatgaattacagaatagcttttgggtttttatttatatgccttctcaaaattaaaggtgttcttttgtttgcattctttgttctcatccaagaaaaggtgtttgtttttgggctgccattttcttttctttttttttttggggatatctacccgtgacatgtagacacaaaaaaaaaatgaaagaccctgcaactttttcccccatcagtaagattaagtttcgaaccgggaaaatcttaggggaatttttttctgtattttgtctactgagttgctaaaagtgggggttgttaatttgtctgaattcacatctttgttgcctgatatttttgacgtgatcagtttgtcaatccgcattgggagaggtcctcgtaatttgggaagtagttgttgtaagcttatgttatcaatttgtcgctaataaaagcaacagtgaaattgaattgcgagtcagcacatgtaccagtggattatagagtggtgtttttaagctgttgatggcaaaactgattacagaatcaaacacattttttttgttcaagcaatcatcacctatttttttgtcttgtgttgtggataagattaatataattgtttacttctcctatgctgttttttcaattttacattcaactaccagtttttgtctgtggtgcaggttgtggccataacagtttttttcttgctatctgt

SEQ ID NO: 74984 - DNA, 784 bp, Carica papaya
  Intron number 1 from transcript evm.model.supercontig_43.1 40 (locus evm.TU.supercontig_43.140) derived from phytozom e v7.0 (chr-ID supercontig_43; pos 1712613 to 1713396)
tctcgaccactgacaccaccgataacaatctccaggttcgctttctcacatgctctttacaaccttggcattttttttcctacaaacaattttttacacattgtttttgtttgattcctgagaaatgtttctggtttcgggagcgaacaaaaatcttataattctaatattgatactgaattcctacatgagaaatcatgtttcgaagcaggtggcgtagtcttaatgaataagataagcttttatgcttttctaactcatcttagtttagtcatagcatcttgagtctctgtaggtctgcaattgtattttactgcttagatatcttggagagtagagaaaatacttggtcaaggtttattcgaactatacttccccctgttccatattcaggtttctttagagtccaagggtggcagtagagtttctaatatgcagttgtttcttttggctgttttcctagcatgcgctttggtaaaaggttcctgcttgatttcctaccaataaggaactaagaggaaagtgctagtagcatgcttagttgttttgttttgcaaatgtaacaaattcttatatagatagctaaattttggcggcacttctattttggcaatggatttaaatattgaagagctatgtttttttctttattgccctagtcaccaaaaatattctgtcttgtttttttggttcccttgactgctagtcatgatggattaattcagcaaaatccttttacattttcacagccatttttcattcttcacaaagcgtcatctaagaa

SEQ ID NO: 74985 - DNA, 696 bp, Carica papaya
  Intron number 1 from transcript evm.model.supercontig_6.32 7 (locus evm.TU.supercontig_6.327) derived from phytozome v7.0 (chr-ID supercontig_6; pos 2370848 to 2371543 reverse strand)
cagccggtaatacatttctttaatctcttacttttcttaattatagaatcaatgaaattctaaccccaccaaatctggccataagttactgctgataattataaatcagattacctttggagttcagagcaaaagccagagtcagatacatactgccatgatctcatatgtttctctttcaatatacagtttttctgatcctttcactcaattgttgaagtagtttgtttttcttgaaggttttcgcgtgccaaaaccttgtcaatcttttagcttatttgaatttcatttcttggaataactgaagtcactacttggctcttgttttctgcttaacctcaaactatttgcactaataaattcttgattgaactttcttttcacaaaaaatagcagattaaaatgattattcaaaaaattaattttatagaaaaatagtatgttaattatttatatttaacatgttcatcagtgttgaaagcatgaatcaaacacaaatttattagaccttgtacggaattataagtaaaacaacaaatctatgtctcagcatgttattttaataatagattgaataagtcttttcaaaaaataagagttaataagaagtaattcagttaattatttatattctaacaagcagtctcaatatataatgcaggtttcacgggatttcagagtttgataattttaaaa

SEQ ID NO: 74986 - DNA, 650 bp, Carica papaya
  Intron number 2 from transcript evm.model.supercontig_47.8 (locus evm.TU.supercontig_47.8) derived from phytozome v7 .0 (chr-ID supercontig_47; pos 50519 to 51168 reverse stra nd)
caaaggcactgcccaagaatcgtctcctctccgaagtatgtcattagggtttgtgtatttatctttatatttttgaattgtttggatttttttgataaaattttttgtttctctgcctgattgatggaatatggaaaaataaaataaaaaatggagtttgtttaaggtttcacagtgaaaatttatcggataagttacggattttgaagaaagttaacgtgttaagagtagtagttattactatctcctccatttgttctgctgtgatggtgagaagatgttttccgataatccaaatagactgaacagtttgcttaattgtgtgcattgtagttatttggtgtccgtaagtttggctttgtaaactcaattttgaaagttgaacatggtaatgagaacgttgttctttgtggtttttccatggacaagaatctaagaggtctctaacttaatcatttcctttgattgtgaggaacaggaatatatcatgctatgaggtaaacgtgttatctatgtttatggtctttttcaaattggaagtatgtatttgtcatattctctgctttaaagtacattctgatatttatgggtgctacctaatcattcaattttagaatagaaagtaaaacatgggtggtttgatttgtaga

SEQ ID NO: 74987 - DNA, 691 bp, Carica papaya
  Intron number 1 from transcript evm.model.supercontig_6.28 7 (locus evm.TU.supercontig_6.287) derived from phytozome v7.0 (chr-ID supercontig_6; pos 2173460 to 2174150)
tgcttatttcttacaccagcaataccttccctacggtaatttctttctcctttatcgttcattttcttcaactttaggtttctcaagtttggtcgattcttctattaaaagtttggagcttggtttcaaatttctaatcgcgtgttacattctctttatgcattacgtttttttttttatatctaagttagtgaaagtaacataaatgcctgatttggtttttcactagtgttaaatttttttgtggcttgggttatttttctcctatattgtgatgtttcttattttgcttccagttgtttgggaagggattgaaattatggcacttatttttgtctgatttgggtaatacttgcctacattaataaaaggtagtaatttgacatgtgtctatgttggaaacgctgttgttttggcattagctttattataaacctttaggttagatcgtgtttgttttcaaatctaattcacagattatgcgggagtggaattattgtgcttcttttttggttcttcttgatgagatttcaaattccatttcattttcttgagtttacatttaccaaggatattttcattaccccttttcccctgatgtgatgagttctcttaatgatttggaagaggatatttgttaagacaggaccttacatcttattgttctggggttgtaatgggtaacaggatt

SEQ ID NO: 74988 - DNA, 1027 bp, Carica papaya
  Intron number 5 from transcript evm.model.supercontig_233. 9 (locus evm.TU.supercontig_233.9) derived from phytozome v7.0 (chr-ID supercontig_233; pos 45566 to 46592 reverse s trand)
cagttcacaggaaatctgggagagattttaatcaggtaaaaacatttccttgattaagattcttccctgaaattgcagcacaattttgaaaagaaaaaaaaaaaaaaaactatatctagctgtgtattatcttgacacattttttaaataaattgtcggatattttgttaattagtttcaaaattttcatttagaagaccggtattgatcttagagcaccttttagtatttgattatagcgtgtgattcactgtttgctacttccatggattggatagatgttgcattccgaaatgttcttttttttttttttgaagaaattctgcattttctcagtaatcagatttggttcataatgagacggattttggagctttggttaaatgtcattaatggatttctaggaaattattctgtgctacttttagcctcaactgtaccttactagctggttaggcttgtagagagcataagggacagaatgtatgaaaatcatagttggagctgcttgctttgaattttgtctagtatctttagtttctcaccaacttaaaatgaagttgtaaatgttagtgtgttcttattggcctatgagttaaccatattatttatccaggtgagttaaaatgtctataaaatcatgtttttctctgtattgttccaataagaaacaatttggctttcatcttttatcaacaattggctgttatatgacctgagaagaacagattttcaagattgtttttatagttcaaggccatgtgtgtgcgcgcgtgtgtatacaaagctgccaatctagaggagtatcaaaccatacatatagcttaattgcgctatcgaactgccaatcaagaggagtaccaaaccatacatatagcttaattgcgctattgaacttatagatgttctatttataggttggatttggacagtaaatcactacggaaagatataattgaaaacaaaatgaaaatattcctaactcaatatcttagggtatcttttttgaacgttacatcatctgcag

SEQ ID NO: 74989 - DNA, 580 bp, Carica papaya
  Intron number 1 from transcript evm.model.supercontig_6.35 6 (locus evm.TU.supercontig_6.356) derived from phytozome v7.0 (chr-ID supercontig_6; pos 2726705 to 2727284)
ttctctgaacaatccacgctctcatttcttatccggtaattatactcttttacatctatacttagttaccttcttcctcttctgcttcttgttaatttttgtttaacgttccattttgttttgatgtatcttcagtaaattcgataacgatctgcttccttctgtcttttggtttgaaaatttcagattcctgtctactttaattgttgattgcttttgtttccattctgagttcttctgatctcgaagaggaatgaagagaaatgcatcagaaatcacctgtgttattctctttcttacttctgcagaatgacgtttatcctacttatttactttgactatttaattagcagtattgtgattcctccaatggcaattcatgctttctgaaaaaaaagaaaaaacgaatcgtgctcctcttcagggcggtttttaatttgttctaaacatagcctaagtgttcatggcctgcttgccactgtcgccggcaagtttaaccgacgataattttttttgtaatgatctcggagctttttgcttcctgtaatgtgctaggttcttcatcgaagccggtagatca

SEQ ID NO: 74990 - DNA, 989 bp, Carica papaya
  Intron number 2 from transcript evm.model.supercontig_52.2 6 (locus evm.TU.supercontig_52.26) derived from phytozome v7.0 (chr-ID supercontig_52; pos 205153 to 206141)
tgcgtttccttctcttttcctcctggactggggtaagttccttcacatatatatctatatatatatacacacacatactatctcaagtttaactctttttattatacacacgtcattaatatgaattacctcttccttttcatctttataacaataactcaaacatatcttgtgcttgccaaccagtctgatatctcactgatccttcataagaatctgttcatcatcagaaaacattatttacatgtatacatatatatatatagagttccccttccaagaggataggatatttactggtgggccaaagatattgaatattttgccagctgaaattagcaagtaaaagattttgaaagagtacagtaaatgagtagagagcagatgataaaattaaatgagtgttagataggattctttttggtagattacaaaattagctctgttacattttacacaaagaagtcgtattatctacccaatattctcattcatacatacacacatatatgtatacacatatatacatacatatatttgtaaacacatttatccctaaatgttatacaactactcattaataatgaaattggaggaaatggttaaagatactaaactaggtattgagtaactaattctttttatggtggaatatgcatatatgtgaaaagagacaaatcacttctatgcacttttttaattaccttggattagatttaatatatatatatatatatattcaccaaggtaaatacggttttctattaactttagacggtatatatgtatatatatataccaattgaattgtatgtatgtgcaaacatggatatcaatctatataaacaaatttatacaatataactgtaactatatatatgtatatacatgaagagaaatgtatattattgtatagttgatgcatgtaaaacatatatgtagagttaagtagttggtatgattgaattataggttgccaggaaaggcat

SEQ ID NO: 74991 - DNA, 697 bp, Carica papaya
  Intron number 2 from transcript evm.model.supercontig_8.13 1 (locus evm.TU.supercontig_8.131) derived from phytozome v7.0 (chr-ID supercontig_8; pos 934988 to 935684)
actggtatgagacttcttgttgctcgttttggttatccagcgtttgacgctcagtattctaggttttagcttgttttcttagtctcattggtatgatttagtttgattggtctaacaaccatcttcaagttgtttttcttcattttgggttttaaatgttcaggcttgttttagcagcgatttctgttgctacttactgtcaaagaattttttccatcagattgaacactagttgtggtgaaagattttcctttttagctacttgaaagtttgctcattatgctctctcatctgtttttagcttcgtttcagaaaaatcatggtagtgtctggggaatcacattgttgatgaaatcaaattggtaaattgcatcggcatagaagaatgtatttccgtctgaccatataatggtttttatttataatgtgtaaaacagaaggatgaatatcctactgcctaggtagatatgcatgtacgatggatgtaagagtttaactttacctgtataaagcattaatttgtctgaagaaaaatagctaccttttaagtctagtttcttcactggatttaagtttccggtgtggcttccatgactccagattatgctaggacatcttttggaaaaatattaaacttgtctcgtaatgtatgccacttttcttggatgatatctttccagggattttcacaagatag

SEQ ID NO: 74992 - DNA, 582 bp, Carica papaya
  Intron number 1 from transcript evm.model.supercontig_42.1 12 (locus evm.TU.supercontig_42.112) derived from phytozom e v7.0 (chr-ID supercontig_42; pos 1037214 to 1037795)
aggtgtgaattcatcacgtggcttaaccggggctgtgtctatagcgtgtttgtgaaaatgtctatgtgagctggtggctatttggatttgggataattaggtttcgttacgttgttgcctatggtttttgagtgagccttttaatgggatttctgtaaattcaatgaaatgcttggtgcttaacatcgttccttccgtttgcatttaatattctagtaatttgggcttgaatgcatttgatttccctgacaagtatgggtaaaaatgggaataattatagtggttttattggttcttttgttggtattttagcagctatctttggttctggattttggttatgcatgcattgcaaagtgaaatcatcgatagaaaatggtattcatcagagaaaataataaagcaagttgaagacttggaatgggttactgtttggaaaaacatattaagggggaattaattttattggtcttgtaacatctctatagtcaatggtttagagtaatggtttgggtttatcatttctgcatacttcatcatttctcagcaggcagcctccagtgccatcagtagccccctttg

SEQ ID NO: 74993 - DNA, 941 bp, Carica papaya
  Intron number 2 from transcript evm.model.supercontig_6.14 (locus evm.TU.supercontig_6.14) derived from phytozome v7 .0 (chr-ID supercontig_6; pos 63338 to 64278)
ttcttgctggttatctgcttcagttttctcgccatgtaagtgcctgcactttttcttttttgattcccttttcgactgttcacattctcttctcgctctcaaaagacgcgtaagtagaagttaaatcagaagatgacaagcttcccaaaaatatatagaaatttaagagggaaaaaaacgttggggatatttttccagacatgattatacggagtatcattcaacactcatcaactatatatggaatgatgttacgactaaaatacaaatgatagattgaattgaattgtttgttttcattaattaatccaagttttttctaaaaaaattattaatttagacttaagttattcaattacgattagggttagttaacgagtttgaaatctcgttattttttgttactaaggtttcggaagtataagaacgtattaaatttcgaaagctcgaaattacaaatttgtaggttgcttaaacttgtttctccttttattttagacttagaattacgcaaatttttttgaataatacaaagatcccataatgtctttactcgttatcaaaacattttcccttccttcggatttgttttctcatgaatttatttttttagatttgttgggtccgcataaatttaattttaatgatatagaggcacagattgggccggcacagattagtctggcccaagaaaatagatgggccaattattatggaccaaaattgggccattcttttgttgtgtgatccggcccatatccgaaccgaagcggaccggatatttccgccctcttattatccatggcttgccgacccaacttggaaccctgcttgcatttgcttttaccaaatgagcaagttcatattttatttacttaggcagaaaagctgataaaatgtaattcatggtctggattcaaagaattgcgactgggttcgcg

SEQ ID NO: 74994 - DNA, 824 bp, Carica papaya
  Intron number 1 from transcript evm.model.supercontig_21.1 94 (locus evm.TU.supercontig_21.194) derived from phytozom e v7.0 (chr-ID supercontig_21; pos 1913058 to 1913881)
agtgttaaaggtccattgtgggaagaggtctccaggtaaattgaattacatgtcttctcctcgtctcagtcttcttcttcttttctggcggagatttgagctggtttcaactcatgagggcgagatctgagctgagttcattaggtttctttatctatttttaaattctttccatttccggttcgtttgtgtggttctcattttattcacttctttatccttctctcagatattactttcttcctccttctcgtcctttttctgattttaattcaaaaaaggaatatggataaagattttgaaaaattaccagtcgattttcgaattcagattcatgtaattcagattttctggcgtactactactgaaattctggaccgtctttcttttcttaacccttctcgttccccctctccgataaatttcctaattaatcaagcttagccagctctctcactatttaattttatctaccatttttagtgtaatttttcttttttcacaagatgcaagaattaacataattgaataataaaaagataaattccaacatatcagttgtcattattttttcatgggatgagcaactgtaaattttctcagtagaaatttgtgattcatcaactcgtatgatttgtctggattctatccacgatctttgtctatcttcttccatttcttcgtctattttatgtgaatatgttaatgataatcacaatttgttttattcttgaaatattatatgataaatacaggagtgaaaattttcttttggtgttctttcatcaggaaattagcagagcttggttataatcgaaacgcca

SEQ ID NO: 74995 - DNA, 675 bp, Carica papaya
  Intron number 1 from transcript evm.model.supercontig_84.7 2 (locus evm.TU.supercontig_84.72) derived from phytozome v7.0 (chr-ID supercontig_84; pos 583281 to 583955 reverse strand)
aggccgcaatccaatataatcctctgctcatttcggtaagttaaccttcagattgttaagaatctttgggagtttataaaggaaaaatacaagcttctagattgctatactacaacgtgtttatgtcacctttgtcttctttttcaacataacgaagtatcacataatttatctttctgattaactttttcttatttatacgcaattaaatatatcctaacctatgttttgattttattttacagtaaatatctttgtctgagagaaaagagaacggttattttatattcaatatggataataaggagatagataatggaagtctttggaaaaggttctactttctggggacagatagatacagatattagttatctccatctctctctgtctgcaggtttgtttgtgtacattgatgttcatgcccgtccttgaacagattcaaaaattaaagcacgctatataaaatggaattttgctgactaacataactgagagctcttcaattgttttccattgatacctaaatgcttcttgacaacttgatttattatagaattacttcttcaaaaggtaaaactatttgctaaaaaatatttccttagacactagaaataataaaatattaattttgcttcaggcaaaaaaaattaaggaagcagttgaagaagcagg

SEQ ID NO: 74996 - DNA, 547 bp, Carica papaya
  Intron number 1 from transcript evm.model.supercontig_694. 2 (locus evm.TU.supercontig_694.2) derived from phytozome v7.0 (chr-ID supercontig_694; pos 21580 to 22126 reverse s trand)
aacctcctccgtccattcaggacgcttccgatcaggtttctgctacactcttcttctttttttttttttttaattttgtttataaatctgtgcatatgcatctctagaatattttcttctctgtttattgctttaattattctgttcactcactcgattttactttttttttttttgtttcagcccgttttctatacctttgctttaggttaccgagaattgtggtgatctattagaaacataatcaattttgttacgtttaattggtaaacaaactttagggcatcttaggatttgggttttacgattatggcctttgagatttgggttaactgtggcttttgatttagttttgatgataattggtacttctaattgtagttagtgataatgtctgatggaggtgaactttaaaggtttccaacatacgggatgatgttatccttttcttttagctgcattcttttgcatatttttgtgaatgtattgattagctgatgtttttattacagattaacaaacgaggggatacagtggaagataagat

SEQ ID NO: 74997 - DNA, 526 bp, Carica papaya
  Intron number 1 from transcript evm.model.supercontig_161. 25 (locus evm.TU.supercontig_161.25) derived from phytozom e v7.0 (chr-ID supercontig_161; pos 309475 to 310000 rever se strand)
ctggtatctcatcttaacttagtttccgtttgaagcagttaagaagtgtttgtttgggttagtgctttggttgtcagtatgaaatggagcttatactatttgccttactcatatagagtgcttgtttgggttcttttgtgcttcattctcgagtcaactcatggtgtcatctccgaattttaaccaaacaagtttatttttgctagggtgagtactgaaccatttttgtgcttttattttttcctgtggttcatatgtaatttgttgagagaatactgacacctcatatatttaggcagtgtcatttttattttatagttctactggtgttattgcatcttgttgagggttataattaaatttgatgatacaaaataatcttggcagaacttttctcagatcttcattggattactttgattgccaaaaatgatgatcatatgataaagtaatttataagaaacatttacggttgaaatgttcttcaaaaggtgaacttgtgacgactgaagaagctagaagacga

SEQ ID NO: 74998 - DNA, 684 bp, Carica papaya
  Intron number 1 from transcript evm.model.supercontig_98.6 0 (locus evm.TU.supercontig_98.60) derived from phytozome v7.0 (chr-ID supercontig_98; pos 1086960 to 1087643 revers e strand)
ttcaattgttggaggttattgacaagaaatatttaaattataaagtataatgttctattttaaacaattgtttgcttctgttgtttgtggcatcactcttatacgagggtttaatacttgtttttttattgctgtacatggttttttttcggtgaataaatttttcatgctctccttttcttggtttgacttccacaattttgtataattgctttttcaatgttaaatggttggaggttattgacaagaagaatttaaactatgaagtataacgttctaattttaagcaattgtttttggtatcgcttgtgtgcaaggatttaatgcctgttttttttttttaatttctgttcatggttttcttcgatggattagttttgcgtgctctccttttcttggtttaacttccatgattttgtttacttgctttttcaatgttaaatggttggagattattgacaagaaaaatttgaactatgaagtataacgttctgatttttaagcaattgttttactttttgtttgtggtatcactcctatgcaaggatttaatacttgttttcttattgctgttcatggttttactcggtgaattaattttgtcctgttctcattttcttggtttaactttcatgattttgcttttcagaccaagagaactaagaaggctggtattgttggaaa

SEQ ID NO: 74999 - DNA, 492 bp, Carica papaya
  Intron number 1 from transcript evm.model.supercontig_6.17 9 (locus evm.TU.supercontig_6.179) derived from phytozome v7.0 (chr-ID supercontig_6; pos 1458240 to 1458731)
gagattaagccgaatctcggcagattccgtaagtgaacttgatgctttaacggttattgattgtacacatctggtttagattctctccgactaatttacaaggatgtagtagtatcgtcttcctccttttgcattggagtgtaacttgcatttatagagattccactgattattaattgccttcaagttactggtttagaattcgttttcttttgaatgttcgctttgtattttatcattgcaagctaattttactttatcgacatgtcacgctctttcatttgaagcactgcgggggaagaatgtgccgtttaaatgtgtatcctttaactgcatactcgttgtagtcactggtaaggtcgtcaattcaccgtttcttcattaagcttcgtttgttgctttaagtgataacagttagcgttattgtttgtaatataaattcacttgtctctttcagctgttcttttgaaggctcttggagctgcctcagtg

SEQ ID NO: 75000 - DNA, 914 bp, Carica papaya
  Intron number 2 from transcript evm.model.supercontig_32.1 01 (locus evm.TU.supercontig_32.101) derived from phytozom e v7.0 (chr-ID supercontig_32; pos 1270826 to 1271739)
agtggacgccagcgagtgcattaagatttacttgggtataatttaactaatgttaatatattattcatcagtttttttttttttcgtggtggttttgtaatgtgctactcgtgattaccgtaatttgtatatattaggagcctactgtcagtatttctcactgacgagcaataagacactgttaggttgctgagaaatgcgaacgattcgcgttctgtagtatcggtattctcctaaattctaacttaagaagcttgaatatccgggttggtcggttatgaataacttttttccttgtcaattttgcatattttcctgtgtaaaaagagtacctctcacggtctaaattatctagtaggagcttttaaaattaaggagagatagtggatgagctgagttatttttattagtttctttattcaaacttgtgttttggagtactcttctttggttgaattcctttccggcatacctgacccagcagctacactccagttgattcaatagaaagataattaaatctacacccttttggtatttgctttatggtgtatgcaatattcttcagcaactgccatgtgatggttcaattctctggtttaagcgcacctgtattttaactcgtgacgtgctaaaaattgttgttacttgtttggtaaaatgtttgtgagtatgcatttatatttgtttctactaattgaaagaatgtgaactagccgggttgctatgaataagtgacatggtgtaagagctgttttagttttgaattcaatcaatcagtcctcttgtttagatgattgtcattcctgtttactgtttgattgccatctttagaatctcggactcattttactctcttgtttacttaaatggtgatctcatagtttctagcaaagaggagttgggggccttag

SEQ ID NO: 75001 - DNA, 598 bp, Carica papaya
  Intron number 1 from transcript evm.model.supercontig_3.29 2 (locus evm.TU.supercontig_3.292) derived from phytozome v7.0 (chr-ID supercontig_3; pos 2057838 to 2058435 reverse strand)
catccttttgcagggaattcttcttgcagcttcaggtgctgataattaccttctcttgattgcttgttaattactacatttatgcattcctttagtgaatacagcattgctgtttgtctgagggaaaaaattggatgttggttttgggagatgagatattgagcatttgatgtacgagaatttttcaatttttgcttcaattcgtgagaagaaatgtttggatttggtaaacttgaagtcaatttgagtttcggctgagttttctgtgattaggttaaaccatgatgtagctgctgcttgattgattagcttgtttactggcctataatgaaatcatggataaagcataaagcttcagttataagttaaatagataaacaagtttttgaattcttaagttacatcaaattgtctttttgggtattggctggaggaagttcagttgtaccccgtaaaagcaggagtgaacatgtaaagcaggctaattttatagtatgaataattcgcttttattttcttcatatgctacaatgtaaatgatttctgtcactcctgaattatgatttattacctcgtttacaggctttcttccagaaga

SEQ ID NO: 75002 - DNA, 852 bp, Carica papaya
  Intron number 1 from transcript evm.model.supercontig_8.21 0 (locus evm.TU.supercontig_8.210) derived from phytozome v7.0 (chr-ID supercontig_8; pos 1478307 to 1479158 reverse strand)
gaaacagaacatagtttctcgagaggtaattcagttctttcattattttgtgcatggaacggcatgttattgtttgttcttttgatattttcttccagtatgtttttttttttgttttattgattggggtgggaggtaaaactaggtatttgttgtattgggttgtattggtgcatctactatgggatgacataggacgttttgagttggcttagcatttgaagtacctgtactaaagaaaactgcattagttgccattatgatattgctaggcttagacttcagtgctgttgatgttggacttcttttgggtagtgttcagacttgcaactttgctagaagatagtcatgagagcttcagtggtagattttgttggtctagttgctttcttttctgctggttagatatttggtgcttctatctatttgtcatctgtcaacatatagaacttccacttctattggtctcaatctatctatttgtcatctgacttcagaatggtatgcaatgcagcgacttttgattgtgaaaacgatgcttacctgacatggttgttggcagaaattttgtatggcttctgaaccagcaaacttttgaagaaaaacaactaatcaaaatggtttttagtgctcgtgcaagttcttttttttttttgggtcaatcattgttagtcatggatgagttccaagttggtgattagatgatgttttctgggggggctttagtagaggttttccatataccaaaccttttttcaatttgtttcttgatctgtttatttcatctaatcatcaagcattttaatttctttcgcaggcagggttgttgacaaagcctgttttatctggaaa

SEQ ID NO: 75003 - DNA, 776 bp, Carica papaya
  Intron number 1 from transcript evm.model.supercontig_3.42 4 (locus evm.TU.supercontig_3.424) derived from phytozome v7.0 (chr-ID supercontig_3; pos 3075705 to 3076480 reverse strand)
ggtacgtctatccgcttcgcttaatttctctttatctggttccatttctgctctcttttttcacttgtatctgcagagtctgtctacttccgattttttttgttactgtagcaattttcgtggacaaggatcagtttgtttactgttgattgattgtttatttcttaaattgttggatccaatttatattttgcaattttaactggactttgttgtaaatttccggtgattttaactggattttctgaagttctaattgcccgtttattttatatagaggcagtggttaaaaatttgtaagctttcgatgtctgatattggttttttttatcgggtaacctgaattactgttagtgtgattttcggttgctaattggttgccttccgtaattattagaatgaaatctgtctgcgctggtgaaggtttttcttaagcagataacgaccgtcaaatagttggagttgaattaatgccttggatgtaattaaaactcgaatatgaagaaaatagttgatttaaaattttctttaaaccctttctaaacaatacgattaaggttttgagtgtgatggctattaactaatatgtattacttgccttgtaatgagcgaaatttctctactaatttcgtctggattaacctgataattataggtttggaatttttcattgttaccatatggagtttcacagctaggaatttcgtaaataactgtttttaacattcttttgattggtagatattgaagaggagatccgctcgttacaactagat

SEQ ID NO: 75004 - DNA, 796 bp, Carica papaya
  Intron number 1 from transcript evm.model.supercontig_91.6 1 (locus evm.TU.supercontig_91.61) derived from phytozome v7.0 (chr-ID supercontig_91; pos 682470 to 683265)
caattacgtcattgcaggtatatttttttcctctctcacgaacttcctcttatgctgtctcatcatagaggaccttctggtgtttgggacttatgcgaggttaattgaggcccataacatggtttggatgtctgtcatacatgcatcttgtgtgcaaaagtttttgtgaatgctctgaatatatgggatgttaaccaaaggtttgctggggcttacttttttcagcactcccttgtcagagaacaaaaataggttgcataagtttgaataactgaagttttttctctgtagcttctttttaacgtttaacttaatggacattaatcaaattttaaaaccttgttcatggattaaaataagcttcgtctggtgtcgtacatatcaagcaaaattaggcaataaaaatagaaaactgtaaatcataatccgagtatgtccagaaatttaaacaaatttttgcaggatagataaatagctgaatagagttgctgttttgtcaactgattatctttcttgtaagcagtacaatatcagtgttctggattcttaaccgcctttgtaaataggttttgttgatccaaacttaccccccttatgcatgtcctaatttggccttctatgtgcgtgcttatcaactagacttgagtttgttaagccgaacaaaataacttgtgagggttgaaacggtgatcgatgttataattggcaaacagtcttctctctgctgaaagttggttgggaattaactgatttactatgcctttgttagatctcgaaggagtacttagagaaacag

SEQ ID NO: 75005 - DNA, 856 bp, Carica papaya
  Intron number 1 from transcript evm.model.supercontig_80.7 0 (locus evm.TU.supercontig_80.70) derived from phytozome v7.0 (chr-ID supercontig_80; pos 534298 to 535153)
ctctccccccatcaactatccactcagacattcaggtttataatagtccatatatatacatctttcttctgctatcaatgttcgcgtactgccctctatgtttttcttgaattagatgcgtttatcttggtttaaaattgatttttgtatcgttggaaatacccactttcccagcttgcataatcgtgtcaagtatctggtttttgtttgtgctttgatttttatcttccttcaatcttatgagtttgtgcttgttttgtatttatgtaaatatagattcccattactccaaagtgcaatattatatattgaactaattttgtttaacgttataatttcttgtttctgtaattgtacgggagatagagctggtttagtgcaaagtgacacgtcaatggtgttcgatgaaatgtctccgtcatattttttctctgttttggctttgagtggagaattgaagcataaacatagccctctagtttgtaatttttagaagctactccattgaacttctcagttctgcttctccagtaggagcattcattgctcgtagctccttcacatttattgttgattgagtcaaggctattgaatgaactaagctcttcatgcttagctcgctaaaaagacagttcaggtttgttcaacgtaatagacatgctcaagtttcatgaactgcattggtttgattgagcttcaatagttgctagtggataaaggtgcacaaatgatggtaacaataaaaataaaaaggcaaagagatacagattttgttgcaccaacagaatcttaatttcattaaacgaaccatttagcatttttgctattgatactcctgtattacagcttcaggaat

SEQ ID NO: 75006 - DNA, 603 bp, Carica papaya
  Intron number 1 from transcript evm.model.supercontig_97.1 1 (locus evm.TU.supercontig_97.11) derived from phytozome v7.0 (chr-ID supercontig_97; pos 95857 to 96459 reverse st rand)
tatattttacaccgcttgtgtggaaaaggattacggtgagttttctccttctttttgggttttaaaattttgagagatgtttttgaattgatgggcagcggcttctgggtcttgattgtttttcagatttatacgtgggtttaggctttaatgagaaggtgtatctgtttttttttttttgagtggaaattatggtaatagtattgagattggattggatttgactgatcctgatctgggttctgctgatgatgttatttgatatggttggctgccgagaaaaaagatgaattacagattgattgactgcttttattttttaaaaaaaaatttcttgcgagataggcaatttcaaaaaggttgcttggcttttggaaagacttatttattaagatcaatttacttgctgccttttgaaaactagaacagtattatgcgtggaagtcgaaattttatttaaaggtttcctgcagttctatgaagaactgagcatcagtaagtgtggagtaatgtgcttttgctcatgattcatttccatttttaagaaatagatttttgttttgtttaggtattgttttgaagaaagcaaaattgactaaaaag

SEQ ID NO: 75007 - DNA, 537 bp, Carica papaya
  Intron number 3 from transcript evm.model.supercontig_519. 5 (locus evm.TU.supercontig_519.5) derived from phytozome v7.0 (chr-ID supercontig_519; pos 26968 to 27504 reverse s trand)
atattcttcgtacatgaattaatagaaaaaggatgaatgtttcttaatgtaattcataattcagtatctgacaaaagccgtgatgctataactccccactttaaaaacctatatttatttatttgagttggtgaacatttgatattcattcctggatactttaattcatctttcatattttaataaaccgattctgaatcaaatgaaccctgggtcctattgtatttttctaatatttgtgtggaataagtaaatacttgacatttaattagaatttgaatgcaactggttttttgaagtttctacaacaggcctcaacattgcgttatctggcagattgcgactaattataaacattaaatttttatgctccaataagatttaggttaattgtttagttaaaaaaagatttcggtcaattgtcactctttatcccctcaatacaaaatgatggcttatataatgccagtgccttaaccattgttgttcctcttctctccagggaggaaaggtgtgaaaggagcacagcctggtcct

SEQ ID NO: 75008 - DNA, 430 bp, Carica papaya
  Intron number 1 from transcript evm.model.supercontig_519. 5 (locus evm.TU.supercontig_519.5) derived from phytozome v7.0 (chr-ID supercontig_519; pos 27939 to 28368 reverse s trand)
gtcaagaactccggaggtaattgtgattttaataaatgttgatagattaaatatcatattaatactttatgactatcatcattgttggattagttgaatgaatttgacccagctggaaggaagttaatcgtagaatttctatgcggactgaacattgatatctgtgtatcaaattcagcaatttctttgtcttgattgccattattagttggcacttttcttttggctgctgtcacaattttttttatttgcataagcatgagtttttgtgcatcttgttcatcttttctatagttctttcttcaacttccttatttctatgtttgagtcattttcctagtgtatcatatgtttctttatctgatcctgttgaagtgcctgctattctgattctctttctttatatctttgttcaatttcaccacaggaa

SEQ ID NO: 75009 - DNA, 462 bp, Carica papaya
  Intron number 3 from transcript evm.model.supercontig_36.5 4 (locus evm.TU.supercontig_36.54) derived from phytozome v7.0 (chr-ID supercontig_36; pos 449418 to 449879 reverse strand)
gctctttgttgtatccttgaattggtgcttgaatttattgcttctttccgacaagaagaacagttttctgttttccttttgggtgttaaatctgtttgcaacatgcttggtcttcagggaactgaatgactgttataccatgtagcattcaaaggcagtaacttaacttggaattttgacgtttcttctaatattgatccattttagcaactggataattatcataaagaaaatggggtagcttttggagttaatgaaatgatattcttgcaagcttttattttgtttttgatgatagttagtttatccaagcaccataaatgctcagggagttgtatgtgaaatgggagtgcagttttcactcttttttttgtgaaagttttgaagtggatcttaaatacattgtttgatctgacttcatgaatagatatacagagagtttttcgttctggaccactccat

SEQ ID NO: 75010 - DNA, 494 bp, Carica papaya
  Intron number 2 from transcript evm.model.supercontig_8.29 8 (locus evm.TU.supercontig_8.298) derived from phytozome v7.0 (chr-ID supercontig_8; pos 2243566 to 2244059)
gttgattggcgggacttctacttgagatcatatacgtgagtttgtacatttttacttgtcatctgttgtggtaattttcattttatcgctatttaaatcctgcacttaatttttaaattagtcctaatacataataggaacacaatttccatgcttgaatcacctccactctcaattttttatccttgggattggaaagagctcaaacataaaaagcattttgtaattgcatgtacgaagattatagaaattaataggaataaaatgataattgaatcaaacatgactttacttctgtatatacgaaattgtaaagaaccagatatagttgtaattttttatgaagttctcgagtttgatgctctttttatttcttcttttttcaccataactatacacataaaatggtataagcttaaattatcagtatataagagtttttgggattattattgatacccacctgttagcaggtttgtcggtaagctcgttgg

SEQ ID NO: 75011 - DNA, 478 bp, Carica papaya
  Intron number 1 from transcript evm.model.supercontig_309. 8 (locus evm.TU.supercontig_309.8) derived from phytozome v7.0 (chr-ID supercontig_309; pos 56049 to 56526)
acgctagaaaagaggctgttgattggattggcaaggtgggttatttcggtttccattgttgattgatcagaataagaaattcatatatttttttagtttcaatactatttgatgggtactcataaattttgcagatttgaattgggtttcttttgaatttgattaatacgaaactttttcattgaattgattgtgctctgttccccctttttgtattggttttacgaacggagtcttttgatttttgattgaattttctttttgtttccatctttacatagctgtggacctaatgtgaaatgggattggtgggttctttcttttcgtgttgggtccagcccttacaaagaattaaaatatttattcccctgttcttctattttctttgtttttctctgggttaaaccttgtttggaagtacttttatgggttgtgattagttgacgattaaaatgatggttttgatccaaacaggttc

SEQ ID NO: 75012 - DNA, 648 bp, Carica papaya
  Intron number 3 from transcript evm.model.supercontig_169. 23 (locus evm.TU.supercontig_169.23) derived from phytozom e v7.0 (chr-ID supercontig_169; pos 290511 to 291158)
gactgcgtggcgtctctgccgttgcaatcctcttggtattttaacctttcttcttcgttttctttttccttcaaataatttaatttctattccattcatttacctgattcaccgctagatctttttttaagtaaaaattcgtaaaattatttagtaatacgtttacaccgatcatagcataacgtaaaataacacaattcccaaataaagaaatacgagaacaaagtccattttgaacctacaaccacttgtagaggaagtgacataccaatctttcagttaagcagtggttgatagtttcattgctgcatcttattagtagctgtacaacctgcttctacatttagtaagcatggtagttatcatagaactcgtgtatttgccattaacgatttggtactatccatttgtttcttgtatatatatttccttaaatggtacgtaggaaatattaatataatcttctatatcaaacacctttttaagtcaagaccaccctcactttctcattcaataaacactttcttgtatcaattagctgccagtcattgtcgggagttgtacacaacacatataccatatatatagcttaactattaataatgcttgggaaagctggtcaggagctcactgtgaccgccccagggg

SEQ ID NO: 75013 - DNA, 546 bp, Carica papaya
  Intron number 2 from transcript evm.TU.contig_28808.1 (loc us evm.TU.contig_28808) derived from phytozome v7.0 (chr-I D contig_28808; pos 7896 to 8441 reverse strand)
acgtcgctgtagaccccgtccacaatcctgtgcaggtaaattatgtatacaaaatatcttcaacttttcttcctgtatgttttattaataaatttttcatattctctaaatttctcatctgtaccatacttttcaagtcttgttaattagacgtggtgataaaagtttttattttctaaattccaacatgtatgtacaatttgtcaaaagtgaaacaagctttgaaaatgacaacatttatgatctgagttcgaatattttgtttgtgattttatcaagtagtttacataaatcagtggatgtcaaatcaaaaatatatagcatgtgaaattgtaagctatgtatccgtgtatgtacttatatatgtgtatatttgtgtaaaatacatatatacacatatatataactatacttctgtataaaatacaaagtattaaaacactatttctgtcagaagaaaaaaaaaagacagaaactcttccaccaagaaattaatcatactgaaaaaaacacgttttttttttgtttttatataatcaagtgggg

SEQ ID NO: 75014 - DNA, 504 bp, Carica papaya
  Intron number 1 from transcript evm.model.supercontig_19.2 16 (locus evm.TU.supercontig_19.216) derived from phytozom e v7.0 (chr-ID supercontig_19; pos 1673257 to 1673760 reve rse strand)
aacataggtaaagtttccattaataaaaatctttatcttttttggtgggtaaacataattatttttttcatcagaattccatcttctgcaaatcatgtgtagaatttcacggaattcagacccctatttattgctaatacataacatttctttcagcaagtctagctgtacattttagagcgatatttgatttatcaattactgcatagctgaatgatcagtatgttctttactagagtttctgggttcaaattgaattgtgtttttatatgtctcctctcttgaaagttattattattgtctaattggtctatgtatattgtttaattaatgaacgaattactcaaagaaaaccctgttaggttctgggagttactgaactcagcatgttatttagagctgataattttgggaatgtctgtaaatttatcatggagattagctgctaatttctgtgatttgatgtatgagtttgcaggagatttttattgggacttctaaaat

SEQ ID NO: 75015 - DNA, 806 bp, Carica papaya
  Intron number 1 from transcript evm.model.supercontig_18.1 51 (locus evm.TU.supercontig_18.151) derived from phytozom e v7.0 (chr-ID supercontig_18; pos 1381709 to 1382514 reve rse strand)
tatatacggctttattaggggcctcggtatggcacagtcttttttgttgcattccgtctttttctgagtctgtcaataaatattaatatcatcattgccaaaatttaaaaacttttccctgtgttttaactactatataccgtattgagatgatatatgggatatgattgtttagactttgtatttattatggttaaatttatatctctacaatatctatctatttattcatataaattaatatttttatgaatatatgatttatgtatgtatgtacgtatgtttttatgcgtatccgggtttatctcgtttctgtgcgtacttatttcttatgtttgcacgtattccttcttctggagtattaaaattggcaatgcatttcaatatcgttaatcttttggtggagatatcttctaaagtttgtgcatcaccagtatccatctatttaattgttttacctctgacctttcttcctcttggtttttggacttgttgaaaaacttgtcagcattgctaatgcacatgcttctcttaagtattttgggtaaaaggagaaggttgttctaagtgcttattctagtgggtagatttaattcattcaaccttgatgttcttctcttgaaggtccttgatgttctcctctagttaggacattttttgattttcttttccaaaagaaagttctaatgtagttatttttgatttgtgaagctcccttttagagagtggagttccttgctctcatgccggatattcttttgatggtcaccaaattgaatgcacccctattattttgtttcagataa

SEQ ID NO: 75016 - DNA, 407 bp, Carica papaya
  Intron number 1 from transcript evm.model.supercontig_2.45 (locus evm.TU.supercontig_2.45) derived from phytozome v7 .0 (chr-ID supercontig_2; pos 879155 to 879561 reverse str and)
gtcaaggttagtgagttaatattttgtgatttaatagcttgcacaagttcaaagttttctcataattatgccagctgtgcttccttctatcggtgacctttttatttgaatgtttaaaataacattaaagcacatatccactttattaatatatacatgtggcacacgtgcatacatatatagatttatattgcattataaggtcttatattttgtttctgtgtattgtaagggtagatgatatagcagagacttatcccataccatttttttatagattgtgagcttcaatatgatgtccaaataacattcttgaagataatgaaagctgttcttaatcaatgtaaaatataaaaattgctaatatttctaaacaatccaatatttataggctgggtttgctgggg

SEQ ID NO: 75017 - DNA, 687 bp, Carica papaya
  Intron number 1 from transcript evm.model.supercontig_634. 2 (locus evm.TU.supercontig_634.2) derived from phytozome v7.0 (chr-ID supercontig_634; pos 6130 to 6816)
tctgccacgaacgacttggacgaccttccttttaggtaccttcattttctatcttctatttctggctagaaattctagcaatctctgtttttgaacttgaacatcgccgttagttttctctcttgcacttcttttttggcacttctactgtccattgtttggttactgagtaattggtgggtgctttgtttaccacgagatataagttagcagtaagctgaattatgcctttttttttttttttgtctaagataagcaatgttggtttacgaatattaatttacatttgtgtggcaaattctagtttatatcggagaatggagagagaaacacggtagcaaagcctctcattttaattttcaaaatcattatcaagaaaacgtgcttcttttttagccataatttgcagagaacacattagattataatcttttacgtaacagatactttggtggcgccatgaacaaacagtcaacatgatttgagagtccagttgattgattcgtttgtcaatagacgtgatgacccagggtttgcacaaaacttagtggtttatgtcaaaatttcgtaacataaatacatatctaataagtgctaaaaaaaagtgactattcaatcttgtagctgctgagcatatgcattttttgcgcaggggctgtaagacctgtgggagagaggaattggaga

SEQ ID NO: 75018 - DNA, 942 bp, Carica papaya
  Intron number 1 from transcript evm.model.supercontig_7.56 (locus evm.TU.supercontig_7.56) derived from phytozome v7 .0 (chr-ID supercontig_7; pos 557483 to 558424)
tgcacccgacctgccctcattgctcgttttctcaggtatttacgaacgaaacaagcagaggatgcttcttgattcttctctgtttttctcgtattctacatatatttgtgcaggatatctttgaagaattgaattattttttcacctagtaatgcacataatgttgacagggaactggtaaattaatactttaaattacatgcacatttttgctttgacggggagttcagattttgaattagaggtgattatgagaagttaggaatttaaagaattagggtcatttttagtttagtgaagaaggtttgatgtattataagattaatggaattaaacattgttagattaattaaattcagaattctaatgaaaatttcaggtactcgctgttttgtgtttaccttattaatgtagtgatggtaaaatgtgttcctaagaactttttatcttgattgatctaatattgaggacgttaaagtataataatgattacagaaatgggactacaccaacgtgatccattttaactcaggtaggttgcataatttatgtgttcttcctttaggtatggtattgcctgttaactctctgttcttgccaaaaggagttttgcatgcaagtttaaaactcagtattggtacttgcttgtacgtttcaagtgaaggaacaaaattcatgtgatgaaatataaagattataggggatgtttgatgaattttgcctatgagttgtcctgcatattgtttgttgtattatatttctttttgttacaagatccccaagaacctgttaaacattggaagttcagctctcttaaattatttttctcttaactgcaatgttattaatattattctttaaaaagaaatgatgtaaatccaagcttggttccagaaaagtttttcaattagtgtaatgttgatgtaggtggcactggattta

SEQ ID NO: 75019 - DNA, 862 bp, Carica papaya
  Intron number 1 from transcript evm.model.supercontig_601. 4 (locus evm.TU.supercontig_601.4) derived from phytozome v7.0 (chr-ID supercontig_601; pos 15659 to 16520)
acttagaaaaagaggtaccccgtttatacaattcattatattagtaattttttatatattttgttttagcgcgtttggtttcatccacatatacacatatagttaccaattatgactaaagttcgcagattcaagtatcgtgtgcttgtttgaagttcgtttgctgatgctaattagttgcaggaaaaagttttacgagataagcgttctttattgatactttattggaaatggaaaaaagaacaataacatactaatatttttgtggttgctaaatcttcaaatatataaatatatatctactatcacatatcgctgtagctgtgcgtatttatgtgtatagctgccgaattgataagatgacaactgatagcgattagacacatgacataactgaagttagataaaagctaaccatagtcagatgttggttagtacgattagctgcaattagttattgagtgattaattgtaattagtggatagttaagttaaacttaattaccctcttgtgtgtaaatactgtgaatgtaattaatgtaaagcagctctcatttttaccttcaccgaaccctctctgaatttttctctccagaccttccctctccattttccaaatgtgattctattcatcacagtttcttgtgatttcacactgataagaactcaaaatacatataattaaatttaatacataaaatctgaaaagaaacactcataacttttaactctttattaagataaagagttctattaaattacaaattagtatttttaacgttatagtctatgcatgaagatgaatgtatgaatttgtgtggaagcaggaggtgaacttgctatccaaaatttatccagtagt

SEQ ID NO: 75020 - DNA, 910 bp, Carica papaya
  Intron number 1 from transcript evm.model.supercontig_5.10 8 (locus evm.TU.supercontig_5.108) derived from phytozome v7.0 (chr-ID supercontig_5; pos 813241 to 814150)
ccaccgtctggcttgcttgggatacacaatcctctgtacttctctttctctctcaatgtccatataaatatgtatttatcatattgacttgtgttatgttatgtctctggatttgtgtgggagggtttccgttgatcttgcagctgagttggggaatttgttttgactttaccatgatcgttgcgttttaggttggtgattcatggatgtgactgaactcttgtttgtgcttcattttagtgtaaatatattcattgggtttatctagaattaggacaaccgcccgctttgttgaattttaagctgcaatgtatgccttcttgtttcaaatacttagcaaagagatgaacaataatgaaggtatgccctttgtgctttatgtcagatttagatgtctagaaaacctaggttttgataagccagagaagttgcttttgcatgccattttgttaagttgcataatcacatttctgtccatttgcttcatttgtctgtcatacttgtgttgtttttcactgtatcttactgcggttttccaatttgatcatttgaatgttgataggattgtctataaaggccatcaacttttagaaatctcttctgtatgattattggaggttcatcaattggtttcccacacaatgtagggcaattaattgaagtgtttgttcttcgtatttttcattgaaaattaattgatcgaagctcttgtgcatttgagtcttcatttaattgtatttgtgcattttgattatttattactgttgcaacaaaaacagctgaatgttctgctacaagcattcatctttatttcttttctcttacatcgttcaatagcaatcatatgacatttgaatgagaagtttctcatttttgcttctgattttgagcaattgaaaaatacagaggt

SEQ ID NO: 75021 - DNA, 604 bp, Carica papaya
  Intron number 1 from transcript evm.model.supercontig_21.1 62 (locus evm.TU.supercontig_21.162) derived from phytozom e v7.0 (chr-ID supercontig_21; pos 1631960 to 1632563)
ggagtttattctcgctaattcacggtgagttgtatttcccctgcttcaatggcagcattactcactgagtctgtgttgagttgcgtgtaggtcgactcggcactgtatctcagtaggtgttaattacgttgataagaacgaggtagatgacagcgaagagggagacaaagtgattcaggaaggaccaatcatagactgccacgtttatataaaaatctaagaaatatttatcacctgtccagcctttacacgatttggcggtatcccagttctctcaccagcactgggaatctctcttgttgacgacattgggagttgccgctgacgtgatttcaacttttttaattaattaatgtttcaaaatgctaatagtaacccttaattattttttgattaaatggtaaatcaccttcactattgactaaattgaccttgtcgccgacccagtcagcagattctaattttgtagaggtgtggctgtcacgtggggaatctacactaagtttctttttctatttttttaataaaaattattttgattaaaataaaattaatttgcatgaatgcaggctcaaaatccgcacgtgcgaagccacttcactgg

SEQ ID NO: 75022 - DNA, 595 bp, Carica papaya
  Intron number 1 from transcript evm.model.supercontig_28.1 2 (locus evm.TU.supercontig_28.12) derived from phytozome v7.0 (chr-ID supercontig_28; pos 174315 to 174909)
aagctcgagtgcttaaggcatctcttggtcacgtagtccgtacactcactattttccctttttcttttcccaattttaatatgttaattctgaatattttattttattttgttttattttttttatgttatggtgcgcaattatcaggttatgttaatcagtatggttttgaaattgtttttagttggaggatatatactgttataacttaagttgacgcatattataatcagctgaagtttagattactggtatgatatgcattagcttgtttatttgggtgctgaaatatgaggaagttactttacaccataattgcgattggcgtttttaagttttcagtggtaaataaattaccatatgcaacactacctctttttgaagtgacatcctcttttgtcccatttttcatgtggatagctcttatgtttgattggctcccttaggttcatttggtggacacagaaaacaattgaaaaaaaaaagaaggttgaggagaaaatgacttcggggaaactatatgttcatacatctgagagcagacaatgtcttggtatcttaattgtgatgaattgctaactacatggatatgcag

SEQ ID NO: 75023 - DNA, 685 bp, Carica papaya
  Intron number 1 from transcript evm.model.supercontig_20.1 65 (locus evm.TU.supercontig_20.165) derived from phytozom e v7.0 (chr-ID supercontig_20; pos 1750847 to 1751531 reve rse strand)
ccgcaggccaatcagttttgaaagatcagagcgcagtgagaatttgctaaattggctcacagacctggaattgtgcattcaagatctggaggaaaaacttgaaagcctggcgaggcatttgattaaaattagagtctcccttctgaccattcttaaccactagcttagaagatcacgaacttaaattcttctgcatgaatggtgtatacttgtatatcacacttttgataataaatacagtcaccttgagatgcccatggcacttcccaatttttcttcaatttgttgtctcagtaaagaaaaaagtaaaaagaaactacttcaaagcatactgggaactattcccagacagcagtaacatggataaatcaagactagaaaaaaatgttacaagatttttatcattaatttcaatcatgtattgaccttcttaaattctaaataacggattagcttccaagctttgtaattaaactttataccaagcatgtaagtattccctttgtctcgactaataggattaagaacaaatcaaaatagatgacttccacattaactctccatttcacatgcttttaaataatgaacaatgtgctagtgtcttcatgttagggggatgccaactaaacctacacgctttggattctaaatttttaatattctcttttttattcattagcttcta

SEQ ID NO: 75024 - DNA, 852 bp, Carica papaya
  Intron number 1 from transcript evm.model.supercontig_66.3 2 (locus evm.TU.supercontig_66.32) derived from phytozome v7.0 (chr-ID supercontig_66; pos 361226 to 362077 reverse strand)
acattgaagctaatttctgtaagttctctccatttcttttcatgtttcgatctgtaattttgattgtttggtataatataagagctgagaaattggagattgtattgtctagcataatataattgcatgttaggatttttattatcttatgggaaaactgatgaactggttctttggttctgtagtaatctgtaggttacctttgttttttgggaataagaatagagcgaggaaggtagactgttctaggcctcttttcatgaaaatacttttactttttttatttcctaaaaatactttttagtgcttatttcctaaaatcgtgtgtttatttgcgtctctatttgtaaaattatgttattcgttattcataaaaatatattatgggcgtgattgttaataataagcgcaaatgagaatatgttttttttttatttttttatttttttataataaaacactaatgtaacgtttaaaattctcacattgattgtcaatcttactattgttaactatgttattagtttctgtgagtaaaatacatataaatttagaaaataaaaattagaaaaaaatttcatgtaccaagtactcttagttttttattgccaaattcacttatctgaccctttaaaggtaaatgagaagaacaacatgagtttgatgaaagtaagcatttggtagtagaatgtgttttgtgctttggttacctttgtctagcacatatatgaatttatgcctatataatttactacttagatatgcttcaagtgtaaaatgtggtaatacgttaggttttttcttgacttccgtgtttgttgtttcagccccagctattaaaggttcagggga

SEQ ID NO: 75025 - DNA, 390 bp, Carica papaya
  Intron number 1 from transcript evm.model.supercontig_2.89 (locus evm.TU.supercontig_2.89) derived from phytozome v7 .0 (chr-ID supercontig_2; pos 1492585 to 1492974 reverse s trand)
tccaaagaagaagagaaatcaacctggaaatccaagcaagtacctcttacttatgtatacatatcatatacatatatcttgtattaattttatgagtaaatttcataaaactttcccttcttttattccttgcttttgcttcaatccctcaacagatttcctcaaatgaaaccctaatttcaaatttcaatagggttttcatctttttgtttttgtttttcttttggtctagaggatctttttcttttcttgtccattttctcttcacctaattgtcatcttcaaagctttaacaaccaccttcttcttcttctttcttttcttttattaaaataaagattcctgttttgttatgtgggtttctttttggcgtttatgtaacagatccag

SEQ ID NO: 75026 - DNA, 681 bp, Carica papaya
  Intron number 1 from transcript evm.model.supercontig_27.1 57 (locus evm.TU.supercontig_27.157) derived from phytozom e v7.0 (chr-ID supercontig_27; pos 1683149 to 1683829 reve rse strand)
tgcgaggaccgtcgtatcgctattgaatccgcttggtgagttctttggtcttcccagcccccctgtttgtttcgcaggaaattttttttgtttctaggagaaaactatagacaagctatgctatggtgtgaagaaacccttacgcatgagaatctttttttgaagaaaaaaatttaggcgtgtttttcgtgaattccggatttttctgatgttgtttgtttcggcagaaatttttttaccttttcttgagattttttgggggcttagttttaggtaggagctaaaaggatggtagattggatatgatagcttttttctttattcgtcttttttacttcgattttcatctgaaataaacgtgcgggttaatgttgagtttttattttcctttttgtttcaaaattttccttattgttctcttttcaaagtcttatgattgagtgtaattaggagaaagcaattttttcccttggtagattttttgccaaataatttcaggtcagggaagtttgactttgatgccacctgaagcattgacctttttcttctgggtatttaggtattccatgctttgcctgcagttttagccccctgttgggggggaattgatactattggtttctatgattgtaatattatgatgctttatgaataatattgtatttgatcttgcagttgccc

SEQ ID NO: 75027 - DNA, 348 bp, Carica papaya
  Intron number 2 from transcript evm.TU.contig_28523.2 (loc us evm.TU.contig_28523.2) derived from phytozome v7.0 (chr -ID contig_28523; pos 2527 to 2874)
ggaaggacttctcttctgcagactcagctagacaggttatttttctttccttccctttgtttgctgttgcttatattctcattttctgttgtcacttgaagaataatctatgatttatcctgtgcggaagaaaagtgctgaacttttatttatataacatgacttaaatatatttgactgggctgtactgcttgttgtgttaacatatgtgttgtcttatacatcgggaagttcaaaaggtttcttagtttgcttttgaaatttttgttattgtctaaagataagaagataattgatttggtattcacatcaggtggtgaagctgaaagctttttcaaagtttgagaa

SEQ ID NO: 75028 - DNA, 668 bp, Carica papaya
  Intron number 1 from transcript evm.model.supercontig_42.1 65 (locus evm.TU.supercontig_42.165) derived from phytozom e v7.0 (chr-ID supercontig_42; pos 1611021 to 1611688)
agaaggctgcctcgcttgctgctcgtctctgccaggttctttccttctctatatatttctatattcgtatcaccctttgttattctctgctgaatttacgactcgaattctttctttctacgcgaccctttatcaaattaattgattcaccaaaacccatttcgttgattttgtttgaatttgacgaaactcaatcaatcaattttctattttcaacagatttcgtcgttgtttcgacgtgttgcattctcatgatagtaacgattcctctgatcctccttttctcgcaagcttttttcttttttttttttcatcctcaatgttcttcgctacctcgttcttgttgttgttgatgtttgattttttcttcttgttgtattctctctcaattattggcttctttattgcactttcatttcagcttcgttttcacgatagcgagttattaatttatatattatttatttaatgtcgtcctgtaagttttttcttgccattgtcatgcagttggaattaactgtgtaatttttcttccttttaaaaataaagcactgtaaatactgttagttttattttttgtgttatatattcctatttactttcagggtgtttcattttattctttttctatgtacttcagaaggtgcagagcgcgttgctgcaatctg

SEQ ID NO: 75029 - DNA, 542 bp, Carica papaya
  Intron number 1 from transcript evm.model.supercontig_211. 9 (locus evm.TU.supercontig_211.9) derived from phytozome v7.0 (chr-ID supercontig_211; pos 38872 to 39413 reverse s trand)
aatcacccatatgtatatagctcctatgtagccaaatatgattagaatacctaaactgggaaacaacgagaaaagaagactactaactaaataagaactgaaactggagttttagctcttacaccaaattgatgtattacgaaaaaatagggtttagaaagaagaaaaacttaagaaaatagaaaaaaatcaaatccataatcatggggattgccaacaactagaaagacaaggttgttaggcactcagttgaatgagagcaaatcaatatctcttattcacaaggggtctaattaataaagataaaccattcaaatgtttgtagcatgactacatagcctaatatgacaacgatccaatttgttgttctgtaattctgtagtctttgcaatttgattggtttcagttgtttgttattagtttgtctttttccttttcagacttcaccatatgatcatttaatttctatattcagcttgtttttctggcgtaatttatgcctctcttttttacttaaattttaagatgatctatcttgcagc

SEQ ID NO: 75030 - DNA, 301 bp, Carica papaya
  Intron number 3 from transcript evm.model.supercontig_27.2 40 (locus evm.TU.supercontig_27.240) derived from phytozom e v7.0 (chr-ID supercontig_27; pos 2195287 to 2195587)
gcggagaaggtaatctgttttcttcttacgttttattaaattttcttttcttgggtggtgggtgatttttctgggttcttgtttgtttttgaatatcatgatcttatcttttttactttctcatgtcagaatctgaaccagaagattcttgacctctgcagattgtttcttttatacctatctatgctctctatcaacagtgacataacagtattaatcaattatatacctttatatgactgtatcttttctgggttttgaatcatatgtatctattatattaatggggcaggtgacagta

SEQ ID NO: 75031 - DNA, 641 bp, Carica papaya
  Intron number 1 from transcript evm.model.supercontig_36.4 0 (locus evm.TU.supercontig_36.40) derived from phytozome v7.0 (chr-ID supercontig_36; pos 349822 to 350462 reverse strand)
aattggctccctatcagccgattttgccttttgaggtaattggaactgacccattgaattgtttggttggtttttcttgatttttgccttgttttactgataatggctttaacttggttttcactgtacatttttgcttgaatgggatagtgaatggtgtttgttaacatatggaactaaaaaaagttatgctcttggtcactcgtgtgtcgtatctttttacgattacttgtcaatttaagtgaactgggtttgtacgtaaagataagtattactcgaatgcaagcagtatatgtatatgcggataacttggtgttctgtaatatcttcgtgaatgattctactttctgcttattgacttactgcattcattgtcattttcaaataatgaaacgggatatatttggtgataataatattggactatcgtttttggtattgcgaaatttttaaaatttcaaataggtttcaatagttgtgcaggtatatgcatgataatgtgctaggctttgtagaaataatgaattttcctttccttactcaaatgttttattaggcaactaggagatgggtaatatgttttaagtagcaggcttcgtttcacaggtcttgtcagcccaactaggaagaaagcctgagga

SEQ ID NO: 75032 - DNA, 326 bp, Carica papaya; identical to SEQ ID NO: 73918
  Intron number 2 from transcript evm.TU.contig_47797.1 (loc us evm.TU.contig_47797) derived from phytozome v7.0 (chr-I D contig_47797; pos 314 to 639)

SEQ ID NO: 75033 - DNA, 352 bp, Carica papaya
  Intron number 1 from transcript evm.TU.contig_35589.1 (loc us evm.TU.contig_35589.1) derived from phytozome v7.0 (chr -ID contig_35589; pos 472 to 823 reverse strand)
tggacagctcctatctcctcccatttcccaaagaggtcagtccgccactattttcttccttggctaaacgcactcttcatttgatggatacctctcctttatacaactctgttccttgtaactgtttttttctttctcgtggcatgtacgagataacaagagtaattggatttatgggttggttaagttaatgttttggcccttcttctctaaatatattgaccattcaagaatcttgtgaagtttttgattgtttcaagtgcagcgaatgtatgatgtttatgtatatgcgagaaatgataagcttttgtttgcaggaggatataagtatccaattcgcgctgtccagggt

SEQ ID NO: 75034 - DNA, 564 bp, Carica papaya
  Intron number 1 from transcript evm.model.supercontig_594. 4 (locus evm.TU.supercontig_594.4) derived from phytozome v7.0 (chr-ID supercontig_594; pos 105284 to 105847)
ggagagagaaatctcaattctcgattaaagcacaggttggtactatttccaatcgctgattaatcaatttgtgggtgtaggtcaaacatcgggggttttgctgactgtaaattttatttgttgttcaatcttctatggatcttaaaatctttattacttttcttttttttttctttccttctaattgtgatgattgatgatcgattaattgttatcttccgagcttggccttttagtggatattttcttgcttgatcgcttttctgattaagagtaggctttgaatttgagctacctcttagcttgttgcatatgcaagaacagtataacatggaaactaaattgctttctaggtttttttttttttttaatttatggtttggatttccatgtacaatcgacagaagaatttaaagggttctcaaaaattttgaagatccattatttgtttttttttttttaaataatcattctaatttataaatgataaaaaattttgattaatttttcctttaattgggatggaatttcacagactagacttggaattgggaactctcaaaa

SEQ ID NO: 75035 - DNA, 863 bp, Carica papaya
  Intron number 3 from transcript evm.model.supercontig_2.39 5 (locus evm.TU.supercontig_2.395) derived from phytozome v7.0 (chr-ID supercontig_2; pos 4357690 to 4358552)
tgaagatcaaaggaaactttgtaaaaggtatgtgtttaatttgattaaactatatacccataataggtagcaaagaatatgattttaattatttaaattggattgtaataaatagtaaccaaaaagtcaatacttgaagtggatatatatatatatatatatatatatatatcataataaaaattaactaaatgaaattttgtaaaaggtatatatttaatttgattaaactatatacccataaaaggtagcaaagaatatgattttaattatttaaattggattgtaataaatagtacctaaaaagtcaatatttaaagcatatatatatcataataaatattttgtaaaaggtatatatttaatttgattaaactatatacccataataggtagcaaagaatacaattttaattatttaaattagattataataaatcgtacccaaaaatcaatatttaaattatatatatatatatcataataaatattaaataaatgaaaaattatcatatttataaattaatatatatatatgcttaattttctattattttctattttattaaatgttctgtttattttaggtcattttaagtatatattattaatatttaaagtacattattcatattgatcaaaacacttaagaatggataattaatcgataggaaaagaaaaaatattttttatttatttttcgtgaaatattatgttgattttctgtcatatttaattctaattgacacaagtagtatatatatatatatatatacatgtattagtgattttacgattattacagttttatatacgtttgtttgtcagacgtgtagcaaattcttcgagagctcttcaatttg

SEQ ID NO: 75036 - DNA, 560 bp, Carica papaya
  Intron number 1 from transcript evm.model.supercontig_21.1 16 (locus evm.TU.supercontig_21.116) derived from phytozom e v7.0 (chr-ID supercontig_21; pos 1361695 to 1362254)
cctgcagccgaggaagtccaggaatccgccgacaggtaacggttttaatgggcgcttttttttagtcaatcaattgaagggaagttttgctttcacgtgtttcgtttgtatatttctagttatagtttcgtaatttatgtgcggtggtttgatttcctggcaattatgtggttaaaggagtaactcgagttttttaggttaaagccttgagattgggaaacggtgttaatcgaaatatcaggttaggcgtgcattggtggtgatttctgaatcattaggccgaaataatagagaagttgtgtaattttagtttctcttctgatttcctcggaaaatatagattgctttcctttcatgttttaaagttccaacacattgtctttcctttcatgtttcaaaacttgtttgttgagtggttgcatgaacttctttgatttatcttttgttttagttctggttgttattcacgtgtgtaattgcggtctcttggatggaattcttggatttatcttctgtttagttctggttgttattcacaaatgtaatgtgcgggatatagg

SEQ ID NO: 75037 - DNA, 883 bp, Carica papaya
  Intron number 1 from transcript evm.model.supercontig_8.25 6 (locus evm.TU.supercontig_8.256) derived from phytozome v7.0 (chr-ID supercontig_8; pos 1807780 to 1808662)
gcgaagagactttccttgtggacaaggtataatcactatttgattattctgctcttgttgtgtcaatgtctgtcacctgtttggtgttttgcctatctgggtttttgttcttttgctctggtttctgattaatgctatgtgtttttagatgatttgtattgcttaactcctttttctttttcttctgttattcccaatatcttcttcccatcatttgtacctccagaagtaaatttgctgctatatggttttcaaaatggggcaaatatacagcttagaggtttatatcctccctgtcatgtgattgttttcgtgcaccattttcatcaactacaaatatgtagagccttcttctttttatgttctgttcctttcctctcatttattgccggtttaatggcggattgtgacattcataacttcattatttgtcatattctcactccttttgaggacttatggggttgctttcatggattttaatactgttcatttccctccttggctggtatatgtcaagtagacatctcttttattggcattgttcatctgtctaaaaacttttgcaggctccttgtgtagatttccaattttaatcctgctttttctctttaaatatattttcttgaattaaattagttactgggtcatttcttttatgccccctcaaccactttaaagtgagttttccctttgaaaccatcaataaggttttcttttgatctataagctagttttttgtccatgtatattcttcatatttgcttttgatgtctggtattgcaatcttgtaatgtcaattagtatatcatttaaatctgattctattcagtcatcgataactacagaagattatctctgcatattcggggaaatttagcaa

SEQ ID NO: 75038 - DNA, 618 bp, Carica papaya
  Intron number 1 from transcript evm.model.supercontig_3.16 5 (locus evm.TU.supercontig_3.165) derived from phytozome v7.0 (chr-ID supercontig_3; pos 1230127 to 1230744 reverse strand)
gaagaaggtcaagaagactttatctcatctcaaaggtaaatctttacaactacattatacatacatacatacatacatacatatacatatatttagtgtttcggttgatttaattgattaatttgtcttttaccacctataaaaacacaactcaattcatacgcagtgactggtttgtcctaatttgatttgtcaaatttaatttttataagcagtattttcaaaataaagatttaaatatatcatggttgaaaaatataatgaggttcaaaaaaaattggcatttagtaattattgagttctgtagctcaattgatgagttaatcggccgactaactaaaaacaaaatccaattgacttgacccggacccggaaaggagctccgtttcgtgggcttaattttaggcccatatatagcagccctgcaggcccaatacaccagtggttcaaaattataatttaaattatttatatttaaccctataatgtgtgtatatatatatatgtgtcaagagaattgaatatcgttattttgacctatttattttgatcgcttttatatttattggacacatgattaattttctcttcgtgggtgtgtaggtatatactcggtaa

SEQ ID NO: 75039 - DNA, 571 bp, Carica papaya
  Intron number 2 from transcript evm.model.supercontig_51.2 (locus evm.TU.supercontig_51.2) derived from phytozome v7 .0 (chr-ID supercontig_51; pos 15313 to 15883 reverse stra nd)
tatcttcaagctaagaataaaagatgtgtatttgaccatcttgagtgaagtattggaaattccatcaatcttcgatcttattattagaaaataaatctttttaaaattatgggatactagttaaagaatcttactagtttgaagatttaatttgaattgatttgttgttattagtttcctatttttctttataaaagttacaatattcatgtatatgcgccttccaactataaaaaaaggttcagctgtatttattaaggaatcaaagttcctatttattaattcctgtctcatactttttcctaattattaaactaatttttataagtaaacttgggattgtaattatttatgtttgaattaatcttactcgacttgagttgtttagagatggattatttctgttggaattgaaacaaataggcttttgcagtttgaataaataggctgttacagtttctcattgattgattaggcaagtacaatttaatctatccagaaattgacttcatgtaacactaaaattagttgatagttcagaacttgagtccattgacttgtgtaataggtg

SEQ ID NO: 75040 - DNA, 453 bp, Carica papaya
  Intron number 1 from transcript evm.model.supercontig_165. 35 (locus evm.TU.supercontig_165.35) derived from phytozom e v7.0 (chr-ID supercontig_165; pos 214131 to 214583 rever se strand)
aatatcaggtctcttattattcttcttattacgtgcgtatcttacatctgtaagattttatgtatacttcatgtgtttattaatgtatgcaattgaagtatgatcttttttattttattttattttattttaattttaattctgtttgttttcgttttgatctcgtgatagaaacaaaaagaagcgagaaaaaggaaataatgattgatattgaacgtggtttcgattttccttgttctttctagtggaggatgtatactatattggtttcccaataatccgggaattcccttcaagtttgctgaatcattaggcgctttatttgttttcctgatacctttttttagacatatttttcctgataaataatacgttattttactggaagtagatcttatttggttgtttttggtggttgatggcatcaatatgtatatatagggggctgagttg

SEQ ID NO: 75041 - DNA, 724 bp, Carica papaya
  Intron number 1 from transcript evm.model.supercontig_183. 33 (locus evm.TU.supercontig_183.33) derived from phytozom e v7.0 (chr-ID supercontig_183; pos 320815 to 321538 rever se strand)
aacccgagtttggttctgctcgtgttgttttccaggttctttttactaatttctctgcgcaaatatctgaattcagctttactttgccaatctcatttgattttgtttattagttcctcttggtgcttagttatattttcgtattggtttcttcaattttgagtttaaattatgttctggtggttttcttcaattcctatattcttgttttaattacgagatcaattgggtgaatttctaatttgtatgagggaagtgaaagttcatcatttatagtggggttatatatgaggttattgtgaaggaatgagatataaatcgaatgataattcaactgaatgtgatcttcttgtcattgataatgctgttttgatttaatgtgtattcaatttgtatcttattcctttacttaattactagaagcaaattgggtcttaattgttatgtttgataaatataacttcagttaagctcaaatagacagtttagattatcggtaaaacaaatgtatgtaagtcattgcaaatgagaaattacgacttagttgattatatattaagattttttcttaaaaaaaaaaaaaaattatgggttggtgtttgaggtactgcaacaaactaaacttgttattgttgtctacacagttcttgcatgtagattcatatttattcaattgataagtttcttaaaaatttatggaataattttgaattgcagaccaact

SEQ ID NO: 75042 - DNA, 487 bp, Carica papaya
  Intron number 1 from transcript evm.TU.contig_33243.1 (loc us evm.TU.contig_33243) derived from phytozome v7.0 (chr-I D contig_33243; pos 1518 to 2004)
cagttacaggcaggtgacataggtaagtaactagtgctactggacagtgatggtctgaaacttgcgacttctgaagtgtggtttattatgtgctgttttatgtgtatttgcgtccatgcactaactgttttttcttctctggaatctctggaattggttcttctgctgcttggcttaactagtatattttatatgttccaagattaataaggtggcttgggattgtagtttttcttttttcttaaaaaaaaggtttctctgactgtggtcaaagatttaagttattgtctgctttgttgatctttagtttcttttctaaaaaggttttttttttcaattctattttactaatttgttttatcattatatactgattgatatctgagcattttgtctatttctcatattgagatgaccattgattttgaattaggttttattcttttctgcagtgacatttagtaggttagatccagaagggaaatta

SEQ ID NO: 75043 - DNA, 615 bp, Carica papaya
  Intron number 2 from transcript evm.TU.contig_33243.1 (loc us evm.TU.contig_33243) derived from phytozome v7.0 (chr-I D contig_33243; pos 2015 to 2629)
tcagaaaggcttcagcagctccatcctctgatcaggtttggtttcatgcaatgtcaagcaccttaattctaatcgtacattgtacatagccaggtgataaaaactgttattcacacaagcaatttactagatgctctttcttttcatcatcatgattcctggagcaatttaattacagaatcatcaattttttttagtgtttttcaattgaggccattcctatttccttttttaataatctaataatgttggatggttaggatggaggaagatgtaccttaaagatttagtaaaggactgcaatttgtctattacttctgatacgactactttaaccgtgaatggatattgacatatttataatatcgagtgtcatgtatttggcttttgctttgtttgacaaagaagcaaatttttttatctcaaattttttgtcatttctttttatctaaagttcacaaacctgttaacctgcggataaaatttatcctattatttgcacagaattctagcatgtgttgcaatctttagcttctgattttttgttaagcaaagaaactttaagcagttcatttgatctcttttatgtgtttctgtgtttcaattgacaggaca

SEQ ID NO: 75044 - DNA, 705 bp, Carica papaya
  Intron number 4 from transcript evm.model.supercontig_27.1 87 (locus evm.TU.supercontig_27.187) derived from phytozom e v7.0 (chr-ID supercontig_27; pos 1912961 to 1913665)
tctggacaagcttcagaggagaacccttgttcaaggtatgcaaaattcttctccaacctgttcccattattagcaaaattatgtacctagattcctgcctccatcttatcttttgttagcaaaccggatccgtccgtaacaaatttgctgcaagttttgtcttttctttttagggagagcttccgaccagcctgccacatttttaattatatagggtggcttagatttccctttacctgttgaacatagaattgctatccaaattggattctctagaacaaaaatgtataaaaaaacacctatttttccattagttgaaaatttagaggattttgtgttgagcaagatgatctacatatttattcaaatgcatttgtgtcaatgatgatatcctctgagtaaattgtgggaataaggttgaggataagtgaagaatcatatggactgtcacatcaaactgctggttaaaccaacttgatttgccattaaatttggttggagttgtggttcttgataatttgctcgttctgtcttctatatactatggcagattgttatttcaaatgataacatatgatgggacatatattcacttgtgtttttttcctctaatgaacacattagtactctagttactttaagaaataaatttgattttgctgttttacagaataaaagaaagtcataaagaattgagcgatacag

SEQ ID NO: 75045 - DNA, 922 bp, Carica papaya
  Intron number 2 from transcript evm.model.supercontig_222. 7 (locus evm.TU.supercontig_222.7) derived from phytozome v7.0 (chr-ID supercontig_222; pos 36302 to 37223)
aagttaagctttgctattagtttattattgacaaggtaattgaagaaaactaaaagaaattagcttacacgttcactacatattttccttgttagtcaaatgcttaaattttattgatcaaaattcgtaagtgacaaaatgtcttccacagagagagagagagagctgacaatactttgtagcattttttaagggaaagcttaggttgtttgtttattaacttatgttaatagagatcaaaatcagctacactaatagaaatttcacaagctgttcaggagtttgaatatttgatacgtaacaactgatagaaagctgacaagctagtaggcagcttctgcaataatagtttttgaaatccagactagagcttcttttttttccagagaggagaatgttcaaaagcttagaggtagtgtttttaaagatagaatgtagtttttgttagaatataagaataacttccaatatgactggtgagaaaatagatgatatattatccttaaatgtgaacacttttaagtttcactttttctaattacgcattttcatttttttaaattaagttattgcatataaaaatatttttaacaagaggttaagaacttattttattgaataagttcatataagcaggtaaagagtttataggctctaattatgcattttcattcttttaaattaagtttttgcatacaaatatatttttaattagaggttaagaacttattttattgaataagttcatataagcaagtaaagagtttataggctctataaactaccagttttgctacttaagctaagccagacatactttggatgatcttttttcctttacatagtagtttctgtatggattatgattcatttgttaatttctataggggtctacctattgggggcaagggtagcactgagt

SEQ ID NO: 75046 - DNA, 1025 bp, Carica papaya
  Intron number 1 from transcript evm.model.supercontig_80.2 1 (locus evm.TU.supercontig_80.21) derived from phytozome v7.0 (chr-ID supercontig_80; pos 121320 to 122344 reverse strand)
cacgagtattccctacgggatgtgagtattctctcttgctttctttctttactttctgcaatcggcttcttgcatggagaatatatatatatatatatacacacactgtaattctttctttgatcttttacatatatatatatgtatcgtttctataatttcttcagtccgagttttcccatgccccgaatcgtaggcgtaattttttttttttttatgttatatacatgtgatactcttactttcttgaagttctttgatcagcttcttgcatcgtatggatgtagttatagtagttctttcttctttgtttgtatatatatttatatacatatacgtatgtttcttttatattatatttctcgcattgcaatcagcctcttgccatttgccactgagattcatgaatattcaagacttttgtgggaagatgctgagttcttgttccaggtcctcattagaaccatacagtacttgtccgccatcatcagctgctgcacacataaacttcaagattttattttcttgctctaatccttgtatgccatctgtttcttgtattgctgaaaaatatatatatatatatataggtgtaaaattagaactaatgtttcttttgtataatatatatatatatatatatatatattatattatattatatgaatcacttctataatctatcatctgaaggttcagattccatctccatcagtttccatgcatacgtttgcaagtcttttattacaatttcttgaatctgcatgaacgattcaaattttatttgtgaacaatgttgggagaaaatttaatttttctgttatatgtacacttttaatgctaatacgccaatattaatttgattacagtaatattaaatttctatattcattgctttatattttatattaaaaatattttttaaaagttttatttgaaattattatcaattttttaatatatatatgtaactttttttaatttacgcagtcagacgattacgtactctgcaaaattagaaacaa

SEQ ID NO: 75047 - DNA, 394 bp, Carica papaya
  Intron number 1 from transcript evm.model.supercontig_16.3 1 (locus evm.TU.supercontig_16.31) derived from phytozome v7.0 (chr-ID supercontig_16; pos 740984 to 741377)
agaggttgcagctcctcttttggagaaattcccatgtatgttcttcctttttcgtattctccttcaaatttcagtttcttttttagctttgaagaattgataattgtggtaatttttgaagatcgcagttgggttttgattttccatgcgagtattcatcgcgcttgcaattttctctgcaaatggataattgggtgtctgtgaattgttcgatttgtttatttcttcttagagcattggttattgtcaaagattatggaggcggccagtttggtctctcagggtttccctaagcaatgagctaatttcctcaatttcatcttccgagtcaaattcattaaccaatggtttctttgtttcaagggataaacacctctaatacccattccaagga

SEQ ID NO: 75048 - DNA, 759 bp, Carica papaya
  Intron number 2 from transcript evm.model.supercontig_16.3 1 (locus evm.TU.supercontig_16.31) derived from phytozome v7.0 (chr-ID supercontig_16; pos 741569 to 742327)
aagtcatctcagtatgttagttttacttgactagaattctattatatgaatcctctttctgtatgatcgagcaataacgtgaattaggtttttttttttttttgggcttcttagattgtgttttgagtaaagattaacatgaatgcgattaatagctcctcaattttgtatgcaaaaacttctccggtagttttcttttgattattcatcaagcttgagtgcttagaactttaggattgaggatgaatttttcattccctatttttatgccttttttaacgaatttatttcacactttacaaacatttcctttgtctaggaaaataggtctagggcttattgtcctcagattagttccccggatcagacatctgtaaaaccctggatttcatttaaaaccatgacattttggttttctgttttttttttttttttttttcatatgctgttgcatggttgcaccaatatgataaatataaaatctgtcaattactttttatttttattcaacaaacttaaaataaaacatgagtattatttctgggactactaattgcgggactcatcattgcggcagcatgtgctccaagtgaacttaagtgagaaagaaattggcaatgggtagtttttctcttctgatttttgaagagaacttcttctggatttattggcatgtttaacacataatttatagtctttttaatatttgatactataacttgttattgacaataatgaactttccaactttcaggaatt

SEQ ID NO: 75049 - DNA, 796 bp, Carica papaya
  Intron number 3 from transcript evm.model.supercontig_46.1 77 (locus evm.TU.supercontig_46.177) derived from phytozom e v7.0 (chr-ID supercontig_46; pos 1710774 to 1711569)
ctgagcttgatctggtatgcgttttactccatttctggtttcttttattattacttattgagatttgttgacttgttaattattagcattattgaactctttttattctatttggtgagaggggaatattgcattctatgccattaaaatgatatgttcacggtttatagaagtcggcaaacttatacgaatacttgatctgtggcttcagcttgtcgtgcttttgtatgtattctaagggaaagtcttttatctcttgggccttcaggttttccagttggttgattggttatctgctgctccctctattttgtttctttcaaaattcaatgttgatctgccatttgcaatttaaaactgcagtatgacatgttcggggtttgaattttgacgacattcaagtattaattgctagtattttcttttatatggttagttcctggaaaaattcaggtgaggcatgagaaaacaattactgatcaatgctgttagaacaaaagatactgatatattcttaatattaactttatcttcacctgttaacatacttctagattaaagaatgcacaccttatttttacagcatggtatttggtttgatatcaatactggtcctagaagagtcttacagattttttttttttttttttttttgaaacttctttttcatttcatttggaactgaagtggtgagagaatgaggggtttcttgttattgcttccctcaagcatttttatcttggatgctactaagacattctcctgctacctttttttcaggtgatcttatcccctg

SEQ ID NO: 75050 - DNA, 603 bp, Carica papaya
  Intron number 1 from transcript evm.model.supercontig_55.1 74 (locus evm.TU.supercontig_55.174) derived from phytozom e v7.0 (chr-ID supercontig_55; pos 1055934 to 1056536)
gcggagtacatctgtttcttcaacaaggtacaatactcaaatcaattcattcactgtattttcgttttttgttgctttaatctccccaatggctttctgcttcatttattcattttttggtctgattcttttgtcccaaaaaatcactgtttgttactgtatttctttgttgaacttcgcttgctttctattattgctgctgtttattgaacgattcacgggtatgcgaaatgtgttaagatgtggtgcgaagaaaaatgcttgatatttctctttgcatgttcctgatctgcttacctcctcgtttttatgtttcttggctgatgtttactgggattttctggattaattgctaacgcttctgggtatgtttttctcttgttgttgcttctgtaattttcaattttttttttttccgggcttctgtttattcttcagcagaccttagggcttttgttgactctttcttgtaatatcatggtttggcttcctgggtcggtctttcttgtaatatctctttgtggaagattgtattttgatatggttgtatatttctgcttggcaacaggataacactgtagttattaagcatcctaagaaatc

SEQ ID NO: 75051 - DNA, 754 bp, Carica papaya
  Intron number 2 from transcript evm.model.supercontig_85.9 3 (locus evm.TU.supercontig_85.93) derived from phytozome v7.0 (chr-ID supercontig_85; pos 635456 to 636209)
tggacaaaaccaatcaactgttcaagaccaaaggcgtaagctccatatctctctgtctctgtctctctctctctctctctctctctcttcctctctatccatctccatctctctctgggtttctctgtacttggaaaatcatgtcaaggattttcttgttcttttcgtttttgctttttgatttcttctgctcgagtcgcctctagttttgtttcccagaaagggagattcctttgtggaaagagtttgtttgggtcacaggaaaagcatgtgttctcaacagattaaaatctctgctacccagtactttctttgaccagatcctgtttgcagaaacaaatctttgaattaaaaaaacaaaattcaagaaaaaatttatctcactttaccagaattatttatctatccatttttttcataattgctccgagcttggagttgtggcatcacatgtaacaaaacaaactaaacatttgatcatcatcatcatcactttcatgctggtatttctcttcatgtatacccaacaagtttacgaatagggtatgggttttttctactttttactcacatccttttcgtctcctcctttattcggccataaatggcaaacatctccttattcatgacgacccctttaattatttcttacaattattactcattttcttcctcctcacagctctgacttgggtccgtataaatctaaatctctgatatgcttaagaattttatatttgcagagaattcagga

SEQ ID NO: 75052 - DNA, 521 bp, Carica papaya
  Intron number 2 from transcript evm.model.supercontig_64.2 (locus evm.TU.supercontig_64.2) derived from phytozome v7 .0 (chr-ID supercontig_64; pos 3646 to 4166 reverse strand )
gcaatcacttgatctggcctttgtcccatcaaaaggtacttgtttgttaccatgcatgcgtatgccagtagagtttatactgatcacagcattttgttttgcctgtttccctttatcttacactgaaatctttggactctgatgtttgagagttcttcttgccaatgaaatggagaagagacaataaattcattattattcttttgtttagacatttctaaagtacattcctgatttctagttcagactgcaaaagtcaagtccagttgcatcaacacaatcaatctgccccttggtttttggaatatgcttttgaagttgctttatttttgcagatgaatttgcactttgatgtttgcaaatttttgtttaacctataagtattctactaggcaactgagttattgttttagtaaatatcatggttgtagctgttggttcttaagacatctatcgttatgttaattttctttttctattattcagcaacaggtcaagttttggcttcagagcttccaaag

SEQ ID NO: 75053 - DNA, 451 bp, Carica papaya
  Intron number 1 from transcript evm.model.supercontig_64.2 (locus evm.TU.supercontig_64.2) derived from phytozome v7 .0 (chr-ID supercontig_64; pos 4231 to 4681 reverse strand )
gaagtaagggttaaagctatctcgcatgaatcggttctcatttctgtacattgagtggtctctgctgtttcagccaaagtattttctcgcgtgtttttggttgccatttaattaagaaaaaggtcttctttttcaagtcctgcatgatcatcttcatttaaaaacgtctggaacacctttttacgtggaatatttttctatctggactctagtgctttccagacttttctgtttttgctttgagaagttttctatgcctgagcttgactataattatgattaacggtttgtttcttctgaatgtgaaattcaacttttgacttcataaatttgttgtctacttagtgaaagaggtttatggtctgccttttctggccctaaatcattacttttgctttatataataaaattttctcgttaattttggttcttagggcagctggaaccccaa

SEQ ID NO: 75054 - DNA, 900 bp, Carica papaya
  Intron number 2 from transcript evm.model.supercontig_49.3 9 (locus evm.TU.supercontig_49.39) derived from phytozome v7.0 (chr-ID supercontig_49; pos 292041 to 292940)
ttctgaatcaagaggtgctgaaattgcgtggacaggtatggtcactgaagttctttcatttttttgttccatttcctttttccttcatcccccttccttttctagggaatgggagtaatggttgaaaatcagagagcagttagagtcgtttatttggtacttatagtaactgagtcttttcttcaaatcttcctatttagtgatgtaatcagcagtgtgtctgttttatgtgccgagaagcaacttactgtaagaagcacattttgtttaagatttatttatttctttgtatttcaaatattggcttaaattgcatattttcttaatatatgtacttattatcccatagaattgtttttatataaatcaataaatatttttttcaataattttatttttttcaaacatgtaacttatcttttaaaaaccataacctagatgcacttcatttctttatagcagtaacagtgagttgggttgatttttttatttagttgttaatcaattcttaattctatttctcatgttagttttagcatgcataactagaggataggttgtgtttgagttaccaccagaccaactttttcttaatgttgggaggtaaacacctaccttaaaaggcaggaactaaatttttgaacagtggtaactcaggtgtgtaaatcaggtttaagttatgcatattatgactaatatgtgaatcagaactaggaattggctaggaaattaatggaagatgaaccaaacacaaattaagtgttttaaggatatttgttttagcaattccaaatacccaattaatgtggagccaaattgtaagcacctttatttgagtgctaatgcaatcatggctctgattcaggttgagagcctcagacagaagtgtgagcttcaaga

SEQ ID NO: 75055 - DNA, 699 bp, Carica papaya
  Intron number 2 from transcript evm.TU.contig_44850.1 (loc us evm.TU.contig_44850) derived from phytozome v7.0 (chr-I D contig_44850; pos 620 to 1318)
ttgaagacggtgagaagaaagctttctttgaccaggtttttcttcttttttactttttgatggaaaattcaattcagatattttcctttttcgttacctttctatttttgagaacaaaagaaattttggtatggatcctgtaaattgctttagaaagtccgggctgtgtttggttgcatgcaattggagcgctcggatttggaaattcaatctgcgaccttcttattgatttattttcgtagaagtctattaacaaaataatgcacagtgaaaagaatgccgctttgctactgaaaatttttaacttgaccattactcaccaaaaaaaaacttttggactcaactatccaatgtgaagctgttcttggcaaattaagccaacttctttgtcttcgtgaattttactcaaagatcttagtgcttttctattataggcgtcagaatctggatttactcgtttcaggtgaatgccaatgtttttttttttttcttcggtaaaacagtgacaagggataagaaaaataccaataatctcctttatgctcaattattgagatcttgatctgtatgctgtcatgataaattttctgtttctctatttgattatgttaattttattcatgatgttttaagaactttctgttttgcatttattttctacaaggttgctcggttaaattcaagctatcctggtggttt

SEQ ID NO: 75056 - DNA, 734 bp, Carica papaya
  Intron number 3 from transcript evm.model.supercontig_282. 6 (locus evm.TU.supercontig_282.6) derived from phytozome v7.0 (chr-ID supercontig_282; pos 19450 to 20183 reverse s trand)
aacaatctttaggtaaatgttttatgaatgagaatataaagacctcaagaaacctagtgtgctgacacccccattacagtgtctaacttttggaagctttccattacatccgattgatacacttgaaaatccattatttcatttttcaaaaggagttgcacaaatcgaatggaactttggaggtggcaatgcgtatgcttgatatgaaattaaaaagataagtttagtttgtgtgattagaacctctttggactgattaagtagtctgtcacctccttagctggtgcttctgatgtgagcctcaatcacctctctgaaaatctttgtttagcaattagcacgcttcttggtttaactcaattctgttctcgttctactcttcactcttagttattttatatgtttaatttagtcataacttatttgatacataattgactcaactcactgattacttaaattccacaataatagatttgtattcccacttataaacagatgaaatgacaaaaaaaatctagcttaatttggacatggaactaacttggaatttgattactattttcattcaagtgtttattccatttatggattcctattctatagatgtaatatgaaccaaactcagtagtgtctggattggtttaatggtttttgatgttaatctagactgactttttcagtgttctcttgattcaggaaaggaaagtgcaaacccgaaacttgccggagct

SEQ ID NO: 75057 - DNA, 664 bp, Carica papaya
  Intron number 4 from transcript evm.model.supercontig_97.4 3 (locus evm.TU.supercontig_97.43) derived from phytozome v7.0 (chr-ID supercontig_97; pos 270690 to 271353 reverse strand)
cggaaaacttgcagcagaaaccaacagagtcagaggtaatactttcatcaccatctttttgttctattcctttcttcagttggcagtatagttgttgtaagtttttgaattcttttcctttttgtttttatgataaattgtttaatgacttacttctaaccatgttggtgctatcataatttcagtcttttccttatttgccatcatgccttgtgtcttgtgttgtttttggtttttctctctaagtgctcttataatcttatatattaataaatatatacatatatatatatatatatatatatatatgcataccactcattgttactttctggtaaatctgtgtagtaaaaatctgtggcagagacagctactgaagtactgttgcacttttggtgtataagtgtttgaaattccattattgagcctgtcaaaatgtttcttctctctattatagtgtttccttggatatatgcggtaaaatacttacaggagtgtgaggttaaccaaaaattgagaagaagcttaacttaagaggctttcgccttgctcatatatggattgccattcattttctaatgcaattattattcatcgcattcttcatggattggctaattggatctgattttaggtgtgacactgctgttctctgaacccccgg

SEQ ID NO: 75058 - DNA, 891 bp, Carica papaya
  Intron number 4 from transcript evm.model.supercontig_46.1 90 (locus evm.TU.supercontig_46.190) derived from phytozom e v7.0 (chr-ID supercontig_46; pos 1771249 to 1772139)
tgactgggcatttcatatccgaacaacagagggaggtcggtggcttggctaacagaattctctttttcttcagtattcccccttttatgcaccattaatccttcacattaatatctttgttatattaaagggaaatccaactgggatcatatttctttagatcctgaaactgatgttaatcgatggaaacattagcttccacaagatttacgtttcagctgtttcatgaaattgactcgtcaaaagctctagccaaaaaacagtaaaatccttttagtttaatttataaattggttcttcataagtagaaggaagaaactacttcaatgatcgatgaaatttatgaagttccaatgattgctgattgaaacacttggtttacaagtgttcttagcattcttttgttggtgcatcagatttacgatagaagtgaacgggtagttatgatatcaaactgcatatcttctgaaatcttcagaaattgacacatcccgtcactgagagtactgtacttgacatgtttacatgaactttctttgaatcaagatcctaatactcatatcaaataaatttacgaactatcatttgctattttggtggattatttatgcataacagtcaatcttagtgtgctaacacaagctttttctaggttataagaaatgtggattttttttatggtcctcaaagttattattatattaacaatgtgcattagtttactgttggaattacccacttgaatcgagatacttcaaactacatccagattatttaaattatggtcttattttacattttgtttccaaaagaattatatataactcatgcaaagaactttttgtgtttgaaatagaaagttctggtccacgtccttgaggaagcaggcta

SEQ ID NO: 75059 - DNA, 787 bp, Carica papaya
  Intron number 1 from transcript evm.model.supercontig_173. 48 (locus evm.TU.supercontig_173.48) derived from phytozom e v7.0 (chr-ID supercontig_173; pos 386524 to 387310 rever se strand)
ccgaatagaaaagaagccgagacacgagctagaaggttaagacctgtatcgaatttttggtttgacataactattctgttcatagtacttcgacatcaataataacacaacaaaatataacttcgaaactaggatacacgagataatagttcagtttgaactcgtaacattttacaaaaagaggggatataccgtttatcaacaagataacacaacctctaaaagagaacatacgagagtatgcgagagcagaatctctaaacaaggatacacagaatctctaaacaaggataaataaatactgagagatcaattccattaaaatttacaaaaacttataaatctgaggactatatccacattcaatggtgaagatttgattaatttggtgaatttctccactagtttccactaacaaaaatataaaacttcaaagctaaattgacatcaacaagaaaaaatactttggaaaaaggaaaacaaatcactaatctttcatgttttctaatttaactaaactaataagtatgtatatatatatacacagattgattacaggtggtgatcagaagttccatgaaagttcaaccctttagagctcgccaaccatcaagcatatacaccacaaatccacatagttcacacctgaaaactaataatatccgtatacatgtttatgtatatataaatatatataacccaaataagcacttgtaaaatgactaccgaccatattatctccatggcctcctctgttcctcttcttgttcacgtgatcttagctccg

SEQ ID NO: 75060 - DNA, 345 bp, Carica papaya
  Intron number 1 from transcript evm.model.supercontig_346. 3 (locus evm.TU.supercontig_346.3) derived from phytozome v7.0 (chr-ID supercontig_346; pos 23185 to 23529 reverse s trand)
cttgctctcaaacaggttagcttttgtgtgtaacactggactcaactttccatttggctgcgagaaaatggagagacgtgacggaaaactggagtaccatgacattacttctggtcttcggatttctgtttcttttgatttgttaacactcccgtaaaggatttctaattgttacgaagttttcctctcttttttttttttttctttttttcttctggaatttattcagggagcggtgttctttttagtgttctaaccaagagttacaccagattacaaattaatatttcagttctcacgtctgtattagggttttgaggttagtggatctgatatagcttggag

SEQ ID NO: 75061 - DNA, 489 bp, Carica papaya
  Intron number 1 from transcript evm.model.supercontig_6.39 6 (locus evm.TU.supercontig_6.396) derived from phytozome v7.0 (chr-ID supercontig_6; pos 3001864 to 3002352 reverse strand)
caaactttgttggctctcatttctggaattttcaggttaatgatcatttcaatctgtaaagtcctttgaatttaacttaacctttccatatcatgcttattcagttctttttaaaagcttgagtttattaaaatgataatcttatgctgctgcagttaggggaatttagtgatattaatgcattttttggaactggtttattaaatcttagtaaacaacgaaaaacaattcaaaatccttgcaattttgtttgtccattacaaatatttcatggggtgatggaaagctgaagattcctctactactcaatcaaagaaatataattaatacatgatattttgattgaatgagaaattgagaaaagaaatagaattacagaaagtgggtaagtttgcttctctcatttaacacatgccccttctacttttgtgttcggtaccaccaactcaattataattttattgagggaacgtgttatgttcttgaagg

SEQ ID NO: 75062 - DNA, 961 bp, Carica papaya
  Intron number 1 from transcript evm.model.supercontig_26.3 8 (locus evm.TU.supercontig_26.38) derived from phytozome v7.0 (chr-ID supercontig_26; pos 393623 to 394583 reverse strand)
gcaatctggcaagtcttatccgacgtggctgacacgtaagcttgtttgtcccgtttatcggtggagatccgacggctgtcactgtccagtcactcgacaccgtcgatcgtggaataacgagagacaataataataataataataataataatatgaatgcgatatagacacagaaaagaaagagagaccgttttttcatacatttaaaagtgactcaacaaagagaaaagcttcggattttccgtcttttcggcatatgtgagcttacacagagagagagagagagagagagaggtaacaagtgatgggaatcttcggcagtttattgcttgcggaattcgaagtttgttgcatgcatttctggtagttttcctaaaattttcagctgattcttttgctgccctgttcgtctcccaatggttgtttttttttttttggaaaggaaaagcagtctccctcatctaggtttattgcaaatggttttctcatcgggtatatttttatggattttgatgttttaattggtaggttagtgaaatgaagatctgagtgtagggagcgtgtagtctttgctaaatataagggtagaaggaagtggtatacgattgcccgattcagtaatatagggtgtggtcacagaggaagagatttgtgcattaatgaatttccttttcaatccaatttttttgatgactgagatctaccgtgtttttccaatggatttcacgggtgaatgtaacaccttttcttttcttttcttctcctttatgttcttttgagttcttttgcgtgccatctccttctctctctctctctctccccgctttatctcggaagaacctgattctctgaacaagagaaacgaattactttcctgctttttttcccttttgcaacctctctctctcgtgtgttgcaatctgaaggttctggcggagacaatatatctctggagaagtcg

SEQ ID NO: 75063 - DNA, 1013 bp, Carica papaya
  Intron number 1 from transcript evm.model.supercontig_38.6 7 (locus evm.TU.supercontig_38.67) derived from phytozome v7.0 (chr-ID supercontig_38; pos 1439048 to 1440060)
gttgaggtcctcccagctgtctctacggagcacacgtcctttcgcagcctccttggtgtagttactctctttcttacctctttgacatttctattgtttgtttttttgatgatggtgctgatctccaactttttctttgttttgactgaggattttattttgaacatagatttttgttccgcgttcatattttcttttgatgtttctttttactgtttgagtattctctagttttgaattctctgttccaggtccatggcgatgaagagtttgcaactcttctcttttattcactgtttatatgatctatctttgctatgttcttgtcttccgtgaaaaaggctgtattattctgtttacttgagggtcgggaaacgttttcaatacatgtgatttgatcttactaaggattatattatttcctttctcctgcggttcttagtgcttgattggcgaagtttataacctttccgttatgatgaatttgttttataccaaagaatacatgttttggtgatatgtagcggcctagctgatattcaggtgtatccttcttacctttatgactacttttcctgaatgaatgtcttgcttttacaatgatatgttaggcaccgatcatttttttttccttcttttttctgcctttaacggtcggcaattgcttgccatgttggatttcttctcctctatagagtatattcttttgtcatgtaaaagctgttttctcttttctgtttcatggatcctctctcttagaaggtaccgatcaacaatggcacgcctatgccatcctgcaggcccttagaatgcgtctaactgttattttttttttgtttctactagactgcatttgcaagaaatatgggaattaattgttttcggtggctatttcttttcttttcttttcttttttgagaagaacctcgttggtcaaatttgtagttgatcctagaatttgtctctttcactattcagtaagttcttatcacagtgtcaggtgttctcagtct

SEQ ID NO: 75064 - DNA, 649 bp, Carica papaya
  Intron number 1 from transcript evm.model.supercontig_246. 4 (locus evm.TU.supercontig_246.4) derived from phytozome v7.0 (chr-ID supercontig_246; pos 42989 to 43637 reverse s trand)
gccgtgtattatatccagaatttcgtggtcgggtatgtaccagactttcctgcttcttgttagaatggctaacttgtttgaactttgaactgtctggtgtgaagcttatggtacatcgagataaaggaacttctgtagattttgttgtattgcaccatttaaccaactgttttggcaaggtgcttagtggagacgtgaatgataggaattttcccatccttgctttagacattttgttcttcagctctggaactttcttttctgagcttaaaataatatataaccatttatctaaaaaaatataaccatatatgtgactctattaacttctgtttaagtacgggcttatgtgcactctatttgtgaatctttacttacatattttgtatagtagttttcatcaccatcttacctttctatatgatcaatttagtttcttctactgtgcactttatccagttactttcatctctctgtatattcggtgattggtatttatcattaaaatctgtgtcttgtaccataatctcttgtaatgtaactgttacttgggcatgcttaatttgatatcatccttttcttttggttgggggtatgtggaatgattctttcaggtgtctgcatttctctctcaccactttgcagaggt

SEQ ID NO: 75065 - DNA, 1018 bp, Carica papaya
  Intron number 1 from transcript evm.model.supercontig_16.9 6 (locus evm.TU.supercontig_16.96) derived from phytozome v7.0 (chr-ID supercontig_16; pos 1537023 to 1538040)
aagttgcccaggtttcgtctactcaggtacttgcatagttaattctactgtcttcatttccacagttgctgatatagggttcatcgatttgtttagccttgtataagattttaagctttagtggcactgacactgtgttaatttgagttgggttctgctgaatcttggtgaatttatgagtggtgagtttatgggggtttcctttgtttttctgacttttggtttatgctatcattttaaggaagaatggtaaaagagattctgcattgattgggaggatatatgtggctatccggtaccaatatggcatttgcttctgtaattatgagggttgtcatttacttgtttgtattgtggaatcaaactgttcgttttggggttaagtatgcgaatatagcaagagatggtgaagttgtcataatgtggaatcaaatattgtgtttatttgagttggtatttgaaagattattgtgcaaattcattcaccaacgaacacctaattatcatagtggctttttgaatcaactataggttttttttttcttttttttttttggggggggggggggggagagggaagagaaaaggaatgaaactccattagaattttttatcttattttgttgtatgaagattcgatgggattaaagcaggtgaaacataattatcccaagaatggtccacggaatgagataaagaaacttaaggaaatggccttccttattagatgctaatgaaacgaaactagtttacaagattcccagatctttaaatcaataaagaactgactgaccagcttggtatatgactggtcatagccttttcaactgctcaagaacataaaataatcattcacatgatcagatcttgttatttttctggatttgcttagccatacttctttatttaaatatgccaataattggtacttgcctagtagattttgtggaattttgaagtccgtatgacctaaaatggtattaaaatgctcgttacaaccaggctgctcaacaagttg

SEQ ID NO: 75066 - DNA, 922 bp, Carica papaya
  Intron number 2 from transcript evm.model.supercontig_179. 23 (locus evm.TU.supercontig_179.23) derived from phytozom e v7.0 (chr-ID supercontig_179; pos 163957 to 164878)
tgccactccggtccttaagcaggtatttcttcggtttggctctcatatgccacttacatatagaatcttgaccattacgaatcaggcctgagcatgaactcacctcttcctcaagtaatacatctaactggttaggcatctataagtatctctacaactgtttcacttcatgagcaggatttagtcttcttacgcatgcatcaaacttaattatgcatctttctggccttctgtaaaccgggatagtgtttactgagtcaataacttaattatcatcaaatgaatcatggtctctactcggtgggaattgcagataacttgagagtgtcagtgacataatttccaagtttcaaataaaggaagatgtagaaaacaagtgatgcaccttttgttcaaatcattctggaattgattcactgttccttcttttcgtgctttcaacactcacggctttcatgattcttaatttgagttatttattttctagctttcaagaagtatatacagtgaggttgtatctttaaatatcagaaaagatttttatttgtccgatgctgctttcctatttttggtctgggattaaggtgcataacagactcggaggtttaagtgaatccaattacaatggatgtatatgttagcatatttctgatattttaaatataaggcactttatggatttatagtgttataaatgtaccattttaacataactattcatgataattattgccatgcctgaacaagttatgtagctcaactaagccttcctgaatttcatgccattcatatttgacaatgatgattagggactaacagttgaatgtgttaaaccccatatcataacccaccctactcttttgtttatcttgaataattgattatgtgtaatgacttgtatggtttgattaggttaggagtg

SEQ ID NO: 75067 - DNA, 785 bp, Carica papaya
  Intron number 1 from transcript evm.model.supercontig_200. 7 (locus evm.TU.supercontig_200.7) derived from phytozome v7.0 (chr-ID supercontig_200; pos 92352 to 93136 reverse s trand)
ttaatctttaggtaaatgttttaaatttgagagtttgatggtttcagagttcatagagatgaggaagtttatttttttgggatttgattttggattaccgattagtttcagtgagtttactgggtttttttttaaaaaaaattcctatatttttcctcttcttgttactgagatcatgctggtgattctgctaaggaaaacacttgggtttcttttgatcttgacattgttttcggtctgctaattatcttctggtttccaccattgctgatcatgattcaaagttcatgaagttgtagactaaaaatatagaccgagtcagtcggtctatgttttttattttcccactcttttcctgttcttaattagtgagattaagctgatgattctgctaagaaaatcatctgggttccttttgatcttgacgttctgttcggtctgctaattatcttctcatttccaccattgccgatcatgattcagagttcatgaagttggctagactgaaaacatagaccgagtcagtgggtcaactgggttttttttttatttttctactcttttcctgttctggattagcgaggttaaactggtgattccgcaaagaaaatcctctgggttcttcttgatctgtaaattcttcagtaaaaataatctgggttcttcttaattctgacattcttttacatctacttattatcgtatacttttatccgccattgttgatcgtggttttaccagttcatgcagggaaactcagcgagttgagcgtccatttacgaagc

SEQ ID NO: 75068 - DNA, 709 bp, Carica papaya
  Intron number 1 from transcript evm.model.supercontig_55.6 (locus evm.TU.supercontig_55.6) derived from phytozome v7 .0 (chr-ID supercontig_55; pos 28865 to 29573)
cgttctgctctcgttgtgggcactacccctatgtgagtttttgttcctccttgctttctttcagctttatttgaattgggtactccgtgaatttcaactaacaagcagtgaactgagatgggtatttattcattttgtttttttctttctcgggttcttatctgtttcgctgttgggaaactttgattcaactgataacccttagaacaattatccgtggtgtaattgcaaaaaaagtgttacctttggccgttcttgaaagtttagggtaaatgattagctgatgatggttgaaatatacaggacagttaggctctataaaaaggaatttgaattgatttttctgtagttattaaggtgtttattggaaatagcatatgatcacatacatggaacattcttctctgcaagctgcacattgtttagatgcagtaacttcagaccttgaagacagctcaatactttgtcgttatgtatcgtggagtgaaaagaatgatggtctagctgtgcttctttctctctatccatctggttgaactgaatatacaaatgaatactacaagatttatgtattttttccaagcatacccttaatttgagttctccgtctgatggtcctggagccaatcctgtaatggtgctaagcttcggatgtctaatgtattacatgttgatggtacttgaacttactatatacagggaaatttgc

SEQ ID NO: 75069 - DNA, 632 bp, Carica papaya
  Intron number 1 from transcript evm.TU.contig_41191.1 (loc us evm.TU.contig_41191) derived from phytozome v7.0 (chr-I D contig_41191; pos 370 to 1001 reverse strand)
cttgttcaggtagtatgtgttttatttcgcaataatttcagtctatgccaacaattcttgagctgaaattgcacattgtaatgcgatttaattcaagtataagctactcatgttataacctagaaactgatgcatatatcaccgaagttagttgggagtgattttgattagccattgctattctagaaagtttgaggttatctattctgtgtttacagacatatttggtggatatgaagaaacccagagaatttggctgtactgctttaggaattttgattaagctttcaaacttaaatttattttattcctcagttcaatggtgaaaagaaagagtacgtgaatcttaaacctcatagaaacttcatggaacatgactttgtagaggacaagatttttgaagtgcataaaaaatgagatgagaggctttattctttaatgaaatgccattgaagacttaatcatatccttccagctctgacctgttatgaagtggtaacataatggaacatatcaatacttttgttctggagtctaaagtgctactttgttgtttctcactttccctcttttcttgcctcttgggtttttttgggggtggggtattgggttacagtggcaaactctggctg

SEQ ID NO: 75070 - DNA, 520 bp, Carica papaya
  Intron number 1 from transcript evm.model.supercontig_731. 1 (locus evm.TU.supercontig_731.1) derived from phytozome v7.0 (chr-ID supercontig_731; pos 9689 to 10208)
aatccaaggtatatataattttttttttctgttcttctactgttcgtctcttatgcctttttttttttctgggttagtttattcttcttgttgagttggattggagcagagcaaattggttttcttttttcttctttttcttttcctctctaaacaatgagttgaaggatgtaataattttcccaattcgtgcttttttccaatgaatttttgttgattaagaggtatcatgttgttttaattcctgggttttgcttgatttcatctgggtctgttccagtttcttcgttctggatttaaattttgggataaaaagtttaagttgggaagtttgtaggttttcttcctgcaaatttggtctaattttagaccagcccttttcttctacttcttacaaatttgcattcatcattttatggtctttgattacttttgctcctgttcttctctgttctctattgttgaatcgttcatcttctttgtagagagttgtcccgttgaatacgtgggtcctcatttc

SEQ ID NO: 75071 - DNA, 726 bp, Carica papaya
  Intron number 2 from transcript evm.model.supercontig_81.1 21 (locus evm.TU.supercontig_81.121) derived from phytozom e v7.0 (chr-ID supercontig_81; pos 582683 to 583408)
aattttttcccccctggaatcgttaataggaggtactgtttttcttaagcacattgttagagtaggagagttattttgtttgttttttttttaattttttactttggttcttgtttaagttcgtgtgattgcttctgatgatatgaattgttttaatctgagtttttcttatacaaccatggtttttttataaggtgtagaaaaaacattggttttcaatgtctcagatgttactcttaactggtttatttgcataattgcttttcgtattggaggaaagtctcatgctctagaatcaagacgatattagccagatcaagaggccatattttctaataatttctctattagttgatttggataaatttgttctatgcacgtatcaagtaaaagctattactttgaagtggtttcttgcttaatcccttctgtattagaacaaggtctgatgctttgacattatggacaatattagctgaataaagtgccatacttccttattatttctggtttagttgttttgtatatgttccatgcttgtttccctcttaacttaaaccttgggaggtcggtgtgggaatgaaaaaagaaaccgaagttagacctgttccttgcttcttctatgttgtaaatgtatgtttatcctaattttccctctcacttgggtccaagttcttaattgttttatttggatggatgtatttacgtgcttttagcgtggtcata

SEQ ID NO: 75072 - DNA, 657 bp, Carica papaya
  Intron number 4 from transcript evm.model.supercontig_27.2 03 (locus evm.TU.supercontig_27.203) derived from phytozom e v7.0 (chr-ID supercontig_27; pos 2002690 to 2003346 reve rse strand)
aggtttcaggttaagattccatctgtgaagtctgcaatcttgctttggatcattgttgtactgcttggctcccagaaattgcatttcagctatcttcattgcttctatgtcatgattgaattgagctcttaaaatttttttgtggatttctttttgtttctgggtggaagcaagtttcttttaattgattttatcttttctctggagaagctctttattgtttttttatctgtgttaatatcataagcatgtcatatgtcgctgattattacggggacaatcaatctggttgagttgaattgattttatctgttcattgatcaacaacaaaccatcctgtgaatgcaaggcaacaccaactacctagatcttaacaatggctatcagatcagcacattggttagaccgtacacactgaactctgctcaagggtttatctcgctcaaataagtttgatactaaagtcagcctacaacttagttactggcttatagaagccattagtatctgatgaatgctgcttacaaggttttcatgccaagaaatttcagggaactcaaccaagcaacacctttggaaatcaaaggtgtcttagtttgaccctgagatatggttccccaaggaaattatttcaggctggagaataggctccatata

SEQ ID NO: 75073 - DNA, 723 bp, Carica papaya
  Intron number 2 from transcript evm.model.supercontig_369. 5 (locus evm.TU.supercontig_369.5) derived from phytozome v7.0 (chr-ID supercontig_369; pos 29762 to 30484 reverse s trand)
gaagacacatcacaaagtccttgtacgttgccgatcttattttttatctgttgattagatatagatctcttatgcttgcctttgctgctagtgttggcagcttattaacacattttaggagtttcttttttgttggaaaaatgttgatggtcttcaagaattgtcatatttcttattaaaaaaaaaaagaattagtatgtttcacttgcagtcacttttttatgacagatttttttctccatttcatatatctccaatgatagtaagatttccctttggctaagttgaaactaagcaagagaataattactaaatgtgctactcagttctcagtttcagtggttgtgtggaccacgaaggtaattgtattcgtttcacaggcttatatcctaatttagttacaacctatacctactgttttattgctatatctaatgtagaagaaatcaatacatcagtctgtactctgcattacgagaaataaacagtacatcggcctgcactctgctttatgtgaaataaacccttttgagtctccttgttgttgaaggctcctaatgtgggccacaatttcttatttgaaattgatggaggcctctgagttaggaagcatcattttcagtatctttcatatggaatactcagcatctttgactaattaagtctgttgagttcacttcatttgatttatgtattttgagcagttcgtccgctgcaaagaac

SEQ ID NO: 75074 - DNA, 625 bp, Carica papaya
  Intron number 1 from transcript evm.model.supercontig_84.8 4 (locus evm.TU.supercontig_84.84) derived from phytozome v7.0 (chr-ID supercontig_84; pos 654777 to 655401)
agcccctgatactgagctcagaggtcattttgtaggtatatatttcctctctgcctcctgttaatcttaagaaattttttttgatgagtatgttgtttctttaatttgtgggtaatgattctcttcttttttacttcccaaattcgattagattccctcgagaataggagatggtgtcctaaaggagactttttggaagttcaatgaaacttttttgttctaaaaacaaaatttgggcccttttttttgggtatcccacacgtttctctgggttcctgtgtattctactaaggtaattttcttattcagtattgatttgaatggaacaaagaagagagataaagcatgcttaaggcagccaacctgttcccttttctctgaaaaataagcatatttttcaaaagctttcttctttatttcaaggacaatgttgaaatgcctttgttaagctagtgaaattttgttacattgttgggactataccagtgtgttttcaatggattatgttcattgatgttacaagaagcaaattcaagtttccaagacattcttgttcaagctttgttagcttagtctccctgtattttgacattttgaaggccattacttaagcgcaacagcacag

SEQ ID NO: 75075 - DNA, 830 bp, Carica papaya
  Intron number 1 from transcript evm.model.supercontig_903. 2 (locus evm.TU.supercontig_903.2) derived from phytozome v7.0 (chr-ID supercontig_903; pos 8235 to 9064)
atcaaatccaattgaggtaagtgtgaaagagcaaggtaagaaaaatactaactctacaattctcaattcaaactctagtgtagatgttaataagtttccttacctagatagaattaggaaggataagaatgatgctaagtttgctagatttttagaaatgtttaataaattatagattaatattctatttgttgaggctttgatgcaaatgccgtaatatgcaaaatttctcaaggatatcctttctaataagagaaagattaaggaatatggcacaataatgcttactgaagaatgtagtgccattataaaaaatatgttgcatacaaagcttaataatccagggagtttttttatactttatgaactaggcaattttaaatttaaagaggcactatgtgatttggattctagtattaacctaatgccatcatctatttgtaggagactcaaccttggggagatgaaggagacaagcatggttctgtagtttgcagatagatcaactaaaagacttgcaggaatcattaaagataatttggtaaaagtatgagagtttatttttcctgtagatcttgttatacttgatatggattttgagtttgatttatcattgattctaggtagaccattcttagccatagctagagcattaatagattgtaaagaatgggaaattaattgttaggttcaataaagaggagatagtctttgatatcaagaaagcaataaaaaatccttttattagtttggatgatctattttgtacaattgatattattgataagtgtgcagataaacaacaacaagacattctaatagaggataat

SEQ ID NO: 75076 - DNA, 476 bp, Carica papaya
  Intron number 2 from transcript evm.model.supercontig_187. 17 (locus evm.TU.supercontig_187.17) derived from phytozom e v7.0 (chr-ID supercontig_187; pos 233011 to 233486)
caaaacgccagaaggtatgccattccccccaaaggaattagggttttgataatgatacctgcataaacctaaaaactgatattgtttctccctttgctttattgtaattcaaattttagttgtttgtgagagttgaatcttttgtcattttgtactaaattgtcactttaaataatttttttttaaaaaaacatttccacatgtctagatttttaaatacaaatacggaaagttcaagaagaaacaaatcagaactcaggggaaggaagaaaaaaaaaaaaaaatatatatatatatatatatataagataaataccccaaaaaattggatggttatgatgtaaaataatgaaaactcaatgacattgattatactgtcacgcaaaacactagaggaaactgtaatttgggctttctaactgtttctttgaacagttttaactgtgttttggctcttattgatgcagagagagtaa

SEQ ID NO: 75077 - DNA, 743 bp, Carica papaya
  Intron number 1 from transcript evm.model.supercontig_24.2 3 (locus evm.TU.supercontig_24.23) derived from phytozome v7.0 (chr-ID supercontig_24; pos 603788 to 604530 reverse strand)
cgtacaatctctctcaaccaccatccgcctcaaaggtaccaatctctctctattttctattctgtgttttttgtcgccgattcatgcgtatgagagatgcaatctgtagcttgataaggtcttttgtttttgttttgattcggtttcttgtaaatgcatatttttccaaaatttattgtcggtttgttcagttttgttgagttgaatcctattattacaattaaccaagggttagagaaaagcatgaaccgacattaaatgagtaatttctacggctgaggactcttaagattttgttggtgaagttcatgggaaattcatagctctcagcagctctctgtgatgactgattcaatttatatgtatatatgatgtgtgtgtgtgtatgtgttttttttttaaaaaacttttcttttaagccctgatgaaaacacttctaatcttcaaattaaaattgatttaatgccgcatctacagttttctttgctagcaaattgtgttgcaactattataaaataatttatgaggagcagaaggaaaaagacactcaaagattaactgcgttcagtggatttcttgcggatgaagagaatgtgcaagagattcttattgattaaggataaagtattttgaataattttcactaaaaatctgttatagaagttgtttcagttgagctatgtaatttcccttggttatatagttttttagcttgctcttgttcttgcagattgattgtgctt

SEQ ID NO: 75078 - DNA, 285 bp, Carica papaya
  Intron number 2 from transcript evm.model.supercontig_50.8 3 (locus evm.TU.supercontig_50.83) derived from phytozome v7.0 (chr-ID supercontig_50; pos 820270 to 820554)
tggtgtctccatcgcacatcatttccttttaccaggtgctgtaacttttctcatctcaaacagttggagctactacaggctagagttccttgtaaaatcttatatacaacaaaaacaaaataagttgcttgttggtcttacatattttcttattgtggatcattggtttttatgtgagtcttcactctcttggacatgattttttggcaccattttccaatatcagagtgattaaacctatatgctttcttcaaactcaattatggaaaaatgtacaggctttta

SEQ ID NO: 75079 - DNA, 909 bp, Carica papaya
  Intron number 1 from transcript evm.model.supercontig_29.2 5 (locus evm.TU.supercontig_29.25) derived from phytozome v7.0 (chr-ID supercontig_29; pos 243223 to 244131 reverse strand)
tcaccggatctttctactccaaaaccaaggctgttagtttcgtataccacttactttacatgaaatgtctgtgagtttattggtttttcttattaaaatctttgatacgtttgattgaatttatcagaattgatttttgtaaatgcttgacctgggtttttaagagcgtttcatatgagacgtaacgtgctagatctgacgagttttgttttgttccatttcttgtttagcgagctgcttttccactgttattgcttacatcgtattgttggtttaatctcctgactacgtaaagatcttgttcttcacactgcaacgccaaattggatcaaaagttcgatgcttcatgctttgtggcttaagatccactcagagctcatttctatgcgagcgcgagattttttgaattgtgatccgtacatttaacgttgaacttatggtttctaaaacagtgataagggctagtacccccatttcttgatattctataactatttaaactgagtacccacgtaagtaatgttgcttgtagatgccatttgagtgtttggggaaattgaagaaagattttctgggttcttggggccaaatcttcgttttggatattgattctttgtgttaatttaacatcctatgtattgatcttctttgatggtagggacttttcatggataatagtatgatcgatggactatttggaaactgcagtcagtgcctctaatttttttgtaatttttagtagtatggttcctctttttgagattttgggcaccattttccatgcctcgttgtgttcttagttgatgataaaacttggttgcagttggtacgtagatgtgcagcatggtaccgttgtcctaatcgtgttcttttactgataattgaaggtggaagatttgctccacaatt

SEQ ID NO: 75080 - DNA, 437 bp, Carica papaya
  Intron number 2 from transcript evm.model.supercontig_3.11 (locus evm.TU.supercontig_3.11) derived from phytozome v7 .0 (chr-ID supercontig_3; pos 91075 to 91511)
ccttggaaggacctgaattggacactctcagggtgagtttattttcttccttctagtttcgccgtattgagtttgattcaaattttgaccacaatagctttcttatctgttgaaaaaataaaacctcggtatatatacaatcactcaaaataaaaagtgagataaaaaaaaacataagatttaacgtagtttgacaaatatgtctacatgtaaaggtaaaactgaaaaaaaaaatttcattgtaatgaaaattgagagtacatcgttgatagagttgtaaatccttacatatacaaagtactagaattttctctaaaatattctccaaaatacacataaaacattcccataatcaagctacaatcaacattatgattatgacatgaaagtttatttgtacaggcttcggagaaaattgtgcttccagaagacacgac

SEQ ID NO: 75081 - DNA, 808 bp, Carica papaya
  Intron number 1 from transcript evm.model.supercontig_24.6 6 (locus evm.TU.supercontig_24.66) derived from phytozome v7.0 (chr-ID supercontig_24; pos 1487386 to 1488193 revers e strand)
ttctatttcctaaaccttccattccagacagaaaggtaacggaaacttcttttttcttgtggccgatgatccaacaaagtaatattccaaaatttgcctccattttctaatttctgaattcttttaagttgattcccgttacagttgttatattgtctggtgtactggcttctgcttgtgcagttaaaatgatatgagcttctaaatttctggttacttttacttggattattggtttgtcctgatttttttctttctttttttgcaaaagaatggagcaccttttgtattcactctgggatggaaaaaaaaaatgctcaacgagatatttcaatttgtgccataaagaaaaaatctgtggaaattaaatacttcttgagtaaatggaatcctagaaagctagaagttatccaatgattatccatccatggaaagcagaattggcgaattcaatttacaccaaaagcataattttaatgttatgtttgtgtgtatgcatataagttgattaaggcagatgttctgtcttcgaactttttgaggattgttgaatttttctaatggactaagaaagccatggattcttgctgtggaagtatatagaattgggcgtggaattgagtctggaattaagatgcaatttttacttaaattcttgtcttatttgttttttattttccatccctattccgtacaattaaattctgaactaaacctttctatctctctcttgccttgctttctagttagtgatttttctgttcctgtattaggttcttaactgcaaaatcttccaggaaaaaactga

SEQ ID NO: 75082 - DNA, 487 bp, Carica papaya
  Intron number 1 from transcript evm.model.supercontig_2.68 (locus evm.TU.supercontig_2.68) derived from phytozome v7 .0 (chr-ID supercontig_2; pos 1170676 to 1171162)
ttggtggcctagggtttagaaactacatagatacggtagctgccaatttttttttctttctaaattagctaaaggaagcctaaagcagaatcccacaaccttctaaccttcagacaccaagaaggatatggttggtggcctggggttagttattacaaagataaaatagctgtcaaatacttttttctaataaggtaaggcatgtattccatgtactggatggaatagcaacatcgtttaagagagtcagactatgaaagtaacatataaccttatcaatgcacaccaattgatacaaaaaccaaccctgcataaattatacctttgacttctgacctatttcttttccaatcagatacacatcaatgcaatgagaacttgatcccaaatcatgctatcttttccatattatctgcttgaaacttttgcttagtgactagccttctatttgtctctgaacagaggcgcatactggagttcacaaagt

SEQ ID NO: 75083 - DNA, 833 bp, Carica papaya
  Intron number 2 from transcript evm.model.supercontig_2.68 (locus evm.TU.supercontig_2.68) derived from phytozome v7 .0 (chr-ID supercontig_2; pos 1171335 to 1172167)
aagtctgaaagacatacgtgtacggcttttgagttagttcaaccatatttgctttcagtagtctactctttctctttagtgtatcctctcattctctctgctctaatctttgtggttgttagttgcattgtatgttatttctttgagataaatatagatcgcatcgaagaatttcatgatgaaaatgttatttgtcatttagtgttgctgtgccctaaattatcttaaaaatacttttgcaaattcataagtaatttaaaaattcaataaattttccttttaaaacttgagaattttctattggtatgatggttcttccacttcatttggttcattttccacttaattcttaatcaatactcaatttaaattctaatattactcttgatatacataatcagaatataatttgtttgaatttcaaccatcaagtaattcaaggtgggacagtgataactcaagcacaataaactattttctaattttgcatgttaagagtaatatgaatatcagaattaggatttttttttttgggataagaatgtcagaattaggaattgaatgtacaatgaataaaatgtaaccttaatgcaatgaacacttcacctaggagcttgtgttcctctgttgtgtagcagaattctgcatatattgtttaaatactgacctacacaaacacagaaactgcagttttttttttggttcaaattagtttagttttttatgctcattggctatgtggcgctatttcaaatctatctttcatttaatcaatttttatgttttgatttagaacatttttcatgccaggtgtccaagcagcctattggggg

SEQ ID NO: 75084 - DNA, 827 bp, Carica papaya
  Intron number 1 from transcript evm.model.supercontig_84.9 0 (locus evm.TU.supercontig_84.90) derived from phytozome v7.0 (chr-ID supercontig_84; pos 685672 to 686498)
tgattaagcagctcaggaaatctgtggaccttagggtttgtgatttttaaaattgctttttgatgcatgatttttcattatattgggattaaccgttaagggtttgttctgatatctcatatcttgtggattatgtttggagtcatgaccagatactggattaatcttatacttatagcatttatgaatgggtttgttttatttacggtgaatcttcaatttaatgcaaaagcttttaatctggtttaatttaacccctctttaatttacattttgtggctgttcaatgaacacatttttccttttttcttcaaaaattagtgcctgactaatcgtttcttggtgactcacgcaatacattgttgatcttatgtttctgttcaccgtcgattttctgcagagtttctatttaatgtttctgaatcgaccaaaacgtctattttgtcaaataatgaagtttcgttttatgatttgcttaacattaactgcgatttcagcatgataaattatttagtagaaccatagaaattagtttgttaccataattttattaacaactccaattacattttcatcagtaactctcaaatttttattgagctattaatggcttaataatgggaagatgtaatatcatcttcccacatctgtgagtctaaataatttacagtttaatactatacaatctgggttttctaaatatttcagaatttaaatggtctatttagaacttttagcatgacaatattctaaaattttcaaactcatcaaacaactgggactaactcttcattacattgccttctcaggatcaggtactttcaacc

SEQ ID NO: 75085 - DNA, 817 bp, Carica papaya
  Intron number 2 from transcript evm.model.supercontig_44.8 (locus evm.TU.supercontig_44.8) derived from phytozome v7 .0 (chr-ID supercontig_44; pos 76415 to 77231)
aggaggagtgcaagtcatttgatttgttcatacaggtacttcaatcatcctgtagcccttttggtcaactccttcaatttcttctataagaacttatttgtattatcctaatccttttaaagtttgatgtttgacctttgtgcactgtttttttttcactttcatgtttggtctgcatgtagtttcacaactattttctgatcctcttttgctattaagcacactttattatttgtttctcttctaatttattctggtaatagggattcatctgtcatctgtacattgcaaatatatcttattttggttgaggttgatgactatgaagtgacttacttcctacaattacaaataggtgcctctaggttgaattcttggtgagcctctccaaaatctaagtttgtcataaattctagagagtgtacttggtaagagaacttaaatgtcataaagttacttcaatgcaggctttgggtgagtatttacacctatggttgtgacttggtaagcagatagttctgcttgatcatggttggttatctgggtggatagtgagtaggcagatgagtagtggatgggttttggctgatgtttcaccctatttcacgtaattctttgcaattggccttgcttatgtatttgaatctgactctgcctgtgatatgatcctacaaagcttcacactcttttgatgcaaaagtattttcttggttcataaaatttcatttccattaactgttttaagcaatggtacttaaatgaaaaatgcaattacttttcagggttcaaagcacagtgctcctgggttgaggatcgt

SEQ ID NO: 75086 - DNA, 557 bp, Carica papaya
  Intron number 3 from transcript evm.model.supercontig_171. 26 (locus evm.TU.supercontig_171.26) derived from phytozom e v7.0 (chr-ID supercontig_171; pos 348942 to 349498)
tttggtgctacaactttgattgtcaaggtgagattgattttattttttgattgcttattgtcatgacccagatgggtaatcatgtaatcaatgctcgaaacttacccatttcttttaatcctggaagatcttcatggatttaatctgattggatcttgtcctgagaattgaaacttattggttgacctggttttggcttgagggtgtcaagcagatttttgggttttatcaggaaaagatcagtgatcatgatccaactacaaaaaattttacttgattaagttctacggtgaaattagaagtttaattaattattaattctgggttgcttttgtcttttctggtgtttctttttgtttaataattgattagggataactgtaaggaatattcttggaaccttttgctgtatctggaaaagtaaaaatatcgatgtttctcagagaagaaacaattccaaaaaagtgacagttctttcacttttgtctctgttcattaaatatttagtttgtactgttatagataataggcagcattggagctgtttctgctggact

SEQ ID NO: 75087 - DNA, 297 bp, Carica papaya
  Intron number 1 from transcript evm.model.supercontig_23.1 23 (locus evm.TU.supercontig_23.123) derived from phytozom e v7.0 (chr-ID supercontig_23; pos 1949816 to 1950112)
aaaagtaagattgcttgcttgtttgaaatcgttttgaatttcttttctgttcaacaaactatctgataatactttgttaaataggtcaaaatactaatttggcccttgtactatttcaaatattcaaattgattcttataccatgtttttttttgctattttagtccatatattttttaaaaaaatttatttttagtcttaaaccataatcggtgtattgtttgtgacgttaatctggtttcttgttaaatgatgggtgcagaactaaagaattgcaaaggtggggttgactgtttg

SEQ ID NO: 75088 - DNA, 485 bp, Carica papaya
  Intron number 2 from transcript evm.model.supercontig_95.1 3 (locus evm.TU.supercontig_95.13) derived from phytozome v7.0 (chr-ID supercontig_95; pos 277249 to 277733)
tcctcctaaagaacgtcatattcgaagtgagttcatgttttgatcgtgcaagttcagttaaaaaataactttccatctgctgaagctattgatcggcataaatcattgttgttccatttagatttcatgtatgcaattgttgtttggaattcgatttgaaatgcaatggtggattggtaggcttgattgagttcaatttttttttgttttgttttcttctccgcaaaagagaaattgttttcacaatatgggcttcatgtacaccattgtttgttagaaatggagattgaattgtgatggtgggtttttcctcgagttcaaaaaatcctgtttggctgcttttgattttgatttcaaagctcgtcctcatctaatcttgatggtctaatgctgatgtaatgtatacttgttttgacgtctttttcttgtttactgattaatattctgcagaaatattttttgcaacatcggtggcacgtccccga

SEQ ID NO: 75089 - DNA, 712 bp, Carica papaya
  Intron number 1 from transcript evm.model.supercontig_87.1 06 (locus evm.TU.supercontig_87.106) derived from phytozom e v7.0 (chr-ID supercontig_87; pos 836958 to 837669 revers e strand)
gctctagctcaattcctcaaggtcttcaccacctggtccgtacaatctccaaatatctctctctctctctctctctctctctctctctctctctctatatatatatatatatatatatatatatatattagcttaaatcttaaatgttccgaccaatatttaacgagaatggtaccagtggaacataatcttacagatttcccttgccttattcatggactcgtatttgagttgctatttgctggtactgaaggagaggtttccttaattgcatgttgaaaagggaaatggattttttccctcccttcttctttttcaagctgctgcttgtttgggaaatgggagaactatgaatagttatgttcttatgtagttccaatgagtagtttgttataggctcgggagaaattggagcaagagaaattagaactgcatgcattgtgctgtgttgatgtgacctggtagcttgggatctactccagtttcaaaggagagcactaacatctggctaaagagttgttttgtatgaatttgttatttatgcaggattctaatttgagttcttattatggttttgaatctagcattactagtttatcaaaagatgctcaccgataatggaatgtgtttcctacacaactaaaacttctatgaaataatagctcagtttttcaatatgtgtcttctagatgctcaggtttaaagaaaagag

SEQ ID NO: 75090 - DNA, 887 bp, Carica papaya
  Intron number 1 from transcript evm.model.supercontig_198. 38 (locus evm.TU.supercontig_198.38) derived from phytozom e v7.0 (chr-ID supercontig_198; pos 188691 to 189577 rever se strand)
ttcagtctttcctgtagagtttgttggtaggtgtctgatatattgcttttcttccatttccttgctaattcatttaaatctacagttaccagccttcttcacagagggaaatggttagtttcactctgtaaaaagtttctacaatttttccttgatgtctatttccaaaatcctggaatgagtatatgatttgtttgaattatttaaaatttgatccaaaatcagatttttgagtatattgatttgagtctatttacctatatagataattaatattacctaagagccagttatccttcgttttagagattatcatttgatcaatatatatctgcattaactagtctatgttttactgattttgagcagatttcttccatgatcaacaaactaatgttcaaccttttcttttatgatgtcttcggaaaaaaaaaaatcctctgtggttggttactcactccatggtcgcataaactataaatttctgcaatctggaagttgggaagaaatttaaagaatgatttttccctcttttactcttacataagtttaacagcacatccaagggagctttttgtatgcttaagtttaggaggaagtttcatggatggtatgaaagatataaactagtaaggaccaacttaatgtaattttctttcactaccattaatctttttgtgcaattgtatagcaggttttgctgactgcacttttgcttacgagaagcttaataacattcctgactaggatataattattttgcattttgcattttgtttttgtttttgtttctgtttttttttcttttttttgggtaacgaaccggttgaagttgatgtatttattgtgcagtgagaggttttgtaactggaagtactgatacatca

SEQ ID NO: 75091 - DNA, 377 bp, Carica papaya
  Intron number 1 from transcript evm.model.supercontig_79.3 8 (locus evm.TU.supercontig_79.38) derived from phytozome v7.0 (chr-ID supercontig_79; pos 747545 to 747921)
ttttccggtgagaattttttcccgctcttaaccttctgtttggttgctgagaaattccgttaaggaaatactctgactcacgttttggttcttaaaacaaatctcatcaactgttgtattgaatgaaatggtgattgatttatgatccgaacaaacagagcatggttatttgctttctattacatatcttagaaacttcgatttaaataattcggttaaaacttttgaattttgtctaactgcacttttagtatgaaaaaaattgaacttcggaggcgttgtacaaaaatagcgctggctcacgttagacagtaaataagttctcattttcctatttgatagtcttttgagggactctttcatgttcttctcatagg

SEQ ID NO: 75092 - DNA, 639 bp, Carica papaya
  Intron number 2 from transcript evm.model.supercontig_32.5 (locus evm.TU.supercontig_32.5) derived from phytozome v7 .0 (chr-ID supercontig_32; pos 105630 to 106268)
atcaaacccagttgagataagtgtggaagagcaaggtaagaaaaatactaactctataattctcaattcaaactctagtgtagatgttaataagtttctttacccagataaaattaggaaggaaaagaatgatgttaagtttgctagaattttatagatctttaagaaattacgtataatattctatttgttgaggctttgatgcagatgccacaatatgcaaaatttcttaaggatatcttttctaataagagaaagattgaggaatatggcacggtaatgcttactaaaagagtgtagtgccattatacaaataatttacctataaaacttaagggcctagggagtttttttgtaccctgtgaactagaaaaatttaaatttaaagatgcactatgtaatttaatgtcattatctgtttgtagtagactcaacgttatagagatgaaggagacgcgtatggttctgcagtttgcagatagatcaactaaaagacctgtaggaatcattgaagatattttggtaaaagtaagagagtttatttttcctatagattttgttatacttgatatggatgatgagtctaaataatcattgattctaggtagaccattcttagccacagctggagcatttata

SEQ ID NO: 75093 - DNA, 716 bp, Carica papaya
  Intron number 1 from transcript evm.model.supercontig_65.9 7 (locus evm.TU.supercontig_65.97) derived from phytozome v7.0 (chr-ID supercontig_65; pos 1005876 to 1006591)
gtcagcctgtcctcaacaccgggtctcctattaaggtatacctagttttctatatttatgcaaatttatgtctctcgatgaggaatgctgggtttcatttgctggttcggttagagtttccggtaaaagttattgcttttggtgctattggattatcagcgcctaaataaagtaggaaacccaaaagatgcgtaatagttgtatgaatgtagatccggtctttctggtattttgagtgcgataagatcttcgaatgttgcttctttatgttctgccaataagttcttccagttagatttcatattcaacccatatcacttgttaatcgcctcagttacaactagtcagaaggcctttgtctaccttcgccagtaggagattttttattttattcgcagatctagatctttatgtagattgataatttcattgagtaaaagctacttttggctgtctgcccaaattaagatatgctgtgggaaatttagagtttacttgttgaatagtcttggcttcatcaaacttgagtattcacgcaattgatctgcttctcttgtagttgttgtgtcttgggtttattgggctttgagattgaaaattttttcctttctttttgccttctattatttaacttttggaactgataagacaattttaatatatttgcatatttttgtgtagattcctgttggtaggtctacccttggacgtatcat

SEQ ID NO: 75094 - DNA, 701 bp, Carica papaya
  Intron number 1 from transcript evm.model.supercontig_55.1 68 (locus evm.TU.supercontig_55.168) derived from phytozom e v7.0 (chr-ID supercontig_55; pos 1025454 to 1026154)
gcagcctctgtgccgaatcttttattacaacccaggtacctgactttattttcttattaatttatgttgcgatgcaataatacccagattgcaagtcgtagtccttagattaaaaaaagtggagctttgtcagattttaaactggttcggcgatagcagctattcgttattcaggagaatctgatatgctgtaggttcatactgagttagaactgggtaataagttttgtgtgcttggatgaatttaaattattgtagtatgtcaaaagattcatgaacttaaaacaacttaagttatttttacctgttaactgcaaggggaattgggttcggcatgtcggccatgcttctgctgtaattaaggtgacacttgtcaccttctcatgtttcctcttggttgcgcaagaccgaaattgtgtccatgtaacttattcttaaacttggggacttttgatcacaagcttgtaaagttttcattagttcaaatactcaatatgatgaggtgtgcgtgacaaacagtgaagtgcaaatttatatgggcaagaatgtaatgggtctagtatttggctctgttattagttacctggaaatgttgtctaaaaggtatgggattatgagtgttcttttcttaattatctataaaaattttcttttgtttttatatgtggccggttttttattttcactcacagggagcaagc

SEQ ID NO: 75095 - DNA, 1005 bp, Carica papaya
  Intron number 1 from transcript evm.model.supercontig_35.3 9 (locus evm.TU.supercontig_35.39) derived from phytozome v7.0 (chr-ID supercontig_35; pos 777020 to 778024 reverse strand)
tcaaggtaatattgactcttattctttatgttaaaatttgcatattttcttcttctcagattataaataataaattatgtcattttttattaatttaagctttttcaataactaacaagaattaattttatcatggtatgaaaatcaaatgtcttgacttctagattcctgtagcacctttgtttaattaaatttcaaccctaggtatgaagtacattcatgtattaaatttatattttcaatctagtaagttcttacatacaaagagatactaagataagtaatagattggtcctattagtttaagcttttggaataattggccatgaccaattatttcacacttctcgagctgcttgctgttgtttaaaatttttcttaaccaaaaaagagttactaggttttacctggataaaactctcccaattgtgacaattttgtttaacctctagacatcaggaatgttatgctacattgttaattttgaatcccctttgaaagcctgtgctttcttgctggatcgccacctaaatttaattaggaccaaaggtatctataacgtgaaaatagttctcgggtatcttttttaaataatatttatatttcatataactcaaggaacccatattaaactagtttgaatcatggatatgagctcttcttggtaagtctgggaacctgggtctcctttgtctcaaatgcatcactcacaaaaaagaaataattgaatgtgctttaaaataaatatttcatgcagataaactgaatgtatagcatgctaacaacccattccatttgtctatgcggcattctggtgatggtttgagttgtattaattcacagcttctggcttgaactttatcttttagatttactgaatgttttgaataattcaacatgttatgtaacttgctagaactctttctctccttctatgttgtaattgtgtgatgatggaggattagtaggagcaatgataaccgggctttggattttctttcaggc

SEQ ID NO: 75096 - DNA, 969 bp, Carica papaya
  Intron number 3 from transcript evm.model.supercontig_162. 21 (locus evm.TU.supercontig_162.21) derived from phytozom e v7.0 (chr-ID supercontig_162; pos 152185 to 153153 rever se strand)
tctccatttggggtggcgaacccaactaaatatatatatttttaaattaaatcaatcaaagtttccagaagtttttcaaagtcattagaaaatgtttcctgtatatggtcaatatatacatatatatacatatatatggatcctgaaaggggtaagtgctgctgaaccaagcaaaaattaataatatttttacctaaaaagtcaagctaaaaagtgtttcatagttttaaacatacataatatgtttaaaaaagttttttaacattttcttgtaaatattatccttaattaaattacataatattaaatttatctttttaatataaatatttatacgtactatatatattgtataatatataatatactcaattctacataatataaattataaatatatatattgtgtctatgtaacttgttagatgtattcttagttgaatttttagtttgtatttactgaaaaattattatattattttttatcgtttcaatattaataattatttctataaaatacaacaatttttattttttaagataataatattttttatagttatttttattaaatgtataataatttgtttaaaaaaatatatattttcacttaataacaattgttaggccccgatactttatctaaattatattaaaacccaaaactatcattaattctgattatcacccgtttcatctcaagcccaaaaaatatcttacaattatggaatatttacagataaggcgcactgtatgtacctcttctccttcctcatttactcatcttcttcttcttttgcttcttcttctcaccgtgctttctgtaacaacaaacaccttcaagacaaacccagtgaattacaatactgcacattaatggactatcaaccaaacacagtgtaaaagtgaaggagaatttagggttatagtgtctgagaagggatgaaagaggtgggtggttttgccagg

SEQ ID NO: 75097 - DNA, 718 bp, Carica papaya
  Intron number 2 from transcript evm.model.supercontig_85.1 32 (locus evm.TU.supercontig_85.132) derived from phytozom e v7.0 (chr-ID supercontig_85; pos 900120 to 900837 revers e strand)
agaaacattcatagacccaacttttaatcatcaaggtgctgtttacagtcaataatgtttctattcttgattcattcctctctggtgtatatatttattatatcatagagaacttattctattcttgaattaaggggggtctgtctcttgttacttacaagttttttgagcacaggttttagtttatctctttgctaatataataggcagcttacttattagctgttaataagtagttttaagttgaaaagagtatttcttgttatttttctatactggtttaagagtatttattttttttttgatatgatcacatatttattagcttctcatataaatatttgttcttaaaataaggacctttatgtgaacgactaattgattaactttgtagttaatacacctattgctgtaagcatactttttagcaactccaaacagcctataagttgcttgtcattttgtatgcctggttactaacaatcacctagttttctggcaagttaatttttcactaaagatggcctggttgagtcaaatagttttatttgttgattaacgtagtgaccagttcgaagaaatccaagaaaggagtgtaatttattcaaataaaagaattatgccatgagaatattgtatcaatagttattgatctactgctggcttcatttatcagaggcttagttttgcagattgggactcaaagttgcagcaaaca

SEQ ID NO: 75098 - DNA, 852 bp, Carica papaya
  Intron number 1 from transcript evm.TU.contig_25278.2 (loc us evm.TU.contig_25278.2) derived from phytozome v7.0 (chr -ID contig_25278; pos 11775 to 12626 reverse strand)
tgctatttgtttactccaagcccaaccacgtgaaggtaacagtaaatactcatcatctgttcttattctgttggcttttgatgttttcttttatagattttgatcagtgatgtgttttacgacatgggtatgtttgaaaaagaagaaaaattgctcatttacaagttttcttcttttttggtttcaacgtttaatcagtaaatcacgtggtggttgcttgtttggtgatttgagatttggagaactgggtctcgtaaatttttgggggaacaattaattgtttgatctgcaatttattgctccatgcatgttgcatcgggtactatttcattagagttgaaggtctgacatttgatttttagcgtgttgctgagccatatttaagcagtctgagaaatataaaatggtgttttattgcttttctaatggtcaataattgtggtcaataatgcttatccaaatctatgattctattgtctctgtctacatctatgataaagaattgtggaacatggagcttgatcattcatggaaaaccttctcatataatggtgtaaatatagaaatcagagtcatcttcttaaatggttagttaaccttgattctaaatcttatttgatccattaaaagctgctcttggcgagaaattgttttatttgtgttctacataaatacagaatagatagtgaagtgctgtacagtctacatagatgcaggccttcgaatgataattcgatggtgtctagaaatatgaaatccatgctcttgaaactaaatttcttgaaaaaaaaaagtgcttgtttcaccttttgtttctctacataacgcaggatccagctcataagtcacttg

SEQ ID NO: 75099 - DNA, 548 bp, Carica papaya
  Intron number 2 from transcript evm.model.supercontig_6.41 8 (locus evm.TU.supercontig_6.418) derived from phytozome v7.0 (chr-ID supercontig_6; pos 3132438 to 3132985 reverse strand)
ctcagcagtttgtggtaagggcaagaaaagtcaactattctgtttggtttatgagaaaatgaaagagacgattttgattggaagatcagtgatttcagcacatgcaattctaagaatataataattctttctttttgttcttttttcttgcttctttattttctaggagacttgacagggattgggctttttcagtttctcttgatgattctaaaaggtcgttagcttgtgtactttttttattttttcaaaaaaagaaattatttttatccgatgtttaagggacaagtcttagctggtaccaattgtatttaatctgttttttttccccactttatgctgagaaagagaactgctggattttggtttcccgccgttttgaaaatgtcattggtacttttttggtcttggaaaagaaattatccctttgtcatcttgaaaatctcattgagcttatgatagtttggaaattcagtacggagcttgatggctgctaatttgatggtttcttaggcagaggcagccggagttggaaagctgaggcacca

SEQ ID NO: 75100 - DNA, 370 bp, Carica papaya
  Intron number 1 from transcript evm.model.supercontig_96.1 4 (locus evm.TU.supercontig_96.14) derived from phytozome v7.0 (chr-ID supercontig_96; pos 266879 to 267248 reverse strand)
cctatcttgatacccttcatctggtaattatgcttttcttttcttcttcgttaattttctcactttcagatctcatatctacatcgttttcttgcctccattgtttgcatttatgcaacagaatttattgcttcataattccctcttccattatgggtttctatatgtatgtcgatatttgatttgtaaatgtaaaaacccagaattaagaacatcaaatagtgatgagatatttaggtccaaattacaaacccatagaatttgatatgttatatcctgcattcttgttgaaacccatgagtggaaaggaaattaacaggagatgatttaactatgaatttgtttaacagtgtggtgatcagaagagagc

SEQ ID NO: 75101 - DNA, 522 bp, Carica papaya
  Intron number 2 from transcript evm.model.supercontig_14.7 (locus evm.TU.supercontig_14.7) derived from phytozome v7 .0 (chr-ID supercontig_14; pos 117785 to 118306)
gaatttgattgtatttttttttgtcgacgatgtttttggttcccgaacttgaagtttacttgatacagtaattcttactttgtttttttttctcttgatacgttcactatgtatcttgtctctctgtttattttcttccaggttccattttatttttctctgtttttcctcctgatacgattacttatcgcagtgttgattctcttccgagttagaatctggttaatctatttcacattagcttgcgtatctgatacctgtttacttatcgatacccgactgagctgattgtcttcaaagttcaatcttccattctcattctctgtttcgtattggattgtcgtcttgattgtttgagtgccagaagtcggtggttttcataagcttttttgtttgatgtcctttttgttagccgatcggcctgtatgggggaagccaatgaaagatggtaagcttgcaaatttatttatttatttttcggggccagctgtgttttcttattctccccacggtgtcgagtgg

SEQ ID NO: 75102 - DNA, 311 bp, Carica papaya
  Intron number 1 from transcript evm.model.supercontig_20.1 37 (locus evm.TU.supercontig_20.137) derived from phytozom e v7.0 (chr-ID supercontig_20; pos 1488251 to 1488561 reve rse strand)
atttgcgttttatcattcacgtaatgtaaaacgacaagcatctttacgcatgtacttttctgacactttttttttttttttttttttgtcaatcctcaatcaagttcccaacattctcctgatacacttgtctaatcttacaaatttaaataggactttgactttttaattaaaaaaaaaacaagtgattggtcacggggattgccctattttattaattacccccttttttttttcttttctgattaaaaaaaaaactttcgtatttaattaattttaagtaatttattttttgattgtaattaacagga

SEQ ID NO: 75103 - DNA, 1016 bp, Carica papaya
  Intron number 1 from transcript evm.model.supercontig_22.6 4 (locus evm.TU.supercontig_22.64) derived from phytozome v7.0 (chr-ID supercontig_22; pos 1405067 to 1406082)
tcaagccccgcactgctgatatctcatctcaacaggtccttctctccttctctatctcatctgtgcatgaattcgatatcttagtgttttgtctgctcagaacgaagagtttggagtgtttagggactgcaatttttacttttttattcttcacgtgaaattggaatcctcttacaaattagttcagttcttttttctggaatttttcgatatttgctatttgcacataaccaaaatatagtgtggttatctcattgtgcgattaaattacctcatagcattgaatctcctatgcttaaaaccgatgtttcaaccccaaaaagtaatagaactgctcctaaataattcaacaacatactaataggtttgttgcctaatcttttatatatatatgaagtggaactaaattataacgaaagctggctgtggttttggggctagaatggtggttaatccgtttacctgtgtttgatgagcaaagaaatgaaaaaaaggtgtctcctttttacgttttatcatccactcaccttggggtaattgttttgatatatgtatatgtacgtgtatatatatatatatatatatatatatatatatatatttcatagtgtttaaaaacaagttgcgcgattaaaaagaaaatagtttttcttgtttggaacaaatcaatccttaaaaagatgtctgggattcgaatagagaaccacattggttcacgttctaagcaaaagagtgtcaaattataaatgaattccacatcaagaacatcattgcttctgaatgaagcgtttgatttttatggtcttggtagatcgaaggagaagaaagatgtttacctatttaatcatgtttatcagttggcagatatttattctgggtgaactttgcttgtttgttttctcctttcaggcttcttggttgatttatatgtattcttaactaattgttcttcttggaaacatgttcttgttccttttgtagtttgttgaagcagttatcactatacgagcaggatc

SEQ ID NO: 75104 - DNA, 494 bp, Carica papaya
  Intron number 1 from transcript evm.model.supercontig_4.15 0 (locus evm.TU.supercontig_4.150) derived from phytozome v7.0 (chr-ID supercontig_4; pos 2826782 to 2827275)
gctcaagcaaagggtcatcactgattggcccaaaggctagttttgctcacccgccgaattctttgttgcatcgttatttttctcccttaatttattctttaaattccgtgttttatacttgtgtttgtttgccttctcgttaactttcttttgaggatgttgattttttggtcaatttagatgctcaaactgagttttggttcatttttagaaaaacccatctggtttactcgggcttattgattttggaagaagaaagatggtaattctgctaagatattattctgttttattgtgcaagttgaagattttatggttgatctgttttttaaataatatatccatttgtttaagctttttgagtttgtatctatgatctatagggacagaaaagccagtaatatcactattggttgaaaattttgtctataaatgcttttttcttcccttttttggttctctgttaggtaaaacaattattcctaagggtgtaa

SEQ ID NO: 75105 - DNA, 555 bp, Carica papaya
  Intron number 1 from transcript evm.model.supercontig_513. 3 (locus evm.TU.supercontig_513.3) derived from phytozome v7.0 (chr-ID supercontig_513; pos 11856 to 12410)
aactggaaaaggtcagtctctcatacatgaggatcatttcatagttatttttggttctgtggaaagatttagtatgaatattaatgtgttcctgtttatgtttatgtttggttcagtggaaaatatagcattatgtggtaaactctgtattgaatatggattgtaacagagagttatgataagatctggactgaggaactattgtgggaaacaagtcaaagtttggaagaggagagggtgggaagatgtttgtagaaagtttctacaagaaacaatttgtagaaagtaaaaatcctagcgtaacacaatatataaaatatgttgttttagaggtactttaatatgagtaaaatatgctggctgaggtgtgtatggatatggggcgtgtaatgggtaacctgcaacaatgaccctctctaatcttgaattctcaggtccaaaaaatgattttttaaacatctaagctgttttatatgttcagtttatgtataattttcatgcagctcaatgtgttctatttatataatttaattttacatgatcagtttctggaaa

SEQ ID NO: 75106 - DNA, 864 bp, Carica papaya
  Intron number 1 from transcript evm.model.supercontig_8.22 1 (locus evm.TU.supercontig_8.221) derived from phytozome v7.0 (chr-ID supercontig_8; pos 1559507 to 1560370 reverse strand)
tcaagatcctatcgatctgcacctacgctatcaaggtatctacatatacatatatttatatataaattcattttctctatgatatataaattttcatgctacaagatgatttaattatggtttaaaacatggttaggcaaatgatgatcctcattattcaattaactagtgcattaataataaattctcatgaaactcaaatttctttttttttttttttttgtgatttgttttatgcaaagatatatgctatttgatatccaaccttcattgattactctttctttttacttataaaatgtaagtgtttgaatctattgtggtaacacacacatgtaatacattggtggtttcatatatgatttctaaactttgatcgttaactagaatatctaaatagaatattaattgatgtaatgggatatgaattcgttatctttatattataaatcgtataagaattaattatagaatttaataaaattttgatatattttatattaggatttctcttttaaattaagaataaattttcgtatatgatagaaattgtattaattttatctcaaattaacataattggaattcacatcagatgagaaacgatcttagggttttagtgaatggaagcaaacaaaaaagttagtagtgataagaagatgtaatatttgtaacgacaatttattattcagaaatagaaaaattaattaagactaaattctcttgttaatcttataagaataacttttttttggttgtataattttatatttatttgttgattttcataaagaattctctaccctcatgacatatgtttgtatatatgtatgtatacataactagatcctcccttcggagtac

SEQ ID NO: 75107 - DNA, 630 bp, Carica papaya
  Intron number 1 from transcript evm.TU.contig_41691.1 (loc us evm.TU.contig_41691) derived from phytozome v7.0 (chr-I D contig_41691; pos 700 to 1329 reverse strand)
gacccgacaggtatgtagaaaaaacattatacacctcttaagttgctatcctgtattttcactgttgcacttcaattttttgactgcaagctgattttgggcatgattatctgttctttatggtaaaatgtagctaaatgtcaaggtggtattgagcgctgttgttcttggtttatcagaatgtggtgcttcagtgtcagtcaactattatctggtgacggtgaaagtaaatacttacacattttagtgatttgctgggtgtttggttttcgtacttgttgaattagcatgtcatttatggatttgctgccaaagtcgactggtgtgaatggtttcatgtattgttcttgtcacttgaggacattttgtgattctaagtgcattttgggaatcagctatggtctgttaaaataagtggcaaaaaacctcacctggtatgacgtcttttgcctgatggatccaacttataaattttagaaatatattgtatgcatttatacgtttgaaaagatcctcttacgtaaatcaatttaagtaactgattggtaataacttgtactatacgtttgaaatctaagtatggatgaaggcttgttaaacttaattggttttttctcattggcagtggat

SEQ ID NO: 75108 - DNA, 659 bp, Carica papaya
  Intron number 2 from transcript evm.model.supercontig_157. 14 (locus evm.TU.supercontig_157.14) derived from phytozom e v7.0 (chr-ID supercontig_157; pos 154309 to 154967 rever se strand)
caatcaaggtgagtggttttttaggtcaaggacttcatttggtttcttgtgttgcggctctttgttctgctaacaatttgattaatctgaccgcaaactttatacaattcatttaccctagaaacattaggttggatttgaacaaaaatttaattttatggaatatgaatgataataaaatgaagaagatttagacgaaactaaatcttcttacttcgttgtgatgtatctgccagaatttcagatttgaacaggtataagacgcatatagaaccatttctaccatctctagacatcacccatcagacagaacgtatattagtatgaactataattcaaaacagactctaccaattccaaatagtttacaatttcaaagaagaaaaaatattggttgactatatatctgttagacctcacaatatgagatgcagaaacaatgttttacaaaatgaaaaccttaaatttccaaaaccctctttggagtttcaattggttgcagccttgcagcaaagttatcagtatacaatcacaccagcataacaataagcatttacttctatcaacaagtaagagacatttatttatttctttttctttcttctttatctgttgctgttttagccacaggaaacatcattccctctcctagaaatcaa

SEQ ID NO: 75109 - DNA, 580 bp, Carica papaya
  Intron number 2 from transcript evm.model.supercontig_36.1 11 (locus evm.TU.supercontig_36.111) derived from phytozom e v7.0 (chr-ID supercontig_36; pos 867961 to 868540)
aagagcttgataaggttagttcatttcatcaccagtccatgttttgtgaagtcttacttttctgcagagacgcaaaccaatccacgcatagtaggtccttcgtgctaattttgttagaacgtatttcttttgttttttataaataaaaaaacagatgacttcttttacattctttttacagtatattggaattccagttgttttaagtgccaatttaattcttcttgttgagtttctttttcttttaagtttaatatctgttattttatcaaaaacaaaaaagaattaaaggaagctggattagtgaaccccatgttcgtttcaccatcttgatttttggggtttgattcttgattaagtaagaggatattcagattttcacccgaaaaatttcagaattttagtagtgatctcataattgtgttgaaaatataatccaaataatttgtgttttcgcctgactcttataaagttttcactgaatattctttttaattaattcgtcatgttaattatttcagtactaaacatattctgattaacaggagtgcttgcaaatagagaagggaaggaccttgta

SEQ ID NO: 75110 - DNA, 368 bp, Carica papaya
  Intron number 1 from transcript evm.model.supercontig_59.6 (locus evm.TU.supercontig_59.6) derived from phytozome v7 .0 (chr-ID supercontig_59; pos 53995 to 54362)
aatctggatcccctcctgctgccaggttcattttactctaattttctttttgattgttttctgtttgtttcatgagaaaactgtgcagaaacatggaaaaagaaactcatatgttaggctctggttttctgggttcttaaacattatgatgttagcactatcagtccttcaatcttgtgtatatttctcagctttcttctcatttttcttttgttaactgcaagtgtatattgatcctcatttttgggtttcatttttcttgctcattttcctagaatataaacaatttgtttatacatatataattaaaatagttttattttgtgaaagcagccaggttgtgggttggccaccaattggggctcaca

SEQ ID NO: 75111 - DNA, 508 bp, Carica papaya
  Intron number 2 from transcript evm.model.supercontig_59.6 (locus evm.TU.supercontig_59.6) derived from phytozome v7 .0 (chr-ID supercontig_59; pos 54397 to 54904)
cccaagaggtgaagaagaagagaaagacaaaggtttgaagaaaaagatatgcaatgaaaaaggcatattgggtttgtcaaggtgaatatggatggaattccaatcggaaggaagtggatttgaatgctcattcaacttatcaaaccttggctcaggctcttgaggacatgttctttaggacttcttctttcactatcacctccattaatggtctttctctctttttttttaatctccatactaattatgggtgtcctcatgtcagattaattaggcatacccagtttcactttgcactttatctctctacatacatatatacatgtacacagacacacacatgcaatggtaggttcttttcatatgtggatgagggatatgttatgttgataatcaaagtagtaactttagctgatttctgttaattgattaattactttatccgggttgacgtgtttagtgacatttgctaggatcgagccgggagaaggaacaagcaaaagcctca

SEQ ID NO: 75112 - DNA, 615 bp, Carica papaya
  Intron number 1 from transcript evm.model.supercontig_829. 2 (locus evm.TU.supercontig_829.2) derived from phytozome v7.0 (chr-ID supercontig_829; pos 72421 to 73035)
atctttggtgtaggaggccaaaacaagatcaggtaaactccgtctctttcctgcctttcttttatttgtttagtctgatcgtatttcagcagtttggtttcgtgctttgttgttattcgttgacattatggatctttggatcttgtgttagatccctctcgttgttgtgtgaaaccgagctgggttaagtattgttatgttgctctatcctcggttctttgttctctctaagttcaaattactggtggtgcagcatcggcgtcttgtatgtaactaacttgtttattgtgaagataaaatataaaagttggactatctttggcagcacgccggctgtattaatgaatgaattgcctgtcttgaagtctggtatttgtttttattgtttacgcttttatgatgactaaacacaagtttggaatctctagttacttgaactgtcttctcgaacagggggggcaagtacctttttctcatgtagtgttgctgccttaccttcttgatgttgcattttcatttccttggtttcttttctgttaagggaactgttattcacatctatcatgttattgccttgtagcttgattctcttgagaagctgaataaattacttga

SEQ ID NO: 75113 - DNA, 411 bp, Carica papaya
  Intron number 3 from transcript evm.model.supercontig_9.12 5 (locus evm.TU.supercontig_9.125) derived from phytozome v7.0 (chr-ID supercontig_9; pos 708210 to 708620)
aggttggagatatcgtggtaggacgggttctggaggtaatctcatgttcatggcaatatgatcttttgctttcttgcatcctgattggggtgccatgaagtaggttattgaaagagcaaagtgaccatcactaggaataagcttgattcgaattagtgtttaatgtgctttgaatctttgttcttgcttagaagttgactttttgataaaattgatcgaatagttagaatgtaaaattcttcttgtcaaattgtattgttaagcaaaataatcagggtacttaaaaatcattcatttcctgaaaagttcttgtttttttttttttcgttaactttctccttttctactcccaaagagttcccattttctcgtttaacttctccgtttctattttcagattgctcaaaagcg

SEQ ID NO: 75114 - DNA, 254 bp, Carica papaya
  Intron number 2 from transcript evm.model.supercontig_4.16 3 (locus evm.TU.supercontig_4.163) derived from phytozome v7.0 (chr-ID supercontig_4; pos 2985297 to 2985550 reverse strand)
aaactgtcaagcattttggtcaacgtaagtttcgtgtctatcttcattatatgcatgtttattcaggtatatatatgtttattccacacctaaagaaaagcaaagggaagattattgtgattgcttcagctgctgcatggttaattacgccaagactcagcatttacaatgtaattaattaattaagctcactcaaaactaattaatttgttaattcaggccgccataatcagcttgctcgagacattgagaat

SEQ ID NO: 75115 - DNA, 403 bp, Carica papaya
  Intron number 1 from transcript evm.model.supercontig_7.24 3 (locus evm.TU.supercontig_7.243) derived from phytozome v7.0 (chr-ID supercontig_7; pos 2384859 to 2385261 reverse strand)
ttgctccgcttgagcgtgtcaagattttgtttcaggtatctttttgacttcattctgcttctataattcaagattctattttatctactccttaactattgattcaaattttacgatcggctctccttgaaaatggataatgagaatatgggaatttaattcagttgcctcttctttccacattctttatcggttgcaagtcgttgcttgcaatttgggtatttctagtatatactcatatgagttgaagcaatcatctcgaagagtgaatgtgagtattccagtgtataatttgggtaaaggttgatcaatcacgaaacagatttccattctgttttttgttggcgatatttagcttctgtggtgtcagcattttcttatttaataattcttgaaaacagca

SEQ ID NO: 75116 - DNA, 335 bp, Carica papaya
  Intron number 1 from transcript evm.TU.contig_32653.1 (loc us evm.TU.contig_32653) derived from phytozome v7.0 (chr-I D contig_32653; pos 5036 to 5370 reverse strand)
ctgataaccctgtgggatcacttttcttggataaggtaacattaactaggttcctacaattctcatctctcgttttttttatcatctatagttaacttatttgactgcatgttggtcgaaataatcagaataggccttcttgttacggttgtgttttcttatccaggaatgatttcagtataattctttccatcatttcatatccagcagcaagcttataaactcaacatgatgagaaatcagttttttttgttcttaaattcaaacatattaaggaaattcaaaattaaccattttgatgagtttttcgtaggttgtgctccctaagcttaagg

SEQ ID NO: 75117 - DNA, 1017 bp, Carica papaya
  Intron number 1 from transcript evm.model.supercontig_80.1 12 (locus evm.TU.supercontig_80.112) derived from phytozom e v7.0 (chr-ID supercontig_80; pos 905238 to 906254)
ccaagcacagaaaggtcttcactctgtctcgttgatcctcgacataaatttcaattttgttcttcgattttatgtctagcttgctcgtcgatgtcaatcttgttagttgacgttgtgtttggttgcttgggaatgggagggagatggggcaaatagttgatgatcttttcgtaatcggggttctcgggaccgtattattagcggattatggatgctcgactctttttgatatttctattgatttgatctgcggtttgttgattcatgtggtgttctgctacttgttcgcatatagcttagctaccctttataaaatttatgccgcaattctccaatttctttgtcggaattatttgtaagttcttcatgtgctgggaaatttgatgatatggcatctttctttttttaaaaaaaaaaattattgaaatgatggttttcataaacatacctaaaattgggtgtgggatttcatctatcatattgaaattcacttgattttcatcacttgttttttattgtatctccatatgaagctcacagttggtatgatcaacgaagtagcattaactttttgtttcttttttgtctttggaaaaggaggtgaggtggagtgaggggattattgagtgggactggcaatttgacttatatctgcttgaaagtctattggttctggttaattgttttaatgaggtgtctgcttaatttttgaactcctgcttggatgtccattggatgtgaaaattttatgagatctattaggatttgacacattaagttcactggtaatttcactgacttggttcactttagttgctttgtttcagtcggttggtttgcttgctgctggtacttggtccacactgttaatcatcaccctctctttaaataatttatgtttcaagcctatttgccttagtttggccattccactctcttttcctcttcaagttcttacggttctttccctctatatgtgcagattcttgaaggacttcttaaacttccagaaaatag

SEQ ID NO: 75118 - DNA, 734 bp, Carica papaya
  Intron number 1 from transcript evm.model.supercontig_69.7 2 (locus evm.TU.supercontig_69.72) derived from phytozome v7.0 (chr-ID supercontig_69; pos 803767 to 804500 reverse strand)
gtaaaaaaatttccctttcactttcactctaaactggctacctcagtaaatgaaaggaaaacaacccatgaaacaaacaggccgcttcactgtcatttagtaatttggacctctgcaggattcaatcaaaggaagaggagactgaggtttacaaagtgatgagcattatgagatcatttattcctcacagctcatccatggatctctatctacccacttatggaaccaaattaataagcagctcaaaaatgctttctatctacataaatatatgtaaacagaccattataaagggttaatctttatgactaagttattttaacacgtataaattcagtccttgaggcaaaatacccaacattatctgaatagggtggtcctctttgtctgctttctgtctctctaaaacgcactaaaacacacacacacacacacactcacacatcaagcacagtattatgtcaaatctaaaccatctctttgatctccccgaacagatttgttatgtgcagtgtggcttctgcacaactattttgttggtatatgttgtgtttcatatactctctctctctctatatatatatatatatgttagtatgtattttccagcaagaatctacaatgattggtcttttttctttttctagtcttctttcttgggctttttccttttcaatgattttcaacatatgagcgcaggtaagcgtaccgtgtagcagcttgtccacggcggt

SEQ ID NO: 75119 - DNA, 497 bp, Carica papaya
  Intron number 2 from transcript evm.model.supercontig_52.1 08 (locus evm.TU.supercontig_52.108) derived from phytozom e v7.0 (chr-ID supercontig_52; pos 896900 to 897396 revers e strand)
gctggagttctgcaagcttcgcttggactgttaaggtaaaaaaaaaaaaaaaaggattaaatttaaaggagtggcatgtcgttttaagtgaaacagtcgtgtcgtataatgaattataaattaataaaacatgagtaccaaaaagctttcttggttttttccttctctccaactggaagctcttgtctgtttgctgtttgattagatgagtatattatatagcttatagaatttcaaaaggtggcgtgtatgacaacaattcttccttacacacacacacacacagacaaaataacactgcatgtcggagaagatagtgaacatgcgaatctacagagatccattttgaacaagcagccctgtgagataagggtaaatcaagattaaaaaaaaaaaaaaagggttgatataatttttttactgaagtaaaaaaagttaagaagaaaattaataactgggatgttgcaggctagggttcatcgtggattttctatcac

SEQ ID NO: 75120 - DNA, 538 bp, Carica papaya
  Intron number 1 from transcript evm.model.supercontig_80.4 0 (locus evm.TU.supercontig_80.40) derived from phytozome v7.0 (chr-ID supercontig_80; pos 340953 to 341490 reverse strand)
tctggttctctcaatttgtcaaatcgttctctcaggcaagtaaccttctcgctttacccgccgaatcaaaatccatttctcccgagtttccgcgcaaattccattatcttttatgtagattgatatttctgaaaacttaaagcgaagctttcgtctagttggttaattaaaacaaatccaaattgcgtttatttatttggtaatccggctaagatatatattttttttaatctcaattttgtgtctgttgaataatcgaattaaattttgcttgaagctcgcgtatactagtcgagtctgtctcaggtcaggcaaaagagagatttggtccgacgatgatgaatgcatcatgttttagattctcttattgttgttataccacgtcttaggatgagtaagttgtttatgaataaggattttaaaatgcttttgatcttctatggtcgttgtaaaacttatatgtttttatcaagtatgttataggtgcttgtttgtacttagttgctaaattgagttttaccttacagggaggtgccta

SEQ ID NO: 75121 - DNA, 829 bp, Carica papaya
  Intron number 3 from transcript evm.model.supercontig_56.1 0 (locus evm.TU.supercontig_56.10) derived from phytozome v7.0 (chr-ID supercontig_56; pos 307359 to 308187)
ttgtcactccttcaatcttgtctgacagattaagggtatattcctcttacagttttgcataattttttcactgcagtttgtgttaatattgtcttcttccgagcctttgtaatttttcgagtatttcttatctcgagaccctaatttgccttttgatatttatcgttgttcactgcttgtacacattgccaccattgagtatagagaacacttgagagtagaatatacaagatcatctgcagtacttttgtcaatgggcttttgaccattatcgatgtaccctgcctggttacatttattgttattaatgttattgttttcggctacattcagatcaaaacattcgatttacatgtcaagaaaaatctaagatgaatggacattgtactggttaatggtgtcacttatgatatatttattagtaataccaataacaaattttatgatctgtttaagtaatgactttatttaactataggtcactgatgactagccataaacctgcgtgattgagttggtgttctctactgtttaacactggatttggttaacataattggttcagtttgcaattactgtatgggtttcccccataaccgaagagagagtttctgctgactgtacccaagaaattgcatttgatcaaattttctttacacactactgtttttaaatccaacgtgaatctctgtggaggccacttgctatcatgtgcgtgatgctgcttcttttaagcaacatgatacaaactcttttgatgtggtttgtaagcctctttttgttgtgctttgcagattagtggttcacttgcacgcagagcaatcaagga

SEQ ID NO: 75122 - DNA, 345 bp, Carica papaya
  Intron number 1 from transcript evm.model.supercontig_75.6 7 (locus evm.TU.supercontig_75.67) derived from phytozome v7.0 (chr-ID supercontig_75; pos 641314 to 641658 reverse strand)
ggtgatcattggaaaggtactcttatcttgttatatcgtgtttctttcactgatttactatgctaaatttgttttcttgtttgagtatttattaatttaaatcgatgaacttcaaattgttgagaagaatggagctcgttctgaatttaaattcatgattagttatgtttaaagtggcaatttaaattgaggcagttagaagtgtctgggtcataaaagtagctttcaactgttatacattgttcaaaaataagttcttctgataagaatatgctaattaatttttatatttattttccttgaaatacagggttctggaagttgtgaagaggggaaacatcctga

SEQ ID NO: 75123 - DNA, 946 bp, Carica papaya
  Intron number 1 from transcript evm.model.supercontig_97.1 5 (locus evm.TU.supercontig_97.15) derived from phytozome v7.0 (chr-ID supercontig_97; pos 122130 to 123075)
cgtggaacccaaagccctcttctgaacctcagcaggtaaccttatcatctcttatctaccatttatacatatatatatgtatatttttttctttctgggtgttgaatatttctcatatgtgtcatggttctgctcaaaagttaggtgcttttatttgccttgatccgatctaggttttgatttcttttgcttagtgtggggaaaaattgttttcttttccatggatattttctgggaaaatttatgggttggagttattagcttaattggtaattacaaaggcaggtttctgagaaaaaaaagttgaaatttttggtgcttagatttgtcttatcttccaagggcatactttttcttggagagaaataagctgtctgcaggggaataatgagaagttttatagcacatggtggattataaatttttcccagacttgtttcccttggtgagaaaaaaagagagagtgaattttaagtttcagctggtggtttgttacgaacatgattgtctgttcattgatttggctagtaataatattggtgttcaattgaaggatgctaacatgtttttatcactgtagactttagaacaagttttaactgacctggggcgtgcatttctagtcatggagtcgaatttgctttcatttgtttttgctgatagatttttagtgaatctattgaaaatttagtcaatcacccaaattaaaattttcagttacttctattctatccattcttcgcaagttgggagagaaaaagttttgtgtctttttgagggagaatggtgtattttttgtttataactttctttattaccttgtttctagatcatcttagctcaaaatttcttatggaagttgtggtttctactttctttaatatgcttggctctacaaatgcctgttgtaggtgcatatatctttagcaggagataaacacatacg

SEQ ID NO: 75124 - DNA, 360 bp, Carica papaya
  Intron number 1 from transcript evm.model.supercontig_182. 1 (locus evm.TU.supercontig_182.1) derived from phytozome v7.0 (chr-ID supercontig_182; pos 277 to 636 reverse stran d)
tgcttgctttctggcgtcaggtacggtcactatatctgttttggtgtcctgtattgctagttcgttctctaaatgtttaagaatgatgataattgttagcatgttttagagagaagattcaaaactggaagttgtagttcttagttattaggattgccctttggagttggagatttgaaattagaagtcaattggaatttgagaagcccgttcgtatagatcggctgaggaagggaccccttccatatcaaatgccagttctataattcaggttcaaaatagtatgggataataatcctagttagctgtttgaacttgtttttttcccctttttgttagcattttgttcttgaagagaac

SEQ ID NO: 75125 - DNA, 612 bp, Carica papaya
  Intron number 3 from transcript evm.model.supercontig_60.3 9 (locus evm.TU.supercontig_60.39) derived from phytozome v7.0 (chr-ID supercontig_60; pos 544676 to 545287)
ctgatctagcaccccgccatagtaaacttgagcaggttccttttcagtaattataaattagtttctatagttttctctatctgttttcttgtgcaatggggagtgacctgcttgatttacatctaattgtatgattgagttgggactgcaattttaatggcctgttgtaatcctttttggtggaactaattgtaggactttactttataaaatcttgtggtattagttctcatactacaagtgaaatgggatgataatggcatagcaaaatgcattctagggtcaactatctaaatctatatgaatgctatagcagcaccatttaatgatcaaacaagctttcatttttcaaaatttccagaatcctggtcttttcttcttattgctttctttaaattttggcatcctctcttttttactgtgtggtaagtgtattattattcattttactctttcaagatccatctcttagaactgtgtgctttcttctgccttcctctaactttagtctattctcaaagctttggaaatgatataccagaggaaccaaattttcttttaactcccttttgtttcctcacttctcgatgatacatttgcagattttgttag

SEQ ID NO: 75126 - DNA, 697 bp, Carica papaya
  Intron number 5 from transcript evm.model.supercontig_23.6 4 (locus evm.TU.supercontig_23.64) derived from phytozome v7.0 (chr-ID supercontig_23; pos 721190 to 721886 reverse strand)
tgaagagctctgatacagccattgttcttggccaggtactttttgtaccgtattttttcttatgacaggagattggttataggattattgttctcaatttttattcttaaaagaaaaaggaaaggcgcttgaattgtgggctataacaagtttggccattctcacatcattttcattatgaattgaagttgcatagcttagattagtcatgcaatgccatagtcaggcataggacaagggcaaacttgataagactgattaagatggaatagtttctgttttgagattttttctgaatataacaaatagactagtcttctttaactgtattaaaaaatatttggaatttccaacaaccgtcaactcttcgaccataaagctatgtattgtaaaggtatttgcaagatggcagacttgtcgagctttgactttggaatcttctgacactggataattattaacctgtgtaaattcctttgtcctaatattactgcataactagacatgtccatattctcagcttgagcaattttgtgcaaatatccccatacacatgcatttttggtgagggtttgttaattatgtagtagttgtccataagatcacaatattattctctatccttcacttatattgaatgttctaatattggtacaataacttaaaatggtagtggttgtatgtacttgtcagggaa

SEQ ID NO: 75127 - DNA, 458 bp, Carica papaya
  Intron number 1 from transcript evm.model.supercontig_438. 3 (locus evm.TU.supercontig_438.3) derived from phytozome v7.0 (chr-ID supercontig_438; pos 3933 to 4390)
tggaaggttaaaaaaaaaaacaaaaaattaaaaattcaaagggaaaaacatgttaaatttggtgaaataatgtaatcttaaaactcgttaattttctgaaactataaattcaatctctcttaacttgatagattctgagactaattcaagccccacaatcttacgatcctacttgtctttctcaaaacactttttcttcttcttcttcttcttcttctccacactactctatttaaacccattaaaccccatcttcttcttcccatcaatctctgcaaaaaaactcgagagcgactctgcaaccaactaagtgttgtagtatcctgcaactatggtaattagttcttaatgcttaaaaacttaatcttttaattcaatttcttctttttcttatataatctaacagtactattctgtttattatcagagtcgccaagctgctgattccgaacctaaga

SEQ ID NO: 75128 - DNA, 957 bp, Carica papaya
  Intron number 3 from transcript evm.model.supercontig_49.2 6 (locus evm.TU.supercontig_49.26) derived from phytozome v7.0 (chr-ID supercontig_49; pos 143779 to 144735)
gagaatcagcagcaaggtctcgggcacgtaagcaggttagtattcgtttagcccatacctatttcttttacttttgattaatgttctggtggagtactttccatattataaaatttttgaaccgaacctgggcaccaatccatgtaatgaactcttgtattgtggatctaatttaataacttaaaaatgaagatatttagcaagaaacgaaaaagaagtcatggagagtacataggaatgaaatgcattcgtcaaatcaaccagtaattttccatcttgctttatgcatatgaattctgttgaactgttcagactcattcttgacgaaataaatctttcttcagtgtcttcaattggaaggcagttaataagctcttgtcttggatctagggacttgtttcatatattaaaaaacaaacaaaaggaacaaaaaatcctatggtatttgactatctaacaaaagatcctatggtatttaattatctctgaactagtctgtgagacattatgctggttctcacttaaagaaggttgaagcttggatgtagtttgatgaataattccagcagttaacctgttttttgggtccatagacatgcatcctagaagtttaatgaaaaaatatcgagaatggggatgggatagcagtctgaatggcaatacagagatcctgagaggtcaagatgatacgaagttataagatccacccaagataatgataaaagtgactcaaggaaaatgccagcacatggaagttgtatcagcttccaaggcaacgacttattaagctcaataacctagttcttaatgcattctgaaaaatgcattaaggttaacaaatagaagttattgtactttattcagaaaataaatagtttcttcagagtcagtctttggatacacaattgatggtcttttatcatcttcttccctgatggtctcttccaggcttatacc

SEQ ID NO: 75129 - DNA, 638 bp, Carica papaya
  Intron number 1 from transcript evm.model.supercontig_2.33 0 (locus evm.TU.supercontig_2.330) derived from phytozome v7.0 (chr-ID supercontig_2; pos 3813865 to 3814502 reverse strand)
cactttcacgactgttttgtcaatgtaaatattcttttctctttctatctctctctctctctctatgttatatacatataaaatatgtgtgcgctttttccttattattgcatatgtgatatatatgttgttgataaaattgttgataaatatgatatacaaaagaatggagaaagccagtgtcattatgaccaaaaaggatagctatctactttaattattagacgactctgtgtttgcattatatatatatagatagatagttacgtataaagaaaattataaatgacttcattaaatgggacgtgtggttcccatactattgaaaattatgcgtacttagtataatcttcattcaagggccacagtaatatgaaggacactagtccattcagaatggtttacctgatacatatgcaaaccaaattaacaacaaaaacccaaatcaaatacaaaccttatatatatatatatatatatatatatatatatatatcatgtcaacttctatttttattttcctgcctacttctttcccttttttatttaaataaaataacgtcataaacaatttaaactcataaccataatgatgtgatttcataacttataaatgttttgtgacttatagggttgtg

SEQ ID NO: 75130 - DNA, 768 bp, Carica papaya
  Intron number 1 from transcript evm.model.supercontig_94.5 4 (locus evm.TU.supercontig_94.54) derived from phytozome v7.0 (chr-ID supercontig_94; pos 751046 to 751813 reverse strand)
atctttcaggttctgtgtatgcatcatatatatatatatatatatatatacatacacgtatttacacatgaacaaacgaacgcatatacacaggaaacttttttttttactctttaattttgaattataccttttttttaactttttaattgtgaattattctgatatatgtactttttgattttgaatttgacatattacagcatcaatggttgtttctttgtgttatatgtgtgtttttctttctttttttttttttgttttattttctgaatccagtggttaaatctggtaatttatatgtacatatacttatctatatattacatatatatatagcatcaattctcattgtgttttttcttcatttcctgacttcaatggttaaatctgatacattacgcagcataaattctcttggtgctttttcttaatttgttttctgaattcgatttttctgtacaaaaaattgtttgctgaattcaatgattctcttggtggttttgcttagtttgttttctgaatttaatggttacccttttgcattcaaggccgaatatgtgttttatcattggcttcattgaaagattgatggtaaaggactaatctttcttgttggaaggaggttaaagtttcttcttgatcctcaaaagtttctttctttctgtgtatagaattatgtatcttctactttttcatacttcaatttaattttgtgaaattttttatatagctactttccccacaattggaaagtatcagaaagaa

SEQ ID NO: 75131 - DNA, 998 bp, Carica papaya
  Intron number 2 from transcript evm.model.supercontig_28.2 3 (locus evm.TU.supercontig_28.23) derived from phytozome v7.0 (chr-ID supercontig_28; pos 319149 to 320146)
ggtaacttgttctggctccctctcctttcggtacttattgtctttttttttatttttattttgcttcgtctttttcttgtctatctctaactcatttttagaaatggaactcttctttgtaagaataagaggccaattaataatttattagatggatccgttagatttccttgagatttcaattagggcagtgggattgtcttccattaaaatttggactgtgttgatatatacaatgtgtttatgtgtttgagcgccactatgcgtgtaacattatgtatatatgtatgtatatatgcatgtaaacacgtataagttgatatatgtacatatcagttgtattatatattcatatatatgcatatatatgggtatgtgttcgtataaatatatatatatatatatataggaatcatagtaaatatgcatgttatacatatatttcttctaaaatattgtttttcatgtactattacgaatgtttgtaccataaacacgcatgtgcatatgaaatggaagttagaaattcttttcatgtgccaatcagatttttgggttttaaatttcagcacatgctctgcaatttttgttactcagcatttgcttcctttgtaagtgatttaggataaattagggttgagttgcttgcttaagaatctaggggaaaacctaaacattacactagtgttcttaggtatcatgcctaggatttgactaaatcacacaataggtattgagaaattctcaaattaattttaaataattgaatgataatctcaaaggagattagaatggtatttgtagatccttttccaaataagattagactaaaaaatactgatattagataagaaagcaaaacatagataaacttagaaacataaaaataaccttctctcaattagtaagttccatgagtaaatttcacatgcaaatcaaccaaaatatgcaatatttgagtgctatgctacttggtgtttagggttgctatacgagat

SEQ ID NO: 75132 - DNA, 561 bp, Carica papaya
  Intron number 2 from transcript evm.model.supercontig_42.6 3 (locus evm.TU.supercontig_42.63) derived from phytozome v7.0 (chr-ID supercontig_42; pos 581878 to 582438 reverse strand)
taacaacgtaagattggattttattgagttccagatatgttattgctatttggttactattttttggtaccttttatctgaatttcagttctgtcaatattttgttgtctgttttcctatagggaaggcagtgggactagaaagtttgctggttaaatttttttttttctgctatctcactatggagtttttaattgcaaaatgtcagtaattttatcatccccttggaagttacattgatggtcttttccttgctcaaacataagaatgatacatgtacttttcagttactgtttcatgttatttgatttgcttctgtcttcactcttcaagagcttttcatttttactcttggctggcatgattttacatagatttataattttttttcatagatttataatttttttttgagatatagagagatttataatttatggcttgataaatttactgttgtttttattttctaggaagtttctacaatctaatttttggttctgtataaccaaatcgatttatatgttcttatttcattcatatatgttgtttggacttaag

SEQ ID NO: 75133 - DNA, 797 bp, Carica papaya
  Intron number 1 from transcript evm.model.supercontig_6.27 9 (locus evm.TU.supercontig_6.279) derived from phytozome v7.0 (chr-ID supercontig_6; pos 2143856 to 2144652)
aaagaggattacgaggtacaattgtcaaattttctttcatttaattgaattatctcgttttttttttttaattctttcttccaagacaagacttcgaatctggcgggacaagtcagtaagagttagaggcttcatttagattccaagtttacaagataattaactgtaaatgccttaaaatggtgaaaatttatttctgcatacatccacagcactagaactgtcaatttcccatttaaagggttttcaatattttctatcgtttttatcggttgatatctttcttcactctctctcagtgattcgcttgcttcttttctgtaagaatcatagatgcaactattagcttctgctagcccatgtcctattggcagtctttttcttgcgaggatgacggccacttcgattctgctttgatctcgtattttgtcaaaaccctaaatgagagttcttttacatgtcgataaaaattcttgtctatcaattcctaatggatctatcaatttcatgggaaaatagatgttactttctcaagtttacacgagacagactccaaaaaatttcggctgtttcttcatggtaaaattctttttggcttgtgtgggatttgggtcctatcaattttttccattccatttggtttattagttttaatacaagggaaagcagaatgaaaacagtgtttgtaattgtctagatccccaaacatgcactctccattgaagcttctctgatgattaatcagtgtaagtctaaaatatgattgcagattgaagagaagaagcaagctgctgctg

SEQ ID NO: 75134 - DNA, 754 bp, Carica papaya
  Intron number 3 from transcript evm.model.supercontig_62.2 6 (locus evm.TU.supercontig_62.26) derived from phytozome v7.0 (chr-ID supercontig_62; pos 196216 to 196969 reverse strand)
ggtatcctctctaccaacactgtagtaacagctaggttatgtcaatagaaaatgaaaatcctttacacggcaaaatactttgttcaggagaaaaatccaggattagtagttcaccaaattatctttctaaatccaataatgtaattttatagattgtaaattgcattactggtcactaagattcgaacgagggcaagaatgaatccaaattctcttcaggatggctccatgttcaaatggtttatctagttactttcaccctgatgccaaaacctgggaatgatttgctgcttgaactggttgctcagtcctctataattttctttacgggtcacctcgggagggcaggagtggatccaaattctcttttggattcctccattttcagtgcatgatgtataacatctggatattgacacattactgccaaaatccttggagtgatttgacttgaactggttggtcaggcctaaaaaattactcagctgctttcgtgcttctcttgtatacacttctgttcattccataagcaatttactttatacaagtgacctaaatctattaattgatgggaaaaatcttctgacttctttgagcaggtagtatgtgatgaatccacagaaacaaggaggttaatgatcttaacttattcatttcttttactcggtttaaacaaatacattgctaaatttttgtgttagattgactttgttttcaaattgttgcagctgtaagcataagagagccatagctg

SEQ ID NO: 75135 - DNA, 419 bp, Carica papaya
  Intron number 1 from transcript evm.model.supercontig_27.1 11 (locus evm.TU.supercontig_27.111) derived from phytozom e v7.0 (chr-ID supercontig_27; pos 1221838 to 1222256)
cagtcaccggaaaccggttaaagccagtcctgaaggtagtttatttttgaattcaacggctggattttatttttacctaccagattctcagtttgaattttcaaaaactttttggtcggcgaggagcctgcttctccggcgccgttctcatttttaacgttttctgaatttcaaaaagaagaagtacaatacaaaaacgctgccgtttaaattatcgcgctttccaatgttagagcagtttcgaaattggcgtatatgtaacgcttaggagctgaaaagtccaaaacacccttttgtctggtaaaaagtgaagaagttaaaaaaaaaaatctgtttagggaagagagggtaaaaaagtaatttaattggggttaaaatttgcaggaggaagagcagtactgagagtggcgaagccgaaa

SEQ ID NO: 75136 - DNA, 578 bp, Carica papaya
  Intron number 3 from transcript evm.model.supercontig_3.44 2 (locus evm.TU.supercontig_3.442) derived from phytozome v7.0 (chr-ID supercontig_3; pos 3191412 to 3191989)
ctgctgtaagccctttctctcttttttcatgatcaagtttctgctgcttaaggtggaaaagaaggaaatgataaagaatgttgaatttgcttttttttttcttctcatttgctatttgcttttagatttatgtctatggctgcaagaattttatacagtttgatttgagtaataaatgcagagctcaacctcgaattggtgattcatgattttataagcctcttctaggaaaatagtaaaaaaccctgtaagatattatttctgcatgtgttcttgaacctatatagaaatttaacaaaatgattttagcataatatagtaccttataaaaggaaggtttatagttacgatttctttcatattcatacttttgcatatcttgttcgctcgtgattgtcttgactcgttctctcactctcagcccctattcgtgatcgagtagagttagagtcgcattcttgtttgcaaggatagcttatattggtagataaaagaagaggcaatagtggcttgtattgtttttcaagattggaagggtgataattttttccttgaatctcaggcaaagaggatagaga

SEQ ID NO: 75137 - DNA, 822 bp, Carica papaya
  Intron number 3 from transcript evm.model.supercontig_54.4 1 (locus evm.TU.supercontig_54.41) derived from phytozome v7.0 (chr-ID supercontig_54; pos 873551 to 874372)
aaaggtaagctacttttatcatctttctctttttggagagttgcattttcgtttgtttgcctgtgcacgtttgtatttatacaagctggaactgttttcctggctaagtttcgttgtgacttttggttttgaagatagtagatgttataaagaggcaccaaaaagtgataccaattgacagagtacaacataatttcatagagaaaataagagaaaagttgaagagaaatgtgaagattacataaaaaagtagacataagaaaatattacgtaaaaaataaggtggtgaaatatatagcataagcataagttctttaaaaagaataacacaacaatgaagagtaaaactgatcaagtctcaatttgacattgttttctattgtctagatcaattacctttatataagctacaatttacataaataagcgaaatatcaatacaataaagtaaaatcataagtttctaaatcttaatcaaattgaaatccttctaaaattaattgaatacatttcatgaatagcttaaaatgatgtaaaagtactaaatagacattgtaggcacaagaatattagtatccttaaaaatgatccattttgagtctttaacttttcttcattctgcaaataatgctttacttggagaattcttgtttcattacaaggaagcattttgctttatctggtactggtagatattatgttctgtctaccacatatttgtcatctcctctttctttgaataaacttgatcttgttagccaacatatatgtgcttttgtgaatgcagaattcaatctttctgagaaacaagctgaagctcta

SEQ ID NO: 75138 - DNA, 954 bp, Carica papaya
  Intron number 3 from transcript evm.model.supercontig_200. 11 (locus evm.TU.supercontig_200.11) derived from phytozom e v7.0 (chr-ID supercontig_200; pos 110940 to 111893)
cgccgtgttctgtttagaacattgaacactgacaggtaaatttattttaatcaataatgttttgtaacgttgtctagtaatcacttaacgtttggtaacttaattcaatgttaaaatgttacaacgaaacatcagttgtccgaggtgtcatagattttaccgtgatacacagctttgaggagatgacatacagacacttggtgtcaggaacttggttgtctaacagctgagaaacagatctgggtttagcttttgaggaaattgtagggctggaggaggcataaaagagaggttcagtagaggaagaaagctaggtgaaagaggagagctgagagaatagaagaagaacaatactagagtggtacagatgggttatcttagattttctcgtgatgattctgctagaaatctgggcactacatgtagcagtactagaaaaaatacaaactaggtaccaggtacagtgacagctgacattccatttgtccttatactggatattcttctacaattatattacagaaaatccaagcaaaataagagaaattatatccattcgaggtcctgacacttggtttcgcatgtgttttaagtcttacaaataatcttgtagtctttagagactttggcgtagtctgctttaagatcttttagttttatgggtcaatgtatatctctaagcttagttatttgaacattatgaaatcttaaatgtaagtggagtgtgtttatgtctatagggacaaagtttttccaaagtgaaatgattgtttgattcattcatctgcttctttgctatgtatcgtcatgtggctataacttaaatttatgattgaagtgtccataatgtttgggaattcattttagaagcagagaattttgtggcagctgaactttagtgccaactgaaggaaattatgtgtgaactggaacttgtctaatttcaggcggctt

SEQ ID NO: 75139 - DNA, 719 bp, Carica papaya
  Intron number 1 from transcript evm.model.supercontig_21.3 9 (locus evm.TU.supercontig_21.39) derived from phytozome v7.0 (chr-ID supercontig_21; pos 594086 to 594804 reverse strand)
gagatacaggtttacaaccgagcttacatgtacagtcaagatatgaaatataccgcgtcgaatcaatctccaaattgtacctggcatccgttaatgacaaactcgtcgtcagactatcatatccttttctttacattgtgtttctaaatctgtgtttaacgttcatctgatgtttgatttcaatttcatatgcctttctttcttgtggatgatacaatttcccattgcttcatttatttttctaacagcattacaacgtttgattgcttcattttatacttcctctgttttactttacttttttgttgttgaacgagaacggcgacggcctctgtttggaagttgtattgatgaagctgaaattattttcaatcggtttttttcctacttgttgtattttgatatcattttacttttttttttgttttgaagttttatttgattaatagttcaatttcaatctcaactcgttttgttttcgatatatttttggtctttgacttctttattttttgtaaaattcaatcttcatcttcaacaacttcattattggccttttgttttagtcttcttataatattttattatttggtcaattatacatctgtttaaggtggtgtcttattcctttttgttaccttcaagttttttcctctctgtctccatgaaacacacctttaacagaagaacacagaagataatagcatcaagaaaggcga

SEQ ID NO: 75140 - DNA, 567 bp, Carica papaya
  Intron number 2 from transcript evm.model.supercontig_60.7 6 (locus evm.TU.supercontig_60.76) derived from phytozome v7.0 (chr-ID supercontig_60; pos 1255993 to 1256559)
tcctcgttgatatcggcaccggttactttgttgaggttacttacttccttctttgaatctttaactttttgagttgtacagctatttcgcgctctcttctcttttgcttttctgtttttttttttgggggattgatgtattttcaattattttgaagttctgttaagcttcagtcatccctaaaacaccataacaacatccatgtaataggagtcaattgcgtcctcatctcgacatgtaggattatagctcagagaaaacagaatctatttttgctgattgtttagtgtctcagcagcagatttcgagtctcgaaacgtatggttgtgattttactatgtgcctggagccacagttttggtttctcaaaaaaatttcacacgctgatatttgattggtagtaggcatgttatttgattgtttgataatgtgaaaagaaaaagtaagtgaaaatagtgtgggaaataacgtttccactctctggagggaatactggttctttttcaatctccattacttccctagttatgaaaaagcttcttgtttttgttttcatgtcagaaaact

SEQ ID NO: 75141 - DNA, 349 bp, Carica papaya
  Intron number 1 from transcript evm.model.supercontig_397. 1 (locus evm.TU.supercontig_397.1) derived from phytozome v7.0 (chr-ID supercontig_397; pos 1690 to 2038)
tgggtaacagtacaagaaaagagagggtattcaaggtcagattaatgtaaataagggtggccttacaggtattaatgtgggtgttcatgtcaccaatttttttgctaaggctactaggtgtttttgattatgaatctattgattatctcccaattggttggcccattactcatctttgtatacctttatgagataatcctaggtaggagcatctctaggattcggtggtcaataggatttctagacagtttgagtgtttgaagggagttttttctctctaggaggaagagtcactcttattcaatcttgtctctcctacattctgttatgtcatcattttttctttagt

SEQ ID NO: 75142 - DNA, 463 bp, Carica papaya
  Intron number 3 from transcript evm.model.supercontig_397. 1 (locus evm.TU.supercontig_397.1) derived from phytozome v7.0 (chr-ID supercontig_397; pos 2161 to 2623)
ttcgaagattggtcaccaggaaggatattcccaaggttttagtccctataaccaaaaaaaaggaatctttttactgcaggaaaccaatttggctagtgatccaaaagtttggatatatattagtctaacctgtgaagctcaggaaatatattacctggaggcagaacttttgtttttcttcccatcctcatgctggagtcatgaggttgaatataagtcatcacttttagagggcgaaagatactttcatttagggttatatgctttcagtataatatgtacgcatatatatgtatatatttgaatttctcgatttcttgtgttattcatcaaatataggaaagaattgcatattagtttggctatctttctctctcactatacatttacaaatttatcatatttcttatatactaattgtttgctgttgttcaattgtcaaaagcagaatcacaggaattag

SEQ ID NO: 75143 - DNA, 786 bp, Carica papaya
  Intron number 1 from transcript evm.model.supercontig_250. 10 (locus evm.TU.supercontig_250.10) derived from phytozom e v7.0 (chr-ID supercontig_250; pos 96388 to 97173)
cctcttccgcattcgcctctttcacgcctggctcggtatcaccattctctgtttaataagctctgcaatgttccaagtttttctttcatgtctaattgcccgcatcatgtcttatgtatgaatgtatatcagacgtttacgagtttatttggagacttggagtggttatttctcctttgatgattttgagcaatcagctgaaaagggttacaacggataagttttttttttaaaaaaaaggagtagcaatgaacaagttaattaaaactccttgaatattcataaatttctttctagtttcctagcaaaattaatatttgtcttgtgcatttaagttcatttgaacctagaatttttatcattttagggaaaatcattacttccagattattattttcttataaattttttactttccttttagtttaatttatttaacctaaaattttcaagtgttcatatttagaatcacaaacacctgcaattattctataagaagcaaatacttttcacctaaaatgataacaagctaaactattgctaaataactcacaattatttgaattccaataagatgaaaacccaatcaattgaagtgaaactatacttttgtcctcttacttgctgttctttgtatgccccgtgttgctgaataaatttaactgtgatccagattttgaagatcatattgtaatgaagttgtcgtacactagtgaaccattttgctggtgttgaattgtgatttatgcagccattgttaggatttggagtggccaaagtattgga

SEQ ID NO: 75144 - DNA, 851 bp, Carica papaya
  Intron number 1 from transcript evm.model.supercontig_16.1 05 (locus evm.TU.supercontig_16.105) derived from phytozom e v7.0 (chr-ID supercontig_16; pos 1633830 to 1634680)
accttattacggcaggtatatgttacttgattgttatgttaaaatttcatttgtttgatataaaaaatttacaagttcaatctgacaattattggattagtcatgctgtggaaaatttatggccagtggagtgcaaaagtgtccctgtcacgtaacttaactgttatttcattgctggagattgccaagtccagtcattttaggtgttattaatcgctttctactcttgaatgctgacttctcactttcagaatttgctaaattgttaatttggacagtttaacttcaaattttcagaatcgcgaaacttctaatttagaaagagcagaaagagaaacgagatgatgcagaagtctaatataatttcttcaaaatccagtaccatgtactgaattacttcgatgcagaagtacaatctggtccattagtatgctgttttgcgttgtttgtttaagcttcttaattgctgctggttaacttgagtactggcttaagcaaatactataactttttaactaaatcaagttttctatgttttttatctcacgttgctatactaaactaccagttttagcaccaaacaatagagagctgctttttccccaacaaatggtatcttcaatattttctatccttttatacatatttatctttttttatccttctaagttattcaaaaggctatgtaaaacacatcattggcactaaaatgttgaagaggtctaactagtgaaaaggcagaatcagtattttgttcattatctgttatgctaagaaacaagagtgtctaagcgacaacctctatggattttcaaaatgaagttgctaattgattacaaataatttgcagg

SEQ ID NO: 75145 - DNA, 729 bp, Carica papaya
  Intron number 3 from transcript evm.model.supercontig_90.7 0 (locus evm.TU.supercontig_90.70) derived from phytozome v7.0 (chr-ID supercontig_90; pos 1440621 to 1441349 revers e strand)
gaagttcggcagaaggctgccgctaaccgagacaagtgagtcttctccctgaaagagttggcaacagttgatttttttatgtcttttctctctgtctgggtgcgcatctctgtttttaaattacttttctgctggtttttgtaccatcaagctaaatgatgcgcaattgagttcagagttgattacaatatgatcccttttccacttataatttttcactgcagttatctgctgtcttagtctgaactgcttgtctcactgtttttaatttcagtatcctaagtgtaactgcacttgggtatgcctgaggccctttgcttcttcatatacaaatgaacatctatgtttgacattgtttcaggctggcaagttactgtagcattttacacgtttgttttgccattgattctttcatttttgttatcaacttgtatatgaagttatacgcatggaagtatattttatatataatcttatcttcatcacttcagacaaacatagcttgatttattgcactcttgttaaagtttcattttgtgtaaatggcatctgtatttttcctcctgtagctttgagtgctatcttctgtttggtttttccctttctcatgataaatacatcttcaaataagcagtgagctactaatttctatccttcaataggaatttaaattcttgtgggatttttgacaccttgtatcacagatttcgcagctcagcagcaagtgga

SEQ ID NO: 75146 - DNA, 503 bp, Carica papaya
  Intron number 1 from transcript evm.model.supercontig_3.36 9 (locus evm.TU.supercontig_3.369) derived from phytozome v7.0 (chr-ID supercontig_3; pos 2501798 to 2502300 reverse strand)
aggatcttcaagatttttaaggattttttgacgaggtaatctggaaatgatccccttaacaccagtttgtgttcatctttcccagacacactcagatatttcaatagattatgagatcaaagtacttccaagttgccatattgatacttgggagattgcatatgctttggagaaagaaacaaaatataagaaaacaattgtaagcatcaaaattaatttgaggatataagagtatagattgaaccatatgtttaccatggttttgcccctgttagtgtaaaaaaaagatgaaatttcattccttttcttttctccatttaatttcaaatcatcattaataatgtcttcacaacttcgaaaattttccaatgtttttcccttgaggatgttcaagaatgttcaatactgaagttctaataaccactgaacttcctttatgttcttttattggtgttcctgtccttatagggtcacaaagctagaggaattaggcagagttggaa

SEQ ID NO: 75147 - DNA, 629 bp, Carica papaya
  Intron number 1 from transcript evm.TU.contig_24967.3 (loc us evm.TU.contig_24967.3) derived from phytozome v7.0 (chr -ID contig_24967; pos 11399 to 12027 reverse strand)
tcgtgaggtaaacaccctattttctctctctctctctccttcatttccttttctcttttcgtctttcttgccacatctgcactgatttgctttttccggaggtactgggtttctttgattttgaggaacttcttctgtcttgggtcttcttggtaatgcttctttaagatcttgggcgatcggttctgacaaccactttttccagtgaaaatcttgtttgtgaccctcacgatataatccttagagttcctaatttacgttttgccttgatatttctattttcttaccatatagcttttcgctttgttttgttaattgaagggtttaaagtcttctcatttgggatcttgatgtgccccattttcttattggatctcttacaatcgcaaccgctagaaaagctgtttcttttgatttattatgatatgtatctctggtgaagttaccgaacctttgaagatattatttatctgttgataccacgggggattttctgccttaaattgccacccccttgtgaatctcatctgttgggtttttcctgcttaaatttgcgattggttgttgccgtttgcttcagcatctagatcttatgttagtttcttcggatgatctgtacagattgcttg

SEQ ID NO: 75148 - DNA, 691 bp, Carica papaya
  Intron number 4 from transcript evm.model.supercontig_35.2 7 (locus evm.TU.supercontig_35.27) derived from phytozome v7.0 (chr-ID supercontig_35; pos 584888 to 585578 reverse strand)
tcttcagagaatatattgcctcgcatcgataggtaataactctgcaaatctcattacaaaaatgattaaatcaatgttccattttccctgcaaatctcattgtagaatcattgatcaaaatattcctctgcttgccagaaaaacataaaagaagtattttcctgttgaaatccatggattgataaatagttaaatcatcttgacttgaattgttctttaatgggttaatttaatttcacaaggctaaaaaaggttgttgtgcaaaattaggaaaaaaaatcaaaagtaggagattttggtgaataatataaaatttcacatggctgtgtacagtacacgggtccagatccatatcgaattttcgttgatcttgtggatcccataaattataatttaaagatattatattattcaaactctgattatatatattctttggacaaccaaatttcatccgatgattgcctccttgtctgattttgctctgaaaaatatgctttttcctaacaagaaaatctttctttagaagatttgaatttgattctctctttttaactcgctttttgtaatcaactgatctgctggacaataatcagcttttgattatcatgatcttaatttaattaattaattaagcggggtgaatctggcaaaagttggacttgataggattattattataatattacag

SEQ ID NO: 75149 - DNA, 413 bp, Carica papaya
  Intron number 1 from transcript evm.model.supercontig_82.5 9 (locus evm.TU.supercontig_82.59) derived from phytozome v7.0 (chr-ID supercontig_82; pos 972752 to 973164 reverse strand)
acaacttgtctgtatcagtcgctgtgcaggtatttattcaatgagttatttgaatgattctgcttatagtctcttaggagctccattgactttcaactgaatttcacaaatcaagttcattagccaaacatggcctcaaattatttgttctaaaataaagtgtgaataaattatataaaacatatatatatttatatatctgaatttcgcagttgttgactgagttattaagcatctggctctgtggccgtcctattaatttgtcactcatgagtcactggcttacttgccacaacttattttgaagaaaagcctgtttatttttatcaggaggctaagagtcaaattagaatttctaattcatgtctgttatatcaggggaaacaggatttgcagaaaaattctttgccctc

SEQ ID NO: 75150 - DNA, 853 bp, Carica papaya
  Intron number 2 from transcript evm.model.supercontig_32.2 6 (locus evm.TU.supercontig_32.26) derived from phytozome v7.0 (chr-ID supercontig_32; pos 380856 to 381708 reverse strand)
ttgttttttgtagatattctcatagatcatttgaggtattatcgcaatcacattctcttttttgatacttcaataaatatttagaagattttttggcaatattgatatttagtataaagaagtatgcaactttttataatatcagttaaatgtatcaccaatcttttaacttgagataagtatagtctattctttatatcgcatctttttcataattaaaaaattatctaacagttttattcacattccttacacagaacatcattaatgcttaaatatagcttacaattgaaagtaacctaattgaagtcaatagagaagctcttgtgtagccttttcattcgtctagaaaatggctctatatttcatgattgtttatagtttttccaagctcagtactacagcttcgttggacggatcatgccaaacacatcctctagatatctagagtttgctccacctgaaatctaagttacatgcattcgcaacttattttgtgaaataatatgcattctagaacaattttatagcctagtgtgtaactaagtgggtcaatatttacagtaaacgagggccttcgcacgttttgtatacactttgtaattgatagtaacagtttagtaaaaattacagttttttcttttctttttttttttttaaaaaaaaaactattcaattagcattatggctctttttaaagtgcatgtctgaagttcaagcgacgcgttctcctgactgggccgtgccaagcctcgcttgcaagctgcagctctaagtgaaaaagaaggaagaaaacaaaataatttgtctgtttcagtgagtttgtggactagattcttaggtgggtcttctc

SEQ ID NO: 75151 - DNA, 672 bp, Carica papaya
  Intron number 2 from transcript evm.model.supercontig_6.25 5 (locus evm.TU.supercontig_6.255) derived from phytozome v7.0 (chr-ID supercontig_6; pos 2005350 to 2006021 reverse strand)
taacgaacaatttcttgagttggctaacacactaggtactactattcccttcttttggtcaaaatcttgttctgtctatcaaatttcttgacatgctaagaacagcgagcctactgcttttgtaactcagtttgtttaataatctctaggtggtaattgaaattctgcaaaaagactgggtttttaaacgtctaagaatgttaaagcgatttcattaggggagtagaactggcagcaaggtcacttttgggaatgaagaataagatgaactctctgaatgttattctgctttggtcacttgtgtagatcttcattggcttacattagtgatgtattctttccccaatcttgatcaagtgctgtaggatgggtttgttttttcccttttccatggatgagttagagaaatgttctagtttttcttgttcaaagagtggacttcttatatttttgggatcatgttgcatgcataacattcgagaattcaatatcatgattaaaccctgccttatatcaaaaggtccatgcatttcatgatgtagtttggtgagtcatatggtagcataataaaattgtatcctgtgattgttaatctgttcttcgaatgtgaacgaaatgcttgttcttgaataattattgtagtttggaatacagatccagatagacctaaga

SEQ ID NO: 75152 - DNA, 547 bp, Carica papaya
  Intron number 1 from transcript evm.model.supercontig_6.25 5 (locus evm.TU.supercontig_6.255) derived from phytozome v7.0 (chr-ID supercontig_6; pos 2006089 to 2006635 reverse strand)
cctgaacgcaggtttctactcgctttttaacctaatctttttggctgacttcgttgattttattctatttttagtctagtttgaatggatacagttctagatttatccacgagcaactattgctcggtgctttttctttgcatttctgactactttgttgaatacctagtttttattttctttaattggttctgaagtagcatttgtttcatgaaggcagttcttttatttcttcagaataaaggagaagtagattgttaaatcgatttgatggttgcgcatattcatttctgcagaatcagtacactgtagaaaaaaataattcataataaagttgaaaaaatgcgtttctactgttactttgctaccttacaaatgataatctagactgtcttgtcactactaaatttaaatttcagcaataaggttatattatgttcggttcaggttagatattaaacgataaagttgaatttttttatgaattaattttggagagtctgtatatttagtaggcgaaggcctgaggtggaagtgaaggtagaag

SEQ ID NO: 75153 - DNA, 354 bp, Carica papaya
  Intron number 1 from transcript evm.model.supercontig_155. 30 (locus evm.TU.supercontig_155.30) derived from phytozom e v7.0 (chr-ID supercontig_155; pos 722419 to 722772)
ctggactcaccattgctagccttgcgattcctcaggtattctctctctctctctctctcttggaggttacgtaattaataattttaatggtgtttttgtcgtctatttcagattcttcttttcagtggtgagaactgagtttttttattttatttgaattttccttttccttttaaaagaatgtttgtgttttgtaacattccttgtttttttcccccacttggatttaattaattaatctttaagcacatgattttgttgttaatcttcacatgagcttaatctctaataatctttaatgttccatgtgaaaaaattgtttatcaatttgtttttggttgcagggaatcagtt

SEQ ID NO: 75154 - DNA, 414 bp, Carica papaya
  Intron number 1 from transcript evm.model.supercontig_26.1 8 (locus evm.TU.supercontig_26.18) derived from phytozome v7.0 (chr-ID supercontig_26; pos 71903 to 72316 reverse st rand)
cctgaaactgccaggtaggcgatttgtagttttgcaggagtaagacttttgtttttgataaaagaaaaatgatacccgagttttaattcctgttattattttatttaagatggtttaatggttaatgcatatcaaacaaaacattaagagactgtaaatataattaaaaaattctgcattatatgtcacatataattaaatataacatatatcatcttgattatgatgacaaaaatataacatatatctatatgccccgttaaaaaaattctaaaatttttaattaaaaatatcaattaattttacatttatataagcggatatattctttgcgttgcaagaattttggatttaaaggtggtttgtgggtgttgatcagattcacagctctcgtggagcgtaacgtcgcccagg

SEQ ID NO: 75155 - DNA, 715 bp, Carica papaya
  Intron number 1 from transcript evm.model.supercontig_66.8 6 (locus evm.TU.supercontig_66.86) derived from phytozome v7.0 (chr-ID supercontig_66; pos 810009 to 810723 reverse strand)
tggcttcgagactaacgccgtcacccccattcgtaccttttctatctctattgctacttcctcttcccatttacacacgcctagatctaattgtttctactgcattttgccttattcttccgttcttgctttttcttactagatctgattgttttgattggatttgatctctggattttgcacaactatgttactgcactcactgttatctgttgagtagataagactcatttgataagtgatggattttgtttatttcaaaatagtggacggaaaatggtcctccctcctgttttcgattattatttagcgtttactcttctgcgggtagacgtctctctctcacataagaagccggtgtagtcaaatatcatctacaatgtcctcgttgagaactgacgctatgtttcgaacaaatcaatttccaccacccgtctcagaaagagataatttatttgcaaattcagatttttatgtctaaaatgtacaactcctttcttccaaacattaattttttttttttttgtgaggcggagattgttattggtagtatatcttaatggattttgcgtatttacttggctgattgccatccgggtacgtgttatctatcttcgaccgtgattaggtttgaaattataagacgtttgttaatattgattttaatggtttacccataggtgccactgtaagagtggagtgccaagacaggaga

SEQ ID NO: 75156 - DNA, 626 bp, Carica papaya
  Intron number 2 from transcript evm.model.supercontig_75.3 9 (locus evm.TU.supercontig_75.39) derived from phytozome v7.0 (chr-ID supercontig_75; pos 406125 to 406750 reverse strand)
cagtgcctctgattatccgctggtgacgcaaggtatctttagttaattgatgaagctttttgtttacttttttattgttgtaattttgagtaagtgggtcactgggttgttttgtttgttaaatgggtgatctttggtttgcttgtataaaaaaaaagtctaaagctttaatttggtttctgggcagttgctaattttgcttatgtggattctcttttgatgcatttagtctcttgctttataaagatgccattttgaagctgtaatctgggataactacgtctgtcaatactttcatatgcttttgatttttaatttgtgatcttatgaaaattttattatttctttagttgattccttctgctcgttgttttatgagctggagttataaagttcaacgttccgggcatttgtctctacgtttgcttgtctttctctccggtttagctctggaagtttttttttttgtgttttttgaattgtaaccatatcttgctgaagatctatttaatcttttctacgagtactgataattgtttgtaaagttcacaaacctaacaactctactattacttcttattgacctcagtttctgattttcctcttcttcatgacagatctgcttc

SEQ ID NO: 75157 - DNA, 507 bp, Carica papaya
  Intron number 1 from transcript evm.model.supercontig_14.5 (locus evm.TU.supercontig_14.5) derived from phytozome v7 .0 (chr-ID supercontig_14; pos 39971 to 40477)
gacgtcgtttcttcccagtccatttcaactctaaggtttttagcagttcgattttgttcttttatcggtgtactggagtaattattttctttactttctgagtctactcttctaatttcatctcactctcgtacatttcttttcttttcttttttaaatgtattgatgttattgggtctttctggtaacagcaagctttcacctttaagcatctaaaatgttacaggttgattttctttttatataatgtcaagttatatatatatatatatatatatatatatattcattgtatacctgcatttgcttaacttcgattgtccatgttttgggttgtaagcagcacgttgggtctgttatatgtttgtcattgatgctaatttaagttgtttcttcttttttcttttaaacgttggttttgatttgccgttttgaagaatgttaactttgtccctgtcatacaaaatattagggctggtcaagatcagtcttccaacttgggtgatt

SEQ ID NO: 75158 - DNA, 645 bp, Carica papaya
  Intron number 1 from transcript evm.model.supercontig_6.38 7 (locus evm.TU.supercontig_6.387) derived from phytozome v7.0 (chr-ID supercontig_6; pos 2944160 to 2944804 reverse strand)
ttggcccgaatactggtgtgcctcttcactataaggtctcttctttttctatctctagctgatactcaaaaaagttattgtttttcttctcagtttcataacagggtgcccaaaaccttcttgggtcttcaaatgaatgagattatctcttctgcttcatcattttcttattgtgggggggcaaagtacgtgctttttggctttttaactcgatacgggttttagctgctgtagctcaataaatgccatttggttgtttactttacaggtggttttagcttttctagtacaaatagttgctatttgggtcttttttttataatcatatttagcttttctagttttgtacttattgctgttaatcccatttctccaaattataagtacttaggtgaatgtggcctggttcaaccagcctctgaggaaaaatggtaaaatggattcttttagagtctgaagtcattttattctaaaagaccgttttttgcccttttgattgttaaccttagagggaaagtagcaaacttctttctcagcttgcttgtttatgtgttggaaagtgacatcattttctgagtgtgtttcactcagttattgcttttgattgcagggtacctgctttcatcgtattatcaaaagatttat

SEQ ID NO: 75159 - DNA, 694 bp, Carica papaya
  Intron number 1 from transcript evm.model.supercontig_48.4 3 (locus evm.TU.supercontig_48.43) derived from phytozome v7.0 (chr-ID supercontig_48; pos 261316 to 262009)
cgtgttccaatcaccatcattgatacctcttccaggtatatttgtcatgccccattgtctttgtctcctggcattgtctgctattcgttagaacaaataaaattccttttagaggctaaagtctttgaatttgcgttctatgtgaggtttttatgtcttcggttctcgagaattttcttggttgtgaatgtgaaggatagcagagttttatgctaattaagttaagggtgctattcgtttacctttatttaggcttttatgttttcatcctctcagagaggattcaaaattagaaagacaatattttaaatgcgagttttcttttgcaccaagtattactagtggcactgcattgcttggtgaaacactcggtgaatttccaagtaaaggcagttaacttaattagggtgatggtagtttcctttttcacattacagataagattccaattgagttttttcgattgaaagtcactgggctagcaagttacgtgtatgcatggcatctatctagttgtcgtgttatattataacttcacagctaagccagctggaatccacaaacttaatcacaccttgcattaatgttatttttacatggtttttgcatttaatttcctgattctaatgattccttgacgtaaccttcattttacacagaccggaggatagaggtaaacttgctgaagaactga

SEQ ID NO: 75160 - DNA, 519 bp, Carica papaya
  Intron number 1 from transcript evm.model.supercontig_1617 .1 (locus evm.TU.supercontig_1617.1) derived from phytozom e v7.0 (chr-ID supercontig_1617; pos 5641 to 6159)
agaggcagaaaaagaagaaaagaaggaagaaaaaagtgagtatttttccccgttatctgccaactttcatttaatgctttacatagttggcgaagaagttacctgccagcaaaagggtagaaatagaatgagaatgatgggttcatattttactgctgttgcacatttataaacttttcagggcttcatatattgaataaagaaactttgcaaattcgaatttttatttcttttttttgtgggatatttggcaatccagtgaagggtgagtttcaacatctaatcttttttctcttttgtaattttgataatatttgtagggaatctgaggatgttcttgatgaagatgattatttgcttctccaggataacaatattaacattcaaaaggttggtagttttatttttgttttctcttgccaaaaaagaaaatagggaactagttgcttattaatgagatttttgctttacaaatggtaaatagaaaaagttcaagaggttgaagaaagctcagaaaga

SEQ ID NO: 75161 - DNA, 625 bp, Carica papaya
  Intron number 1 from transcript evm.TU.contig_33846.1 (loc us evm.TU.contig_33846) derived from phytozome v7.0 (chr-I D contig_33846; pos 2052 to 2676)
atatttccttgggctcttctctgcttccccgttccgtaagttttttgtttctttgtttatccatttcggctcttgtactttatgtttgtggcgaaaataattaagaggaagttggttatccattttgaatctcagtgtaaatagtaaaaggaagatcaagtatgacattgttggctgtgttgaatcacgaagagctttgtttcctaatctcgagttgtactttgggttgctgtggaaatgctggattaagaagttagattcccgtagtaaacgaggcaaatgtgaccattttgattaaataagtcttttttcttttctcttgaaaaattttcatttgccataattgagttgagatgtgaagtactactgtttcatgtacttcctttcatttacccatagttcagttgtaaactccttctatccatattatcttctaaggagaagaaatgctcactacctctgtgtgtatttggagagataatgaaatgcttccagagaggataagataaaggacaactttgtgattttcattgttttgcaaccgtatcagtttttttctacgtctacagttttcaactgttcttgagaaattcatctgttgatgtctagttggttcaagtgcggc

SEQ ID NO: 75162 - DNA, 711 bp, Carica papaya
  Intron number 1 from transcript evm.model.supercontig_1868 .3 (locus evm.TU.supercontig_1868.3) derived from phytozom e v7.0 (chr-ID supercontig_1868; pos 5494 to 6204)
tggggatcgttgcagacgcacaaccgcaggagaaggtaaatcaaagaaaccaaatctgcaaaaacaagagtttcattttagaacgtgttctagggttcttgaatttctaatttagggtttttgtgttctcattttctgtagcatatcatataggttcgacttttaatttcttgcatttcgttctttgcttctttttttatgtcaattgagtattttcttcatttttttctctcttcgtcttttttccctccttttcggggaaaagctcgaattattgatggtctcttggtacttggaaggatctaagtcgtcttcgttattatttcccttttcctgtttgttatgggaaataagggaagagaaaagaaaatttcacgtaggttttttgctttcttggatcctacgtaggtttttgtttttcactctgtaatcgatataaatgaactcgtctgtataaacgctgggatcacaggtatcgaactaattcatttctaaaatctgcaggatcaaaagcatgagtttgattgttagtcttcaatagtaagggatttagcggtttagctgatttagaattttaggttcactggaaaatatctcgatttacaaatttggcgaatctgcaaaagttttttttgttttttgtgtttcgagattgatcctagggtttcaatctggattttctttgtgcaggcttcttcagagatttcgacg

SEQ ID NO: 75163 - DNA, 645 bp, Carica papaya
  Intron number 2 from transcript evm.model.supercontig_30.1 46 (locus evm.TU.supercontig_30.146) derived from phytozom e v7.0 (chr-ID supercontig_30; pos 1914357 to 1915001)
ctgtccttgagctcggttacagctttgtcttcacggtacgtattatgtatacatactttcctttttgtttctaagtctttggttaagttatttttctttttattgcagtaatatatgtatatatatgggtatgttgccaagagtatatgaacacaatggtcgatgattcgaattcaggtcattcgttcacttttgttaatatatatatatagagagagagagagagagagagagagagagagacttattagtgctagtttgggagacttttcttgattattgattgatttaaaagaaacaagattgtaaattattgatctttttcggcagagtaagagttttagttaaactgaattacttgcaggaaaaagaaaatcataccgtacgtctaaatgacaaactcttctaattttaaaaattattcctagttttatatatatatatatatatgggggtagttttgtaatttccagttcatcttcctcacaacaaaatctttattttattttttatattcaatttgttgctttctgtacgttttctcagcagctaaacttatttgactttattaacttaaatctaattttgtttttttcaaagtatcgatttgtagaagataaaatatatagtcgtgatgcacgcagg

SEQ ID NO: 75164 - DNA, 483 bp, Carica papaya
  Intron number 2 from transcript evm.model.supercontig_18.3 3 (locus evm.TU.supercontig_18.33) derived from phytozome v7.0 (chr-ID supercontig_18; pos 203867 to 204349)
tctcaaggtttgaatttcaaaatttgaaccatccataacaacgaacgattttcctttcgatttttcttcttctttttcttcgtcttctttttcttcttgtttcagttaattgtttctggatgaaaaaaaaaaaaaaaatgttctaatagattattccaaaatattgttctgatcctcgttcggcacggcgtcgtttttgatcatgagttcttccttatcgttttcttcttgttttgaattactggtatctgagatttgtctttttctttctgtccaagtctttggcaaattcatgatcagcttcttccttctcaaaattgatcagctaaactcaaaaactgaatttcccaacgaatggattattttgtttcagcacatatattttttacctaaataattttttttcctattacgaaatatccgtagaaattataaaattattatgattcctcacgatgatggattatgtgatcatgcaggaat

SEQ ID NO: 75165 - DNA, 454 bp, Carica papaya
  Intron number 2 from transcript evm.model.supercontig_161. 30 (locus evm.TU.supercontig_161.30) derived from phytozom e v7.0 (chr-ID supercontig_161; pos 414540 to 414993)
ttttccttggagagaggtaacagaaaatctctttgatcgttcaatatctttttgtgggtgcttatctttatattttatttaacttgttcaaatctttctcggaaaaattctcagctttaaaataaacatcttgcttaacaattttgttgcaatcttgatatctaggtaattgattaattgaactttccgtacaaaaacttttttttttttatagaatcaatacaagaattttaagatgtccaacatttgactaggtagatttttaagggctgagtcctgaaagtggatatcttttaaaatcttctttttttcctttctcaaattggttaagctgcaatataggaagagatattgaagatgtgatgatgttttcttctctatgtttcacttttaacttattcgctttggtcacttctcagtgttgcttggttggttggttgggcactgattctgg

SEQ ID NO: 75166 - DNA, 919 bp, Carica papaya
  Intron number 2 from transcript evm.model.supercontig_9.35 5 (locus evm.TU.supercontig_9.355) derived from phytozome v7.0 (chr-ID supercontig_9; pos 2462299 to 2463217 reverse strand)
gcaaaaagacaatttctacttcagtatgttataaactctatgcacttcatattccctttatgaatgtattcagctatcccagtggcgtattcagctatttgtattctgatccactatatctattagaactggaaaaacatattgacattgtgtttttgtggtaatgttgttctacttgctccatgctttgtaagaggatctagttttgtttcttgaagtagtttcatgagtgacttatggattcgagttgtgagaatcttaattagcttagctgtggatctgcaagaaatggatttaattaattgatttatgttagagggttatcaagtccagattaggtgggttttttaatctgtatttggtcggcttaatcttgtgttcccacatgctctttgtgttgctgatttgacaggctctgcagttgcataggcatatgctatggaagaaatgttaatgattagtctttgaataaacttgtacaactttctatttcattgtctagaggatgatggagaaagtaatggtcagttatcactttctgtttggatgctgggataactaaggagtaaaagaaggagaacttcgatttgagtctctttctttttgggtttctgtgggctgaattacttgtgtaaagttatccgagtagttaacagggttggtcataggaaattctttgttgggttggagtagaaaatgatatttttgagattcatttttgtttatgaaggaatgcggattctgagttcttttaagccagagttacttgagtatcaaagtgtgtaattttctagatgagttctcttacatattatcttaagttttcacgaacttgcttttacttaatttttttgaccaagctaatatgctttttgcctgggaaggtcggagtgaaggatcaccagcggttccaagcttc

SEQ ID NO: 75167 - DNA, 527 bp, Carica papaya
  Intron number 1 from transcript evm.model.supercontig_152. 17 (locus evm.TU.supercontig_152.17) derived from phytozom e v7.0 (chr-ID supercontig_152; pos 97910 to 98436)
tcttgcaccatcgaagaacttctcgattctgtcaagtgagttctctggtctgattgtatatgtgtgttacagagccagctccttacgtgagtttttgtgtgtttgggtggtacttgcagatggattttctttatttttatttgtcgagaaactagtttttgtgggtttgattgaaatcttaattggcttttgatcctctggagaaaaagtttgctttctttttaggttgaatgttaatgggaaatgattcgattgttgtaccaaccgtttaattttgcttttagctattttctctaattctagcaaggtttacggagcttacatgtgttgtcaaaatttgcttgagaggtgaaaattattgtatttgttttaatctttttttttttgtttaatttaatttcatttgattttattcaagcactgaattttaactggttttgcattgagattacatgattttcttttcctaattttgatgcattttggtttcagtttactccattaggcatcaattactctgcaggggg

SEQ ID NO: 75168 - DNA, 875 bp, Carica papaya
  Intron number 2 from transcript evm.model.supercontig_28.1 42 (locus evm.TU.supercontig_28.142) derived from phytozom e v7.0 (chr-ID supercontig_28; pos 2131414 to 2132288)
atttattgaatcagaggtgcctctttgttcacagggtaatgaatatgtgactcttgcttaacgcaggcaattggtgccatgctttttttttttttttttttgttttcttcgcaagattgccgctttattatttaaattacatcatatggccagaagatactttcaccctattgtttgttgaatggcttttgggtatcaacatttctctggagataagagattcgtggtttgaggattaacttcttttttaatatcttgaaatcaggtttaagaggctcgatagtttatctttttgcgtaagttcttttcaaactatctgttgaattgtttgaagagaaagagctgataggccattagtattgtttaaaatatggcttatatgttcttacttatgataaaatgacaaaaatttacaattttattgcatttgagaatatctaactttcttaattatgagtacatcacggacatttacttggatattaccggttttttaagagagtatgtaagttatctaacataaaattacttcctaccagctttcattgtaagagttcataagcctttgatatttaccagacacgttaggaaattgaaaatgctgttggagtttataagcttttgttgacaagcaaataagctaagccaagtactttggaagggcttgaagtcgatagaagtttgaaaaccatttttttgaatcaggtgcctatatttgttgtaacaacttcaatctttagaacttgtcatcttgtaatgagccatattcatccgacatttttcaatcactttgattcatgttggattttgtgaaaactaataatgaattagtgatcttgtttgctttagttcatcttttgtttttgcagggaatc

SEQ ID NO: 75169 - DNA, 495 bp, Carica papaya
  Intron number 2 from transcript evm.model.supercontig_98.4 4 (locus evm.TU.supercontig_98.44) derived from phytozome v7.0 (chr-ID supercontig_98; pos 878554 to 879048 reverse strand)
aggttttctccattctctacaaggtttttagtgacctttcctttcaatgtttcttcattggcaatctcctccactgccattacagttttgcttaggtaatggtgtcctggaaaatatcaatcgccacatttgtagcatgttattgtcgccttcctaggttccatttctcttctcacggcttgagaagctcgttcgtaatttcttccatcagacttgtccaacagttggacagctttgccggtgaaatatgaattttgagatatttctattattgattgctcttggagcaggtttcgttcaaatgtttggttgagcgagcatagtttaagcaatttattatttgttgcaattctggtttgagtttgctgatgaaattggaaataaagaatttctccaggagagtgagattgtctacgttcattagagcatacaaatgcttgaaatgttcttgatattttggaacaggtccgatttgtcagcttattgaattcttct

SEQ ID NO: 75170 - DNA, 985 bp, Carica papaya
  Intron number 2 from transcript evm.model.supercontig_83.9 9 (locus evm.TU.supercontig_83.99) derived from phytozome v7.0 (chr-ID supercontig_83; pos 955301 to 956285)
tggaatttgctatactcaccctgagaaattgccaggtacatgcacttcatcattattttaatcataactcaaatactagtaactacattaattcaattcttttttactcttttttattggtcatcactgcgtaactttaaccagtcacatataagaaggaatacatatacatatatatatatatatatatatatataatgtgaacgaaaatcctctagaaacctagatgatcagttaaaatgagaatgcacgtattactaaaaccctcgaaatacaacctttaaaagaaaccctttgaaatactaactcaaattcctatttgatatatactggataatttgcaagtatataataactctagcatgcatgcatgcttatcatacatatataaaaatgcagtctcttgtaataataacccactagggtataaaaaataagaacacgctactagcctattataatgactgtttatctaacgcatgcaaaatcctgggacttgattactttaatcattgtttgataaatatatttggtttctaacccttctccttcttctaaagaaacctcccaactaacctagtatatataagtagctgtagcattttctatacatgtatatatacatgtatatatagctttaaaaaaagaagaaaaccctccaactaactccatttctatagcattcaattatcattacaaacgatttaagaaaccctccaaccaaccctaatgaaaattagatggaactagatgtataacgaaatttcccatcaccaattggtcaatcccttgattttctttttggttcttctttgaagaaataaatcatcaataaactcacacagtatatcacctatgaaatatatattagctcataatcaaatgtcttaattccaaaattaatttaatttaaatactaaattttgtgtaacacatactaatatcagtatttctaaaatgacaatcaatataggagtgaggaaag

SEQ ID NO: 75171 - DNA, 1035 bp, Carica papaya
  Intron number 4 from transcript evm.model.supercontig_36.1 71 (locus evm.TU.supercontig_36.171) derived from phytozom e v7.0 (chr-ID supercontig_36; pos 1263575 to 1264609)
ctcagctgtggagcgtcaacaggtaaaacaactcacctgataagcttcgcttctcgtttgactctactcctatcttttaatttttcataaaacggaaaattagttaaacttttttctaaaataaaaattttaattatttaacgtatttggataaagccaaattattttttctgttcatatatgtatatatatatacatatatttattttttgaatatttccccttattatttaatgacttcatacgcaaagtttgcccattagacaatgatgatgatgccaaaagaatgtacaactttaaaattgttaactgccgtgatcgtctggcttcaatcctatttatatgtaagaataaactaataagcaattggaaaatacttatatatatatatatatatatctatacgtatgtaggataaagacaatttaccttattccaaaaagaaaacgtaggatgaaagaattggaacgaagctgaagctgaagaaagcccattaacaaagaattgggcattctttgcgaacttttaaccagatagcaatccaatcaaatttttaattaataaatatatataatgttttggtattaaaaattaatcagatagttttaaggagtaaagatgaaaattacaatcagagaagtaaatgcaagtcaaatcgatttggtgcaggtagccattgccattaaatggaagaagcccaagaatatttattacgaaaataatttcaagggtctgccatttttcttaaaaataatcgctaattgaattaaatagactattcattactgtctacaattatcaaattaattgatgaaccgcccttcaggcctcaaacagaatttacttgattttttctttcccaaaataacttcatctctcttcattgggtgtcgttttccctgaccacataagagataatatcttatgtatttatacatatatattattatatatgtgatgtatttattattgctggatgtgttgaaaatgtcatctgagttctggttgtactctgggggcaggtattggagcagc

SEQ ID NO: 75172 - DNA, 530 bp, Carica papaya
  Intron number 1 from transcript evm.model.supercontig_65.3 7 (locus evm.TU.supercontig_65.37) derived from phytozome v7.0 (chr-ID supercontig_65; pos 494975 to 495504)
tggaggaaattggattgctctcccacaaaaagctggtaattatatagtaaaccctgaaaacatgggatctctctattcttcttcgtctcctttcatgaaatggcttggttttatttttattttttgggtttatcctttgatcttcttctctgaaatgggttggtgttattattattttttttttggacttctttttctctgaaatgcgttaatggtattattttagttaattattcttcttattctttcgttaaatgggttggttttgttttcttggattcctactttgatcttctttcttcttccctaaatttggtgttattttgattcttcttcttcttcttcttcttcttctttttccttttcttctttcatgaaatgggatcttttctgaattccttggttaatcttcttcttcttcttcttcttccgtgggatgggtttttgttatttttcttggaattttcttcttcttcctttggaataattaatgtttttttgtttgtttgtttggatttaggtttaaagag

SEQ ID NO: 75173 - DNA, 536 bp, Carica papaya
  Intron number 2 from transcript evm.model.supercontig_65.3 7 (locus evm.TU.supercontig_65.37) derived from phytozome v7.0 (chr-ID supercontig_65; pos 495590 to 496125)
ataatctgcagtctctttgccaccataggtagcaggtactgtgtacatacatatgtatgcgtgtatatatatttatatacacacactctctcttgttaatttaattcagtctaattttctagcttctcaaaagaaaaattaattcattttctatttattcttttctctttctttcccactcttattttcttgacctaaaatttcaaaagaatcaaaatgggtatcattgctttccatttttatcccaattaccaactgttatgaagaaaacaattgatgaaatctacctataaggagtaacaaagaggaaagaacctgttctctttaattttttcctctctttcttaccttttatcaagattttcaaaccaagaatctgctatttttggataattcttctgcatgcatgtcaaaagataattagatccaggcgtatattaattatatatataacttaaatacatatgtgtgtgtttttatgtatttatatatgtaatattgttgactataactgaggttcaattttattgttgcag

SEQ ID NO: 75174 - DNA, 951 bp, Carica papaya
  Intron number 2 from transcript evm.model.supercontig_48.1 9 (locus evm.TU.supercontig_48.19) derived from phytozome v7.0 (chr-ID supercontig_48; pos 142348 to 143298 reverse strand)
gaggtcagtgacttcatttattgactttttgtctctatttgctcttctcttttatcttctcaacctgtcaaacttggatttatttactgtagtcgaaggttaatggcaatttgattttacttatatttactgttagtgacaaaaatccatgatgggtattgcataaacattggagaattattttatatatatgttaaagaaattgtttttacgaacgaattatttcataaaatgggtatatattaatgtaagtttttttggttattagaagaaaatttagggtgacaaacaaaaatcatgacgtaaaattttacgagtttactagtggataataagaaatatactgtgtcaacaaaaataatttgttgcaaaaaaataaaatattagttctctagaagaatttagacatcatggactaaaattataagaactgaaaaagaaaaaagcaaaattcaactataatttagcagttaattgtgcacaagaatttgaaatgaaattttacttactcttttttactatctatttattagttacatgatttgtatttctaccttttttttttataaaattgtgagtttaaattaaattatgcatttcactgtattttagttatttgataaaattccactacacttttccgcaaattaagctagtgtttaccggtcgaaatagcatttgtaatgttttcaagtggcgtacatcatcataaagtgtgcatcaactatcaaaaagttggatttgtaagtcaaaccatcttaacttaattcctaatcaataattaaaaagtcaatgcttagcactatatttctatactagtggtgcaatcactcacaatttcttccaccattcatgaattgcattcaattttctctacatgggtttgacaaagcaacagcctttatctttattgcaggttgatctactaagccgtctgcattctccttactt

SEQ ID NO: 75175 - DNA, 430 bp, Carica papaya
  Intron number 2 from transcript evm.model.supercontig_62.1 50 (locus evm.TU.supercontig_62.150) derived from phytozom e v7.0 (chr-ID supercontig_62; pos 927081 to 927510 revers e strand)
tgttgattcctcttgttggagctggctttctcagggtaaattttcacctcttttgggttattgatttctttgattatttgcttacgggtttctttgattcgatatgattatgacgaaaatgtactttttgtgtctttaatccactcagtgtggtaccatcgaaggatatgcatgcacataaaataatgtgtttttgataagttttgcgcttaattcactctgtgactcgaagtgtttggtggctgatctcattattgaagaatgctaaattatcagaatcttctgatgaaagttcttttgattttaaactgaattagatagaaaattctttgactggctaggtggcgatggttgttgcctctagccttgcctaaaatgttttctgacttcttttttacctcttgaaataggatttgcaacaccgttgtga

SEQ ID NO: 75176 - DNA, 900 bp, Carica papaya
  Intron number 1 from transcript evm.model.supercontig_91.1 0 (locus evm.TU.supercontig_91.10) derived from phytozome v7.0 (chr-ID supercontig_91; pos 150263 to 151162)
aggcaagtatacgctttagcttctcaaaaatttcttttcttctcatccgtatcaaaaaaaaaaaaaaaaaagaagaaaatgcgagtgtgctttcgtttactggattggcattttgcatgacaatttatagaataccgttctgagatgaatgtcctttacctgcattgtccactcagggagctttataactaagctaaggatgccaaggtggatagggaaatgagcttcatacgataagaaattaatgaattcctgggaattattgggtgtcaatagttaaacttttccaaatccaagttgcttttggataccgtcttgccatatggctgtggaaggttatattaaagaatctgtttcaaagaggggaagggcagggtaaatatggaatgaaatgtacttgcatgtgataaattcactcgagttttgtgcgatttactttattagtgagagaatttaacagaaacgagagtgaaatattttttcttcttcagatacaaatggtaaatgaggggaatagaaagtttttattatttacaagataatgttctgttgtctattatagaaggaaaaagatcaaaagaacatttaggctaatcaagcttcccagtattttagtacttgcatttacttgcgttaattttctcccaatttggagaatactttcgatagaaatgacaaagaagtatttcctcccattcttgtttcattctattactaaaaactctcgtagacaaagttgaaaatgttaaacttttattttttttattccatgctgacctttgcttcccccaaacatagcctaaattgacaaaatgcatttttactggggttcacttggatgtggaattatgatattcttgtgacttcaggtcttgagtgatcctcaaaagagagcaactt

SEQ ID NO: 75177 - DNA, 955 bp, Carica papaya
  Intron number 1 from transcript evm.model.supercontig_51.1 18 (locus evm.TU.supercontig_51.118) derived from phytozom e v7.0 (chr-ID supercontig_51; pos 1149070 to 1150024)
tgttgtgtggattacaggtctcagtggatcaggttgatacttttctaactgtaaatttcctacagaagaaaaattatcatatagcctggagtttaaacttttgcagaatttgtcacttgtcggggatttatccttgaatgatttaaatattctctgtatttggtgctttgaaaaccaactttgcacttgtatatactatatgtggcaattataattcctccgcattaccagtttttgcaattatcaggagcctgctgcttgccttagtggtcggctgctcagcatttggatttagaatgtgatggtgctaaaagcttaatggcaacaagacattcttattatcttagaaagattaagctatacaaatagactgtggaaaccatattgttcggctagcgagtgcctattatgtggttttgaatttgtgtaccgtggctctgttactgattttcttgttcactaagttaatatgtcactaatatggtgaatgacattatcttttgtctttgaagtgccatgttcactttgtgaaactgtttgaaacaggaagcaaaatgaatccggaagtaaaacttgaaaacattgtagatagttacgaaaaactaataaagtattgactggtttagtacaaatcaccagaaacaattgctaactagctcattaatcaactgtagtaaccaaataaagataaccagtgagtagactagctattgctcaatttcctaggtttgagatatagagaagctctctattcttactgcctaactaaggctgttgaactgataaatagttctttttggaaaataattttttacgatatcataatacagtaatgaatatcaggtactgggaaaggctgtagtttgcattatgttctattgagctcattctctctttccccatctctctgcaattttcagggaaaagcactctggcattttcattaagtcgagaa

SEQ ID NO: 75178 - DNA, 804 bp, Carica papaya
  Intron number 1 from transcript evm.model.supercontig_19.9 (locus evm.TU.supercontig_19.9) derived from phytozome v7 .0 (chr-ID supercontig_19; pos 80707 to 81510)
aaattgcttcgtaagattagagatcgaattgataggtttgaattctctttatttctttttctatagctagtttaaatttattaattttataggcaacgaaaattttggatttaaaatgtataaaaaaattttatttttaattcataagagttatagtaaaataaaaaattaaaaaattttaccatttaagttaaataaataaaaattcaaacattttatgtgcttgaagtataattaaattaaattgtgagggtaaaaatataatgaatcccatagataaatattatatttttttaatactatctaattttatactgctaaaaattaagaaaatatatatttttaattgttttataattggaaatatttcttaataaatttatatcaataatagtaagagctctttaattttaagtacaagttagctcttaaggtatatcccaagagagatcttatttctccatcttaagtagtataaattttataatacttttaatataatattctatgaatgatttgtaatttttttattttaatgtatatttcaaagttcgagtatggttcaaattttatttatatggaaaaagaataagaacacaagtgaaaagccaaaatttaacagaacgaaattgaaggcatcaattggtttcattatgtataaagtttgtaaatttatgttcaaaacatgaagatatataaattgaataaaaatttaatagaacttaaccaaacaaaatgtaataatttaataatttgtttaatggaatagggtgggcgttgaggttccaaagattgaaatccggt

SEQ ID NO: 75179 - DNA, 610 bp, Carica papaya
  Intron number 1 from transcript evm.model.supercontig_153. 20 (locus evm.TU.supercontig_153.20) derived from phytozom e v7.0 (chr-ID supercontig_153; pos 474006 to 474615)
tctcaagaatctcttggtaaccttttgttgtgtcaataaatcttcattggcttatgcagcttaacgttttcttcactgaaaattctattaagatttgaatatttatattaccttgaagcctactttaaaagaacaatttttttaaatttttttttaagttaagaaaaatatttgtttgtgcatctgtcagcaaaaattagtttatttaattagaggtgatggatgccaattgtggatgggctcaaggatgtgccccttcagtcgcgatgcttaaaattttgaatttattcataaatgctgcatttctgaaaaagaaccactaatacaatttgttatgtattttacttccatcatcctggctaacacattgcctctgtttgtcaagtcttcttcaatctagctagcgttcttttgagcatgtaatgtctgtatattctttaatctttcttatgagaaagactcagcttaattttgattctttttcattgttctgataaatatttttttatgctgttccacactccaccatgcatacaactaataatgctggtttttctttgggtgacatttcatagctttggcggcattagaagaaaaggcaagccaagac

SEQ ID NO: 75180 - DNA, 880 bp, Carica papaya
  Intron number 2 from transcript evm.model.supercontig_9.29 8 (locus evm.TU.supercontig_9.298) derived from phytozome v7.0 (chr-ID supercontig_9; pos 2031578 to 2032457 reverse strand)
aaaatctgctttcatttcttaaattttgccaaaaggttaggcttgtataatttcaccaactatttcaacaagttcaatcactcaatatcgtctatccagttggctcatttcttcttcaaaacacttgagtagcatgtatattttgtttattagtttcttaatctatgaactgagaatgtattggtgtattaaattcggaataggattgtatcttctctttctattctttctttacatgtcatatgacatatatacatttttccttgatagacttttggtaatccaagataggaacctgtttcatgtatggaggatgatttcacctagtggggaacaatgaaaaagtaaattaaacttataattcaatcaagcatcaaaatatatttatttggaaacactcccaacacaaacaccaccaacttgctcttctcatcaaaagaatggtgaagctatgtatggccaaatgggatccactcatagttataaaccagttctgtcaatttttttaaagaaagtgtttatccttttgaagaaaagaataaatctatttcgggattatcctggtcttaacacttcaacccttggaagaagtgctttaggcatcaggctcatttgttttagctgcattttggaatttgatttgtttgtgcaactgttaagtgatatagattaggattttgatcagctgtacagaattgcatgtttgatcctacattggtggtcatgggcatttcttttgtcttaatagaattttgtaatcaggaggcagtcaaagtagtctctgcttgtcttattaggaattaattatgtcaagaattaacctaatctcttcgaatattaatttatttaggaatcacccatttttgagcacttaagggta

SEQ ID NO: 75181 - DNA, 690 bp, Carica papaya
  Intron number 1 from transcript evm.model.supercontig_9.29 8 (locus evm.TU.supercontig_9.298) derived from phytozome v7.0 (chr-ID supercontig_9; pos 2032533 to 2033222 reverse strand)
gctcaaatcagcggctaagcgtcggcttgagataggttaatctcttttctattagctcttgaatcttctttcatcgctccattttgcgtggttaattatcagaatatagattgagtttttgaattctgctcggactttggattggattttttggatcctaggtctgatcgggttttttgtcttactttctgggttttgattgtgttggttttgctatagtttttttttcctgtgattctccagcattaggcttgtttggcaatgaggaacaaattggaggcaaggagagagaattttgaacttaaacgagtgttttaccactgaagttgataattcttttatcttttattatgttccaaccaggacatgattcaagctttctgtattcaccttttttatagaagctatgtatattgttgatctgccaagaatcaattcaatattttgtgttatatgccaattaggtttcaattttaagacattttttaattaaacccttaggttttcataattttgatgcatgataaaatggggagtgtagtatagataaaggttatagcacaacattgtgcatagtatcacactgtagtctagcatacacacaactagtatgaatacgttgattatggtttaacattgtgcatttttaatgtggaagaaatgttgcttgtgatggtatttctctggcag

SEQ ID NO: 75182 - DNA, 220 bp, Carica papaya
  Intron number 2 from transcript evm.model.supercontig_14.4 3 (locus evm.TU.supercontig_14.43) derived from phytozome v7.0 (chr-ID supercontig_14; pos 474846 to 475065)
aattgcctgtatgtgtctctattaatcttcctctttctttcccttttccagaataactcaattttttttttcgtaattgttggaagggtatgtttgagtctctggtttttttttttttttttatatattttttataaggcaaagtttgattttctttgtttcttggtttgttgttgttgggtttttgtagagtgtggcccaggaatacgggattcagggt

SEQ ID NO: 75183 - DNA, 707 bp, Carica papaya
  Intron number 2 from transcript evm.model.supercontig_165. 20 (locus evm.TU.supercontig_165.20) derived from phytozom e v7.0 (chr-ID supercontig_165; pos 126357 to 127063)
cttggtcttgtgaacaagacgagtacaccagacaggtattcctcgcacgtagtaattttggagctctgcacattcctcaaggaaaatccgcacattgttccggaaaggacccttgagtttcattgggtacccgcgtcctaaaaacatgtcaaagtcaaagatcttccgcctgctctttttcttccaacgagtttcaacaatagggatcgacactgttgaaggcaaaaggctggagtttgttcagtggcgtaattcctgaattctctctataaagaaagaaaaagagagagaggaggaagggtattctgttggggttttgaactggagttagttgcaggtcattccgctcgaattcgaagcttaaacgatagcattactcgttcggggtattgtgttgggaatgaagaattcagtatgaaaataaaaaagattactagtcattacagaaatcagagtaaagcttagttgatcaccttgagggatcttctgaggtttctgctcgaagttacgtccaacgaatcccaacaacaaatagttcaagagcaaattcgaggtcctgctttggtaccaggaattgatgtgtattgcaatgttactgtgctgtatacaaatcttttgctgaattatccagaatcagaaacagtgaaaatggcacttcaaacagttctggacagcaaacactttgtgcaagattggccccttcagag

SEQ ID NO: 75184 - DNA, 592 bp, Carica papaya
  Intron number 1 from transcript evm.model.supercontig_86.7 2 (locus evm.TU.supercontig_86.72) derived from phytozome v7.0 (chr-ID supercontig_86; pos 937915 to 938506)
agaaggtcattctcaagaaggtaacttcctgcaatcaaataattctacttcctgctgcactaactgaaatatcattatcatttctattgttgtataattcaatatgccttgctgcacttgttcttaatcttttatcctagcccaggaacttgattgattcgctgagatatcaatttagaaatttatgggaatcatgtattggactttgatgctcagaaacaactggtctattctaatggatgcactgctatcttgtaaatatgatgatttccacatttacttaatttttgtactcttttgtcctagccctggcacttgattgattcactgagatatcaatttagaaatttatgggaatcctgaaaatacgtttgggctgagtctagaaaacaactgttctattctctaatggatggattgcgctcttgtaaatatgatgatttccacattttctaaattttcgtattcttgcccccttagagatgattttacattcttgttttattaattatcccatacataaggaagcagaaatttcgttcttttctgatgtgatcatgtaggtgaaagttggagttcaagaggccgaaga

SEQ ID NO: 75185 - DNA, 624 bp, Carica papaya
  Intron number 2 from transcript evm.TU.contig_28852.3 (loc us evm.TU.contig_28852.3) derived from phytozome v7.0 (chr -ID contig_28852; pos 13600 to 14223)
gggcacctctgtatatcctattgtaccagggtgtgtattcattttaattatcttaatttcttcattaaagattatcgggaaatttaattacttaattttgatacttgggttttccaattttataataaatttcacttattaattaaatttctgatttttaatatctttaactagattattgataatttttttataaaatttttttaatgatattatttatttttgtgtatttctattagtaaattgtttttatattttaattttctcaggatttaaaaaaaataaattatattttaataaataattattgtacttaattttcttcaaatttgtggttgttaatttttagtctgatttttattttaaaattaatttctatcatttttagaattctcgggagatccatagacttactggacacttcttgtgccaaaagtcaaagtggtccacattgaccctgtttagttcttctatttcttccttctttatagcaaaagtcaaattggtcataaacaaatagataattctgtaaagcagaatacttactgatcaaaattaagcacaagtgaagtaggggaaaaaagtagcagacacaatcataacatatgaaatgataatgcaggc

SEQ ID NO: 75186 - DNA, 480 bp, Carica papaya
  Intron number 2 from transcript evm.model.supercontig_19.1 14 (locus evm.TU.supercontig_19.114) derived from phytozom e v7.0 (chr-ID supercontig_19; pos 744197 to 744676 revers e strand)
gatttgaggttagttttatattaaaaaactcttgttttaatgtatgctcagaaaaaagatggatgttgttcttttgccgctatctctaaagcttttgaaactaaacatctggcttagcagtagattaggttatcgatgcagttaagattcatgacaaaattcactagcgtttgcatgataggacaatatggatatgtacttttacatatgtaaagcaaatttaagattgaatctgtaccacaatatcttcaacaatattaagcacttcacttaatcgtagcctctttcttacaacatatcctcgttgatttgtgccttatttgtgtttgtattttttcccttaaactgtctttaactccctatgattagcttgacatttgaattgctaggtccttaataatatataattaattaatttctctcattttgtgttgaagcatgaattttgttgttcaattgtcaggcactggtactagacgt

SEQ ID NO: 75187 - DNA, 249 bp, Carica papaya
  Intron number 2 from transcript evm.model.supercontig_2.26 0 (locus evm.TU.supercontig_2.260) derived from phytozome v7.0 (chr-ID supercontig_2; pos 3309620 to 3309868)
aggtctggcaaactattcctccagacagagtaagttgacttcttcttcattactccatttgctttgggtttcttttctccagtaatctccatttagttttttatctttttctcaaaacaggaaaaaataaaaaagaataatctttatcatcgttcttttactctagtttgcatatatgctgaccagtggacttctttagccatataagttactctctttatattacattttgtccgtctagaggggtca

SEQ ID NO: 75188 - DNA, 785 bp, Carica papaya
  Intron number 1 from transcript evm.TU.contig_29434.1 (loc us evm.TU.contig_29434) derived from phytozome v7.0 (chr-I D contig_29434; pos 8517 to 9301 reverse strand)
gatcgcgtgaaagcacagacattgatactttccaggttactactctttggtacaattgactgcatgcattttaagtttttgaaaaagccgagtttcacatctttctttcatcaaattactaagcacgtcttcattgaaagcctattttacaattctaggcatcctcaacctgtatgtacctttgtggagctttgtcttcatgtaactctcgaatagtgatgacaagaatttgcagacaaaaagatccgtagttccttagtagtatgcaaggccaagaagcacctcatgaaacaagtaaaactgtcaaaatgagcagatttgatgccctttactgaagtaaagtatcatggaaagttgctatgaataactcttggagtttaggtacattttacgctgatcatataaagacaccatatgtagggctctgctactaccttccaaatactttcatctttgccgtctagagcttgtgaaatagagtgtgaacacagtatggaatagtcaaacatcactctgtatcagagatttccttatttgcggtctagagcttgaatgatgaaatagagtgtgaaccaagtgacgaatagtcaaatatcactttgtgtcggatatgtagacagtgaatggaatttaaatgacagctgtttgttggcttgagtcattccatatcaatacttttattattacgtgatacttatgtctcgcattgggttacagcatattttgtttagtttgttattctttccaaataaagaggcagctcactctattcctttctagtggaa

SEQ ID NO: 75189 - DNA, 780 bp, Carica papaya
  Intron number 3 from transcript evm.model.supercontig_8.10 (locus evm.TU.supercontig_8.10) derived from phytozome v7 .0 (chr-ID supercontig_8; pos 115093 to 115872)
ccgttgatcctgaaacttcttctaagatcagtgaggtttgcgttgcagtctaattctcctcagtctctctcctgttacttcagttatattccccaatttctttgaatttgcagattcttacttgatttattacttgattgataggcatcactctttaaattctctagatgctaaaaatgtttttagaaaaataatgtccttgtaaaacaaaatgaacatatagcactctagtttgatgcacgagtatgcaggattgttgacacgcatgcttgtcttcaaaacaaaagtcccttatgttcacttggaagagatggaatatcttctttacatcattcctttttagtatatgaagaatttgtttcagcagtttctagagttagatgtaatactgatggagtagttggtatcccatttagtataacaactttcatcgttcaaaactgctctgtaacttgaccagacaagaactttttattaggtgtcagatgtaacactgatgttataatatgatacattaatttaaagttataatggtgctactcagatccaattttttcacctgatggtttttatcaatattatgctaaagatcatggataataggaagatttccgaatttcttagaaaactatagtatttgactgtaggttcttctgtttttctgcagttattttggtgcaattgattgaatctggtgagtgctggtatacaataggtattattaactactcggttggattgacaggcaatcacggctaagggtggtcacttccttgaagc

SEQ ID NO: 75190 - DNA, 599 bp, Carica papaya
  Intron number 1 from transcript evm.model.supercontig_42.4 4 (locus evm.TU.supercontig_42.44) derived from phytozome v7.0 (chr-ID supercontig_42; pos 340891 to 341489 reverse strand)
ttatcactacaaaggtagttaataatgattattatgtctctcttttcggtgtcctgatttgtgattgtgcattctttctctgttaattttatgtaatctattttgtaccctttgattccttccctttttgttcctggtttactggtgcaattttcataaatccatgatgtttagagtcaacaattttggggaatatgtgtttgtgtatatagctataaattgatttatagccaagttaagctatggagactcgttagctggcttatgaatgcccttagaattttgaggcagtttttcttctaaaaagaaaagtgcaatttgatgtcagaaattgatcaagagtttatggtctgtgttatatgatttggacagaaaattgaagaaagaatccttccattaactgtgtttagattgaggtactggcttgttgaagtgcttaacagaggctagatgtctttctgtgaaaaacctcatcgatctggcaatcctccatgattgaagtcctagaattttggtaccttttagttagatcagtaggtttttagtttatatttttacacatatatctcatgtacaaaacgtttcctttttctccagat

SEQ ID NO: 75191 - DNA, 641 bp, Carica papaya
  Intron number 1 from transcript evm.model.supercontig_28.9 4 (locus evm.TU.supercontig_28.94) derived from phytozome v7.0 (chr-ID supercontig_28; pos 1373866 to 1374506)
ctcttggttcatcaggctcttccccgactgccgaggtccgatccattttctcctcttcttcacctaatttctttctttcttttcttttatgctttctaaaatcttgttagggtttttttttcagttggatttgaattttgagtgtgctgagccttgcaaatttattgcttctttcccaatttggtttgcttcgaggtttaccacctccaatctgtaaaatatttcagcatcacaagtttaatttggccttaaattaactaagaaacaaacgagaaatctatgctcccaaacatgatcttagctaattcgatgttgcattcattagaagaatttggcttgtccttgattttgttcgtgaactaaaagttgccatttttgttgctttaatttagttagctttagaattaaatgatttcctagaaatttgagtggaaattcaaaatgctagactttcagatttctagcgaacgagaccaattttgtgttcccttcccttaagatgttgtttttacttgtttcaaacaattggttttcttggcacgcactcttgcagttcttgtttctgattagtaaaagctatcaaaggcttagaaattgttctgttgattttacaggtccaaccattctgttcttccaagaga

SEQ ID NO: 75192 - DNA, 673 bp, Carica papaya
  Intron number 1 from transcript evm.model.supercontig_628. 3 (locus evm.TU.supercontig_628.3) derived from phytozome v7.0 (chr-ID supercontig_628; pos 12855 to 13527 reverse s trand)
catcccccttccttcgttcaacaacaggctcaaaggtatacatatatatatatatatacacacacatttatatctacacacacacacacatacactttttctctttacacagttctcatcccattcaccaagttcttgatttaccatatacatgtatttgtctgtgttaaattgtatcctgattttacgaggttacagtatctctaaaatttgaatcttttcttctcctttatcttcctctttctctctctctctctctctctatatatatatatatatatattgctaaagttaatagatatatccttaaagtgataagttatttttcttattaaaaactttgttaggatttcgggtctataaaggtttgagaaagagaaatatatttgattttaagtaataaagacgatctccaagctatatcttatatttactacaaattgaattgttttctatcggaattaatcaacaataatctgagttattttattttttagacaaatttgaggagaaactcataactcaaatagttagatattcctgacttattattattactactttatttatttttcttacttgcaagctgtttcattaatttacgtttctgaataataaacaatcttgagtatgtttagatttgggaagatattctcttgtaacttactgggga

SEQ ID NO: 75193 - DNA, 392 bp, Carica papaya
  Intron number 1 from transcript evm.model.supercontig_284. 6 (locus evm.TU.supercontig_284.6) derived from phytozome v7.0 (chr-ID supercontig_284; pos 57898 to 58289)
aggagcctcctaggcgccggttcagatatactcctgtatgtttataagatacctaagttgtgcatagcacttgtttctgtatgtatatacgaggttcttcgggtgttagggcttatggggtttgggaattcagactgtgtttggaaataatttgtacgtttcatgtatgttaaaagtgggtttcgcttttactttgatgcatgcttgatgaaggtctggagcctttttcttgttattgtttgatcttgtatagtagtgtgctaaaaagttatttctgagcataaactctggttccatgaaagtaaattttttttttttttttaaatctggctctgattgattccgctgaattttcagattgctgtgattgaagaaaggaaaagggcagttag

SEQ ID NO: 75194 - DNA, 969 bp, Carica papaya
  Intron number 1 from transcript evm.model.supercontig_61.4 3 (locus evm.TU.supercontig_61.43) derived from phytozome v7.0 (chr-ID supercontig_61; pos 1292689 to 1293657)
ggaactttcgggtatggatttgtttccttctattttgtcaactgaccataatggaaggaagtttatgtgtatacccatattagctagagttgataattcaattcgttatatcaatgatttatatatgttttcaatcaaaagaaaaacatgcttgtggcattatgaggaattgcttgcttcctattatatgaaagaattgagtactctggaagccaattattgagttttatgtatcatggactttcaacttactcgaatcgtttgtatatgatttgttatttgaagatacatgcaggcatgaaatatagaaatctgttactgatgcatccactctaggagaaaacgttgttaacatggcatttttgtaacacatcccggtctaattttgtaattgcagctttagctaatctatcccaatgactagactacccttgttcaccttttgcatgaatacttgtgtcacctgtcttatcgaatatctatgcttttaattctccaatgtgcttctgctggttgagccataactcaacacgtggtccttgtttcaagtattggtaccagaagtatgtaatgctgtttaatttcaaatgacttatatatagaagcaggtaggttggcaaggacaataaacatcagggctcttatcggtcatggtttttccaagtattttgatgtagattttcagtcttcagtctagaggttagaagtcatgagaagagtccaaaatattcattctactgctatagtaactaatatgttatttatctttcagataagttaaaaaaaaaccaaggaaacaacaggaggtcatatcacgaaaatatttttttctgatcagtattgtgtgtaaaacaatcctaggctgatacatagcaatcttttgatcatatttagttatttggtaaagcggacaaagaaattgacatctaatttcctgacaaataacttataggtacgtggctccggagt

SEQ ID NO: 75195 - DNA, 374 bp, Carica papaya
  Intron number 2 from transcript evm.model.supercontig_20.2 32 (locus evm.TU.supercontig_20.232) derived from phytozom e v7.0 (chr-ID supercontig_20; pos 2478485 to 2478858)
actcaacatcgtcaacaaggcagtctgcttgtactttgagtactttttgttgccggcgttgaatttaggattgtgtggttacttgtgtcactttgtatgcaaccaagttgatttgtcgaggccttcgataaatttttatatggaagccatagatgtgtattttcatgtaaagtatccgaatcactgatgggcaatatattgatgttaatcaagattctagcaagaattaggcggtaagacatgtttttaacttcaacatattagaatatggccatgaaattggtatttttattgattaaattgcttgatgttgaataaagggtgtaatttgaattttcttttctgtttctagtttttagatttcctgggaagag

SEQ ID NO: 75196 - DNA, 303 bp, Carica papaya
  Intron number 1 from transcript evm.model.supercontig_36.1 98 (locus evm.TU.supercontig_36.198) derived from phytozom e v7.0 (chr-ID supercontig_36; pos 1571260 to 1571562)
gttaacaaatccatattagaaaaagaaaaaataacctaaaaactactgtttggaagtcaaataacaaaagaccagattgcttactaaattggcaaaaaaaaaacaccatgaaaagatcaaataattaaatcatacttccaaaaattcattactaaactcaaaatgcttttgttaaaagaaagggcatctaccttaacattagaaaataagtaagagaaagagcactgagtaccaccataaaatcatcttcccttatattctatcctattatatttcaggcaatttcaagagaagcaaaagaat

SEQ ID NO: 75197 - DNA, 776 bp, Carica papaya
  Intron number 1 from transcript evm.model.supercontig_170. 53 (locus evm.TU.supercontig_170.53) derived from phytozom e v7.0 (chr-ID supercontig_170; pos 279533 to 280308 rever se strand)
ataagtaagtttctttacacttattttgttacgtgatttcatgttaagtcaagtaatttgttggttatttcaaaaaaaaaaaaaaattcaagtaatttgttggttatttcaaaacaaaaaaaaaaagtcaagtaatttgttggaatattcacagaatttgcatttggacatagggcttaaatttgatttagatttgtttgattgagtttcttgagagtgctaacaatttttactcttcttgcaggaaaaagaaagaaaaagagttattgcagaaccatatgggaaatgtagcagcataatgatctgccatatacatctacatattaaagagatcttattcctttgatgggaaattgttctccatggtgatcagctatataaattggattccttggacagattgtccctttacgtggtgactataaatctatgttgtacggttagttatcattgatgttaactttagaagtgctaggaatggggttttaaatgccacattgcccaagagcttcagaatttttttgctttggttcttgcaaaaatccaatgttttgcaagaatttttctttgctgcatttaattagaatttgtggggtcagaaaaagtgcgaatggaaatccaatttcagaaagactgtgtaagagagaaaggtgcttaagtgtgagtggagatgcagatcaagttttcaaagaagagaagatgatttgagtggattcttttttctattcatttcggtgacaggttgcagggggcaataaacagcagtgacagaggta

SEQ ID NO: 75198 - DNA, 304 bp, Carica papaya
  Intron number 1 from transcript evm.TU.contig_32361.1 (loc us evm.TU.contig_32361) derived from phytozome v7.0 (chr-I D contig_32361; pos 2555 to 2858)
ataagcccaacattgttacaggtgcaaacgttcaggtatacccctgagattagcaagttactgccttgtgatctgggttgatttcttttcatgctatatttattaaaagtaaatatagttttcgtactgtaatttccttcttttcttaatcaaatgtaaaaagtagtagtatacgtcctacaccaggattctatactcttctttattcttgtaagttattacgagttttaacacgttctctacttggtttgttgaataattttatgaaggtgtgctgggagaaatttgcaaggtactttgaagt

SEQ ID NO: 75199 - DNA, 539 bp, Carica papaya
  Intron number 2 from transcript evm.TU.contig_32361.1 (loc us evm.TU.contig_32361) derived from phytozome v7.0 (chr-I D contig_32361; pos 3004 to 3542)
aacgatctccttatcgagaagaacaaagaaactgggtattcatctcatcattatctccttgcatgtgaatctaaacaccttctgagagaagtttctttatttactcaagatcattttagatttaggaagaattgggtaccagagacacgttctcacataagctggttaaagaattaacaaataattaattatatcacatgctatcataatggactctcttctcccttgttctatcttaattaaggtttgatgcaagcctatgaagctgatcaatctctaacctgtgttctgatttgcacctggtctttattgaggcttatattagaaaattcatgcaaaagctcatccaatttctgacttgcatttttctgtatcttaagttctgtccatatgctgtgctataaacattctaattgtacataaaggagtttatgagtattattaagggtatacctatgggttatgcacgcatttgtttacaaaaacgtcatcaagcaatcatgcagaaacttatagagactagcattttgtttttgtag

SEQ ID NO: 75200 - DNA, 782 bp, Carica papaya
  Intron number 1 from transcript evm.model.supercontig_51.1 29 (locus evm.TU.supercontig_51.129) derived from phytozom e v7.0 (chr-ID supercontig_51; pos 1251094 to 1251875 reve rse strand)
gaattatcttctcgttgtaagatctctcctcctcttcctcatttccagcttctatctgtctttctgggtctgtaggtacctctcgttttgggttggttccttaagctctcgatcttagttgaataaatttttttttggatttcttttgttgaagtcctagatcttgaaattgtatatatctcaggctgcgatttgcagctgacttggtttttttcttcctttttaatttgttttctctaattaagagaacccaggcggctgtcttcaaaatccaagctcgggtttcagttttctgagatttttactttctgggatttcttcaagttaaccagaaaactcaaatgggtgttttttaaaaggtcgtttttttttcttctcaaattggcggttctcacttctcagccttctcgatttgcatagattaacccatatggggtgtatcagaatgtcgtttatctcatctcaatctaatttctagttctgggtcttctttgtttcttagaactcttttcgtgtttggttttctactaagatttcatccttccccattttatttgactcatggatctttcaatttagctcgagaaaagtaaaaatctcagacgggtttgttggaaatccgcttctcttgcctttcgtccacttaattttatcttttctataattgtcaattccagagtctcgtaattccagttgataaaatcaaatcggttaggtaaatgactttttttgagtatttttttacagctgcggataaggaagacagaaaccagagagcttgc

SEQ ID NO: 75201 - DNA, 658 bp, Carica papaya
  Intron number 1 from transcript evm.model.supercontig_166. 33 (locus evm.TU.supercontig_166.33) derived from phytozom e v7.0 (chr-ID supercontig_166; pos 258505 to 259162)
taaccgaccattggaaattggtaaggcttcttcaggtatgattatagtactcaaaaagtaattgaaatggtacgcattttgtagcagagaaattttgaaatttgctaatgtagagcttgctgatgttggtcatggatattaactgcaaaatagtatgaggttccatggaacttcaattttgtaggtggaaatttacacattctcggatatgtttctgctaggaatattcaaagtttctccccatatttgcttcatgtcatttccggaggaaatggattttgcataaaggtggttctatcatattgcagtgcttttgttggccctgtagcatataaatgcaacagaactaatatgcttttctacttctgtttgagtctgtgacctacgcttgtagtattactatatagttccgacatcgtctatattgttacaagcagccttggctaatataattttttttggtttgctaccatattttggaaacaatttctacacctttctcaccccctgtttctttcatctgtagaacctggtctttcttttctgatgcacaacgtggtaatttcacatgcacgtacacaagtactttaaagttaatgcacaatatgccttcttgtatgtaggtaaaagaagattaaaggatttattgcgtcaaagt

SEQ ID NO: 75202 - DNA, 450 bp, Carica papaya
  Intron number 2 from transcript evm.model.supercontig_7.13 4 (locus evm.TU.supercontig_7.134) derived from phytozome v7.0 (chr-ID supercontig_7; pos 1324396 to 1324845 reverse strand)
gggcctactctactatttgctctcagtctgcacaggtactttagtttcaattgatacgtttttgtttcatgtctgtttgcctgaatttaccattaaatttgaggtgaatgaagaatctgaacagctgaaatatgaatttgattttctgctttcatctaaagtaacttatattgatatctactccgagtcggataggagcattggtgtcactgagtcaagaggctcggccttgtttaatagtaataacagaaattcgtctgtagttggatccattatcatttcatgtatgggctgaataaagaaacggaaactctagttttagtgtttcagttctaatgtgataatttgttatgtgcttggttggatcctgttttctcttttggctgccccaacttttgttatgctgactatgataatgttgaattggtacagaagcacggtgaagagaaa

SEQ ID NO: 75203 - DNA, 657 bp, Carica papaya
  Intron number 2 from transcript evm.model.supercontig_46.1 60 (locus evm.TU.supercontig_46.160) derived from phytozom e v7.0 (chr-ID supercontig_46; pos 1571234 to 1571890 reve rse strand)
gagaacttcatccatttaaggtgaactcataacctcataccaaggttttcataatagctcaggctgattggatagaaattgaaattattaaaaattctgtcttatggtggaagaaaatttggtaatggtgtcttctctactcttaacaacaggaccttggatttatacctcttcacaaacatgcataatttgccaacgcttcattcagattttctggtttccttttgactcatacagacttgagcatttaaagtgactaatagggcaactcactgtgcttgtaagaacttttttttttgagaagggatataagaactaatgtttaaggctatgtttcagacaaatccaaaatttttctagaagtcatttataaatctacacttagttcaaataagaagaggtataaattctactaaaaaaatttaattttatgaaattttatgcagagttagaacaatagatccagagggtatctaactctgcgggcatagcttctttcttttccccactctccttcactctatctctccttgatgtttctgtgatttttagattgccgtcaaaaacatcaaacaatagaatactattggaaatcactattttatcttgaaatcatgtgcagaaaggtgcattcagtgtagcagcaaaaactggagt

SEQ ID NO: 75204 - DNA, 909 bp, Carica papaya
  Intron number 1 from transcript evm.model.supercontig_96.3 9 (locus evm.TU.supercontig_96.39) derived from phytozome v7.0 (chr-ID supercontig_96; pos 573963 to 574871 reverse strand)
attattgtgtgtgtgtgtatatatatatatatacactttatttgtaattagattgattaaaattattgatatattagtttcatatataaataactttttattttttaaaataaatgtatatataaactaaatttatatatcttatataaccaggtacagattttctatattagaaaatcttatattattattaatcagaaaaatatatagaaggagagagagaatctctcgtaagataaagaaaaatcaaaaatataattatttaattattttttaatatgtttacactatattttatattttttttaagagatattaatgttttttttcttcattattaatgcaagacagtaggaatctaatctcattaacagttgcgttccctgtactcgtcttcatgatcctaataactatttttgacttattttatttgtttttgtctctttatatatgtgtgtgtatatatatgtatgtacaagatatttatatattttttgagaaaaaattgatttaaataaatttattatacactacaaggtaatcccgccattgatgccaagaagctatcttcaatttctctcctccattcctaaattttattgtaaacctttttaactttgtacaaaaatatagtgaaacgattttattaacaaaacgatctataaatatacataaaaaaatcgtataactttccaacctgttctatcaaggagtccaacaaaaaccctttcccatgtacatatatactgtttgattctttattattcttgaagtctatattttctgcagtttgaaaaaatatatacatttttttaatgtacagagctaaatatgatgccatttaaacttagtttccttcaactttttattgcaggcagttgtggtggtgtcgcttcctaccattataat

SEQ ID NO: 75205 - DNA, 154 bp, Carica papaya
  Intron number 2 from transcript evm.model.supercontig_169. 5 (locus evm.TU.supercontig_169.5) derived from phytozome v7.0 (chr-ID supercontig_169; pos 151739 to 151892 reverse strand)
aaaggtttatcgtcttttttcgttctacgataagaagaggataaattattgatttagaaatatattgtttcgcgcattccattttgtttttgatttgaagcattcttctgtgtcactagaggaagtttcagtgaagcaattgaccgactacagg

SEQ ID NO: 75206 - DNA, 905 bp, Carica papaya
  Intron number 1 from transcript evm.model.supercontig_209. 34 (locus evm.TU.supercontig_209.34) derived from phytozom e v7.0 (chr-ID supercontig_209; pos 160167 to 161071)
agggctaatcagcgtttggtttctctctaccttaggtgtgtttcttgacgtttttaaactttcttctgctttaacttgttttatttgatgatggttcgttcatgcttccttggaataagtaatcgtggtggttgaatactcgtgattagtttatatatggttcatttgatttgagttttatgattggaatttgtgaggaggctttttgggtttcagtctcttttcctgatttattactttaacaacatagtgggagcgagataagcttggaattacaatggtattctcattttatcttttaattaagtttggatttctgacaccttgctatctaggtagtaatcagaaatatatcttgaattcgaagttgctttaatcctcaatcaaacacgaaaactataaccatgattcgtatattaaggattttctagtaactatggtaaaagaatttaaccaaagagttgcattaaatatagcttaagttcttatttcatacatatttctatattttttgctacatgttttgattgttccttatgttgattataatctgattggctgctatgcagttttcgcgctttctttgttattttagatttatatggatgcgttaatacatttccaagggtcaacagtgtcttcatctactattagggtttgtttttcctatttttggatcaaaaccagtagactctagttttccttccttggttttaagtttcatgagtcatccagttttgctcgatatttttttgttttccatttcatttgtctggttatggtagttttgttcatttagctacatggattccttgttagtgttctttctatttaaaaattgtttcattactacgtattagaatccttttcaaatggtttctttatcaggttagggcaggctgaaa

SEQ ID NO: 75207 - DNA, 506 bp, Carica papaya
  Intron number 1 from transcript evm.model.supercontig_343. 2 (locus evm.TU.supercontig_343.2) derived from phytozome v7.0 (chr-ID supercontig_343; pos 9741 to 10246 reverse st rand)
gaatcgtctggtattgactcttcatctctttgtatctatagctctgaataattttaggattgaagttaggtttcgtcgtaggatgtttctgtattacgtctgtacgattttagactgtctcttcttcttttccgagtaattttgttttgtttcgacaattctctagtgtgtctgtggttggatttagtattttaggaggatacactcattgcttgatcataatgtatgtggtatatgtgtattcagagctatcctgatgcagcttgtttgtgaaaaaaattgttttgattgctttctggcatggggaatataattttttttttaaagaaatggagctcagtgggaagtcttaatcgattgctgtattgttatcattctttgtctatacataccccaataaggttctcgggaagcatttatattggacatcttcttattatacattttgattattgttcttcttcttttgtggatatttgttagctcggctttgaactctgaaacaa

SEQ ID NO: 75208 - DNA, 774 bp, Carica papaya
  Intron number 1 from transcript evm.model.supercontig_94.8 (locus evm.TU.supercontig_94.8) derived from phytozome v7 .0 (chr-ID supercontig_94; pos 191758 to 192531 reverse st rand)
atctaacccgggtatgtcttttgctcttcaagttaaattatcaagcagaaaaataaccacaacaataaagtttattaggcttgttccagttagattttgttatatcttggcatgcatttttcttactttttctttcgaaatttatgggggtgcaaaactatttcatagcaggtcaaagatttcttaagagctggtttattctgccagtttgaaaatcttatggttgagttgaatatgtgtaggtttaattaatttaggaattttaatacataagagtaagaattcaaaagtagcaagtggctttcctcagtttatagtcatatcatgttcatgattcttatgtctggtttcagcaaaaataaaaaataaaagactattcagattattcttgttataatcctttcccccagctgaactttctccttctgcctcctgattatgctagtgatgtttccgtttaagtaaattaagaagtttgtaatgtgctttactttcacctttaaaaagaattgtgaaatatctccaacaacatcatcttagcgctgttattagttgatattttcagaatgaccagaagttggaattaccgttggctaaatttagcaagctgtgtgagttgggaaaaaatatgtccatattagtttattctggttgcatggaaaatactgttcctttttgctttgcccagataatttatctggtaaatagacagccagtttgctgattgttcggtgctgatttcagggtgagaagctcctgggaagtcttggtggc

SEQ ID NO: 75209 - DNA, 342 bp, Carica papaya
  Intron number 1 from transcript evm.model.supercontig_808. 1 (locus evm.TU.supercontig_808.1) derived from phytozome v7.0 (chr-ID supercontig_808; pos 2157 to 2498)
gcttgatctagataaaaaggtatgttgtgttctcctctactcgccatccttctcaacctgaaaatttagtttactcttcaggcctcaagcatctcaaattttttacccattcctcaattacttgtagtttattaagaaaagagtaatggttcagtaagaaaaaattatttttgaacaatttgaatgaaaaaacttttatctgagcctttgtgtaattgcattaggttttaacataagaaatcaaatcatgtataactcaagtatcttgtacatactagccgactcaatggtagcattaacttaccaggtcaattcatacccaacagttagagggtttacagc

SEQ ID NO: 75210 - DNA, 359 bp, Carica papaya
  Intron number 1 from transcript evm.model.supercontig_21.1 07 (locus evm.TU.supercontig_21.107) derived from phytozom e v7.0 (chr-ID supercontig_21; pos 1286057 to 1286415)
gcaggagcgtattctgacccctactctacttgcaggtattcatcttcctctctctctctctctctctctctctctctctcctgtatttgattttttgttataatcttccgctttatctacttgtttggaaactgaaacaaaatgagtaaattacatattggggctctaggttgtgtcttggttttttcatagagaagatactcaatatagctaaataattatattaccacttgattgttcatacaatgtttgaccaaatatggggtataaagaattcttttctggatgttgacgaagagttcggatgctggttttgttggacagggattgctggtggaggcgttggattaatatctaag

SEQ ID NO: 75211 - DNA, 606 bp, Carica papaya
  Intron number 1 from transcript evm.model.supercontig_50.1 68 (locus evm.TU.supercontig_50.168) derived from phytozom e v7.0 (chr-ID supercontig_50; pos 1566751 to 1567356 reve rse strand)
acactttttgaaggagacgttatattaacaggtattgacttttttggtttttaccattttcttgttatagattgaataataaattcaggtttctgataatacaagttcttgagacatctgacacaagggaaactgtattacctttttgcctactttcctttctgatgtacgaggttctttctgaggtttgattgcataaatgtaggacttgaacttaattatagatgtacttaagataaaatataggcaaatagcttctactgccttatattgtgatattacagatgaacctcttcatcattccatccgtgtggtttggagtagagtgcagattcaggctctagcataccttttttttttgtttttttgaagagagcattcctttcttcataagccttaattttttttctttctttggcatctgtttgaccttactgttacaccagttaataaatagtattttgtagccactggttttcttcaccttcctgtttaaaattactgttagatgacttcgtggttgtacttggattcagtttttttggattaacttatatcatggttttggtaggcactccggaaggtgttggccctgtgaaagtaggc

SEQ ID NO: 75212 - DNA, 598 bp, Carica papaya
  Intron number 1 from transcript evm.model.supercontig_160. 8 (locus evm.TU.supercontig_160.8) derived from phytozome v7.0 (chr-ID supercontig_160; pos 210205 to 210802)
gcattcaggtatccctcactttccttcgatccctctttcctgtttaagttgttctcgtgctgttcatgccttttggtttggacgttgattgttttatctgcaattcctctgtaatttttcttcttcggtattggattctggcggttttggtgtcatgtggttattagctctgcaatttgatcagacaatcagatccaggtccggaacctctatgagatgataacattcctgatgttattattctctcaaatcttcagttaaatgttcagatctgcataaactttggtttgatattcttgtaaaactgatgttctgatttctcttgactataaatgttaatttattttttatgatatgcagtcgggttttttttttccccgatttttatgtttcttgtttgagtttgactccatgtggggaaaattgatatcatgtgctgtctcgacattacgttttgttcttgttctggttggtctttactgatatgctgcatttgaattattaacaaattattacagctttaatgttaaatatattctagatactatatttttgtcttaatcacttctaatcgtgttcctcttctctgttcagcctg

SEQ ID NO: 75213 - DNA, 666 bp, Carica papaya
  Intron number 2 from transcript evm.model.supercontig_75.1 24 (locus evm.TU.supercontig_75.124) derived from phytozom e v7.0 (chr-ID supercontig_75; pos 1193141 to 1193806 reve rse strand)
aacagagaaagaaccttattgacagaagtattcaggtgagaaacttttgatgcatgaagtacgcaaagttttcggaatttatgtggtgctatggttttagggaacattatataaagggtaacttcgaattagtctcatggttagtgagctccatgaccataaaattggacaattcattgcccaattctggttaatttgttcatttgatgcttttttatagcaagcttactctattcttgttgtttgaaaattagtgagtcatacttgtaagttagtttgtggtaagtgcatttctcaatcgggcaaaatcaggtccaagttctctttttcgacatcacttccaatgatcaaaaaatgagaaaaaaaaatagttgagtagtggaggaagtttgtcaagttatagatcaaaacccaattatatcttttgaggaaattgttggatctgtcaccatcgtgacagctaacattgatggtgaacttttacatggccaaggaaattgttagtttcatcatgtgtttcagcaaataatcttctatagctgtattgtttgtttctgtcagtaattttattatgtttcgcttataaatttactcgtctttgggtcaatggcatttggttggttgactgaaccttggtgctttgatctcagagatacggaaaaatag

SEQ ID NO: 75214 - DNA, 481 bp, Carica papaya
  Intron number 1 from transcript evm.model.supercontig_75.1 24 (locus evm.TU.supercontig_75.124) derived from phytozom e v7.0 (chr-ID supercontig_75; pos 1193879 to 1194359 reve rse strand)
aaggtgcctctgttatcatctcctctcgaaagcaggttctcaatctactatttagaaacttttctggtttatgaaattttgctctgattaggtttttgctgtttggctggtgagaaaatgttgagaggaaatgggtgaaacaagaattttaggattttactgatctaaacatctttttctggagatttgagggttacatttacctgtgcttatgagattttgcttcaattcgagttcaatctgttttgttggttggaaagtatgggttctttgattaagctttgaacgtatatattcaatatgactccaaattgtttgtttctttctagggttttctgtaagtatgaatcattatctaatatacgaagtttgctagctgaactgacacgatatcttcagtggaatgtgattggtttagatgtttcatttttgcccgtaaaagttttgggataaaatttttatgtggtgcagaaaaacgttg

SEQ ID NO: 75215 - DNA, 836 bp, Carica papaya
  Intron number 1 from transcript evm.TU.contig_32569.1 (loc us evm.TU.contig_32569) derived from phytozome v7.0 (chr-I D contig_32569; pos 320 to 1155)
atactgtctcccacacggtatgtatgtatgtattatatgtatataaatttatgttaaggaaaaaaaagattactaattttactcttaccaaattctgttaaaacaaaattaactacatatattagggtaaacttgacatactaccattttattaactagtaaatttagttcctaacattgtttgatctcctaactatccagttttcttctactttctaacgggaaaaaaaataattatttcatatttgaatactttaaagaacagtatgaaaaaataattttgcctaactaattaaatttatagtatgttaccactattaagcctattttttgttgttattaatttaataaattagtcaaatttattctttttgactattgttctaaagttgatatgataatgaagcgggtatagaatgaatttttgttaaaatcaaacttatcttagtataaaatacattattctgaaacgactttaaacttttgacaggtttattagaaaataattttatttgcactgtgcaaatttttggtgaaacctgtcccgttctgtttaggttaatggatatatctcaataaaataaaaattgtgagcttgtgaataatttgtatagaggcctcaatcaatcaatttcttttgacataatcttgtcacacatatgtaacattattagtgaataacttatgctccatttctaacatctcttaacactctaaattcataatttcttaaccttaaaaaattattaatcgtaaaagaaattaattttttggcaccttctactgtgtttatatatatagaaagagcaagagagaggacacgtaacatcagctgt

SEQ ID NO: 75216 - DNA, 480 bp, Carica papaya
  Intron number 2 from transcript evm.model.supercontig_248. 5 (locus evm.TU.supercontig_248.5) derived from phytozome v7.0 (chr-ID supercontig_248; pos 165861 to 166340 reverse strand)
tcttctccatctacaacagcattctctcctaccaggtactgggaatcaaattttctttttgatacagtaaatgccctgcacaagggcttgtacccaagttccttaggaataggaaactggtgctgagcactttggccatgtgcctcgtctatattaggcattaggtttaaataacaataatcaccttatgcgcccgtatgttattctatgagttgctacatgttcaaagatttgtgtaagaaatcacttacaagctgatgttacggtatagatgaatggtccgtgttagttaaattacttaattttttcagtcaacattaattgtgccatcaatttgtataaaagaatgtcctaaaagtctttgtatgttcagcgttttttgttttatttatgttcttttcaagtggctgagtaaaggatatgtacaatttcagagaatattctgtttttgctttcttaggcatcaaatagagggagaat

SEQ ID NO: 75217 - DNA, 782 bp, Carica papaya
  Intron number 1 from transcript evm.model.supercontig_640. 1 (locus evm.TU.supercontig_640.1) derived from phytozome v7.0 (chr-ID supercontig_640; pos 2582 to 3363)
ctcatcatccatttgcattctcttcttggcaacaggtgtttcttttttttcttttccatctctttctcattaaccaaaaagtgtttttgtcatattcatggctggttaagtagttaattgatttaatccttggcattatcaattgaatggtgcatagacttagttactgagtactctatattaatggaatatgtaacactgacaaacttgtcattgatggaaaaatcagtcgggcacttgtctttgaacatatacatacatatatatatatgtatatgagtgttatgggtcaaataattcaaacttgtcaacatttaaaatcattattattagcatttaaaaacatttacactcaatctttgaaacctgttacggcttggatgctttgcatttcgacaatccttaaaatgaatttttactgaacaaattattctttcatctcaaatatatccctttaagttttttaattaccatagatttaagtttgtgaatcgtatatagctatagtgagctatatatatacttcaccagttttactctcaactagcaatccgtcttttgtttataaatagtattattgtttctgaattcaagataattaatcatttcttggatttaaattgatgaaacatccatgcgaagcatgcatgcatgttatatatatatatatacatatacatacatatatatgttaaccctcaactatctatcaaatactcaaactaaagaagtaaataaacatttcaggtggtcacaaattgctgctcgccttccaggaagga

SEQ ID NO: 75218 - DNA, 472 bp, Carica papaya
  Intron number 3 from transcript evm.model.supercontig_30.1 40 (locus evm.TU.supercontig_30.140) derived from phytozom e v7.0 (chr-ID supercontig_30; pos 1832505 to 1832976 reve rse strand)
attagagctgcggcaaaggtaattcagtattatacatgccaatcttccgctaatttttcaaaaaataaatatactacgcacttcttgtcacaactaaaactcccacttttcaagatataacttgtcgtatcatgacattgtaccctccccagtcagttaatgactttaatcattgctgaaattgataagaaaatgcagttatctcagctggctgaatgtgggagtttgatgttaaatagggcccaacttaagtatcagcagttctaatgctcccatgcttgagctttaactagtggttgcaagcttcttgctttgatttgaaatgatttggcttacagctgaaaaaggaccatttgctgcttcttatgctagtgttgttagatgacaaacataatgttaattcacatttaggcatcctccttttgtcacttgagattctaaatggcaagtttgtgttaacagaaccacaggg

SEQ ID NO: 75219 - DNA, 1015 bp, Carica papaya
  Intron number 1 from transcript evm.model.supercontig_441. 5 (locus evm.TU.supercontig_441.5) derived from phytozome v7.0 (chr-ID supercontig_441; pos 32445 to 33459)
gacccggatattgctctctcctacatcgtaagcgctttcttcttcagtgctccaagttgttttcataatttgcctttggattttacattcaaacgtgctatacactgttgttttttttttttttttttacttgtggcgtttcttagatccaagtctggaggtattagttggattgagttctattaagcttgtgggctttgttacttacagtttgattgattctagtatcgaattatctgtccgaacaaaaaatagtatatctgtttaaaatggaagctttgttaggacttgaattgttctgtgactttagtttgattgacctgaagtttcctgtttagtgtggctggaaaagacaaagctgttgagaatgtccacttgaagtgcaatcctctactttgtatgttttgaaaataattatttagcaatcggaagttttagcactagatttcattttggttagtttaatgccggggatttcataaagcatattgcgataatttaagatgttgattgtgtgttcttcgctctttgcgtagagagacattgcaaaattttgtgatataatgtggactgacgagcttcagaaatggaagttttgaattcattgctttaactttccaaaatttgagaacatagaaatgggtattgagtttattactatacctttttatctatatatatataaaaaaaaaaaaaaaaaaaagaaatgggtattgagcgtggcagttcacgcgttttaagttcccatatataattggctcctggttcacgtattttaagttccgacacataattggctccaggttcacgaattctaagttctggtacacaattggctccaggaacaattgcagctaacattttcatggaacgatatcataaacacactagatatctcctgacatctttattcactggttttagtttctggatgattgttcttataacactttatgtcctgtacattttgtttttcttttagtaactagtatttttttgtgacccttttaaaagg

SEQ ID NO: 75220 - DNA, 482 bp, Carica papaya
  Intron number 2 from transcript evm.model.supercontig_49.8 1 (locus evm.TU.supercontig_49.81) derived from phytozome v7.0 (chr-ID supercontig_49; pos 541349 to 541830)
aaggccagttattgtggctggttgccagtctgtggtgactggctgttttggtgatggtaggagatggcaatgaaggctaccctcttagatttttcttattttgataatgaaagccgaattgggtatataaaagaatttaggattttcttaatctaaagctttgatatcatgtgaatgaattcattatatcgtttcttgaatattaacaccctatatatacaagtgaatagcaataacgaaaggaaacattattaatcataaatattaccgagacttgggataaatgactagtatattatttactctaatgaagtcctaatttgtacttcttaacagaaatgataatatgagagatcatattcaatgtgacagagtatattagtcaggcttgaagaaattaattgcatattataacttttattcttgaatttgtgctgaaaaaagactctttgtttgcagttcttttataccagtccgttggc

SEQ ID NO: 75221 - DNA, 597 bp, Carica papaya
  Intron number 3 from transcript evm.model.supercontig_49.8 1 (locus evm.TU.supercontig_49.81) derived from phytozome v7.0 (chr-ID supercontig_49; pos 541883 to 542479)
caagccaaggaacagagacagtaagtcaactatcatgagcaatagtgaataaatatattgatccccaaccttgaggaaaaagaaataataaacaccatacgagctaacacctacacctaatgttaataccaccctttgacataatttatctttcctgcgtaatgtacaacattgatttgaaaatttttctttagctaaggaatcatgctcggcatgtctaattgctttagatcaaaaatgaatatgatatattatcatgtgagtttaataatgagaacagagaccaaaatgagatgggaaatcatgtctgtacaaaccagatatagatttgtacttactacaagatttagcttgatgacaggaccatcttttttcttttcttcctaattgcagttctttcatttcagttgaattctactgcaaatttcttctctgggcttggctcttagcattgcattttctgtctcaagatttttgttcttcactcatcaattagtcaaattttatttctgtttgagttgttatttttaatttactaaattggtttccacattcttattttattatgtcactaatttttcaaataggcaaaggaga

SEQ ID NO: 75222 - DNA, 896 bp, Carica papaya
  Intron number 1 from transcript evm.model.supercontig_160. 11 (locus evm.TU.supercontig_160.11) derived from phytozom e v7.0 (chr-ID supercontig_160; pos 286082 to 286977)
agctttttgcagcctaaactcgaaagattagctaggtaattaatagttatttaatattaattaactctaacttaccgactcaacgctgtttctctctaacctctctttcgctctgagaatcgtatgattttgatgatagctggttttatgctgtttatgattcgttgactgcaaattattcacgagattttttggtgttaagatcgtccagtttttattttatttttttaaagaaagaaaaaggtagcaacggaggttgattttttcttctttgttgggaggggtggggggtggtgggggaatgagcagcatgtgggatttttggccacgtattctttaccggaatgttttacagctttacacctagatttcttttggagaaaatttgggagatgtcaatttaccgacacttaaagtcgctatcattaggctgtcaagaaatataagccaaaaagaaaattctggaacattttcaccaatctttcttgctttgtgttggtcaaaagcattctctcttctgactcatacgcaactgcttagttctagaaactgctgttccatttcaaatcattttctgtgtattctggaaactgtcttaatctcagtgtttggtagcggagatgtgattttctttcgtggtatccgaattcttgtaacgtaaaggtgaagtagaggactgtttgtggctgtcatatttagccgcttgacctactcaaggttaactaataactaagagttaattagcttattcttggttgactaagttatcccgagactacctttgttgcatatagattcagtcccatcttttgaattgtattgttatctgagacgtggtgaaaaatggttgtaatgatgcaggaataaggggatattatttgttgccattgatcaaa

SEQ ID NO: 75223 - DNA, 891 bp, Carica papaya
  Intron number 1 from transcript evm.model.supercontig_62.8 9 (locus evm.TU.supercontig_62.89) derived from phytozome v7.0 (chr-ID supercontig_62; pos 598332 to 599222)
gtgagagtcacatcatccaacggcggagggtaagcatttccgggatttgatccgccgatactggttcccaggctaatgttggcggaaacgttctttctttatttccgattcgcgcctaccctttgttatgttgaagccatggctgaggcaattaaatgcattctggacacccttcgttaaatttcctactgttttatgtagctactgcattaatattgcatgtttttttttttaaataatcattttagtaattcgctttgaagaaattagaaagaaaatatatatttttttttaattaaaggatttatttattatatgcaatgaattttctctaactttataaatatatatatatacaaagcttaagtgtacaatttatttgaatttttaaggtatattttataaataacaccatgtttatattaaaattaaaaatttagagaatttattcgtaaatttataattaattcaattaaaaaaataaatattattaaaagggtcggtgttgaatttaattttaaattatgtaaaaatcaacaattaaaatataattatgtaatttgctaattctacatcctttttccctggagagttcatcaatcagtcggtaggtttccaaaaatccagaaatactccacgtggaagtcaatatctggaagccgacaagcggatcgtttctggtcgtaatctcccgctgtcctgctcacagccatatctggagcttccccattggtttattcgccaatccacactcttgtttgcgtcttcgcgcagtaaccattttttggattctttctgatttgtattttgactataaccagttttttttttgttaatttttcctcatcttctttagggtctttctggagatatttctggagacagaggagg

SEQ ID NO: 75224 - DNA, 876 bp, Carica papaya
  Intron number 1 from transcript evm.model.supercontig_284. 7 (locus evm.TU.supercontig_284.7) derived from phytozome v7.0 (chr-ID supercontig_284; pos 61988 to 62863 reverse s trand)
aatcgcgaagcaaggtagttatcgaaatcttcggttttccaagttcagcttatgagcagggttttaccagggtttaaggttctatctaaatttgtcccaaatcattaatcttgaatccttaatgctttttagttcattatacgtgttttcttggttagatattggttatatgtctgaacttttatacagggaatcgaaatttatgcttttggatgtttttgaatttcacttataattttcttggggtttcctacatttttcataattgataagatgcttaaagaactcgaacatgtaaataaactaatatagcttataaactcggattgcaaacttagataacttatttataaaaagactttatcaacttatacactcttaaagagtttagaaactctataatctataactcctatatttcctacattttaaggcgagctctaactttattggattggaaaggaaactcacgggaaaaaaatttggataaattcctgtttaatgtctcaccgttgataaacatgctatctggtttgatctgactgcagtggaaaggtttcagttagttagctaaaacataaacattaaattgacaagtgggctaggaacctgctcctgctgaattttgtttttggacccagattgtttgacagtcccaataatttctctctttgtttgctgctaattagaaatttagacagacttcggatattgttggacggttttgttgctatcacaaacaagatttttttccccttctatttgactaatatctcattttctgtgcctatttggtttgggatgtgaaatttaccataaatgttaatctttttcactccaggttgttgcgagtcaggtgtccctgttccaccattc

SEQ ID NO: 75225 - DNA, 656 bp, Carica papaya
  Intron number 3 from transcript evm.model.supercontig_22.8 0 (locus evm.TU.supercontig_22.80) derived from phytozome v7.0 (chr-ID supercontig_22; pos 2008797 to 2009452 revers e strand)
tctgattctgtgactgctaaccaacaagtacgcggtctcttgcaaggaagttggattagcacttcaccactctcatcttttttgggagaatatttgctgaaattctattcgttagtaaaaagtcaaagccacatttcgctggtgttagctattgcttttgcagtaatcttacttatgcaggtaaacaactatcaattaattttcctgcttagtagcctttattcatgtttgttcagctcaccaactttttacgggatgtggttgcttagctcttctatatggtatttattaattgctcttcttattttgatagcagtaaatatattcttaaaatctcataggcgccagccaatttcactattgttttctgaaattttcattgttttcttcacactgcctctcaattaatttgaagtttgatcatattctatactaaaagttttccaagattttctctttgttaccccaaaaaaagactaagacaagtcaaattggtcctttcttttatttagtatgtcaaattgttccaatgttgacacctggctgtagtattatatcatccatctccttttcatcaaaagagctcctttcttttttgctggttcgtatcacacccattagacaaggaggggtgcacagctgagggaagtaaaaga

SEQ ID NO: 75226 - DNA, 881 bp, Carica papaya
  Intron number 1 from transcript evm.model.supercontig_46.1 14 (locus evm.TU.supercontig_46.114) derived from phytozom e v7.0 (chr-ID supercontig_46; pos 1004631 to 1005511)
gtcaaggagctctgcagaaactttcagcgcggcaggtactttcttcttcctcttcttcttcgacaagagctgcttctgctactactactcttaattcctaatgcaatatgtaattttagataaattttttttctctttgttcatttcctttgggattgagtttgttgaatggacttctaatttagggttttacaacacgaacatactgcttcaagtttgcttctacgagctctttgagtttcatcctatcaattatcgtagtactatttaaattcatgtcttagacatattcaaatatacttttctttgttatatacttggattgagagttaatttcataattcttgaatcttgagctttgagagatgatattaaataagtctgatttttaaggtgtcgagtgaccttaagtccctctttaactttccgatgaagggaactggatatgttcatcgatgtcttctgttagttgtgcccagaatgcactggtagaagaagatgcaacactaatgacctattctataaagtaaaatttgaaccaaattctaccttactgtatttgattcactattgaaaacctttagtagttaatggaattggaacttccttattaatgtaggagaggtatgaatcccaatttctctgtgaatgattacactgggatcttgtctttattattgtctttgttttattttttccagttttccaaattgtgttgatatagagatattatattttgtgagatcttgctgctggatttactgtattattggtttaccttgtttctttttgcaaattgcatttttggtttatgtaattgccactgcacactttttcttttcaagtttaatatcatttcaattcttcttccagctgtcagt

SEQ ID NO: 75227 - DNA, 288 bp, Carica papaya
  Intron number 3 from transcript evm.model.supercontig_6.21 4 (locus evm.TU.supercontig_6.214) derived from phytozome v7.0 (chr-ID supercontig_6; pos 1698642 to 1698929)
gttttcatcttcgttttgatccgtggtctcaggtattttattttcttctacatgtttaatctattgcttttctttatttcggatttcactgtttaagaagtttcaatatttagtttctcccggtgcatgaaactgtaagtttgagtggttcatcctctctgttttatgattgcagcaattagtctttattgtgtatgtatgacctaatgtccatgcctgctgttaatatgctttgttttttctaacttcgaattctgcattagaggttacgccttattgaagtttttg

SEQ ID NO: 75228 - DNA, 874 bp, Carica papaya
  Intron number 1 from transcript evm.model.supercontig_252. 20 (locus evm.TU.supercontig_252.20) derived from phytozom e v7.0 (chr-ID supercontig_252; pos 151423 to 152296)
cctcctcctaagggtactaatttttattgattgctatttttttgcttcttgtttattttattgtattccgtctccgcattggggtaccttcttttcatgtctgttatagttttcatgcgcttcttgttccgatcgtttttcctttcgctcgtctggttttagagaaaatgaatagaaacaattttaattttgttaagtgtagcgagatttgcatgttttattgggtgaaagaatgttctacttcccttccatatcttagctaccaaacgaaacttaatgttgctatccttgtatagaatcagcagaagtatgccttccagatacctttcttgattcgttgatgatttatatgcttaaattactctagtttaattggttataatttttcctaagcagtataaacttgctgtttttagtatctgcctaaatcaaacaattttgtaagtccactctgctggtggtataattgggatgtaataaatatggtgaaaaacttgagtaatactgcttccatatggtcattgaggatcatgctaatgcaatttacaaataattacgggcagaagttgatccatctgtactgtatgtctggtacctgtctcatcgaattgtagataatcaattagggaacgtaaaatcattatgtcctatgtgttgttttatctgttaaggattttgctaattagcggactttttgcttgtcaccggatgtcatttcctatattttcttctttccttctttccaggatagaagttcctttgttggcatgttgttttgattatgttaatagtgtattgaataccttttcttaattgtattggttggtgtactcgtgcaggtgacagttccaaaaaggctgacccaaaggcacag

SEQ ID NO: 75229 - DNA, 686 bp, Carica papaya
  Intron number 1 from transcript evm.model.supercontig_489. 1 (locus evm.TU.supercontig_489.1) derived from phytozome v7.0 (chr-ID supercontig_489; pos 7790 to 8475 reverse str and)
ttcttacatttctcgtggacgcgtcttaactccaggtattccgtcttatcgtctttttatctcgtttaccaatttttgtatgtgggtcttctttatttattgtggaaaatcttttgttgaaggcttatgtctggttgtttgtggatgttgttttctttgtattctgtcatctgctgctataagtgggttgttttttttttttttttaattttgttgttattttgcttgtgaggtatttagttgggcttatttttatagacgcaggcaactaaccgatgaagagttcaaaagctatttgctttgtaatagcatgttttaaaagcgaaagctagtgagatattttggttttggagagtttgtgcatagaataagtgaatgataatattactccaactttgaaatattttaagtcttattaatttttaaaatttgtattaattaaataacaatatatgattattattacacttccaaccaaaaagtttaacacttgaacttgtatagttttaatccaatgaccctttttttgaagtaacaagaattcgcctttactatgcttgcgcatgtacttgtattactgtttgtatagataagcgtacttctgactattacatctgtggatgtgcatttttgaagacttacaagtagaagttttgtatgtttctaagtacatcctgacgaagaag

SEQ ID NO: 75230 - DNA, 950 bp, Carica papaya
  Intron number 1 from transcript evm.model.supercontig_2.29 5 (locus evm.TU.supercontig_2.295) derived from phytozome v7.0 (chr-ID supercontig_2; pos 3576432 to 3577381 reverse strand)
taaaggttcgtatatagcatcacgttcctcccaaaacctttttctgttcttctcattaatctctctctgtcttctttatttaatcttttgtctgctgggcgatatcttcttcttaaagctcattgtttggtgtttggccatggagttttagctgttggtttattttcgtgcttgtaagttctgtaagttctcctctatcttccaatgacatgtaaacacaaattttttgtcttccaatatttgacgtctctgtatattcatactttcagtaaatgtaccgagagaatttataccttaatactctccatatctatatattcttccctgattgttctctggttctaggcctcttctgtcaagttggcacttggctatcacgccgtgatagtgaatgtctgtgcctgtgtgaaaataagaccacggaactggtcttattagagagagagacaagtgtttagtgatctataattcgaatcatcacatgataatcatctgtgccattattatttgtgcatagtcccaatcaagtattttgttgaaaaaatttaaaaaaaaaggtatttttttttatcttagtttttgtcgatgacgatgttgttgctgtgcatttattcttctcctttatgaacttgcaacacgtgtgaaccaaatagtgagagaatttttaccaccctcttggctggccatgcttttcgaaaaagattttgagaatcttttatttttctcttcgaaaggaacgtgttaatcatgcaatggcatgcatccgaggtgacaaaatctaaccattggccaatcaaatttgacttttcactgtcatattagttttcttctcagtaaatgttattgggtcttgccatgtttagctgttttagaaacttgatatggacttgacaatgaagcattacagttctgttttttttttttttttttatcagtgacgactgcagtta

SEQ ID NO: 75231 - DNA, 557 bp, Carica papaya
  Intron number 1 from transcript evm.model.supercontig_64.1 64 (locus evm.TU.supercontig_64.164) derived from phytozom e v7.0 (chr-ID supercontig_64; pos 1169028 to 1169584 reve rse strand)
ataggttagctaatttactgatcgtatcactgagctaagctaggaggaatttccggctctacaatgaggaagtggacgatcccgtccgttctgtttctcctctgtcttctctttctcctaccggatcaaggtgcgttagggttcttcttgttcgtttatttagtgtaaaattgtatgttcttcttcttcctcatttttcttataataactcaaagccggatgcgctccgcatttacacaggaacttgcagtagatgtagtttcaatttcatgattcaaatctctactagcattagtaatctgttgctgtttttaaattgaaatgatcatttgtattttcatttttgttattttctaaaaccgtcttaagttaagatccgaatctctgttcggatatgccgatacttttgagggcattgcgtttctttaattttgatttcggtttgatttaaggtgcaaatctcttaataaagtgattagaattttaagatttttttgctgcttattgataagtttgctatggaatctatggttatgcagggagaaagttacaagcaa

SEQ ID NO: 75232 - DNA, 761 bp, Carica papaya
  Intron number 3 from transcript evm.model.supercontig_30.1 25 (locus evm.TU.supercontig_30.125) derived from phytozom e v7.0 (chr-ID supercontig_30; pos 1669672 to 1670432)
tcacctttccacctctcagtgctggcaatcttctggtttctctctctctctctccttctcctttctcacttaactattcactacatatataattaagtatatgttagggttttccggggattgtgtgggctcatgggtatgtcccacgttgccattttgcattttgtccttactgctctgtttttcatacttggggctgcgtgtaaacctattacttcttcttctctgccacctgcaacttcaaaactttggaaaaattaaagctttctcttctctgtcttcttttcatcttctctttaattaatgtacgcaactctcaactacattttatacgaaggcttttccaacttttttcctatcaaagcatgtgatcgactactttcctcctcttcttttatcttaaaaaatttcattttcccatgtcaaaagcttcattttcttttacccatttgaagttttcattttcccatctcaaaatcttcatcttcttttacccatttgaaaatttcctttcccttttctccatttaatgttctctaagtagtttgttgcgcacattgattatgtacttcatcttgcaattaataaacttttcaatatttaatccatttcccaatttcttctaaacccattatttcgatatacacacacacacacacacacgcacacacatgtaaacccatttggcaatcacggtgatataatcaacattatttgatgaattaggtaaaaggaggtactctgagagcgtcgccaacatt

SEQ ID NO: 75233 - DNA, 836 bp, Carica papaya
  Intron number 1 from transcript evm.model.supercontig_2.34 3 (locus evm.TU.supercontig_2.343) derived from phytozome v7.0 (chr-ID supercontig_2; pos 3990011 to 3990846)
aagaaattaggagtttggatctttcttacttgccggtaatttttcagtttctcctttctcttcctcccctttttaggtttctactgcttttcactgtttggttccccagaaagtttcgccagaaatctctgtttcatgcacttaatacagagtctgtatagctttttgtgctctaccaaattgattatgacatttggtgtgagttgttatcattggttgaatttatttctaatgtgatttggtatatacatagtttggctttttgttggactttccaaaacctgattccgaattcaattttgagtggcaaaaatcaatgtatattaaatgatctttacattaatccctacattttccaatgggggtttctgtatgtgtttctttaagttggttagagtattaatgaagattcctttcctgaagttgcaattttcctaaagaaaagttgcttccaaccattaatggatgtctgtttcgattagtgcataatgatagtaggtaacatagtgtagatttgagtcatattggtgtgtacttcttaagaggttatgttacaatgctcatgtacatgatacctaattaaaaaaaaaacgtagatatttttattacaaaaaaaaaaaagaataaatctctctctgtctctcaagagtcttttagtgagttacatcatccataatagattctggttaaaaatgtgatccctcacttctcggactgaatttggctttcgggaaagtttaaaatcaaattggaacttgtgataaaattggaacctttttctagcagcttaaaaactcgatattctctgcttcttttgcaatacagataaggggaaa

SEQ ID NO: 75234 - DNA, 532 bp, Carica papaya
  Intron number 1 from transcript evm.model.supercontig_189. 34 (locus evm.TU.supercontig_189.34) derived from phytozom e v7.0 (chr-ID supercontig_189; pos 288669 to 289200)
ctttcatcaacaataatttcgtcaaaaggtactaattgaatacttttattttttatgctatatttgaaatgaattaaaaaataatacatatttaatcagtaaagttgtacataatttttgtaaaaaattatgcgagtcatacaagaatgataaaattttcaattgaaatcaaaataatatattccaaatgacatctttaaatgatagaaattaaaattttttgtttcaataacatatgatgttctgataaattgaatttgtctgtttcattctaagtagaattttcatatcttctaatttaaagtgtgagtttaggagtatgtatagttaattagattgttaattgtttatcagcaaattgaattaatgataattgattaagttattacaattaagtaaggctaagaatagagttctcaaaattttagttatggtatgagataaaataaaattcttttctctcatagtatggaatatgtatatatatgtgttcacatagtttacttataatgtattaaaaaaaaaaacacag

SEQ ID NO: 75235 - DNA, 594 bp, Carica papaya
  Intron number 2 from transcript evm.model.supercontig_70.8 5 (locus evm.TU.supercontig_70.85) derived from phytozome v7.0 (chr-ID supercontig_70; pos 556409 to 557002 reverse strand)
atttctatatccgccgtttatatctccgtattcaggtaacttgatgttgttctcatgggttttatgctgaaattaatatatttcgctgttcatattttcatgctgatccgattgaattttgaaatgaaatacatgtttaagtagaatgtatgagaaagaaagggaacgtcttataatcttattatgcgaggacaactgtagaacaggattcagggcagtatacatgcagtataaaggagagttttctttttgactttttaggcttttttttttaaattttgtttttccagtttttggttctattcaccagaagtttctgaaccagtctgatattcttcttcaaacagtagtcttaatctcgtcttctttttttttttctaatgtggattgacatgagtttatcattatatcatctgttacaatccactaattgtttctttaggcaaatggaatataccctgaaatttatccatatttgtacttgcagttttaactaaaattacctttgggattgagattttccactacatgaatgttctcaatctttttactctcacaggattgttttggacgaccaatagctagtgctccgga

SEQ ID NO: 75236 - DNA, 606 bp, Carica papaya
  Intron number 1 from transcript evm.TU.contig_39682.1 (loc us evm.TU.contig_39682) derived from phytozome v7.0 (chr-I D contig_39682; pos 1077 to 1682 reverse strand)
tgctacctagtgttgcaaattactttttggagcgggtaagatcatgcctgaggtttctatggcactcgccttttattaattctaaaaaactaacttacgctttcttatcaaacataatttactttatgttccttgattgtaacttgcttataattatttttgggtgctgaagtttttaatcctttgcatagattcgtcaccgataggttggatgatgagtgttcaagggcacacgactaaattttttagatactgctggaatatattcaaccttttttttaattattattttactgattgattatttggcatgctgcctaatggttgattaatgaaggcaatgaatgatgacctaaggagcagaatatcaatatttccttttagggaatgcttgaaatcttttacagtgaattttggattttgaaatgttattttcttttatgctaaacatttgcttgttgcttacagaggaagcaagtttacttgttattcctaagttgctttgagtgttctgatctcatccctgttagttgctatttggttttatatgaataactcttgaggttcatgtttaatctttgtattgttgctgtactcaggctgttg

SEQ ID NO: 75237 - DNA, 1006 bp, Carica papaya
  Intron number 1 from transcript evm.model.supercontig_183. 14 (locus evm.TU.supercontig_183.14) derived from phytozom e v7.0 (chr-ID supercontig_183; pos 175819 to 176824 rever se strand)
ccatcgagatccgcaattttcttggagaaaaaaaggtgccgtatctttcttttctaggtttagttgttgactgtttacaactcattgaaaggcgtatcttgcattttggagatttgaaactgtttgaatttttgtgtattgagggtttaaagccacatattttattgaatgatcctagcgaaaatgagttaaattaatttactgagataagcaaaactgactatgatcttagtttaagtagattttcatataaattgttcagagacatgattatatactaccttttgatattgattattatatgggtttaatgtgaagtgtgaaaagatgattaagtactgcatctcagagtatgactggaaatgatgctgcatttagagccacatattggttgatgggagtgaattttgatcttagttatatatagagcttgatataaattgtgaagggacatgattatatattgccttttgatgttgattattatatgggtttaacgtgaagtgtaagaagaagatgattatacactgcatcttagagtataactggagatgatgcttcatttagagcccacatattgattgatcctagcgaaaatgagttaaattaatttacaaagataagtaaaactgagtatgatcataatagagtttgttataaattgtgcggagacatgattatatattgccttttgatgctgattattatacgggtttaacgtgaagtgtaagaagaagatgattatatactgcatcttagagtataactggagatgatgcttcatttatactctggagatattgcccacatattgattgatcctagtgaaaatgagttaaattaatttaccaagataagtaaaactgagtatgatcataatagagttgccttttgatattgattatcatatggatttaatgtgaagtgtaaaaagacgatgattatatactgaatcttaagagcataactagagatgatgctgtgacaacaggttcggaaagtggaa

SEQ ID NO: 75238 - DNA, 725 bp, Carica papaya
  Intron number 1 from transcript evm.model.supercontig_1921 .2 (locus evm.TU.supercontig_1921.2) derived from phytozom e v7.0 (chr-ID supercontig_1921; pos 4519 to 5243 reverse strand)
gggtactctgctttttccctttaaaaacaaaatttgagatgttttgcatctgggttttggggattttgtgcttttcggttccattacttttctaattttatgattttgaggatttttttttcatgttagtattaacttgactttactgaccacggattttttttttgggaaaatattgtgaatctgactttcaagaaattgggatttgctggaaaattagcagaaaatggtggcttatttggttgccaattattttctgccccttttgatcagatcactgagttcttccataatagttcatatatagcagttgggttccaaggaaataatctaattaaaatggaaatttagtccatctattaacgtcctctccccaatcccaattgcaagtttaagacttaaacaagatttgttcttggtccttttgcaggagttgtttagttaaatttcatgtttaatgcaggcttttttggtaactccagaaaattgggatagctttctgtcagtagatttatagcttttgatatttttatcagattgctggttctcaccaatgtgaaaaaactaaggggaattcagtcaaacaagtttgacttgcttgtttaaccttcttctaaggcatatttgtaaacctacataaaccctttttgctgcttgatttatctcctgtgtaggaaagtaaaccaagaacatgtctctttatggcaggtacgattattcgggat

SEQ ID NO: 75239 - DNA, 955 bp, Carica papaya
  Intron number 1 from transcript evm.model.supercontig_2.34 8 (locus evm.TU.supercontig_2.348) derived from phytozome v7.0 (chr-ID supercontig_2; pos 4018325 to 4019279)
ttcaaggattccaaggtatgtcatctcgttcctctgttcctacccacacacacacactcacacgcgtaaacaacctcttatactgtattatataactatacatcatatacatatatatgcagtgatggaaccacgatgtttaagggggagggtggttgaggaaaaaacagtgtcaataaatcttaatttgtactttttaagtactataaaaatgttaatcctttttttcaactttttatttcgaacataatgattaaatttcgtatcattttttaattatctttattactaagagttttttttataaatttattcaaaaaaatatatacggaagaaaaactatagaaaaaataagagattggatatgttttttattttgtttaattatattatgtgtttttaattaaaataattagagggataataattaagacgaagttttgttttatttgtgtgtgtatatatgtattcacagcttcaatataaaaataaacgatccagtattttttagaaaaaaaaaaaaaaaaaaaaaagagataaaagaggatgtccctagtatttttccaaataaagtgggagtatttagtaatttgagaaagggaggagggattatttaataattttctaagaaaaaagggctattaatatactactaacactatgcgtgttactttaaagggagagggagtaatattgttgaaatatggtacaattcatatattatttttctaaaataaggcaggattccaaatatgttaagcattaatattatctacatagtttttttttaatataaagtaagctatgtatattattttattttatgatttaattaaataaatatttataattattgaactatgatttgtgaataaataattatttacagtaagttttttttttttttttgtattttgcaggtagtaaattcagagacttttaatctactaatctt

SEQ ID NO: 75240 - DNA, 439 bp, Carica papaya
  Intron number 1 from transcript evm.model.supercontig_83.3 6 (locus evm.TU.supercontig_83.36) derived from phytozome v7.0 (chr-ID supercontig_83; pos 415332 to 415770)
tggggtatctttatgtagtctgtaactccctttttaacatataatttttttttgagagagctactttttaacatacagttaaatattgagtttaaagtcttttaagatttaaatccgtttctcgagattggtttttaaattaaagccaatggagctgtgtcattttctattcctgaataatagaagtcaagacatatattttattggttgaattcttctttaaggggcatactttctttttaccttgggtgcttgttggtgtctaattcgacattgagtttgctattttttcttttacttaaaatagtggctgtaagtgttaatacatttatgcattatggtggattttgtttttgagggaagtttgtctggttgatttggtggttcataactttcattgtgcttgtttcttactatcttgcaggttcagctattgttg

SEQ ID NO: 75241 - DNA, 777 bp, Carica papaya
  Intron number 3 from transcript evm.model.supercontig_30.5 2 (locus evm.TU.supercontig_30.52) derived from phytozome v7.0 (chr-ID supercontig_30; pos 769633 to 770409 reverse strand)
tcggtcttggtttttaggcgattatatttgtgaaggtagatgttgattacatggttgtttactgttaactatgtctgtgtatcaatgtccaacattgtttggtgtcatgagatatatttactttggatatagtcgtgagtatgcatttgtagtcacatatacaactggtactcaatttctgacttaattagctatggttattagtaggttacgcaatttctgttagttattttccgtttgttatttttttgttttgatttgtatcttgtatatgttagaatattcctaaggctagctggtgtcaagctatattgtagcgttgtccttttcgtacatgtgattaatactaacagtaggttgttatgcagcagtatgctaatgagaattatccagaatcctaaatttttctctttactgtctcctctgctcgtccctctcttctgcaattctctaaattcttcacttttctccctcattacttcttctattctactctctcagtctccaaaccaaccatagtaaaccctaatgtgttagactcctgatttcatcccctcttggagccattgttaaatacttttacttctctaaaaagaaaaaagattgaaactgtagctattttacacatgttagttacatatttcaaatcctttatccttatcattgatattcaatgttgtgattatatgttttcataatcttttcaataactaatttcctgtatcaagcagtcaagttgactggatttgtatttcttctcctttttcctatgagcag

SEQ ID NO: 75242 - DNA, 568 bp, Carica papaya
  Intron number 1 from transcript evm.model.supercontig_171. 9 (locus evm.TU.supercontig_171.9) derived from phytozome v7.0 (chr-ID supercontig_171; pos 85206 to 85773)
ctggaaatatcgagcgagagcttcttgctaaacaggtcttggtctcagtaccttatgtactccttttcttattttttattaatatgttcgaaatataattttattttggtgttttgttttcttaattgatgtaaaattggtcgcgatgtgccgattatagaggaatttagttctttttttttggcttttttcatgcggttgattgactaaattttgttgaatttcatattatgaatttgatcgtttttgttcttctgttttctgaatttggtaggttttcttaatgaactaagatctgatacaaattatttgcaggattttgaattttgatggggagttttttttagaggtgtagtttattacttgagaaatatggtggtcttttgaagtacaatacaagtcctctatctgtttcttctcttgattttttttttcaaattttttgtttggggttcttctgatcttgctgattctttttaatttacacttttattttcagaagagaatccaaaatcttacagattcttttcttatgttggtatgcaggttgcattagatataagtgaag

SEQ ID NO: 75243 - DNA, 646 bp, Carica papaya
  Intron number 2 from transcript evm.model.supercontig_171. 9 (locus evm.TU.supercontig_171.9) derived from phytozome v7.0 (chr-ID supercontig_171; pos 85800 to 86445)
atagtggaggagagcaggtattgattcttcaatgtgaattttctcaaattttctagtccctctttgtggcctagctttaatggctttatttgttggaactggaaatttgtttttcatcaaggctgctgtatgtctaggttttaaatagatttgagagataatgaccatgaaagtgatgattttcaagttcttcaaattgttgtgttgtatgaattatgatgctctatttgtaatattttttggagagctaaaagtggtgatcaacggaatagactcttcattcaaacctaattcatgctatgtagttgttgaaatttatagcactacatttcaggtgttctgggttcagtcattcacacttatgagctgttgtttttattttcactttaggaaagatagttctggttctttccttatagtactggtgatcaaaattttactttcatttgccttttaatgattttctttaatagctgatactaacttatttgaaacaacagaaatggatgcccttataaatttgataattttctgttaatgaagcattgtgcaccttaatctttacgctactttttttgtgcctgatctcaaaatagttaacgtttgagcagggaggtattttgtcctatagtcggttgtggggcaa

SEQ ID NO: 75244 - DNA, 383 bp, Carica papaya
  Intron number 1 from transcript evm.model.supercontig_5.11 3 (locus evm.TU.supercontig_5.113) derived from phytozome v7.0 (chr-ID supercontig_5; pos 850457 to 850839)
gatcaacctcgcaagcatcaggtaaccttttcgtctgtaatttgttcttctctttgatccatcaataacagttcttgtagctttttcatcttcctcgttgcttgatttgagttgccgaatggtgctaatcagcatctgtttcgtcaaattctaatcgcccagtcggttttcatatctcggtcatgttagtttctcaagaaaacaagaattttcccactgcccatggacgaagtttcgtctatgtaattttcctgggaacctgaaaattatgaaaaaaaaaaacaaaaattagtcaacccttgtttaattgttcttgatggaaattcttgttggtgatgggttgattaggtatccttgaggggagcaagcgctaaggagatttc

SEQ ID NO: 75245 - DNA, 954 bp, Carica papaya
  Intron number 3 from transcript evm.model.supercontig_7.9 (locus evm.TU.supercontig_7.9) derived from phytozome v7.0 (chr-ID supercontig_7; pos 198251 to 199204)
taaatctgaaactaatattttcctaaatagcctaggtaacatgaaattatatggatgtactaaaatcaaataaatattataaatattttttaacactaaaaacattaaatcttggcttattcctgtcctgcgtcatcatgatatcatatttgaatgtctgtcatgccaatgataattgatgctgaagtcaaggagattttttaaaaaagaaggctgtggaggagtgtcatcgaggcgagttggggtggcttggattaatgtggagatgtaggacagaaaagaagggtcatgggttaggtctgtggaagaaaatattgttgggctggcctagatttaaagaatgctctatatggaagctgggtagaggagataaaatcagattttggctgaagagttgatttccaaggatctttgcaatagcacaatcaagaaatttgctgattgaggaggcgggtcagtaaatgttaatagtaaatgattgggaagtcagagaatatgaagaattgctgcctcttatttctgaaaaacatatcacatcagagctggaccaattcctatggaagctaaatcaaaagggggaattctctgtcaaatccttctatacgcacattgtagaaatgtatatatgtagaaatgtaaatataatatggggtaaattagtattttactaggttgttatgatagctggaaaatgtccactaccattgcaccccgttagattgttagaatatttttcataacctttttttttgtttgttttggccgaatgcctataaattggcatctttgtgcccaataataataacagaggattcttctcttctctcaaactctcaatctttttcatggtattagagccagtctgatccacatttatcatccaaatcaaaccaaatggtcacggatgagtaaacctcttttccacctgaagttcttttaggatcctatcttcca

SEQ ID NO: 75246 - DNA, 726 bp, Carica papaya
  Intron number 1 from transcript evm.model.supercontig_59.9 8 (locus evm.TU.supercontig_59.98) derived from phytozome v7.0 (chr-ID supercontig_59; pos 845837 to 846562)
cttcctcttcccacagtttcgagtcatcaatttctgtacgtgtgcgcttgctttcatcttctgatatttacggtttcctttttactttagttttcagtctgccgattcggttaccatagcttgagtagtgttttagaattctctctctctctctctctctctctctctctctcttttctcgtttaacgtgtttgatgatctgtacatgctttttatctcttgtgcggtagaaattttgattcattttgatttgattagatatagtatcaggtattgctgatttacgtagcttaacataatttatctgtttggtttgctgatcttacgggatgatcttaatcattgaattggttttcttacatgtgatctgaaattcgggtctatacttgctccttggagattgggaacttctggaatgagttaacgttcggattgaattgtgacgtgttctgttttctagcctttatttcctgcatctgacttccagaacatgatattttaccatgaaaatatgtagccactaatatcctttttgctattgctcttcctttttgttttctttgagaaattgttgtttaagttcttttgaggaattgttgtttaagttcttagtggttgtgtacctcaaaatagtttccttttctttcatatactctttttgaattgatttatgttttataatcccaatcaggcatcagtctgtttagccggagacagtgccgcata

SEQ ID NO: 75247 - DNA, 492 bp, Carica papaya
  Intron number 1 from transcript evm.model.supercontig_3.15 6 (locus evm.TU.supercontig_3.156) derived from phytozome v7.0 (chr-ID supercontig_3; pos 1189711 to 1190202)
attgcaggttattgagctgaacacttttcttattataccctctagaatttcataatgtttcaaagtttgttccttgtttgttaattttccccatgtacaatatctggttgcggaattcaatttgttttttgcttacgttttgcaccatgaagtgatcgtcatgggatttcataagcaattatggaaactgctaaggatattggaaaataaaattattagaagttaccttcttcaccccctaacccccaaaaagaaaaagaaaagaactgttacaattggataattcttgcattttcgtatgttcttatcttgataagatgggatttaattagtataatttgtgagatatagttgtccttggctcctagccctgtcgtgaacaaaaatcttctgtttatatgtcttccgtgaaatgtgtttttgcctagtgagattgggagtgagacgtgttagctcataagatgtgttgtttgtttagtaaatctcagctca

SEQ ID NO: 75248 - DNA, 571 bp, Carica papaya
  Intron number 3 from transcript evm.model.supercontig_162. 3 (locus evm.TU.supercontig_162.3) derived from phytozome v7.0 (chr-ID supercontig_162; pos 13202 to 13772)
gtgaacctaaagcctctaccattcggataatacaggtatgcctttggtcatctttagagttgatttcagctgccatgactattgataaatattttgctagcaaaaaaaattttgaactctcttctccggaagtatttttttgttctgctctagtccattcatctttgatggtatgatatgatatgacaaggaaccattctcatgattagaagccttttggtgcattacctagaggctcaggcattatgtaagctctggttcaccttatagttgactattggcttcagaatctgttctctgtttagttcatctgtagttctttacataaatcagtaatctaagttagtctgttctctgctgcttgtcatgcattagaatgactattgcagttcatagtgtttgcagcaacgggcaaccccatttgcaactttcctctaaaattatgttgcttccctctcatgtcttccttgttttcctaaatttgagtttgttaatagcaactatgatctgttttttgatgacaggatttatcttgctggcactattttttctgcctttacaggacaaatac

SEQ ID NO: 75249 - DNA, 853 bp, Carica papaya
  Intron number 1 from transcript evm.model.supercontig_180. 22 (locus evm.TU.supercontig_180.22) derived from phytozom e v7.0 (chr-ID supercontig_180; pos 365672 to 366524 rever se strand)
gtgttccactcaccaaggaagtcggttttcatcaggtcaattactctctatgtttccccattaatgatttgagaattttgaagcgtttgcttaattcaattagaactctaaccatacactggtgcatttaattgctaacgaaatactgtgtttacttgttaattaataaaattaaccatgaacagaagttatattaatataaatgtcagtgttgatagttccgtttcccggtctgttgcggttcgaggaaagttgaggtgttgattgtaaatgggtaatttttcatttttgtagaccataaaattggtgtatgaaagggttttgaatttaagggttttaaaacccacacccggatgattagttcaattttggttttgtgcatcccaagggatagggtacctatattcagacgtatgtgtcggtgttggggcccacgtgtaattagacttggacctggttttgtctcgcctcggaaatctgtcaccgacgtccattgatgtcgcgtgtgtcttacgctccgctagctactgaccttggtttccaattgggccaactacccccactgggtagtattttcctatttcagtgaaattcatgcaccaatttagtgtatttcctagtgggacaattggattattacattatcatgtttgctcatttctatttgaggtagtttttttttttttttttggatgagtgtagaagataaacaaatggtgggagattaaaaaatcataccaagtttgtgaaatatactattctgaatctgtttttggagttgcatgatcatgaaagttgtttgttgattctaatattctcttcctggtgaatgggtgactataaatgtatcagt

SEQ ID NO: 75250 - DNA, 526 bp, Carica papaya
  Intron number 1 from transcript evm.model.supercontig_8.8 (locus evm.TU.supercontig_8.8) derived from phytozome v7.0 (chr-ID supercontig_8; pos 107020 to 107545 reverse stran d)
ttgcatcctcttcctgcttcctcacactatcactggtatgaaatatgtgctcctttattgctgtacatgaatgctttctatctttgatgggcggtccttttttcttaccttttttttggggatattccttattttgaaagcttgaacctaaggatattaaaatgccaaagagaggattgtgctattgcattcagtaggtgcaatttgatagaatcaagacttactaaatatgatattgctgcgttgagtcatctttcatattcaatttttggtttcaatttgcattttagttttacaaccaataatcaaaatcttctttataaaaaaacactaagttggggtgagaatttaatcttaaaacagagaaattgaattctgtcatcgaataactcaaatataagaaatcatattaaactagaactaaagtttatgaatcatcaatagaatcattatctgaattgtcaagtaacttatcgtagctagcaccaactgattttcttttgttggtgaccctttttggcagctg

SEQ ID NO: 75251 - DNA, 773 bp, Carica papaya
  Intron number 1 from transcript evm.model.supercontig_80.3 (locus evm.TU.supercontig_80.3) derived from phytozome v7 .0 (chr-ID supercontig_80; pos 12750 to 13522)
tgtgtttgtaccacacgcaaggcaagtgcaccaaggtaaaaattttgatgtcgactcattattcttgagggaaatacaagattgagtttatgtttcctttgattgcttcagaatttgttaccatgttgttgttgtggtaatctttgcgtcttgtatgctatctgtttgatgaaagttttgagaaaaaaaggagggatattaagaatttctttgttgagtttttatgaacaatggtaagcagcaaagcatacatccacgtataagaatttctgtacatacgcgcaatttctttgtgcacggttgaggagaaagttcgcgatagattattgtgattctttgcaactgtatattgggttagggaatggaaagggtgggacttacaggcaattgcttgggcgcatatcttttcattagcagaggtagaattggttttgtttttcagtttagtctggatggattagacaccttctgatgaatggatattagaatttttatgactaaggacctaaaaacctattcatgttgatgggacatttaatggatttgaaaatttagggacctggatataactatttgtgatgcccttgtggagaatattgttatagatcagtcgtatattaggaactagaaataaaatttgtctctatggcagctgctcctcatcatctgtaacaaaagagcaagaagcctatggtggtgaattattgattgttgtatttatgattagttgtgaatcaattgtgaattcttattgacttcgtgctgtcattcag

SEQ ID NO: 75252 - DNA, 656 bp, Carica papaya
  Intron number 1 from transcript evm.model.supercontig_2228 .3 (locus evm.TU.supercontig_2228.3) derived from phytozom e v7.0 (chr-ID supercontig_2228; pos 5477 to 6132 reverse strand)
agtaacattcaaggttggttgttttagttttttcccttaaatttgctatttttttaattaaaaattgatctttctttgactgatttattgggtcttcattctcttgaactgttgatagttactgcatttaggctgccatagtattaattgccacggacagcttcaagacttgttaaaaaagttattgaagttcatttattgcaccaaaaagcttcatttactttctttttctcctcaactcttccacagtttattctacgttttgtctcttaaatgggtctttttcctacgttatatacttagcaaaagctttaatcttgtttttagttaatgttttcttcgttgataatcttgtttgtagcaaattgaatttgtgatttccttttctgggtctcccacttttcttcgctgcttttttgggtttcttcttcttttcggatcttctattacacgttatcatgatcggatctcctggctcacctgaacccaacattttagatccggtctttttgttcctgtccttctttgttctttagcttggctaatccagtttgactattgagcgacaatgtgggactttcaagtttatcagtccagataattacggaattttcacagatttcaatcttggtattttcatttacagttctgcagct

SEQ ID NO: 75253 - DNA, 933 bp, Carica papaya
  Intron number 1 from transcript evm.model.supercontig_71.1 8 (locus evm.TU.supercontig_71.18) derived from phytozome v7.0 (chr-ID supercontig_71; pos 336398 to 337330)
tcatcaagaggtacttgctcttgttttggatcccgtttctggtttattttgattcacttgtcaatcaatatattatattatttgggtttcagaggaagaatctgcaggctagcagtccgattttatgatcctaagtcggacttgaacagttgtatatgctgttagatttattttttaagattattttaatttccttaaaatatctttctctgtaggaacaaattattatgttagggtttttcttaaacaaaagggattacttgtttggagcagccttttgaagagggtttgtttttgtaattttttgtggagattctttggcagtaatctaatcgatacaactggaaaaaagaagccagttgcttatgctggatttctttcgtggaactgaaaaccctgaattgttttaaatgttgcttgatgtaagagtaatttatgctggctagtgttagcattcacaacctgtccatgataagaatgttcaaaatacaatcttatagattaggcattatctatatgtctaaagtacaatggtattgtctaaaaagaagtctcatgatcaaatatctaggttctttttgaggttgaaataggcattcatgtgcttattctgttatgtgtttgtttctgagcatgatgtgcatgtatatgtatgttgagtgctgttggcttctctttcctcctttcattcattagctattatgcttccaggtatcatttgtcaactttgaaatattcccttgttcacaagcatgcacagtctgagtagtctttcttttgattttcatcttgattaatgaaagatgaggagtaaattcaagacttttttcaatgctaattaatgctgaatgttggttttttgaactgattgttttcccttttctgtaaattgatggactgtgtaaaatccagtgctcaagcagggcctataac

SEQ ID NO: 75254 - DNA, 832 bp, Carica papaya
  Intron number 1 from transcript evm.model.supercontig_3.32 0 (locus evm.TU.supercontig_3.320) derived from phytozome v7.0 (chr-ID supercontig_3; pos 2223372 to 2224203 reverse strand)
catttactctactcatcctttgcctcaaggtaagcttggtttgtgtttttttccccctattggactttaattcaaaccccaacttataggtagtgtgtcaagagcatttaaaatgaagttctgttaagcttcaaagcagctgtgacctcttattatgaaagcttaacttgaacgaataatttagtaagatgatgttctgagcatttgcaattcgatgctggttctttcgtgattgtagctgtgtatagaatattatgcttcttcctatactatcaatatgtctagatcttgaagcttttagctcttttcatttgggtttaatttgttgctacattcttttttggaaattacaacgacgaatgttggttgatttatatctgtgaatctgtctcttcattttgcaatgtgtaaaattctttatattgtctcaagtttttccatctggaagaagaggattgaggtcatggatggtccctttattggtgcaaaaaaactttgagcatggtgaacaaaaaaggcatagattaaagtctaataggaagattttatggaattaggtagcaagatttctggatgcaaagaataaccagaattcttaactaattacttagtagggtaactcaaactcgtagataatgtgaagacatgatgacgattgacataaggtttgctgaataccatgatggtgttttggtagacaaaattggcaagcgacttttagatttaattttggtatcatcacattggtgaatatgactgtctgatagttgtttatggttcctgtcattttgttgcagactattttcttcatagagttgtatccttctgaaac

SEQ ID NO: 75255 - DNA, 927 bp, Carica papaya
  Intron number 3 from transcript evm.model.supercontig_90.6 0 (locus evm.TU.supercontig_90.60) derived from phytozome v7.0 (chr-ID supercontig_90; pos 1234976 to 1235902)
aggtcaaccaaacacttactggctcacctgccctggtaattcttcttcttttctcttatctttttgggaaaattatattctgtattttctattaatcattatcagactaaatttattattttaatataaaattttttaaatgaatttcacaaaagttattagtaatttatttcaaaatctcaaattagtactgaaacaaataaatggtgaaaaatcgtctataaactcgagacttggactatgtattgattatacatttgcttctactaagagataatgtaaaaattattggaataatacaacaaaattaaccatatgaaattataaagatttattttaaattccatcatgaattttaagaaaaatatttttttttttagaaaatgacaaaaattaaaagtatttttttttttttggcaaaagttaaactaaaatctgcatataatataatacatgtttttaaggaaaaatctacatatagttattcaaaattatactcacacaaacttgttattgattagtcaaaatattactgctcctaaaaattaaattaatatttttaataatggtatcatacaaataataatttaaattaaatttgttactgtttaattccaaatagaatggctatattacgttatatcttagaagaagaatttctactgtaactgagttaagtctgtgtttgaacaaaaaaaattcaaaattaacatgaaattcattgataaattatacatttcttaattagaaaataaaaatctatatgaaattgaaacaatatagttcaaaatttatctgattttatataaatttaatttttatcatctcgtagtaaaacttacaaaatgaatttcacaataattttcagtttctttctaacataaataagttttatgcatggttgataaaagatcaattcaagtccat

SEQ ID NO: 75256 - DNA, 554 bp, Carica papaya
  Intron number 3 from transcript evm.model.supercontig_52.1 35 (locus evm.TU.supercontig_52.135) derived from phytozom e v7.0 (chr-ID supercontig_52; pos 1253987 to 1254540 reve rse strand)
gtgcttcaacctatacggtatattgaaactatactctatcttctaatttctcttagatagatttacatgaatatttggaactatactctatcttctaatttcccttagataggtttgcatgaatatttgcatgcatatgaaacatctgtttgccgacaaataaacatgtaatagcattagcacacctctttgaaaggcttaagatcaatttgaattattcagtatattttcaagcattcccatgatagcattgcccttccaagcctaatgtttacttgcaaggagatgcatgatgtcatattatatgagtctgtcttcagtttttcatggcatgacattgaaataaagccaatatatatgattttcctctgttaacattttagttaaaaattgttttttttttctttgtttgtattgatggaatttgctatttggtatgaggatcttgaatttttctatgccagcactttctatggcagataggttatcctagttataaatttgatattctcttggcaggttgttttcagactaattgttttccaaccatttgt

SEQ ID NO: 75257 - DNA, 382 bp, Carica papaya
  Intron number 2 from transcript evm.model.supercontig_55.3 4 (locus evm.TU.supercontig_55.34) derived from phytozome v7.0 (chr-ID supercontig_55; pos 226167 to 226548)
atcgggtgctcctcaaggtatatttcctttcttatttttgatcttgtcatatcagattttagtaagccagcttcaagatggcgtccatctcttttttctctaatcctggtaattatggaaactttttatttcactatcttcattgacagaggaatctttgtttttacaattggtggagagttttagttacttgcaatttttatctgagagaaaaagcggtcgccaaggatctttgtttacataatcagtgacatgtggagtcttggactttgattactactaagttctccacgggaacaaaagcgtgatatgttactcaaatgttttctctttttcaaatgttttaggttatacgttattcgtcacctacctctgctggcgc

SEQ ID NO: 75258 - DNA, 939 bp, Carica papaya
  Intron number 2 from transcript evm.model.supercontig_250. 16 (locus evm.TU.supercontig_250.16) derived from phytozom e v7.0 (chr-ID supercontig_250; pos 154527 to 155465)
aaagaagaggtatagtggaacctttgttagtagctttgtgtctactgttatcttctgtcttgtttgctttacatctcccctcctgtgtaataattctgtttttttaggcagtatgattttattcgttaacggataatattgtttgaaactccaagcttttttgaccccttagcatatacctgaaaaatgttttcagatatttgaccctattatgaaacatgtatccattcttctttgagaatataagctattataattaatcttcatttgtttatttctttcaaaaaaaatctctctttatttaccaagtattttagcataattttctgccaaaaatagttatgttcttcaagagactgattttgagatattcttgcaattttttggcatgttttaaatgctaggacagtttgttgtaatgttcctcaactcatagtccaggttttcagtttctattgttgcatttcttagttgtaccttggtctctggaccaaaaagttaccctttgtataagtaaagattctacctaaatcctccttcattgtgtcctttaggttgcgataattggaagattataaggatcctttctataattttctttattactgaaagttggggtttactagagagagacaaacttaatatcttttctcatccatccttctctttaatttgtagttgcatgtggatgagtttattgtttcactctcttttgcattggagaatctagatctttatgcacaaaaccttgcttctgcttggtaggatgagctttttattgtatgcctgtattgacacattgatatctgtgcctgtggtagcatgcaacttttacatgcatgcacataaatttggtttttgcagggccctgttcataagcagaataactggtctcacttagtttggtgaatatgcaggaagcactgaaaaggaagttat

SEQ ID NO: 75259 - DNA, 1003 bp, Carica papaya
  Intron number 2 from transcript evm.model.supercontig_2.26 9 (locus evm.TU.supercontig_2.269) derived from phytozome v7.0 (chr-ID supercontig_2; pos 3372740 to 3373742 reverse strand)
cctggtcgtcaaaagattattgtcagcaggaagtggtatgttgacatgtttatatgttcgtgtgaatatgttcaaagtattagaagattgttaatttaatgtgtcactttgcatttcctgacatagaaatttttgtgggttaagaaatataacttaggtggtgtttctataacttgtatgtttttggactttgaaactattgtttttaatatcgatgtctaaaggctataaagttaggacgcataattaatggttacagtaattgatgttatgagcttgttcttaatgtaatattctcctgtaacattctgctgtgcaaagttagagtttcatggtgtccaaaagattgtcatcagctggaagtggtctgttgatacacctatatgcatgtatggatatgctcaagatgataaaagattgttaatttaatgtgtgttactgtgttttttttgacattgaaatttttatgggttaagaaatataacttaggtggagtttctgtaagtagaatgtttctgaactttgaaactattgtttttaaaatcaatatctaaaggctagaaagttgggacggataattaatggtttcattaatctatgttttgagcttgttcttaatgtaacattctcctgtcttttgtttgtctctgccatgaatgatatctcttaatttttctctataaataggtaatttgtctggttagtttccttagaatgagagagtgttttccctttgcctagtactagttttatgttagttgatgataatggctgtgttggatggtttcactctaattcctttttcttaattttccttttcattttgttctcctgattataagaaaagtaatttgttcatacacaagtttgtatgttgaatctgttatctaagtctagtattggtgaaggtcaccatttctttccaagttcttgtctcatgatgatgataaatgtttatttgttttcaggggatttaccaaattcagccgctctgattatttga

SEQ ID NO: 75260 - DNA, 345 bp, Carica papaya
  Intron number 2 from transcript evm.model.supercontig_18.2 11 (locus evm.TU.supercontig_18.211) derived from phytozom e v7.0 (chr-ID supercontig_18; pos 2337535 to 2337879 reve rse strand)
tggctgcgaagcttaaatcaggaagtgaaataaaggttcctgaagcctgaacttgtttatttttgagtttccttctctgttccattgcagacaaactgtatgaggaataagagaagattcacatgcatgtgcctgctttcttgagaaaattgaacttgacttggctaaccccattttatctgaatcatgtagctagcttattttatggcattttagtctcaagaaatgataatacctcatctgaaagtcgatctgtattagtgcttagcccttaactgggagaagactccttcattttcttctgtgatgtgaatattgagaaatgtgaattatggaggatgtagg

SEQ ID NO: 75261 - DNA, 418 bp, Carica papaya
  Intron number 1 from transcript evm.model.supercontig_92.8 6 (locus evm.TU.supercontig_92.86) derived from phytozome v7.0 (chr-ID supercontig_92; pos 724055 to 724472)
ggtctccttcgttcaacattaacaagtaagcctttttcttttttggggatatctcttttgcaaacttgaagttttttcattatgcaacttccgaaattcttggtttggggtttgaactgtgacgttgataccactttttttgctttaacttatgaggtgatcattgaacaaaggagggctcttaatgtgattatgcgaaccaaaaattattcctgtttccctgaaaaatactttctggttgatagtctgtatcggttatgaatttgttgatatatgcatatgatttatttatttattttttaaacctttcgaatttgattgaatttggatactgttattatttacttcaaacctccctatttctcttctgatgggtattccagggaggcagccatttggagaaggcaaaaacagaata

SEQ ID NO: 75262 - DNA, 564 bp, Carica papaya
  Intron number 1 from transcript evm.model.supercontig_17.4 0 (locus evm.TU.supercontig_17.40) derived from phytozome v7.0 (chr-ID supercontig_17; pos 477115 to 477678)
ttttggtgtctttgcagcatctagtcaggagtttggtactctaatatttgtaaaacaaattcactttagaaagttgtgaaggaaagttgatgctcaatgaccactttcaagttgaatctacacatacgatcatggacccatatgcacacacagtgaatataagttttcataacagtaaacaactttatcatgagttggacggccctattctcattccatattcctctaggatgagtgaaagagtgttatgaataagcattcatgcaacgaatatggaacaatatagctagaacaaaattattgtcttcctagaatttgcagagattagaaacctgtaaaacttatgaaaaggatatgtgatagataagaaaaatgcataattgcttccataaaagaaagggtagatgcataaacttatgcgatattgtacaggggtggtatgacaatccatgactctctaaattcgaactaaccaattcaaactcattctggtttttactgaaactgaattggaagggatcgggtcggttcttttccttttttgtatgttatacagggaagctc

SEQ ID NO: 75263 - DNA, 453 bp, Carica papaya
  Intron number 1 from transcript evm.model.supercontig_18.1 04 (locus evm.TU.supercontig_18.104) derived from phytozom e v7.0 (chr-ID supercontig_18; pos 771081 to 771533)
atagcgttaaggtgcgtttcgcttccagtttctgtttgcctctgggtttgttgtattgggagctttgctttggatccgtgggttcttgtttgaatagttttgaaagtcggatctggtttgtttggaatttgagaaatggcgagaattgtttagcgacgaccatgtcgtgaagaacacatataccattttgtttgtctgcttaatttgttttgatcttttttcagccttgaactcataacctttgagattggtagatttattttccgaaaattcgccatcccacctattaaacatttcctggatatgaaaaaaattattctttttccttttcaagttttatcatttcagattgatctagttgcatgtaattggaatttgaattattttctgaaaatttatggtttggataattaattaggaagaagacttgaaggaattccgacagtggggtag

SEQ ID NO: 75264 - DNA, 510 bp, Carica papaya
  Intron number 2 from transcript evm.model.supercontig_19.2 52 (locus evm.TU.supercontig_19.252) derived from phytozom e v7.0 (chr-ID supercontig_19; pos 1922573 to 1923082 reve rse strand)
tgggacaaccaggttcagtcttctctgctgagttgaatcatctattcatttagattgttttcttttgaaacctgattattgaataatctagtttatgataatgtaacaatgttaacgttggagtttaattaaaattaaaatgctatgacttctttttgagcaaccctgtctttctgatcctaggaaatttatgttaaaacaaatcagatttggcgctagattggctgacagattaacttattttcatgattcatgaaattctaaaaccttggcagtatttgtttcttatattgatcagtatcttgttatcagtcctaactttttcacaagttagatgcgggagtatcttttaagctgccggtctatatttattggatggtgaacttttgcatgcagaagacagattagagacacatttaatacaagctatataacaggtctttgattattctcattcttgccatcctgtttgcagcatttggactgttgatctggcatatttactgcaga

SEQ ID NO: 75265 - DNA, 618 bp, Carica papaya
  Intron number 1 from transcript evm.model.supercontig_169. 3 (locus evm.TU.supercontig_169.3) derived from phytozome v7.0 (chr-ID supercontig_169; pos 71037 to 71654)
gccgttctttggaagttaagatacgaaaaccgaatgtaagttatttcaaaagcttagtccttttctgtgcatttgacatctgcagaagacgagattatacaaagtattttactcagttcggattatgcactttgatgaataattgaatgtctcaattttctggcaaaaccgctttgagagggaactgtttgcataggaacgcttcggaattatgtacattaccttgcatgctttctgtcatggcttgccatgatgtcttttataacaacagatttctagctctgatatatagttcctgattgtaattttgggattttcttggggtttgttaaaatcagatagggaataagttttctagcttctgctttcaatgacaatatagggaagtaccgttgctgatttttaaattccataaccagttctcttgacaaactgttattgtcggtcaacattttgagtttcctgtattttgtttttaaattcttcgtatgttaatgagggaagtttcatatttctgcatattatggtacaatcttgacctcagatagtaagttgattaatgttttgcatttctatgaaattgacatcttttatgttccaggattttgagctgggagg

SEQ ID NO: 75266 - DNA, 566 bp, Carica papaya
  Intron number 2 from transcript evm.model.supercontig_169. 38 (locus evm.TU.supercontig_169.38) derived from phytozom e v7.0 (chr-ID supercontig_169; pos 389164 to 389729 rever se strand)
ttagtaggtgttgctggctttttttcctatatatatgtatatatttttctttcctacatctttctttcttatatttcaaagaagtgttctgaatgttgtctgagaatattcaaatgaaacaaatgcgtgtttaactattaaaagacaaactactgatttactcattgtgtgttgagttggtcaattttatgctgaatttgtgcggttaaggggaaatattcctttttctggatttgtatgtttctcatgtgatctttaaagaaccaatgtgttctgaacattagtaaaattcagttaatttttcttcacgtttttgaaaacaaattgtagttttagaaaatagtcatatagttgtttcctcaagcctgccaatatttattttttccaattgaattttttttgaaaaagcgattaaagtgcattactagatgttaatgtctataagcaagattctctagacttctaattctggaatatattatctggtcttgtgtgttaaagtggtaacttgataagtaatatcttatgcagtcaaagctttgcaacttgcgaggtgctgatccccg

SEQ ID NO: 75267 - DNA, 527 bp, Carica papaya
  Intron number 1 from transcript evm.model.supercontig_169. 38 (locus evm.TU.supercontig_169.38) derived from phytozom e v7.0 (chr-ID supercontig_169; pos 389812 to 390338 rever se strand)
tccgataaaggactggaggtcatgttcaacagaatcagacctgtttctatcattcatccgttcaccaagaacaagctgagaaatatcctttttttttaatttatctttatattctgttttcttagaagggttttttttggttgtttgcagattagggtggttaatgaaattaacgaagaattctaaattttgaattcctgatgttgagttcgtaatttgcatgtactacaagtattttctacatgggatggagctgggattttttaataccttgcatgatcattatatctagtggcttccttcactggttattcactctttttagacaatccccaattataccggcctcaaagggaaggcttatcaaaaaccgcaatgaaagaggctctgtttccttttgaagtaaatcttatacttctctttttgctccttttgtttggtttataccatttcattattttttagcgtgttaaatttgcttcttgttaacagtgtaggcaggcaaagatttcatatacagggacatt

SEQ ID NO: 75268 - DNA, 688 bp, Carica papaya
  Intron number 1 from transcript evm.model.supercontig_20.2 6 (locus evm.TU.supercontig_20.26) derived from phytozome v7.0 (chr-ID supercontig_20; pos 200966 to 201653)
ttcttgcgtatttgatttcattataatatatatacatatatatgcttcttcattttcttcttcctctctctctctctctctctctctctctctctgtatatattctgtagtagagtcgtgaatatttgcttttaaagtgatagaaatctttctttctttttgctttgcatttgtattgttcattcttctctgttgaaatattgaaatttcagtttggatgatactgtatatatatgatatgagatacggaaattgaatttagacatgggttatcagtttattacattgggattattgaattccagatgggtttttgtctaatttgcaaagaaatgcttggatttgcttgcatggaacatggtgcatttttctttatttttcatgtttatgtctgagaaattttcaatatattctcccttaagtttccttacattctaagcaatgaatgattccatctaccagataaagatgatgaaattaatttcttcataaaaaaaaaaaaaaaaaatcctctcaatttcccactaaagggaaaaaatcactgttcatttgactggggtgatctcccccaatatcctcttaaagtttcattttttatcattttctactatcatggtccagtctaatttattttggttttgatttgttttcaggcctctcattgcactgggttatcctctgtaagttt

SEQ ID NO: 75269 - DNA, 829 bp, Carica papaya
  Intron number 2 from transcript evm.model.supercontig_211. 2 (locus evm.TU.supercontig_211.2) derived from phytozome v7.0 (chr-ID supercontig_211; pos 11416 to 12244 reverse s trand)
gtccaccatttaagttcaactcatctcacaggtaacttaaagttcatccacgcatgtttacttattttgatgtttggttttaattgggatttcatattaggagatgtacctttaatggacagtgttatcatatagatatatatatatatatatatatatagacatatatgtttttcccattcctatcaacgttatatgcttggcgtttgttcgtcaaagatttttgtgttgtagaccacgaaatgaagagtaaaaactattaatatgttaaatgttactgtttatgcgacatgcaagttttaatgtgattgactctgccccaacggatcatttttgcctttgtgttaatacgattgtcaaaatttcattgactggaatatcaatacgaaagtgtgcctgcaaagcattttctaatatagatctctatattttattgccagataccaagggagaaaaaagtcatgtacttctttaatattctatagtgtaaaaataaatatgtctcccagattactgatcttgtttacttacatatttttctagttttttgtttaatcaaataactatatatttctgtacaaaaatacattatactgatacaaatacttcaacttcttttctcttattgttggcatctaactctttctgttagatgttttatgagctttcaatatggtgtcctgaaggttaatccataacaagattctaagtttttctgttggttgccggaaatctttaaaggaaaagaaaagaacatcagagtggtgctttaagttttgctctttaacttgcagggagcactcaaattttgtcaactgtgttagatttt

SEQ ID NO: 75270 - DNA, 789 bp, Carica papaya
  Intron number 1 from transcript evm.model.supercontig_44.9 (locus evm.TU.supercontig_44.9) derived from phytozome v7 .0 (chr-ID supercontig_44; pos 81433 to 82221)
tcgaagcgaggttagtttgtttctatgttttctctatttcgtttctcgcattctgaaatctaggtttctgtcttaattttggttctcttctctagaaagtaaagtaaataatgcgtggaaatttcagatctcttgactgtccggtttgtagttagatctctaaaagcttagtcgtctaacacgatcagtttggttcagttgtatatgccgctactccttttatttattcttgttgtttaagtttcacatttgatcaatcagagagttatgttatatttggatatgattgtagagtgggtcatccttttggttgaaggaacgaaatggacatgcttatttgagtttaaaggttatagtgccgaagtcttattaattatttgtgctctctttatcgaatcaacttttgttttctatgtgaacactccgggaattttgtgagcctttctacctgtagtttttttttaaatgattcttttatttcaattatggaacctgaagataatatattaccaataaagatttcttgtttagcgtctaataacatattttgggaagataagactcaaagtcctggagcatatatatctttaactgaatatgttagttggagattgaatcacttttttagtagacctacttaaaaaacgaagaaactatcttcatgcatgtggttcccttctgagaactgagatatgtttaacattgtttagcatagttaataattggtaagtttttaatttttttcttattttcttaggacgcggtggatctgctggtaacaagttcagg

SEQ ID NO: 75271 - DNA, 898 bp, Carica papaya
  Intron number 1 from transcript evm.TU.contig_31593.1 (loc us evm.TU.contig_31593) derived from phytozome v7.0 (chr-I D contig_31593; pos 396 to 1293 reverse strand)
ggatcggcttctcgagatctccgagcgtgtctgtacctccactcttactaaaataatgaccttccttttggaagtatatgattgtctaactttcaagtctgtttatgtttttggtttttgcgcacttaccatgtaattagcttgggaattttgttaatctcttaaattctgcagacaatgcaatgcgaatatgcaaaattagaagcatttctttcttcccattctgcataatcgcttttcatcgtttttgtaatttagcttttctttttatttttctcccgagctctttttgataatgcattatttaggacattattattagtattattatttttcagtgggaatgtttgaatagttcgattgtttgtttaactgcttctatttatttaatcgagtaaattttagcaaattggagtcttgcttcttttgtgttagaatttgctagtttatggcgttaggatttaaatgggtgtgagctgtgaagttacaagtgttgaagaattgaattaactaggacatacttttgcttgtaactcatggtgcattaccattatggttactagattttactcgtaattttacactgatgataaagaagccacatttaccttgagaagaacagagaaggagtgggttcttttatgaaacagaaactagctgaatagatgtcttgttcatttacgtcataagttttagttagacttgggaatatcttgattgtttatgattgtatttttctttaattcttgcaaggagtttttatctttattatgtcaaaatcaggatgttcatgtttttccaggtctcagaccgttagaaagctgtgtagttataggtacctagtctcaataatttccttattcttattttgcagtttttgactgttgcttctccactg

SEQ ID NO: 75272 - DNA, 925 bp, Carica papaya
  Intron number 1 from transcript evm.model.supercontig_57.7 4 (locus evm.TU.supercontig_57.74) derived from phytozome v7.0 (chr-ID supercontig_57; pos 1155055 to 1155979)
acggcttcacctgttaacttaaagggtacttattattattatttttttaaataacttaaaagggtacatacttattttatgaaaccaggttttcttttccaaatgtatagaatggttgaaacccttgttggctaagattgtgctttgttgtgaaagagaagtttagcaaaatgcctagcgtagaagtgattttaatggccaaatttgacttttgataaaggtaacttcagaaactaaagataaatatttaggagatatgacctatgcatatgagatatgacttttaaatagataaatagtgtccatgtctttgttaattctaccatgacttatgtttatgatatatgacttttgctcaccatgtctttatcaattctacacttagtttattcgtatgtttaatatttttaaaaataaagtgtcttactaattcactattagtagtttactatttgtcatacattattcaaatattcaaaataaaatagtaaaagtgtaaagtaaataaagtgcatattaaaatagagctaaaaatttcaaaaataattaaaatgggagaaatttcaagaaaaagttcgtaataacaattgtttgtaatggtaatttttattgttatattattattattttttaataatttcaccatctgccactaactttagatcatgatttactaaacacaataaccattacagcacatatcaacccttatatgcaatttttttttatcaaatgatgtataatttaactttatttttacctaagctgttcttgaagcacttttaagcagtcggaccacaagcataagcttggctaaacaggcatcaatttatgtgcagaaccatctgtgtcttatatcttttgatattctgtttctgttgataatttattacattcaggtgtttcaagtcaagtcgactgtgca

SEQ ID NO: 75273 - DNA, 727 bp, Carica papaya
  Intron number 2 from transcript evm.model.supercontig_95.1 (locus evm.TU.supercontig_95.1) derived from phytozome v7 .0 (chr-ID supercontig_95; pos 7858 to 8584 reverse strand )
tggaagctgcaaaatacttatcgttggcagaagaggtatccataagcaatatactcatggattttaccctaccttcctgatgtttttcctaatcaaggaaaagaaatctgctgtgatcaaggaaaagctcctcacctgatgtttttctaacccttacgctacgagctggggttagttttttgatattgcaggcatggtcctgattgttttttagtttttgattttaggatttaatattgactcttctatgaaggaaaagtgagaaaacaggataagagaaaagaaactataagtgaagcaaaatgaagcatcgaaaaaataaaatgcttgaatggatttcattctgctcaagcacctaaagctttttcagacaatattaagtactcaggactagggagattggacaaaacatcacaatatgttttggttcatatggtgaagaattgtttttatggtactttctaagccaattttacatgaagtaggatcgtaactgctagctagcagtcatgaagctaactagcttgatgaagaagtctattggggttgtaggatggagacatacaaggagaatatatttctgaaatgtggtagtttcaggttgcaatctatggctaaactcacagcttccccaacctaagcattcttgacaatttgattatagcaaggattattggtgcctttaatcatttaactgaaatgtatttggctttgcaatgtagcttgc

SEQ ID NO: 75274 - DNA, 614 bp, Carica papaya
  Intron number 1 from transcript evm.model.supercontig_53.1 40 (locus evm.TU.supercontig_53.140) derived from phytozom e v7.0 (chr-ID supercontig_53; pos 1192603 to 1193216 reve rse strand)
caaggtccattttataaaccctagaattagactcccaaatgtctgcattcttatctgttcgtacatagaattgatgtgtgcgcatgcatttttatttcgtggtgggttctagtgtttgatgttagatatggtaatgtttagcaatagctatttgtttcctttctttctccaaagcagaaaaagaaaaaggaaaagaaacaaaagtactttcctttacgtgattgaagaaattttccttgtcaatgttggaagtttcgtttccgagaaatatttgaagccttcaactgtttatttttgttttaaggtttttgggcatatttgtcttgttttatgtgaattgaaataggaaaaaaattgtaaaggtcagttgatatttatttgttgaccaaactgatcagttcctatcaagaatttcatggtttggagcagcaaattttcgttcttaacatgttaatggcctaattaattcattttctcgtgttaaggctcagctaagtttggttgacttttggaatgtcatgttgctttccacgatccttttctcttgttttgctgatctctttctgtgattatttctaggatattttacttcttctttgaatcacgccacaaca

SEQ ID NO: 75275 - DNA, 1038 bp, Carica papaya
  Intron number 1 from transcript evm.model.supercontig_6.17 1 (locus evm.TU.supercontig_6.171) derived from phytozome v7.0 (chr-ID supercontig_6; pos 1396832 to 1397869)
gcagcagctgctcgtgattatcagaaggtattctatatttctcttttgcagacgtaaaaccagaatttgggaacgaattccatggttttttttttgtgaattcatttgttctaaacagtattatgtatgaaattatgcaattattttcccaagattcagtctgtcttaccagagttcataggtttctttgattcttcccgtacaaatttgttagaatttctcactataatgcttagagaaaatagtacttaacctatttccggaagaaatttgattttttaaaaaaaaaattatttgcatatagcacatatagttcaaaagaataaaaattctattagaagatcaaaaaactaaaatcctatgaattttatattgaatttgttaggagatcaatttttatcattttatgaagaatttactattttctaattgaactaaatgtgcaattgccaataaattctataaaactattacatttgttccaaacatgaccttggagaaacaattagggagtctctcgttggaaaagcagatatctgtatggggcgagtttgatggaataatggcttcctaaacaactccctgaatttcaactagttctattctagcaactggcctggaacatagactctcctcctttgcttctgcagctttgcttattttggtttagagaagacataactcttttccaataataatcaaggaggcgatccatgggatgcgaattatcatatgatgatgatcattttgtatatttttagtttataaacaggagttagtttgtgatttacatatgtatagcatgtattttcccaatcaaactattacttttgagcaaagcttgactgatactggttaataatgagttttctggtttatatggtgcatcctgctctgcattaaaggaaaaagttaaactagcaattattgatgacgagataaaaaataatggtttatgccaattatcatcattttgcatgagatcggtattgttatctttcaggaattacttgctcaagagaaggcacaagtgtcaca

SEQ ID NO: 75276 - DNA, 548 bp, Carica papaya
  Intron number 2 from transcript evm.model.supercontig_148. 37 (locus evm.TU.supercontig_148.37) derived from phytozom e v7.0 (chr-ID supercontig_148; pos 439749 to 440296 rever se strand)
cagaagctaattggaaagcccaggtaatttctaaaagtttattaatttatgggttattttatttttgttcgttctttagatctctaatattttgtttttcgtttataagatatctttgcttgttactattatgtccgtgtatttgaattagattacctgcgatggaggcggtcaagtttaaaaaacgaagaatttgattaattttaaatcttaattggcataagaaatttcagttctataatctatataacaaatagaggtgcttataccttgaaggcttcaactttacgtctatgttaaaggagagttgtttttgttcctcaaggcttcaactttacgttttctgtttgctaaatatttgaacaatataaatcaaaaaatctattttgactgatctaacgatgtacagaacacaagttaacatggtttttgacagtaccatgtcaatttaaattgtgtgtgttaataggaaagaattgttaattagagcatggtgatttcatgagtgaacagaaagcttgggaagtggcacaagctccattcaggaa

SEQ ID NO: 75277 - DNA, 446 bp, Carica papaya
  Intron number 3 from transcript evm.model.supercontig_87.6 5 (locus evm.TU.supercontig_87.65) derived from phytozome v7.0 (chr-ID supercontig_87; pos 377959 to 378404)
ggaacttttgggtaagcacaatttcttttggtatggttttgcaacacctttgagaagcctgacacttcctagtttctcatttggattgttgaacaattaacatcaaaatctccaaaataggaattagttccgaagcttgcagatgatgacacaattttcaaattaaagatgttttaaaatattaatttacttactgtttaacacccgcaactgattgaaatatttcatctcgaaattttatattagcaaatgtgcatgcattccttaatgttacataactctgaatacccagtttctgccataattactctatcattttcttttgtggcgtatacaaactactacaaccttttgaggaaaaaaatatactacactgctgcagttctttgcgacaggactatgtcaaactactctcacagaatgttgccccgaatgcatttgcaggt

SEQ ID NO: 75278 - DNA, 501 bp, Carica papaya
  Intron number 2 from transcript evm.model.supercontig_60.8 8 (locus evm.TU.supercontig_60.88) derived from phytozome v7.0 (chr-ID supercontig_60; pos 1421509 to 1422009 revers e strand)
tctcagcatccaccctcaatacaaaggtatttgatttcttccacattgttgtattcctatccaaaatcataattatataaattagtatagattcttaacaagggagtcgaggaatattaggcaggaacaagttatgagatcttagattggttatgtttctaataatatgttaaatccttaaccaaaactgtggtggtagaaaaagttgttacatagattcttgtttaatgtgtgcgtgaggcagggcagcattaggcatgaacaagttttgagatagaattagctacggtaaaacgttaggttcttacgataactatatggtgtcagaaataattatctatgatgtacataaaatagaatagatactcatctttggtgggattacatccattaacaaataatacttagcatttatatgtttgaacaaaacagaaaaaaagtcaataaaaacttttacatctcgcaggagggtggaggaagaggctaaaggttgcaggtgag

SEQ ID NO: 75279 - DNA, 651 bp, Carica papaya
  Intron number 1 from transcript evm.TU.contig_30554.1 (loc us evm.TU.contig_30554) derived from phytozome v7.0 (chr-I D contig_30554; pos 2396 to 3046 reverse strand)
ctcatcctaccctcgttgttagagattcggtaagcatgcttcaatcatctctctttcgctcttcgcaaaacccatttcaatttcaaaatagagtttgatttctgctaaccaaaatttaataaactaaatagtaatcacatgaccatccagtttcaattaagaacctttacgaactcaattctatttctcgtgaattaagatcatttatttgttaaagactttagcttttagcaaagaaagcagtaaactttctgatgtaatggttctagtactgttcttctattgcttttaaaaaacagtaaaattttttctactttcttggaacttgtttgcatgcgcaacatcaacattggtcatatcagttcaattttttttataaaccagaccagagtccataatctttctctatatatatgtttcttctttctttctggaaagaaccaaaacgagaactgttcagtctctctaaaactataataatatagaactgttgcgacaaatcttattattttcaccacaaacagcctttttatatgtatgtgtacagtggcaagtgtctggagtcttgttagaacttttcttttgtttttttaatatataaattaattaagggtttcgttgttcttgcaggtgcacgttttgccgcaagag

SEQ ID NO: 75280 - DNA, 670 bp, Carica papaya
  Intron number 1 from transcript evm.model.supercontig_17.2 19 (locus evm.TU.supercontig_17.219) derived from phytozom e v7.0 (chr-ID supercontig_17; pos 2574982 to 2575651 reve rse strand)
gctctcaacttgtcaaggtctgctagtttattttggtcgatcactttttatctggatttagtttgattgggttgattatttttaatctggatttctgatggttttcgagaattatgcgctttctggtttttcagattctttgttgatcatctggattatgcaaagaattgtactgaatttcacagataaaagtgtcatcttttactgatcacaattcggatagaagggttttctagcggacacaaattgtttgattatcctatttggttgagtgattctcattgaggttcatctttaacgttgcacattctattgtttgctacagtaaagctggtgttgctttaagacaattaattgaccttgttctgtgctcctcctccaagatacttgatttttccgggaattttgttttcaattttgttaaaaaatgtgttaaaagtagttattgcagtattttgatcaatgaattattgcggctttgtttgtgctatgaacatttgatattcgggttcagtcctgggatgattggttaacaaatatttattggtttcaaaaccttcttttcctgtatatagtaatctttctctaaaggttctttttttaaaaaaacattttctaatatcttttatttgtagcagatctagtcattctttaccttttgcaacagtcg

SEQ ID NO: 75281 - DNA, 1011 bp, Carica papaya
  Intron number 1 from transcript evm.model.supercontig_55.7 6 (locus evm.TU.supercontig_55.76) derived from phytozome v7.0 (chr-ID supercontig_55; pos 479411 to 480421)
atagcagggcatcttttcgggtaatttaatatatgcgtatatatacacacacactatttttgttctctcttagtaggcgttgttaattatttcgtgtaatcaagttgaattttagagttattttatgtaagctgcattttgtgttgttttctccacgttctcctgtaggctctcttcaatcactgagagtagtcatttcttcgctgttcgattcatgaaaaatttgaagtctgagcttaatttcgcggcactaacattcgaaggacctaattaagttaaatggccaaaataaatatttgtattatttttggtttctgttgattgatgagaaaacaaaagttcgaactttgaactgaagtgatattttaaagactcaaagttgacttgagtgtaataggttaatttagtattttccttgggaggggaaaaggtttttgaactggttcttctgtgtccctagtctgtgttggttgtcggatttttaattactgttgactagacaaggaaaatggatgtttgagctgaaatttgtccaaatccttggctggcccgaagacagctcttggatcatataaggtgtgaggttcatagatatacaaaagcaatatagaaccattgcctgatatgtcttttctttgaaattatcacaacctctttctctttccgcttaccgtaacagatttcctgtttgtaccttgagaatcagagaatttaaaagctaggttagaactttaagattgaaaacttcctctgccatttctcctagtttaatttaggaaaaattgcaactgagaaatccatcattttcatagtattagatatacaagtatattcaagaaatttgaaggcattccacaggtgcttactagatcctaaatgattaattggttatgtctaaattcattatattcatttagtatgtttttcgccttataaaagacaatcgtcagtcctacctagttgataaaggacgcttgccatattttcttcacaggaaactaacttcaaaga

SEQ ID NO: 75282 - DNA, 810 bp, Carica papaya
  Intron number 1 from transcript evm.model.supercontig_48.1 75 (locus evm.TU.supercontig_48.175) derived from phytozom e v7.0 (chr-ID supercontig_48; pos 1016466 to 1017275 reve rse strand)
ggaacgggacgaggttcgctgcgaattctggaattgctctttcacttttctatgtaatgatctcttgtatccatttatttgatctccatgtagtgatgacaggaatagagtgttgtcttttttgaagagcaaaaaaaaaaaagttgattatgacttcttaatttttgaaatacaaattaacatgttgtggtaaaaactaaactactgtttgctttagtagtaatatatggttgagcttggaaaacacgattggtgaaacagtgtagtttaactcttaccatccactcccatctatgctctcctcctccgttcttccaaacagagttcaaatttcacgggcgattgtttttcagagcgacaatggcgtggaggcaaatcatacgccaagctaggaagacaataatgcaaccgaattcttctcctttgttgtctagattctactccaaatccactccatatattgacttgtatgtttaggtgtttatagtctgaaggtaagtttgttttgtgatttgtgctttagtttctatttgggttgctgagaaggtcaataaaagcctggaaagaagttgtagtctttttttatctgtcgatttttgtttttaatgcgaaaatgctgaattagtccgctaaatttcttacattgctcattccttgattgaggctttgctctcttttcccaaaatgatagtttcatggatgctgctctcacgtttttggtaccttcgcttagtaactacaagagattcataatttttctaatctggatactgaggcattgatagttcccactgttgcagtgaaagtagg

SEQ ID NO: 75283 - DNA, 637 bp, Carica papaya
  Intron number 1 from transcript evm.model.supercontig_27.2 36 (locus evm.TU.supercontig_27.236) derived from phytozom e v7.0 (chr-ID supercontig_27; pos 2172642 to 2173278)
ttcactcctcaggttggtcattcactctttctgccccacaaattaatttttgttttgtgctgtttttctcgtttataggatcttttttttcttctgctaaagaaaacggtttctatctatgaatttaaattccgggttacctgtcaatgaatcacttaagatggatctcgtggaaaccaaaagatggaaatggatttttggcttggctggaagcttcttggataatatagtttacccttttttataaaagtttggtcttttaatggatttcacatagtttgaagagctataatttgttttttcgaaaagaatctgtgaaaaccataagcttgcagttcttcaggatccgtgcttgttacattgagttaaatgcttaatccacatgaaaaagttatttgataaaacatgttcgctatccagttttgatattattgttagtcggaaaaaaataattgcaaaaacatctgtcttgactttgcatgatggatgaaatcttactaatctgaatttgtatctggcaaatgaattagctactgtcatgtgaatctctgtatacttgttctttgtccatcctatttttgttttctttatgtattcttactctcccaggttccagtggttccactgcaaagacctg

SEQ ID NO: 75284 - DNA, 848 bp, Carica papaya
  Intron number 1 from transcript evm.TU.contig_33315.1 (loc us evm.TU.contig_33315) derived from phytozome v7.0 (chr-I D contig_33315; pos 711 to 1558)
acatctgcatctacctctgccgccactgtggttgagtgtgtacagaatttcattattgcaaaggattatttgaaactgaatatggtggccgttgacgaagtgcaccatttattatcaaatattcaattactttctttttagttttccaataaaaactagttcaagtattgaataattattatcctgcttgttgccattttttctctcttgttgtcgttggatttcgaaaaagaaatgttgtatatgtgtgtgtatatatatatatatatataaatatcaaactaatggaaaaccctttttgaagctacccactaaccagagaaacaagagcagacagtaagtaaaagaacacaacggccaaaactctaacctttacgctgacagatgacgggacgtattcatctgacaatttctcctgcaaccggcttggggaagaggaagagctgacacgaaaaaaaaagaaaaaagaaaagacttgattttggctccaatttatagctgaaatcattcaccaacttttctctgctcactgcctcctccaaaagattatcttttctctttcactttctcttgtcttcaataatcttaacactctaaacttccaccattaaatccttcattttttacacttaatgatgccaatcctttttctcaacattcttcgcttttctcctcttggttccttggaaacttccatttaaaggtttttgtttttatttatcttctttttttttttttttttactctcagtgatccttttttgttttattatattttttgacttagcattaatttttttttcaaaatttctttttgtgttgttgggttgttaaaaaggattagatttg

SEQ ID NO: 75285 - DNA, 520 bp, Carica papaya
  Intron number 4 from transcript evm.model.supercontig_29.1 67 (locus evm.TU.supercontig_29.167) derived from phytozom e v7.0 (chr-ID supercontig_29; pos 1833643 to 1834162 reve rse strand)
cttattcttactccaacaagagagttggcagttcagtaagtgttccatttagcttgtgcttttaagtatatctttatagtattgttttcactgtaaaaaaatgttttattctcaaaataaagcaagtgaatgctacctagatagaattattattttttccatccagtaccactgactaattcaatgatttttttttttgtttcctgtatatctaattctgaccttcttgatgagtaattaaggatttactaatttaaattatcaaattcttttgatcatgaaactggtggatcctacatgcttttaccattgggaaatttgcatcttagagtgcaagtaattgagtgatagccaaacattctttttggaaggatttttcttctagaaaacctatttcaaacatgttattattagttttatttggtgccattttatctttgccttttttcattttgtttttaaagttattcatgaaaatgtttaatcttgtttttcatatatgtataacagggttcacagt

SEQ ID NO: 75286 - DNA, 321 bp, Carica papaya
  Intron number 4 from transcript evm.model.supercontig_259. 5 (locus evm.TU.supercontig_259.5) derived from phytozome v7.0 (chr-ID supercontig_259; pos 33123 to 33443 reverse s trand)
ttggctttgtgggtaaatactgcaaatattgtttattcttcaaactgtcttattatgcttcagttttctcattatgaattggcatagtttacatctagttttcctgggtcaacgacgtgcattttgggtttgaagtagtagtcagaagctaagaacaagttcgaatatataacattttaggatcaacctttgttctttaatgttgctacttggcatacgaaaggtcaatttgagcaaaagaggctaacaggtttgagttatttctcttggagtagccttgaattgggtgttaatatgtttttatccagaggcaaaaaggag

SEQ ID NO: 75287 - DNA, 1044 bp, Carica papaya
  Intron number 3 from transcript evm.model.supercontig_9.23 6 (locus evm.TU.supercontig_9.236) derived from phytozome v7.0 (chr-ID supercontig_9; pos 1585692 to 1586735)
aggactcctccgcccctacttactgctctatcaaggttaaatttcaaaacgcattcctcctcttttttcttttcagctgttactttttctggtgatcatctaccatcgaattacgtgtctgatttcatttttttttaagttcggaatgttaatatgattttattcatctgcaaatgaaagattaattttaaaatttcgagcagaattaggtgaataggttctttttcattggaagtagaagtgtattaattgagtgacacgtaaatcgattggaattttatctactccatctaatatagtattatacgcgttcatccatctaatttgtagtttaccttttatggattcaaaatgctagtgttattttcagtttgttagtaaataagtatgaacttagtccgtaagtattcctcttctgtatttactaatccctgcctatataacttatcttttaccagacaggaaaaatacttaaattaagtgttccaaaacttgttccagtataattataatttaccaatttaattatttactttggtttttttactttagtaattattttaattgagtcaaacttacaaaaagttatttttatcgaacttatgtattgataataaatattttttcaaaaaatatattaattagcattaggctattgattgctagtaagtaaggttgaatttttatgaattagatagagtttcaatttatttaaatataatttgtggagtattttctttacaaattttttagtaacttaactacgtataatttgatttaatcaaaccggagaataacctgttccaagtacacaaagccggtccgagtaaatactctccagtataatattatatatatataatttaagcgcgtctaaattgatccagataccacctaagtatctaaagatgtgttaatatgggaagcacgttatacgctatttgcgcgtgcctaaaggatttcaatctagaagattcataattataacatttattttcttgtttttcaggggaaggttccattgttatccaccacagctctgca

SEQ ID NO: 75288 - DNA, 377 bp, Carica papaya
  Intron number 1 from transcript evm.model.supercontig_167. 4 (locus evm.TU.supercontig_167.4) derived from phytozome v7.0 (chr-ID supercontig_167; pos 124017 to 124393)
ggctggcggtggtagctggcgactgttctccagtggtcagctatgaaagcttacttaactctttttagggtttttcttttctatatcaacaatgaaagttgaataggttttataattgagattagaatttttctaacctaatgctctgataccatgttaagaatgatttttttttattgatgtgtattctattaaatattacagtcttatatatacaggttttctaagatagaaaaaggaaataaacaattaattacaattaataacgaattgtgtaattttgctcttatgccctttaatctgatttgttttctctttaacattttgatttacttgtttcttaataccctgatttacttcctctttaatagggatta

SEQ ID NO: 75289 - DNA, 502 bp, Carica papaya
  Intron number 1 from transcript evm.model.supercontig_16.1 46 (locus evm.TU.supercontig_16.146) derived from phytozom e v7.0 (chr-ID supercontig_16; pos 2183586 to 2184087)
gtgaagagggtccagaaatgtgagttatttttttataatctgtttgattactgttgggtgcctttcattgttttttggattcttggttacctatatattttttgtttgaatatccactgattttgtgtgtctggtttgggaagaaacgttttcaaggttgcattttcatactttttccatgagtttttattattcttcaatcataggttggcatgaacctgattttcttctggatgctagggacaaaatattttaaggttaaatatcatgggcatgtgctctgatatcctcatagatcaatactgagaataaagtacagttgctttacaataaagagaaatgaagttagtccaaagtgaggaggcaaatatgctaagatattccatgaacagattaaggattttcatgtttatgtcatgtgttcctcttgggtttgtattcattttaggaatattggtattttatatcaggtggttggaattggaactaaagttggtcgccg

SEQ ID NO: 75290 - DNA, 854 bp, Carica papaya
  Intron number 1 from transcript evm.model.supercontig_73.6 2 (locus evm.TU.supercontig_73.62) derived from phytozome v7.0 (chr-ID supercontig_73; pos 851377 to 852230 reverse strand)
gatcttactcgagctcgatgtaagcatctctctctctctttctcacgcagtatatgtgtgtatatatatgtatgcgtgttcatctatttgtttttgtttgctttgtttgattttggatgctttactttttgaattatgtgtaaatttatcatctgattacatttggatgcgatttttttttttgtttattctcgtcctcttcttcctcccgtttgttttccagtaccaaattatgtgattgttaatgtgtgtctgttagtatttctcttttgtgaatttggttcatggcggagagtgtagcctcttggtgaatttactgggttgaggaggaatcatgaaactttttggctaattgtatgagagtggaaaaggaattatcagctagaaatggctaacaagtttgcgagttttcatgttcgtattggtaaaggaataatgatagaacctttaatctccatgtatttggccgtgaattaatagcagtacgccacttgacctattgtttgtttgttgaaaatagtcagaaccaaccagtgaagcttggcttcttgtattttgtgtttgtagctacggggaataagaaaaattactcatcatgtgcactgaaggttatacttaatttgtttcggaatcagctgttgcgtggaatatctttgaaactatcaccagactagctgttaattacagtttctgcaaaatgttttggataagtattactatttaaggtgattactctgtgttgaatctgtaatgatcaactatattagtggatattttcatgtatgtttaaatttgttttccttcccttttattttgcaggaaccttgccttttatcacatatccggatatataa

SEQ ID NO: 75291 - DNA, 344 bp, Carica papaya
  Intron number 2 from transcript evm.model.supercontig_37.8 6 (locus evm.TU.supercontig_37.86) derived from phytozome v7.0 (chr-ID supercontig_37; pos 653304 to 653647 reverse strand)
tcaatctcgtgggttgtcttctcgagcctgcaacggtgagtatgaagacttgttaactcggttacagcctttgatgtgagttaactcgttgtcttcttcttcttcttcttcttctcgtttggtggtccagaaacggacttaatctgcaccggccataattcagtttcttgctttttagtaatcaagttgcagcctttatcagcttttttcattgttttctttacgagtttttacacttcttgttcttactcttttttttttcttttgttttgttcctccggatgatgatgatgatgatgatgacgacgacgcagttgccgactcagttctacacagctttggta

SEQ ID NO: 75292 - DNA, 914 bp, Carica papaya
  Intron number 1 from transcript evm.model.supercontig_46.1 7 (locus evm.TU.supercontig_46.17) derived from phytozome v7.0 (chr-ID supercontig_46; pos 170231 to 171144)
ggtacttgcgtattaatattctttttctattagaattttgattttcagttgcttttctttggggagtttctgcttcgacataatgagggtttttgttggattcggtggttttgattggatcactttacatgactcatactcgttcgagtatgctttatttttccaattgagtttttcgtttttcctaactgtgattattattattgggttgcctttacttttgccttgatctgaaattggatagaataatagtgagctgaaacatgggtatcttattcttttcataaatttatctttcttctctaatgaagcttattctctgctctgtatgttttgggaatttaaatttgaatcagttcttcttttgctggggattgactctgcttgactccgataatttatgatgctgttgatttaaaacttgctggttgatataggtttgtctcattttatccacaaatagtaggattaatgcctttaacctttgtgagatcatcaaagaaaaaatagaatcggtcctgctttttctgtggctattgaggcttcattatgcaatccatgaagatatgtgctacttcatcctctgattgcaacatttcagattacccaaaaaattcaatagaacaaaacttcagttttctcccacagaaaatgtgaatatcaatgtccaagcaagtcaacttaatgaagcacttcctagacagtggattgtggttttcttgataaagaaaagctgagattgttattaggcatttactgaatcttatcagccgtccctcttttcattttgttttatttttcttttcgatccttcttgcttctgatatggtggcagaaatagagctgtgttgcttaaaggtcatttgttttgttgcgcagaaccaacatctgttcgtgcattcattggaacctat

SEQ ID NO: 75293 - DNA, 988 bp, Carica papaya
  Intron number 1 from transcript evm.model.supercontig_97.9 7 (locus evm.TU.supercontig_97.97) derived from phytozome v7.0 (chr-ID supercontig_97; pos 646759 to 647746)
agggctcatcaacgtttgggatctttgcttctaaggtgagaatgtagaagatgaatcaccgtttggttacatggatggcttaagttgattcttgtgttttggcttgcttgattgctgcgggttcatgctaaatttagtgaattatattttcacctttttttttttttaattcttgggctaatgtgagtctttataatgttctttcgatctacattgatgagaaacaaggttgatattttctcttgttgtgatgctcttcacttggtggtggttacttaatatttgggaggtttgtgaattatctatctattggcagactggatttctgagaatttctcctaagtacattttcatagtattcttctttgttgatgtgttagatttgttcatctttctttctttcttgtggctctacttacatggcttttatccttaaacattttgtgtggggtttttatttggagttcatttgatcttgtagtcaattattttgcttcatttggaatatagattgtgttgtttagattttggttttggcacagaagcatgtgatggccagttctcagttaggtctttcaaggacaagtgggtttcgtatgtagccttcttagtgattgattttgattattgagaaatcacagcaactcggttcaggaggttaagagttgaatgtttatattcgtgctatatcctaaggttcccttcctcattttaaggccacgaggtttttatctatcctttgttggatggtttagattcaaagatcgactttctttcagtttttcctaatgaattttaatatggtttggggaggttctttgatgccaatttttgctggttagtatgacattaggttgcttgaactttctgttgtactatgccaccttaagcagttaataatcaaattctttagatttcttagccatatttactcaaactctatcttattgcagattaggacatattgacgccgccaggaagcaccttt

SEQ ID NO: 75294 - DNA, 424 bp, Carica papaya
  Intron number 2 from transcript evm.model.supercontig_19.1 26 (locus evm.TU.supercontig_19.126) derived from phytozom e v7.0 (chr-ID supercontig_19; pos 823516 to 823939 revers e strand)
tagcagccctgtcacctaatcaaaagcaagggactgtgagtccctgataaacctatttgccttgttgccatctctgctgctatcactagttggagtcctacttacggtttggttgggtaatgcaagtgttcattacggttgggatgtctttttgataggtatctttgtttgtttctctcttgaatttattcttttcagatccaaaaaggaaattagctttccctcgaacttttttgtttgtgagacacattcaaaattaaatgtaagttaaaaagcagaggtgcaaataaagaagaaaacaaacagagtgacccctcctggaacttgaatgatgtatgaatgattcgtactttaaacttccagttttttttattttacttcttgtgcaggctacagtgctgcgacatccctctggttgcgccac

SEQ ID NO: 75295 - DNA, 504 bp, Carica papaya
  Intron number 1 from transcript evm.model.supercontig_3684 .1 (locus evm.TU.supercontig_3684.1) derived from phytozom e v7.0 (chr-ID supercontig_3684; pos 1086 to 1589 reverse strand)
ctagatttgttccatctattcgtgaacagttgcaggtatattattcatttctttgtcttctctgttttccttatgactcgaatttggtatgaactcaaagttgtgtttaatattacgtagatctttcacctcaaatacccatgtagacataagatgacactggagaggccatcctactgaatacgcccaaatttaaaagaaattacgtggaaattgaaaaaagctgacatcagatatagattccatgtccatgctggagttaattgaacgtcctgatttgttgcgaagcatgctatttcctcaaagctcatagaaattttggttgtttatgttcccttaactagatctttgtttctcacacccctagcagttctatgaagcgtgatgtttctcatcatgcatttcttttctgctgaaaggcttgtgtaacatgatgccatttaccattgaacttgtgatgttgtgtcctttatgatattctgactgtgaactaggactgggagg

SEQ ID NO: 75296 - DNA, 714 bp, Carica papaya
  Intron number 1 from transcript evm.model.supercontig_53.5 9 (locus evm.TU.supercontig_53.59) derived from phytozome v7.0 (chr-ID supercontig_53; pos 377103 to 377816)
cctaacccttttgacaccttctccgtttctcagaggtcattattcgttttggtccgaacattttcttctttgaatttccgtttgtttcccgggaaaacgtcgaaaagagaaataacagagtctaaaggaagaaaagaaagagagatggatgagctttaggattttttgattttgtcatttggtctgtttgcttcgaaggaaaatctagggaggggagagtagaggaattgcaagtagtaaatactgagcttcatgttagattatagagaatatatgaagttgaaatatcggaggactgattttacaggattagctgagtggtttttgttggtttcctgggttttaagataacgaacttctgatgtataagattttgaatttcttttctttatataggccttctttggtttctctgcttttgttcatgtttcgctttaattttatctagtctgtacacttttttgccattcttgtttttgattgtcatgaaaataaatggaaagcaagaggaaaaaaaatctttttacagtctattgaaaccatattgcctggcccgaaactattacatgaaattgttttaatttaaaatcaatgattctttttggttcgatgtagttgcctctccctgtttgtgtgtacttgttcgtgaaataaacagttgcttagggtttcaaggtgattccattattcttttgcaggcttcagaaggagttg

SEQ ID NO: 75297 - DNA, 1027 bp, Carica papaya
  Intron number 2 from transcript evm.TU.contig_28217.3 (loc us evm.TU.contig_28217.3) derived from phytozome v7.0 (chr -ID contig_28217; pos 14979 to 16005 reverse strand)
accgggagtgcttggatcattggcgagctgtgaaggtatgggtttgatatctgtttttctgattctatatttggtatctagtgtacagttgttatactgtgtaccttggtcagttatacttctgcagctcccttgtcacttgattctgaacttattccattttagttgacatgactagatgtttttagaggttattagatattcatgttgctaggacttctggatgcaaatatgagcttcaaatgcatgtctatgttgtgattttgataatatattggtcctatcagcaagttataatctcaagcatcagattctatatatgcaacatatccttgtgaaaagaaactatccagccatttttttatagaaaaagaagtattttaaagacaagaaaagatagagtacaatgacggaggataatatatcctcctagagcctcttagtagaactacaaatcatagttacaactgaatccaacaaaaatcagtctataaatttgctagtaacttgcttgctaatttataaacaggctagcttggtggtttgccttaatggagactttgcttagatactgtcgcagatatcagtcttctttttttgtgctgcttaattacacatttcattgtagatgtaactgttaccttagtctcctagatgataaatttagagttaggatcactgcattgtccaaaatttgatgttgactgaatgaatttggtattgcttactgtatttggatgttgctgctcttctttctctgtctctgtgaacaactcaggtaatgttttacaagtggttcattgtgttcattacataaaagaagatttgatcccaaaggacagaagctttctgggagggagttggttctgggtggtttatgccaaatgaatgagaaatttataaacatcatttgcggggttttcgattttcatttaagtgttttttaactttatttgacacactataatatattattcttagtttttttccaggaagggtttgcatttgctcattgcacaacctgtaa

SEQ ID NO: 75298 - DNA, 663 bp, Carica papaya
  Intron number 3 from transcript evm.model.supercontig_190. 34 (locus evm.TU.supercontig_190.34) derived from phytozom e v7.0 (chr-ID supercontig_190; pos 239217 to 239879 rever se strand)
accggagacgaatacttggagtttgagaattgcaagtaaattacttatgtagaaaagtattcttcctcagggaggtaggaatttgttgcaaggtagtagaagtgtatttgcatatgaaaagttgaataagagttttgtgtggaatgattctttggttctatatttgatttgtaggcttttagtaaaattttgcttgattatcttaattgagggtgttgttttaagggtataacggcgatctcagtttgtgcttcgacgatataacctttactcattgaaacttattatatttttgtcttttatttgaaaatgagaattttgtatgaactgataatccaatataacaaatattaaaagagatatgatcagtatttaatgcatctttttatacagtatcataatggttgaatgaaatgccttttcttttaattaagcccaaaacaaattggatttatatctgcttctttaattcaagcattcttcatagtggttgaatggaagtgccttttcttttaaataagcctgaaacaagttggttttatgtctgttttctttaatattgtcatgcattcttcaggaacctgtcaataaatggttttttatttttatttttttgttgcattttaaggcttttgttgaactactatttctggttcacttata

SEQ ID NO: 75299 - DNA, 600 bp, Carica papaya
  Intron number 1 from transcript evm.model.supercontig_190. 34 (locus evm.TU.supercontig_190.34) derived from phytozom e v7.0 (chr-ID supercontig_190; pos 240027 to 240626 rever se strand)
tttttgattgtgaagagttgtggtttggtggcagggtgagtatatttttcaagctgaaatgacttgtacaaacaccctaaaaaacaataaaattaacaaagatggtaattgtgatatgaaaattcagtgggcacagtcacgttatgaacattagaatggacgcaatacatccacgcatcggcatagtttcgttgtcaaagataggaacagctatcatgtttcctcaaattacttagatttagactctagacaaggtgaagaacgatgggagaatgtggtttagttgcctcaaaaaaaaaggaaatttttatccattccgtcgaatataaaagataaggtagtgagaattacatccagcaatactgttctatcttcaagttcaattttgtctccaccaagtaccgacagtaatagggtactttgtagttttaaatgattgtggagctgaatatcctgacaaagagtcagctgaatggatcttctcatttgcatcaggagctaaatccatttgattactttgaagtttaggttgaagagcacttcattcaggtattgtgatgtcaaggtgtgcatttgatattgattctctgagggatatat

SEQ ID NO: 75300 - DNA, 877 bp, Carica papaya
  Intron number 1 from transcript evm.model.supercontig_183. 2 (locus evm.TU.supercontig_183.2) derived from phytozome v7.0 (chr-ID supercontig_183; pos 19528 to 20404 reverse s trand)
taagtgatataaactcaatctacaacgggctggtggtacgggagtgaacctcattagaaattttaatgactttggggaagatgaatatgttagggtttcaatttcctttgcctttccggagtttcttctgattgggccaatgtggaaagttagtgctgatggcctgttttttctaagaaattttttatgtcacttggctctttctcagtcagaccatagagctttccatttaaaactcattttcaagttaatgcgactgctatatagctttttctttttctttttttcttttttctttttttgctattgataatttgaagaaggggatggggaggaatgttggttaatggatgttatctttgtaaaagggctcctgagtctccgaaccatctggtgttgtggtgctcttttgtttccctttttgttgtgctatgtttgagttccttgctttgaatggattgatggcatgttaggtggtgcgatgagaactgggtttaatagtgtatttgggttgataagagaaggaagaagcttacctctcttattctgagagtggttttgtttcacttatgtggatatagttgagtatgtgcatgtgcatgtgcatgtgaatctttttttttttttttgtatctgttggggtgaaggggtttatttatatatataaatatcatatataatttcagttagttgtagagagttgttttatagttacattccttatgtgaactgcaaataaccttactttaattactttaattacttatctaaaaaaaaaaccttactttaattacttgctatgtttatgactattctttgacaatgtgtttttccttgcgcagccttctccaactacctttagtgaggtattccggtg

SEQ ID NO: 75301 - DNA, 807 bp, Carica papaya
  Intron number 2 from transcript evm.model.supercontig_32.9 2 (locus evm.TU.supercontig_32.92) derived from phytozome v7.0 (chr-ID supercontig_32; pos 1172630 to 1173436 revers e strand)
cttatcggcttgtaaatagtgaaggagacaggtaagtcatttggacactgagtcttgtgttcacattatcattattttcatctaattattgggaaactactctctttgttccttttgattcttgtacatgagcttctagtctaagatctttgacttttgccgaccaccacttgagcccatgacatgttcaccatattctttatctatatgtagtgagtagttgatttgatcatgtgatgtacgtcacgtgttatttgtttatatgttcgtacaagtctcaaagagaccaaactccaggctttctccttgtggaaattccacattacttcttatttttttcctctttaacaaagttacttgattacaaaatacgagcagattttatgctcagcaatcccaaccttagtttgagttggatgcacaacaagagctaatttaaaatttgtaatgtaaataggaatcctggacaagccaactttgagattgttgcttataatttctaggtaaattacaatatcttgattgattgtgctggtaatatttgcagtatgtatactgtcatttggttcctgcatctagtttatcatactattcatatgtcgtaaaatatttgttactttttcgttttcaaaaaggaaatatataggggagggtgtaagaaggaagaaaatgtgcatttgctagatttatactgtaattttctttcagaatagttgtttatgatcacatcctttgaggtgaatctggataagaaagtttatttatgtcaaatcattccttgctgcagattgtcaggactaattgttg

SEQ ID NO: 75302 - DNA, 840 bp, Carica papaya
  Intron number 1 from transcript evm.model.supercontig_71.1 5 (locus evm.TU.supercontig_71.15) derived from phytozome v7.0 (chr-ID supercontig_71; pos 274487 to 275326 reverse strand)
atttcactgtcaaggtattttggctttaatctgaatcttcttttcttctttccttcctttgttacattaaggttctatctatctttgtttcatcactttttaaattagaatcgtgaagacaaaatcagagtttgatgggttttcttcttgataaagtttaatttcatttgctcaaattttcagcttctgaattttcgtttgtggcgtttgagcgattataacttgtactgtgagtattaagagtgccgttaagataattgtttattaaaaattatttgatatttgatagaatgaactgttgaaattaccatcacttcgaaaaaataaaagctgtttgtttggtgaagtaagttttgattgaaagtccaaatcattttctaaaaactataaattgtaacttgtgtttaaatccatcaaaaattaaaaaaaaaaattagttttgattaggccaacagcactttttattttctcacttggttgcaaaagtgctctgaaatgtaaaagcaaaagccaaaacttgccgaaaagcacttttaatatttcattttccctgctgatttgattgctcatgagctcaataatagtttttgggtaaattttcttttgtgcaatatctggtagctaagagagaaaatatagaggaaaaaaatgtaactgggtgaatgaagtttctaactgattgtataagtttctaactaatggatgctaaccttctcttttagcctagttctcatcatatgaatttctggtttaaaggttttctcaccttttctcttcccttcttcatttcatatatttctaacttaaattttttgtgatgagaacaattgtaggatatca

SEQ ID NO: 75303 - DNA, 372 bp, Carica papaya
  Intron number 1 from transcript evm.model.supercontig_64.7 9 (locus evm.TU.supercontig_64.79) derived from phytozome v7.0 (chr-ID supercontig_64; pos 504987 to 505358)
ttaaccttatacgttccgttcaagatagttctatcgtaagtttttttttgtttagttgttcatcttctaaatagatacatttgggattgaatcatttcctatatacatatatatatatatattcaaatgttattcaaaaattgaaggtaatcaattaatcattactttggttgaggagggttgtcctccattcctccatttgattgtatgtataatgttaaaaggttttgctaattatgctaaccaatccttaatcatatatatatatatatatgcaattcgatcttatacataaaagaaataactgtgtaatgattgataattatttaatatgtaggaggcttctacagcaaaatacatagtgcaacaata

SEQ ID NO: 75304 - DNA, 482 bp, Carica papaya
  Intron number 1 from transcript evm.model.supercontig_17.1 48 (locus evm.TU.supercontig_17.148) derived from phytozom e v7.0 (chr-ID supercontig_17; pos 1867979 to 1868460)
ttcctaccaaactcattcttttgagaataaggaaggtgagttttgttggtttaatcttcagtcaatttgaatgttgcatgttcttttgatcttttgggggttgtcttaatgtaatgtttcttaaatccatagaaagcttttaggtgggaagggttgtgaatgctggccttaatttcggagaattggtatggtagtataatcgttcagtatggttgttaattgtggttgattttaatattgaagtttgtatgtaaattctatgcaaggagctttgtttgatgttctatgctatttgtaatgagatcccttgaatagagaatttgaataacagctaacttccttttttgctggtgtcttgtgttgttcatcttggtgatgcgtaattttatttcataaccttttcctggttcatgctattttgttttatgttgaatattgtttctggcgacttacatttaattcatgttttgtttcagctgaag

SEQ ID NO: 75305 - DNA, 498 bp, Carica papaya
  Intron number 2 from transcript evm.model.supercontig_819. 1 (locus evm.TU.supercontig_819.1) derived from phytozome v7.0 (chr-ID supercontig_819; pos 8242 to 8739 reverse str and)
tgtcacactattaaaaaatctagtttattttaatagtattattaactatctaccatttttttcagatttttttacttcaattaattaattaatttaaatgagtaaaacaaaaattttgttgtcacattaattcaattgaagaagattttgaatgtataaattaacctataaatagaaaaatgatcaattaatcttcatttattttttttagaaaaaatgaagagatatactaggttaatataataatttgatgaaatattataagaagaagtaagagagactaattgacaaactcaagttttgattggtggttgatgctaaaagccttcaagtacatgagtatttatacgtactagtactactactaatattattaatgctactactactatgaatactactactactgttattactactattacttttactgttgttattactgctattactactacagcaggtactactactattgctattactagtgctactatc

SEQ ID NO: 75306 - DNA, 920 bp, Carica papaya
  Intron number 2 from transcript evm.model.supercontig_3659 .1 (locus evm.TU.supercontig_3659.1) derived from phytozom e v7.0 (chr-ID supercontig_3659; pos 1180 to 2099)
cctttgttatatttatcatcatgtatgtatttagattgtctaatcttcttattctctgacccttcttctatggagtttaactattgtgttatcaggattctctgaacatgctttttaaaccatatcctatttttaatgattgatttctatacttttaatattgttacttttggtatattttggtgaatattttgtctcatagaattgggagtgttgagctataagaattgaaaattaatcccgccttcaaccttgagaaaatttatcttgcctccaccatttgtgtatttctgatatttaaaaataattctatagatggattttttttttctttttacatttttttaatggaagaaagagcaacttcactaggcaccaaagatatgtatttgatcttttaggtgctcttccaagccgaaatttttcttttttaaaaaaaattatagaagaagaaatgcatgcaattaaagtgggagcaaactatgacagaagataataagatggtattcaattaaaataaactataaaagaaagtcaaaatacattgacaaaatggaaactgaatccatttggaaagcaaataacaacattccctgaaagaaacagtgggcctttgctcaagaaagagcaaagaaaacaatcatatcccaaccacataagatagttgaaacagcttaaaaccaggcagattgcctgaaaactggcaaacataggctcccttacaataacttatgccccttaatcttcccaagaccatgttacattagataaaaatatccagcttaggggggcatacccaccttccctaaggtgtagtgatagcaaataacaaatggcatattctgcttccaacaactgcttcaagggcatattctgctttacttaggtttgaatggtttgttttctttgtttaactacag

SEQ ID NO: 75307 - DNA, 785 bp, Carica papaya
  Intron number 1 from transcript evm.model.supercontig_26.2 1 (locus evm.TU.supercontig_26.21) derived from phytozome v7.0 (chr-ID supercontig_26; pos 208422 to 209206)
tctctgaggtatctgtttggttaatgattctgtgtttttctccacaacatttcgttgactttcgtttctctgtctctcttttttttttttttccattctgttatgtatacgcgtgtgttttttttttttttttttttttaatttttgcttttatatatcatattcctcaggttggaatctgtctttggtttgcgtttactatagggtgaaatttgtattatctgtaacaatttgtggattctgtttttgagtactaaatttttgttttatttttttacaagatctgggaaatttgtcattagcatgtaacttggagatcgtaatgattgctagtggcaataatgggtttgaatctagtaagcttgctttagtttctacctggaattaaagcatgattatggacgtagattgttaatcattaaggtctaaagtagtttttcttctatgatcttgcaagtatttcattactagattgtagtggcaattaattagatttgaagtcaatactgttggaaatggaacattttagtacatttggtgatcatggtttctattctgaaattgcttttgtcactttaatttggacattgcttgtgctactaggaacatacaagtaggtataagttactggaaagaaactcttggttaatctagttaaccaggagttaaccaaggaacgtacaagtaggtattaacagatcttttatattctctctcttcatggcgttgccgttgaataatttttacttcaaatttcagaccaagagttctggtgacaagcgcgg

SEQ ID NO: 75308 - DNA, 763 bp, Carica papaya
  Intron number 1 from transcript evm.model.supercontig_2452 .1 (locus evm.TU.supercontig_2452.1) derived from phytozom e v7.0 (chr-ID supercontig_2452; pos 2461 to 3223)
tgcgaagaaagtgaaggacccaactcatctatctggttagattctcgttttgcatttctgatttccgtggtctgtttttcgtgtaaattgatttttctggtttttttttttttcgtgcttttagatttgctgatctgggtaaatttgccttgaatctgaatttgttgctccccttgttcacggcgtattttttttgctattgaagggagtaacttggttttgtactgtggcattgataaacgatctcaatttttgggtttttgttcgatttgatttggggattttatgagttgggaagctcggtgatgagactcaaaacggttcttcttctttcaaatgagcaaaggaatgcttttgcttggttattgaattggacatttgagatggaattgaaatgaaatcgtgttggaaatggtgatatcatactctcctaaaacatttgcagatgaatttcttgccattgataatgtttgttgttttcttctgcttttaattgaaatctatggtctcggtgtttgactgcatattcaacgtagtctcagaaagtttttttttttaattttttttttgttcactgtgaatttgatccaagcaagctgaggcattccctttcttctctactgtaagtggagaattgatgtactacattgttaatccttagatattttcttgagttatatctacttattttgtaaaggtgttagctctacttattagatacagaggtaattttgctattaactcgagtttggttatgatgtag

SEQ ID NO: 75309 - DNA, 715 bp, Carica papaya
  Intron number 1 from transcript evm.model.supercontig_16.1 12 (locus evm.TU.supercontig_16.112) derived from phytozom e v7.0 (chr-ID supercontig_16; pos 1731383 to 1732097 reve rse strand)
tttctaatcaagcatcttctaccagatccagaccggtaatttcctctttcttcttgtttttgaaaattttaaaatgtttttaactgccgaggatatctgtgaatccgttatgtttgggaggaatttcgataaacaggaaaaagacaataatttattaccatgtttaaagtttttatttgcaatacaacgaagaaaataaagaagaaggggggaaccgggaagaagaggacaacctaatcaagggaatgtatctaaagcttgggttagtcatttagataaaagatttggatttgtttttggaagagatatactacatatataataggctgtatatgctaatatatataacatataggataaacagatagtttgaatttgttaatttatttgatttatttaagatagaaaggtcaaataagtctaaataaattgaattttttataaatggatcagatagaggttgaaagatcatgactcatttactgagttaaggtgatattctagtttcggctatatttattattaacaagacccattcagatgcaaacgtgaatgagaagatattttctgagtcaatttcctagaaaattattaatagtttgtttgatcattttgtatgtactgtcagaatttgattcaactgtttctcaacatatatataaagaatatgttaaaccgattctaatgagactttcctgccattaatttttgtagc

SEQ ID NO: 75310 - DNA, 704 bp, Carica papaya
  Intron number 1 from transcript evm.model.supercontig_83.3 (locus evm.TU.supercontig_83.3) derived from phytozome v7 .0 (chr-ID supercontig_83; pos 10325 to 11028 reverse stra nd)
actctgtttggatttcttggataacaggtctatttgcttctatcacccgcatgtttccttattcctttgcttataagtttagcatttagtttcattctcggtatgtagaaagcaactaggtgtcttcgctgtgttttccagaaaaagaattgttctgtagagtggagaaagggaaattatggtttaccatgttgtttctggatgcgttaaggctgatgatggagtcatcaaattgtcaaaaaggcatctatgcttgtaattgttcaatgaagaaatgagcatactcctcatcccttcacatttatctaacttaatttgagtattttcagttcacagacatgaaattgttgcattgtgtagttagcattgatggaaccatgtatgtcttttctttgttatggcttaaaattaatgttgtttaacattataaattcggtaactgattgaagtgtgaagggaatggtgttaagtggaaactcttgaagggatcatagaaatgagaatatcttagagttcatttatgttgaagagatactaataaataaattattctctggttttttagaattgtttttttacaatcttaggatgtaatttttgaaatttgtttcttttgtttttctttttttaattcaatcaatatttcaatattgttgtttgaatttacaggggaatttgagattggtgattacatactaccatta

SEQ ID NO: 75311 - DNA, 552 bp, Carica papaya
  Intron number 2 from transcript evm.model.supercontig_69.5 2 (locus evm.TU.supercontig_69.52) derived from phytozome v7.0 (chr-ID supercontig_69; pos 654213 to 654764 reverse strand)
ctcgttcttcacagtctcataacacatcttctctggtacagattccttcatcaataataacttcaatcagaaaaataaaataacacccagatgccgtccttagagttggaaacttaatgaatctcttcggaagtaaaatgagtcgaaagaaaccataaatataattattttatttaaaattaactaataatgtttgtgaaatattttgattcatttgttcttgaaacacttaagaatttaacaaattgttaggtgaaaattatttgatgggaaaaaggaattataatagccaaaatgacgttcagtaacggccatacgggtaggtgtcagaggagattgttttaaagccatttttgttagcacatggtcaaaacagacctgccactggctttttcactgcatcagattccactgtcacagatttgctcctctcctccccaatcatgacagacgtagtcgtttagcatcatttgctttcccaccaagtttcttgtacaacactattcttataatacagggagacacagacttacttctgtgatatacaaggag

SEQ ID NO: 75312 - DNA, 432 bp, Carica papaya
  Intron number 1 from transcript evm.model.supercontig_80.6 8 (locus evm.TU.supercontig_80.68) derived from phytozome v7.0 (chr-ID supercontig_80; pos 531844 to 532275)
ctgcgactttggtagtcctgctgcttgtagcgctggtgtacttctaccttttctaaagaagcaaaaactagaatctccttttcttttttaacattgcgaaaaactagaatggagtagaagagttatggacaatcttttcctagttttgttttttggtttacctggttgatgggcatggaagagtggctagatctatagtgccaagattaaattcagtttagttttgttcttttcatcctgtggagggaatagggatggacagaaaaactcataatggtgttggtagtttagcctgaaatatttactgagccagaaccttcatacttctctcttggttgatgctttttcaggtttttgacttgtaatcataatttttatcagaagctcttgctttttaagtaatttttgtgttcttatagtacagatatagag

SEQ ID NO: 75313 - DNA, 524 bp, Carica papaya
  Intron number 1 from transcript evm.model.supercontig_8.6 (locus evm.TU.supercontig_8.6) derived from phytozome v7.0 (chr-ID supercontig_8; pos 98768 to 99291)
gaattccagctcggccgaggcccacttaaccccaggtaatccagcggttaagttctcatcttttctcattagctttaaattttggctgaagggttttctttgatttatttgttttattgattacgtcttccgttcagtttcaaattcgaactccttaatggtctttggcaaatggatctctttgtcgtgtctgctaattgtttgttttgtgattcatattgaaaatcctttttttctctctgagtcgaacgctcgctctcttgataaagaggggaggacttaaaagtcgggctgagctcagtctgttataataaatcgttttttatgagtagaaaatgcatgctgacattgatgaggtggttgatttttacatccttttcttccggttccaaactctgatcgtcagccatttgtgattttagcatgagcttaactaaatgatatcactgagttgctgcctgcaaccttcacatgaaagtgtaaatgggttatttttctaatgttttgattataaacagagatac

SEQ ID NO: 75314 - DNA, 489 bp, Carica papaya
  Intron number 1 from transcript evm.model.supercontig_25.9 9 (locus evm.TU.supercontig_25.99) derived from phytozome v7.0 (chr-ID supercontig_25; pos 1021855 to 1022343)
gaaccaagcaggctatcaaggcccttactgctcaggtagagtgactgtctatgttgtaagttttaatcgttggttagtacgaaaatgtcggaaattttgaggcttcttccaactttgaatcttgtgggtttcgctgtaagaaaaagacaaagaaaagaattggttgactatgatatattttgttcaactgttcggtttagagtttgtcccgtttccttctggtttctggaaaaaagaagagagaaaaagaactgtacggtttattttccttttaattttcgagtactgggtagccaatttatggccaaactctgttccgttttccattgttgtaaggaagaaaaatatataggcttacttattctacttcaggaatcaaaatcaaatccggaaaagagccccggaagttcatttttttttttagtgtctattttatcggcagaataagtttattgacgggtaattcttttttcttttcagatcaaggat

SEQ ID NO: 75315 - DNA, 326 bp, Carica papaya
  Intron number 3 from transcript evm.model.supercontig_43.1 57 (locus evm.TU.supercontig_43.157) derived from phytozom e v7.0 (chr-ID supercontig_43; pos 2001481 to 2001806 reve rse strand)
gggtcaagcaatttgaggagcttgcaggctctaaggttcggttttactgccttattattcaaggatacagttctttctttgagttccttatgcattgggcttcctctcttcctgctctttgctatgcaattgtttcaaaaaattctagttttcaacaattggctttgtttggtttcgtcaattttctgcttcttaatagtgattgcttagaattttaggttttgagttttggggttaagcaggcacttgagctcttcgtgttatttgactgattaatttagtcttcagtggttttgtttatagctacaaggagacttctctttcaa

SEQ ID NO: 75316 - DNA, 814 bp, Carica papaya
  Intron number 2 from transcript evm.model.supercontig_59.1 15 (locus evm.TU.supercontig_59.115) derived from phytozom e v7.0 (chr-ID supercontig_59; pos 1023175 to 1023988)
aagccttctggtggctcttccaattactttgacaggtaatatactttctgttacctttaaaagtttttctaaatggtttcttttatttgtctctttatctgcatcagaaaattaaagatgaaaattggacttatgcgatggaagagcacttaatattttctgctgtgacttatagcagaaatctaaatctctttcagctaattatatctatactggcaacctaaactgataattgatgtgaacgataatgatttttcttacctggaaatttgtttttggaaatatatgcttcagggtttttttttaattttatgggctgtaaacaaggattgatagttattctcatctataatatgcatttattatctatctttgtacacttaactgtatgaaatctgatctgataacggtctggtcagagcattgtgcatgttgaatactgtcgtacatgaagataacgtgaacttgagagtctattttatctcaaggccaatctctaaacatggtggagacattgtttcttgtatttatctcaaggccatctcaaagccaatctcaaggcatatttcctgctttgcttagttgtgttctcaaagcaattctttttggtacaattttttttttttttggatggcttctaaatcctttgctggtctttgagaagtcatgctgtacccagtaatgaatgaaatcatgtagggttaacacgcctaagctacttgactattttaatacattcttatcttccttttggttcccgatctgttttcttcatcatatgccaggtttaagaaaccctgcaaaggttctaagg

SEQ ID NO: 75317 - DNA, 889 bp, Carica papaya
  Intron number 1 from transcript evm.model.supercontig_184. 1 (locus evm.TU.supercontig_184.1) derived from phytozome v7.0 (chr-ID supercontig_184; pos 11394 to 12282)
gcaggcttattgtcgactttttgggtattcgtttttcttcccctcaatctttcttctcctaacacaaacacaaacacatatatatatatatatatatattggatacttttggtgtaaaccatgtggttattagttgttatgggatatgattaaagcaagcacgttaaattgtaagaaagatgggtaaaatggtaaaaataatgtcggttgtaataggttaaaaaaaaaaaaaaagatactctttactgatacttgaaaaggtttagtgaaccttggggaaaggagaattggtggataattatgtctgtttgtctggctagtgcttctaatatgataatataaaatatttttaaaattaaattttactaaaaataatttataaaattattaaatgaattaataataaatttttattttaaaaaattagatttattattaaaaaatataaaattaataaatattgttcacttccaataacacaatttttttttttaattaaaaaagaaaaaaagagaaaagaaaacagtaaaaaccctcggtaaaatttggataacggaggtgatgcgatgattttggatgaagatataaagatggcatcaaatactattcagccatattcttgtccaatcttcttccaggctggactccataaaatctctgcaatcatatctctcttatctttacccacagaaaatacccacgaggtgaaaagaatctgtaaatttaccgagagaaatccgaaaaacttttaggactaaccctaaactggagtttgaatcttctgtgcacgaagaaatggtagttaaaaacacattagaatgaaattaatagagaattgatataacttgtggcagctgaagctctgggaataccatatttgagtccgtat

SEQ ID NO: 75318 - DNA, 662 bp, Carica papaya
  Intron number 1 from transcript evm.model.supercontig_31.8 8 (locus evm.TU.supercontig_31.88) derived from phytozome v7.0 (chr-ID supercontig_31; pos 1784967 to 1785628)
cacggctgaagacatcaaagccattctcggatcgggtaatcagtcttgttttttatctattttttcatggtattgcaaattttaatttcaacaacccattaagtgcaaccaaatcttaagttctattcgagcttcacattctttctcatatgtttttgtcctttgtttttcattttggcgattgattttgattaagcattttttattcagatgtattagaagtttctcttttgttgaagtgctaccgtcaggagatggatgtgattaagagattgtagttctgttgttttagttttctctcttataaggatttggtgtgaatatctttaaattatgttgtaatttatgcttatgaagtgtctggcatctgggtgcaatcatttatttttttggttggaaagtgcgtgctatgttgattttaagtttgtcaatgtgaagaataagatgagggtaccctatattttaggaaattgagcggaaattctgtgaacatggtatgctactaagtatttgttggatgaattggtaagtctatggattcaggatataacgtttttctgtctagaggctatgttgaggtttgatttctgctgtgggaggggaagccttgcaatgaaaaactaatttactttcgtgttttgcagttggggctgaagctgaag

SEQ ID NO: 75319 - DNA, 677 bp, Carica papaya
  Intron number 1 from transcript evm.model.supercontig_21.1 84 (locus evm.TU.supercontig_21.184) derived from phytozom e v7.0 (chr-ID supercontig_21; pos 1761650 to 1762326 reve rse strand)
agccaaagacagcgcaagtaaatctcaaactttgtggaattgtttcttacacataattttttttaacaaataaaatatctgaatttaacatctaaatactaaatctaattagcaaggtcaacaggaattatgatcaaattctatgaaactaaattattaagtagtcttgtatttttggcccaatgatcttttacttatagctgcttaaatcaaatatttgtcaggaaaaaattttaagaaataaattactctaaataatactttgttggaaattgaaaaaagaagaatgaaaaaaattaataaaaagacttaatttttaatttataattatttttataaattttcaaatatattggtacacccaaaattttaaatatataaagcataattaattttaattcataaagtatattaaactatttataaaaattcaaaatatacatattaattattatatttataacttatatttaatttaattttgtgataaaataaatagtttagacaaattaaaagttttaaattattattttcaacaataccaacataagagcacgttccaacaatattgtcaatgggaaataatcacattcttatggtctctagtcctcctttttctttagccaagagagtaaggactccattaaaatctgatatttatatttatgggtgtaggt

SEQ ID NO: 75320 - DNA, 394 bp, Carica papaya
  Intron number 1 from transcript evm.model.supercontig_27.1 95 (locus evm.TU.supercontig_27.195) derived from phytozom e v7.0 (chr-ID supercontig_27; pos 1963592 to 1963985 reve rse strand)
ttatctcttcaagtatatcatcatcggagatacaggtgattcctagttttctattctgataatttagtttcctttctttttgagttttgtgatagaatttttctattctgatcgatgattgctttttgaattgaattgaattgaattttgttttatttttgttgaaatcggacggttgtttgaatgtcgattcttaattcgtatggatctccgagtttgtcttacttggataaatagctttgcttgtaaatttgtgtatgtatttagcttaccattattgctattttgatggattaatacgtgaaattacgtaatttttcattttgatctgttaacttcttttctgtttccggttacaggagtaggaaaatcctgtcttcttcttcagtttact

SEQ ID NO: 75321 - DNA, 921 bp, Carica papaya
  Intron number 2 from transcript evm.model.supercontig_52.2 5 (locus evm.TU.supercontig_52.25) derived from phytozome v7.0 (chr-ID supercontig_52; pos 194662 to 195582 reverse strand)
tgctattattatcggcacttccgtcttcatttttggtaagataatatatccatctatactcatcaaaaatttcaaatatacactcgtacatttcttcaaaatatacatatacatatatatatatatccactaacccatgtatatattataagtatctttgtgctcatagtaatattagaatatatgtacatgtatattactttctaaaaatgaaattaattctctgtgttccaaaagtttggggagtagctcactattctttacgttttactcgtggatgcaccaactaaaattaatcaaatccctttagaaaaagtgtttggtttctagaaaattttaaagacgatcgaaatatttgcagacaaaattaatttcatgctccaattctttttaagcactacgattaatttaggtattgatgatgtcgattgttaccatcataatttaggtatcatggaaaatataattaatcagaacataagaaaaaagagggattgcacgtgtactaaatccaaaatttagtgggttttcagggagaaagtgctttgaaaactttggagggccgccatcaattaattatgtttttcttctgtacaacaaaatattatatatgtgtgcgtatatattcttgtccttttttataatattgttatttcattattctagtggcagtagacataaagagatttctccaccatgtctctaaccttttcatgatcagaaatattcatgttaagtgatctgcaacaatggttaattatatattaatgatcctctaattacccaagattgtttcagatttaccacatacatttattattcctgaataggtatatgttttgattcatatatatatatatatatatatattataagtagttgataattacttgtaaaatatttcaggcacggctgcaacct

SEQ ID NO: 75322 - DNA, 494 bp, Carica papaya
  Intron number 2 from transcript evm.model.supercontig_264. 9 (locus evm.TU.supercontig_264.9) derived from phytozome v7.0 (chr-ID supercontig_264; pos 35858 to 36351 reverse s trand)
tggctctcaattgtatgtttcatttgatgctgtgattttacttgatgatgctttttcattttttttttttgatagcttaaatgggttttcgggtatgtatataatctgttgaaattgaatgggttttaagcttatgattgctctttgagttcagattcagaaatcggtggtggagtatttagagttgatggaaaattaagtgggttcttgtgttgttttgataattgtttgattcatattggctgagatgattttgttcatcatgttctgttaaaaacggtttgggttttactatttgatgggtatgttttgtatttttcttacatgctccaattatggtgaaaatggattaaactttttgttcttcttagctattgccttctagtctcctcaaatttattgcaatttggatcggtttattgaacttggtgttgctttcttcttgcttggtttctgtagacacatcttgtttccaaggtctattcttctgtccc

SEQ ID NO: 75323 - DNA, 723 bp, Carica papaya
  Intron number 1 from transcript evm.model.supercontig_5.30 9 (locus evm.TU.supercontig_5.309) derived from phytozome v7.0 (chr-ID supercontig_5; pos 2797619 to 2798341 reverse strand)
taggtatgtcgcttactctattttgtaatgacaatttcattgcttttgaattctttttccctttaacttgattctttttgtaatctttcattgttaagccaatcctgaagatcttttcagtggatctatgatactgtttttgttgttttcaaaatttttaggatatttcttttgtcaaggtgttggctaaatctgctttatctgtctgattaatcgacaattagtttatggctttattttccctcaatttggatctactgcaacttttgttaacttaattagcgtattacttctaattactcttacaggattgtcttcactgctatagtttataagcgccgtagcatttttacttttaaacgttatacttgcactgcgaagaagattatgtgggttggtgtcatacttcatactaactctttaggttgactccaaatcggtctagtttttctcctttctatatatttttatgatttatggaatttctattgactggacctggctcaaccatgcctgaggcaaacccataatcatgcatatgattaattgccttcaaattttagattattttctctttctgattacgaatcacaaagtagcaagcagtgcaaattttctaatactgtttaatggtttgagttaatgaacgtcctagcatcttctcatcatcttggttacatgtatgcagatcgtggatactattcagtggagacagtaacactc

SEQ ID NO: 75324 - DNA, 858 bp, Carica papaya
  Intron number 2 from transcript evm.model.supercontig_55.1 44 (locus evm.TU.supercontig_55.144) derived from phytozom e v7.0 (chr-ID supercontig_55; pos 903743 to 904600)
aaggttggccctttaaccttgctctctgttttattcctttaagttcatggtaatgtagtatcacactgatcgggttgtattatttaccatcactttagcctcataaagaaaaaaacctttttatattaaaatactcttgttggtatatgtacatggaatatattgttgcatcaaacacttggaccttttttgggttgaagttaatgaaagaaagggaaacaaaagaaattttggtttttgaaagtaaaggaaatgattattgtaacttctgtttattctaggttatagaggaaaagaaagatgtatcatactataaatgaaataacaaattagaatgtttaggatctaagaacttatttttaatgttgtgtaaagccctttcctttcccgaccttttccatttcctccaatttaggctacttttgtttgcagatatttaagtgctagatttgccatcaaattttttgatgtaccagtggatttgtatgtgtatctgggtattcagatacatcttttgcaacttcgatttatatgcttgtttgttattgatttgattgggaattgtttggatgagtggatataggtaaatagatggatatagacatatagatgcagataagtattttaaaaaaactactgactttttctgctagatagtgcaatcttattacatcattattgttttttgggctctatgctagggactcgatcatggaaattatacacttctgtgcagatatggatagtttaattacttgtaattttatttttaatttttggttaaatacggaaagtgtttgttttattatttgtgtcatattaggagaggtcaactggcagatctcgtggttttggata

SEQ ID NO: 75325 - DNA, 984 bp, Carica papaya
  Intron number 1 from transcript evm.model.supercontig_52.1 16 (locus evm.TU.supercontig_52.116) derived from phytozom e v7.0 (chr-ID supercontig_52; pos 955147 to 956130)
acttctccagtttcgtcaggcagctcaatacttatgtgagtccttctaaattttttaaatgaattatgattctctgttcttcattttccgatatcattctggttagaaatggaattcaaatgccaaaatcagatttttgattaagaatttcatctgggtctgaattcaatcggtatctctgttttttctttttctttcttaatgccctgtttctaatgattctctcttcttcagtttctcatttcattctggtttaagtgggatttcaatgctaaaatcagatttttaactacggttttcatctggatccaatttcaatcagtatttggccttttcttttgggtctttcttaatgccctgtttctactctgttctgggtgtaattttgattttttaatttcagccattaaaaaagaagaagaagaagaagaagagaagttctagtttcttctggaagtactagtttcttctggaaattctaataatataatattttaagaggaagtttcgagtgagttcttagattttcaattatctctgaaactttcctttcctctttctggaacactctgcggtgtttttataaaaaaatggtttttaatttgtctgtttgttaaagtagaatacccttcttgtaggttctggaatctgccacctcctctatccagttgaatggatatataatgcttctcttcttgtgccgttgagtaattttttaatatattttgcattgagaatttcactgattagagtcttttaaaatatattttcacgtgggtccttgatcaatctctctgttttttttaatgggtaaaagataaaggcatgaataaaataataaatctccttcaaattttcttctggattgctgaatctagatccttttttctccaataaaaataaaatttttttaaaatttttgaattgggttagtgattatggaagatgggtattgcagggttttagaaaaatagatcctgataa

SEQ ID NO: 75326 - DNA, 790 bp, Carica papaya
  Intron number 1 from transcript evm.model.supercontig_92.8 2 (locus evm.TU.supercontig_92.82) derived from phytozome v7.0 (chr-ID supercontig_92; pos 691996 to 692785 reverse strand)
tggctgtcaaagttatcccaaagtctaaggtctgtaagttttccactactgattctgatgagagaaaaacattatgggtctcttcttggttgccatgaaagtttcttggttcgaatatgtcctattcatgtgttagatttttgttcttctggaaacattttatttttttttttgttttctacgagctgatcttgaacatcatattttgattcttattgctctactttgactgtcttatgtcattcattttacctgctcatatgtcggtactgttggaagggattatgttgtgtcaccttggtattattctttgggaatgacaatgctatgaggttatcttagtcttgtgctttcgtcatttagacagattcagcacttgaccaaatgagtttttttctcagtgattaagcaataagcacgtaagtacttcaagctggtttctctgattaaattagattcatatatatagtcaatttcaagcaaaaatgctcttaccatcatcgtaaacaataatccagtttgatacttgctgctattttccattaattggatttggtaggttcgataaagctgcgataatgtgtttgatgttgtgtatgatattgtgttttgagttagttaaattcatatacagcacaaagtacaaatgtcactttgtttcttaatcatcaatgtatgagtaaaaggaatcctgatagtcaataatgagtatttatcattctgggtgcttaatattgaaaccaactatctctctgttttcttgtaataaaaataaaataattattggcag

SEQ ID NO: 75327 - DNA, 1065 bp, Carica papaya
  Intron number 1 from transcript evm.model.supercontig_4.20 5 (locus evm.TU.supercontig_4.205) derived from phytozome v7.0 (chr-ID supercontig_4; pos 3667205 to 3668269)
aagtcgctcgccttaaggacaccgatctcttcaccgtacgtatatgtatattttattttgctctaatggctcgcatgcctatctttgatttagaatcatttgagacagagttcgtttaacctaattcaggttcttggttgtgtgttaaggtcgtcaacttgattttcaggtgttaaattcatggttaattgtagatgggaatgaggagattatttttcttctaatttgcctattgtgcttcctttttgctgcttcttcttttgttaataatttagtcaaattaaatgtgcaagcgaatttgaaaggtttcagctccatttagtggggcaggagggtctggagattcgggagttttagatttttcaatgtgatttgactttagatttatctgggtttgctttgggccaggagatcataattttgtttgggaaatgaattcatgttattcaataattttgcacattattagaaacccaagatgaatgaactggacagcagattgctagtcaggttttgtaggatattcagatgcctcaatgcttttgggaaaaaaaaaaaggaaaagagttgattcagtattattcaagggatgcagaaaattttcctgccctggagctttctctgtgatttttggttgaaggtgttgggttaatgggggcaagatcaaattggatgctagtcaagatgttgagaaaaactatttagctgagtgtaagagttaaacagctataattatagctgtggaaaaatcttatatggtcctacgtgaagcaattactattatgtttttgtttatacccagctggctccaagaagtgaatgatgttcatttatgtgttcttctgatggattcttgcaatcttactgaagttaggagactgaattttttctgtatgaatggtgtagtttgtgtattaaagcatagggcaaactttttctaaccttgtatgaaactagataaaaatttattctcttaaacatgttaattttttctagtttataatagtttagctttgtttaagacattcaggttccaaacttcttcacttctgctgaatcgaaggc

SEQ ID NO: 75328 - DNA, 429 bp, Carica papaya
  Intron number 2 from transcript evm.model.supercontig_19.3 7 (locus evm.TU.supercontig_19.37) derived from phytozome v7.0 (chr-ID supercontig_19; pos 325773 to 326201 reverse strand)
ccaaagatgtaaaagtttcttccaccaatttctgtctactactgattttgattcattgaattgacattaatgtcatacttatttctaaggcaagtaagaaatatttggcaccagagtgttaacaataagttttgtttagagactcagcaagcttgaattaatattctctcaatggcgtgcaccatatatatattatatataataacaatatattcaattttcttggttctcataaattaaaagatgataatggtatatattctctcatcagtaacttttcgttgccatggcacgtggaatgcatgtgattctgtgccactttgcaaattcatgctccttgatcatcactggaaaaagaacaaatatgtgaatatagtaatgcttgcttttatgtccagcagggagtacccaacttatctgaattcgggg

SEQ ID NO: 75329 - DNA, 990 bp, Carica papaya
  Intron number 2 from transcript evm.model.supercontig_46.6 (locus evm.TU.supercontig_46.6) derived from phytozome v7 .0 (chr-ID supercontig_46; pos 80775 to 81764)
ccagagtgcttattaggcagaagcatatcaggtgaagctatctaatttggtgcctattgtagcagccttttattttattctcttctgctatatttgtttgcgagttttacttctgtagttcggatcacgtacaacttcaaatgcatttttccaggaaacaactaagccttaacttcttttttttttttgaaataacaaccaagccttaacttgccataagatgtaatttgaaaggctcttttccaatggaaactttgtgggaacttgttagttttcgtaaggcttcaacatttccaatgccattgtaattcttgcaaaacagttgtccggttagttttgggagagtggatattgttgcattcttgaaggatgtcattggctgttatgcatatagctttcactatggcactttaggtctccatagggagaaatatatgggattaatgttattctggtgatactatttaagaataatatacttctttctataaaaggaacaacttgtctactatatgagtctgaaattgttgttttagtttattttattaaagtcagtcttctaagacctggacaagtggattaatgaaatccccgattcctttggtgcattttttcttttatgtttaccacagtattttcctctttctccttttcatctcctgcatatatgcaaagccaacaagtggattgatgaaaaagtctccagtcttgtatcaatgacctgcttcaccctgataatgttctatttgttttctaccacttgccagttagttctgtttctttaattggttatttcttttttgcttaatatacatggtaatttctatggcgatttggtacttctgttgccaacgagaaacttaagcataatgtggatgtatttcttacacacataacgagtttcctataagaaaacatgttatttctgacacacaggtttaccttggtttgacagggttggaagacaggttgtgaacattccctctttca

SEQ ID NO: 75330 - DNA, 289 bp, Carica papaya
  Intron number 1 from transcript evm.model.supercontig_48.5 8 (locus evm.TU.supercontig_48.58) derived from phytozome v7.0 (chr-ID supercontig_48; pos 322855 to 323143)
tctccgcaatctcaccgcctcgcaattttttaacggtactctctgttcgcatctgtacacgttagcgggcgtgtgtatatctatattatccacgtgattatggtttggttgattattaatcttctttgattagctgaagtgattgatgcttttcatttagttaattgttttttattaattcagaagtggtttactgaacatgtatcttcttttgtgtatcaaaattgttcttaatgattcgaatgcttttgtagctcaaaagtacagtgtgattcttccggagaaattg

SEQ ID NO: 75331 - DNA, 894 bp, Carica papaya
  Intron number 2 from transcript evm.model.supercontig_75.5 2 (locus evm.TU.supercontig_75.52) derived from phytozome v7.0 (chr-ID supercontig_75; pos 503533 to 504426 reverse strand)
aggagctttctgtcattctggacctcatcaacactgtgagtctataacttttaacccatcattattacttcaatccatattataagtttttgaaatgcaattcatagcacacaaaactaaattgtgtcgcggtttttgtggtttatgtttagttcaagtgcttatgaatcttactatggtaattctttgtatgtaaatatgtgttactttgaagtggaagaacctatgcttttgtcttgctgagagtataaggaaaaattgagtagattaaaacttgaaagttgaaatggaccaaacaaatcaagtgtttaatatattgaggctataagtgtacatggcaacttggcaatgtttggtgttgtcacttgcattttgtaacctgattttaaaattggtgaagtaaatgatcatattattaatttaagaaaaaatttaccctgtaaccagatgattgtgttttttgaaggattaagattcaatgaaaatatgtggatcggatgattcagctcttaatggtttgctttcctatgcatcttgcttgttgtagtctggccagatcaattagtttttttatgtgaggggcaaagttagtaaatctcattttaatttttggcatatacaaaaaaaagagagaaaatccagattatatacttcacttaacatatcactgatatgcttcttttttgtacatatacaaaatattcttaaacctacagggatttcatataacagatatacaagatacaaatacaactctattgtattagtaaaatagaaaataacatttagggttattactggcactgtgagaaaaacggggaaaaatgtttgatgctttttttaatttgatagtaccttatatatatataataaaatgttaaagattagcttgag

SEQ ID NO: 75332 - DNA, 903 bp, Carica papaya
  Intron number 3 from transcript evm.model.supercontig_81.5 1 (locus evm.TU.supercontig_81.51) derived from phytozome v7.0 (chr-ID supercontig_81; pos 194275 to 195177 reverse strand)
aactggaactccttgcgagtcacgcaagaaaacaggtgaattcttgttcttctctctgaaatcttctggggtgtgctctgttttttcgtcattgattttgattctctgaatctagtactttcttggtgcctcagaaatttgtacggcaagaaattaacataaatatatatataatgtaaggaaaattcaaacacgaatcattatgttcttgcattaacccatattagcctagattttttccctttaatgggaacttttagttatatctgtcatttttcataagtggtaaatttctactgtggattcaaactcgtggggggtaataatacgtgcttttaatcattacaagacaataataatagatttactcgaacagttacaatttcaatattgttggttgtaatgtatttgactttgaaatccaagaaggggatatattctgtgtttcaatattccattttcatcaactaagcttcaagtttagtggtgttgtttgatcagtgtgtagctggaatcttccccagtggtccactgctcctaatttttatgttgcttttccccaacccaacattaaacttgttttttgatatttttgttcttagattttgacaatacaatacacacacacacacacacacacacatatatatatatatataagagaaaaagtgtatcccactttatggattatataatgacagacattactaactttatcaatacagttaaaccaattatttctattgtatttttctaatgaatttgtattatgaatagtatatatatatatatataatatgtaattaatacaaaaaaatttatcaagactgatttttgggtttatattggaaggaatattatgagaaatgtgaagtaaagattttgggtttggtggtggtcagg

SEQ ID NO: 75333 - DNA, 732 bp, Carica papaya
  Intron number 1 from transcript evm.model.supercontig_29.5 5 (locus evm.TU.supercontig_29.55) derived from phytozome v7.0 (chr-ID supercontig_29; pos 443481 to 444212 reverse strand)
ctggttcgaatccgccaaaagttatccgccgtctcgtgagtctcttgctagttcgagccttaaatctcttccttcttttagtctttcggttttgttttcactctcatttggatactgtcattttcgcttgatgatcgaatggaaggatttcagcgatagagagcttagatggatagttatacgctttctctttcatgttaaataactatgttgttatctatttttaaatgtttttttttatcctatcttattgtttttttacctttattcccgggctctcaattgattgacgtaaacattttccctttttgttctaaaattaggagctcttatgtaatttgcttccgttgattggtgtattgatggagctttgggtacttttgtctacatgatctgttttttgattacagttctatgtgacatccttttcccctattttatttcttttataaattgtgaccttttatctttttcttttctttctttttccggagatggtgggtttgtggtcacatcatagggaccatactgaagttgttaaatttatttaatatctggggttttgttcgcggattgaattatctgattgatgttgcttttaactattgatgtaatgatgatggttctttagtgattaggatgaattatagaatagttctataagtgacatcctactcttttcttcttgttttccttcttcagcatttgtagcaaagttgtttctgagagaag

SEQ ID NO: 75334 - DNA, 783 bp, Carica papaya
  Intron number 1 from transcript evm.model.supercontig_2655 .1 (locus evm.TU.supercontig_2655.1) derived from phytozom e v7.0 (chr-ID supercontig_2655; pos 1609 to 2391 reverse strand)
aggtcttctacttttgtttgtctttgttttctttttaacggaaattgctgaaaattttgttgaaaagaacgtgaaaactataaattgtttgttttacttcaatgcttcttctttgatgttcataagtggttgcttcttacaatgtgatttgtgttcttcttggggctttcgtgcatttacattggggaggaagtggaaactgagtggagtgtgaattttgtttttggcttgaatctatgtccgctttatatttaattttctggtttacgtaagggttgaaattataatatataaaacgcaagtaaaagcttctttctggttgacttcgctgagtcactttgtaatgcacttgtgtttcacattttaaagacgataaatggaacaatgcttctctagaaacaacaagagaattgtcaaacttttctattgttgttccattaaaaaggctcatgttctctgtaacttttctattgttgttcctcaaaacggctcatgttctctgtatcctggcatcttgtgaatctcgtgagtcatctagtggtgtattgtatatttcttctcttgaggagcctacactgtctctcatgctgctgagctgattgtgcaacttgtttaattattatcttctattgcttatccgtacaacaaattcagaaaaatgctatggttattcagtagttacttctccgatatggttgccacagcttactgattattgttacttgtatgaattgtttattctctctgtttgtctctctctctaggtggttgaagtcaagtcca

SEQ ID NO: 75335 - DNA, 492 bp, Carica papaya
  Intron number 3 from transcript evm.model.supercontig_64.1 51 (locus evm.TU.supercontig_64.151) derived from phytozom e v7.0 (chr-ID supercontig_64; pos 1095451 to 1095942)
gaattaaggtagataacaccaccattacatgggcttttctttttctatattttgatgttgaaggatttcaaattattatctagggatttttgctgtacaaattttttactagaagtagtcagaagcacccaaattttctcactgactctttgtacattgagaattttcccataaaaaattttcttaccattgtagcctctggtttccattgcacataagaaaattcaaaaatatcatttgtttttattctcctattgattctattttaggtttctgaaaaagtataagtattttatcttccatcaactgacgctcatccatcacaaaacttccgagactgtattacaatttcttggacatggatcttgattcaacattctttcaacatcatgtatttctggtcatgtcatgatactacttttctctctttttgatttgatttcattccaacatcttgcaggtggcacttccagcagagaccactacagaaac

SEQ ID NO: 75336 - DNA, 475 bp, Carica papaya
  Intron number 1 from transcript evm.model.supercontig_78.1 (locus evm.TU.supercontig_78.1) derived from phytozome v7 .0 (chr-ID supercontig_78; pos 4502 to 4976 reverse strand )
gctaggtcggtgagggatttgaacctggaagggtattagtggattgaaaaaacatgtaagtctcattcttcttactattttttggatggattaaaggagaggaataagagaatttttgagggggtggaagatgatttcgataggtttagagatagatggtttaaaaccctgagtttttttattatgagtcatcctttttatataatggaggattttctggatcttattgatattctaactgatatgtaaatatctttcgtatatggattgtcatcctcatggtgtttgtgaataaatgaactatattatactttttatctcaataaaaaaaagaagagctaattccatttgaaagacaaatataagttgttaatccaaatttaaagttctgtttaaataacattctgtattaattgaaaggtcaaaatttatgtaattaggtgggagtacgttctagagtacagcaaagacataa

SEQ ID NO: 75337 - DNA, 395 bp, Carica papaya
  Intron number 1 from transcript evm.model.supercontig_46.9 (locus evm.TU.supercontig_46.9) derived from phytozome v7 .0 (chr-ID supercontig_46; pos 101865 to 102259)
cctgctcttgtcaattataatactggtacctttctcgcttctttttccttttcttttccttcatattttttttgttgttgctcttattcagttttaagtttagattgattccggcatgttagttctgacttagagatccattttataccttagattaattggattatagtttgaatctgtttactgatatggaataaatttatggaaatggcatttttaatagccgatgaaatctattgctacagaataacctgacggttgttagaaagatagacttctccaggaaaatagagtctcaaacttttaggcatcacttaagaagttgcttttatttagcgatgttaagttcactagtttggatgataatgtttcttccccattacaaatttcaggtg

SEQ ID NO: 75338 - DNA, 811 bp, Carica papaya
  Intron number 1 from transcript evm.model.supercontig_207. 17 (locus evm.TU.supercontig_207.17) derived from phytozom e v7.0 (chr-ID supercontig_207; pos 399087 to 399897)
cagcagtaatcgagttgaatagaagcatcattcaggttattttcaaaccgtatgtgcataacttcagctgcgccattattatggatgttccctgacattgatgttgccaaattctgttgttctttttctgctacacatatgataccatacacctatgcttgtattacattaaagtggttctaattgttctaaataggtacgataattgggctctgtatatgttagctagttttgctcatattatagttgttctttgtataatttattgtcacctttctttttccttttttgttaaaataaaaaagttttgatcctcgttaagattatttagcatttggttaagagaaaaaactgtctatcatttactggggaaggtgaacattttgaagtctataggataggttttgacacatactttgtacattctgagcaacatctgaatctgaggtttagctctttaattcttaatgcattaattcatgaaactggacaccttttgtttgaaggaattttgttcaattatctgaatgttttttcatggaattgtgtatttcgtaagacaacattttagcacgtcttctaaatatgagtaggtgctattttgaattctaatagtacaagaagatattgtcattagtaatttggcgtttttgataatagattatgtttgagtgcactgcatatttgtaagcttggttaattttataattggtttagtaaatatttcagaatatgagtgcacgatcaaactgatgctatcttaacttccaatgcaggctggaggggctgccacaaaaagtatactgtcaac

SEQ ID NO: 75339 - DNA, 997 bp, Carica papaya
  Intron number 1 from transcript evm.model.supercontig_62.1 09 (locus evm.TU.supercontig_62.109) derived from phytozom e v7.0 (chr-ID supercontig_62; pos 699715 to 700711 revers e strand)
cgaacttcggggccacgaagacgacgtaagatctctgattccgtactctctgtaatagtcacattataatctcctgttaattttactttctcgaagattaatttaaccggggagggcattttcgtacaaaactcagttaattcttattcatacatcgatctcttgaatttcgacgctctccattgggatacatgttgtttgccctgttgattgttgttttcttttcatttgtttctgatgattggtttatcagtaggaattaaagtaattcaagagtcatatgcgtttgtaaaataatgtagaactgaatacagggagagagaatagcatgttctcactctttctgcgttagcggaagctaaattcatgtaaaccacttgatgtggcctcaatattaagacacgaagtcgttcgaaagaaaggcaaatatgttgaaaatactcgattcttacctgaataacaagaaaggtatattcggaaactaaacatgcggatttgctccgtggaaaaagtaaaatgttagatttgcgtggttcaggtaaagccttgacttcctagtctcttatatgctgcgtacttttaccgtacgtgtttttaacataggatgaaataaaattagcgggtagatgagcagacccatacaattttttattggcaattctttaagtatactgataagaaaataagaagtgaagtgcactatatgttggtctgtccctggtttttttctttttattactttcattgtctgagttggtctctccaaggagatggagatcaactcatttcttggttttttttttttatttgtgtagaagaaatgacaacttatatctcaatcatttgaattttcatataacttatttctacatggtatcaaatcaatccatgggttacattttgttaaaaggagggatgcatacttttgtatatgcacaagaattttggtgtgatatgttaatctatgtgactaaaatgaatgtcaggttcgtggaat

SEQ ID NO: 75340 - DNA, 629 bp, Carica papaya
  Intron number 1 from transcript evm.model.supercontig_5.12 3 (locus evm.TU.supercontig_5.123) derived from phytozome v7.0 (chr-ID supercontig_5; pos 914214 to 914842)
tcctcgacgaacccgaagactccaacatccgagccgtaagatctctctatctggatctctcccacgctgacaaatgttttctcccttttaggtttcttttttatttggcatttaatagaattagcgtcttttatgctgtggttttgtgaggagcctcattaaagcttcaaactgcaatccagatttcaaatattgctgtattgtaagaatacttactaaataaaaagattagggtttttttttgtggaaaaacaatcacgtgaagtatttatatgcaggttttttgtttggcaaattgagaatcattaaaataaatctatttatttatagttttctaggcagttaaaatgattattggctttttttttttttttatcttctgccgagacattcgaagaagcagaaaatatggatagatgggaataggatgaagtgaacctttagtgagttaacttgttcaatttgttatcactttaatttgacatcatgtagttgaagaggagctgagattgatattgcaagtttgggctggtcagtccgagggttgggatttggtcgcaggttttgattggttgcctttgtaacttgatgtaggttacttcgggagaaactccttacacgtcagctag

SEQ ID NO: 75341 - DNA, 723 bp, Carica papaya
  Intron number 3 from transcript evm.model.supercontig_18.1 46 (locus evm.TU.supercontig_18.146) derived from phytozom e v7.0 (chr-ID supercontig_18; pos 1285441 to 1286163 reve rse strand)
gtatcctcatttcaggtggcacatttgtgaacaaggtatgattttccagagctgaagtgttttaactttttgtttttcatatccttgtaccttatgtagttcctacttcggatcattgacatgtttctttggaagattattctaattaaaacattcttgtgaacatcaacaaaaacttatgtggttctttatggggaataattatatgtaaaaggtagtcggatcgccaacatcaagtatgctatgagaagcaaatgaaccatgttactgaaaggagtagctgtcttagaggtctaacatggttaatttgtatcaaggtgcaagggtcttcacatttttctattttaattaagatattttgtgagcttcaataatttatgtggttctttgtgagtaatacttatgtataaaggattgttgggattgccaacaacatacagtatgttataagaagcaattgagctgtgttattgaaaagtaaggagcagttatattggagatccaaccacctgattagtttgcatctaggcgcaggggtcttcacatttttttgcttctatttcatgtctttttttgattattttcttaaagacttttcttcattttcttataaaagagatgtgatttaattatcagtgttgatcttatgtcatttatgcgttcttttaatttattgaaatttttgcagagcaccttagttccttcacatacagctgcaggtcc

SEQ ID NO: 75342 - DNA, 1030 bp, Carica papaya
  Intron number 2 from transcript evm.model.supercontig_44.1 19 (locus evm.TU.supercontig_44.119) derived from phytozom e v7.0 (chr-ID supercontig_44; pos 1516156 to 1517185)
gtaggtgaagcagataccaaaacctcatctcccaggtttgtttccttactctcgttttgcttttatatggctaattgctagggttaataaggaagtgattgattagtggcaatgatggaggggtttatttgaatcagtattttgttttggtatttggcactatattgtaattctgaaaataactactcatatttgctgatgattggaaggatattgctaaatgaaaatgctagggaagttattagaaaatcatttacgagagaatcggtcctgaaatggttattaaagggtgccatgattgtttcaagtttctgaaatgacatcttggactttatggcatcctcttcaaagtattttgctccctcttctagtataattttttttttactgatagaaaatggtagctctttaaaggggaagagttatcaatatatataatttatctttatgtcaggaaggaattgaaggctacttgtttatgggactctaatcatataaaataaaatgacacatgctccttaagctcatctatgctcctcggagtgtataggaaagtggtctttatggtaaaagaagaatgatctgtgccctttacttcttctagggcaaaatctactctcacattacttgctagtgtaggcaggaaatgaaatcttctgagagcagatgctttcattttttgctgatgagttttggcagaagatgatgtaatacgctccaattatgggtgtccactgaggattgatgcccatattaagccatatgtcacaatagatgtcctcaattttgaaacactggacaagaattcactttctttgtcagttgaatcatataaatgtgttggactttagtgtgttgtttctttgccttaaaagagctatgcttaagtattactgatttacctaaaagatattatgagggaagatggggcatatttcatctgcgttagatgtacccatttttctactgctatgcaagcattagacataatatacttgaaaacatggcttcagaagtccaggagaagcaa

SEQ ID NO: 75343 - DNA, 898 bp, Carica papaya
  Intron number 1 from transcript evm.model.supercontig_271. 2 (locus evm.TU.supercontig_271.2) derived from phytozome v7.0 (chr-ID supercontig_271; pos 6546 to 7443)
tgtcttactaggttgacaccttgtagtcatcacctgtaagaagatgggtctaggaattgtctttggactcaaaaaattcatgtagtgctccgaacagccacctaatcttgaggccaaaaagttaaaaggagtaggtaagcctaatcccattctttgtaatccttagaatatcttggacctctaccttctaagaaaatgtcaaaaagattctttttatgcaacaaaggacatttatatgatttaattgcaagacaaaagctagttattttgaaagtttaacttatccaaaacctagcaacggcctgattgcaatctattaactaccattcttctcttatttatttacttattttgaaagaaaagaagctttattagaactagagagaaaaagaaatgcgaataacaagactcttcttctcttattcttaacctattacttatttctaggttgtttcaatagaaaaaaaaacttattcctaccttaacccaatctgttaactgccctttttctcttattcttgacctatgaattatttctgactttaactattattaattattttacataattaagatacttattattaattaagttacataatgacgatactttgtctgttggactcctcttcatttgtccagagcatgcaagtaaatgagtgaaagtagttactagtggttctgtttttggctttgaaacccttgggcgacagattttagaataaagatctcatattttaagtcattttggttttacaaaaagctcaaagttttgctctcattccattgaatctagtatttgtttgtttatatgcattttcaaatctgaaatttcttattgatgctttttctttcctcggatgttggagtggggattacctgctgcgtatattaggtg

SEQ ID NO: 75344 - DNA, 795 bp, Carica papaya
  Intron number 2 from transcript evm.model.supercontig_205. 8 (locus evm.TU.supercontig_205.8) derived from phytozome v7.0 (chr-ID supercontig_205; pos 111933 to 112727 reverse strand)
ggtgggcctcccctgtactcgcagaggaaaggttagccatcttcattctcatttcggaatttctactttagtttggattttactttaaatattctctggagaatcatctgtttataaccattattgtaccgaaatgacaagaaacctacacatgtgtaggcattgaaacaagaaatctgcccgaatgaactttttcgggaatggtcttttgacaaaaataagaattatttcctctgcttttctgcaccatgaggattcttgccatacactttgtcattcattctaaaaacttttggtctttaacaagttttgagttttgttattttcagaagttggggatgatgtactaacagactatgaaaccaatgttgtttcttctcttggctttagggtttaggttttgtttttcatgaactccaacagacatcactcatagactgaattcctaaccttctccaagcatgtcagtatacatttattctgttggaccaatttcgccgctagtatctatttagtttcttctgattaattcctttcgatgcctgactattaaattcttgttcttcaaatacaatgagctaagtgtagagcatgtatcgccagctctcttttgtttgctatgttgcttgagtgcatattaattcacgaggcccgtgattcaaggattagcaggagtaaaaaagacttagagagcaccagaatatgtgggagtgggatttaacaagcttcttttttatgtattttcttttatctcttgcagggcatcctgctctgattgcacgccaccgaccattt

SEQ ID NO: 75345 - DNA, 255 bp, Carica papaya
  Intron number 2 from transcript evm.model.supercontig_36.5 0 (locus evm.TU.supercontig_36.50) derived from phytozome v7.0 (chr-ID supercontig_36; pos 419926 to 420180 reverse strand)
acgaagagagctccctattttctgaaaaaggccgagtaagtttgaattggttatttaatttagtattgttggattaaggtcctgctatatttaatcataattttacatgtaaacatttgtttttatcctaataattcagttatgcatcggtttcatttttctattggtcttcgatgtaaagggaaattaactcttattcaggtagagttaaatagataataataatattcacttgcttatttcagggaacttaca

SEQ ID NO: 75346 - DNA, 545 bp, Carica papaya
  Intron number 1 from transcript evm.model.supercontig_32.4 0 (locus evm.TU.supercontig_32.40) derived from phytozome v7.0 (chr-ID supercontig_32; pos 529287 to 529831)
agtttgtgaattggaatcgttgggagcgttggaaggtaagatttcctatgcacttcgagactgttgggttcattttatgtttggttgcatgtcaagtgtagggaaaggaggagataaaaaataaaagcttctattctttagttcagtttgattgggaatcctaattctgtgaagtgacaataacagtacaattatgacagaaatttgaatgaagataatattttgatttcaaatcaatttcatgtctaagttttttgtaatgatgagaacataaatttatgattgtgggtgaagttgatttaattatatactaaacggaaaaattataattaactatatataagaagtaagtaggacataggaattgaatgagaatagaataagtttgaaccaaaagcattattctaatttttaaaacatgtaaggattccagtttcatcaatgtaggtttttttttttttttttttgaataaacaaacataatgttgtggtatgaatatattccaagtcaaaatactggatttcatcatatcagattgaccact

SEQ ID NO: 75347 - DNA, 650 bp, Carica papaya
  Intron number 1 from transcript evm.model.supercontig_70.6 (locus evm.TU.supercontig_70.6) derived from phytozome v7 .0 (chr-ID supercontig_70; pos 73919 to 74568)
ctcactacacgtacagtggttcaattaatcacagtgtaagcttttctaatcactacaggtgcagtggttcaatatttgaatactcttaaattaaagaaagaaaaactactgacatggaactcttgaaatgggtcttggatttttgctcctgtatatctgtgtgtgtgtgtgtatatatatatattgggatttgtgagtattccagttcaagttttgacactaatggaatttgcttagatttagttgattcctaatttcctcacatatttgtactacttttagactatgtatattataaatatgtgtgggttgttatctattttttatacatatacatatacacatatatgcacttatgtaggaactcttgctccaatataactatgtcccattcagtaagccatagaatatcacatactctgtgaaaatctgtataaactgatttcacaacttaaaacaaagaagagttaacagagggattagagaaaaaaaaaaaaagaaaaggcgcagtggtgttcttttttgaattagaaaaaaaagaaatatattctcaggtttagataattatagatatatagatatgtaagttatgtgtataatgtgaactaatgtgtttttccatactcatatattgaataaattaggtatca

SEQ ID NO: 75348 - DNA, 960 bp, Carica papaya
  Intron number 1 from transcript evm.model.supercontig_74.7 0 (locus evm.TU.supercontig_74.70) derived from phytozome v7.0 (chr-ID supercontig_74; pos 693860 to 694819)
cctaacctaatactttctgtacgataatttttttctaatttcactttcttttaactcctattcacaatctgcttagttaattcgaaagtgttaacaatgtcattgttgttcgttttagacactgaacgctgttgtgagtattagattgggtgagtgggttgagattcattttgggaattctactcgtcttacatgcttttaacaaagaatattgttttggataaggttttagtaattatcagatagacagtgaggatgaagaaagaaattgtatcactcacatggcaaaagcagttattttagcatttttatttgtacctttttcttctcattttcgtattaatcactcttgaggtattttgcgaagtgtataattaaaaaagaaaaaacttgttgagggcgtgtaatgtctgtcagtttccttttcatgccaatttagtgaagctatatctttagtcttgatgggaattccttccgtctcaggcccgcccagatttgttcattattttcaagataaatatctgatttgctcttgtggaagtttagaagtgaattttcccatggttgtgttgggtttagaatgttcatgagacctaaatcactgtaaatatatgattgctttgtttttgctcaaaagtttcacttgtttaatgagctagcaaagggggactaagtgcgtggtaactacaaatgaacgagttgtagatttactcttatgcacttcggttatcattcatttctcactcgattttttcagaccttgtatgaaaattcatgtataatctaattattaagtggtaaaagaattagcattgaattgaaccaaatgcgttaagttatgtgcaaaggggcatgtggttttcctgcgtatctgatgtcagcagaaaatttctcagctgccactaagtggttatcgtttattcagggtcctccaggaacaggaaagactactagcatttt

SEQ ID NO: 75349 - DNA, 713 bp, Carica papaya
  Intron number 1 from transcript evm.model.supercontig_80.8 1 (locus evm.TU.supercontig_80.81) derived from phytozome v7.0 (chr-ID supercontig_80; pos 610118 to 610830 reverse strand)
attcctgggcttctgtctctggctttgccttcgtaatatatatatatatatatatataacatgtgtattaatgtgtggacatcagtgcctgttcttccttggtttgagagatttctataaatccctgcaatgggtcacttcaaagttgaaatctttatcatctttattagctgattcatggacttcaagaacttatttttgcttcctgttttctagtacttcaaaagacttcaagtgttgtcttttctagttcggaagaaattcaatctggggcttcgtttgaaaccgaggccgggggaagattaattcttttatttcctagaaatttcaaggattactgggttacattagctggtatcaaaagggtactctgtaggatctttgtgatatcatgtaaacttgttaaatacgtgcgtgtgtgtgtatatatttacatcagtgcttgcacttccataatgaggccaaagtcaaaagctttacactatatagattaaatatatgcagctgaaaataaaatgggtgtgtaaatggtaatacagagtggaaaaattgttgggcattacaaggtgtgtgtgtgtatatatatatatatatatatatataaggcttaactcattggctgtgtatgtcaaattagtagatttacaagatccctgttgttgtttgtttggattttagacaggattaagtggtgcactagagaccctctgcgg

SEQ ID NO: 75350 - DNA, 618 bp, Carica papaya
  Intron number 2 from transcript evm.model.supercontig_1902 .2 (locus evm.TU.supercontig_1902.2) derived from phytozom e v7.0 (chr-ID supercontig_1902; pos 10572 to 11189)
gacttcatagggaattggtcgaagcttgctacactgtgagtgtattatttaattttcctcttttattttttgtgtatagtttatttacttttctttgtagtctaaagctaatgtctaatactgcagcataagtttgttatactcgactcataaatgaagtatatcaattcgaatcctgaattttgaatttagaatattaagggagaccaataatttccactatttctttaattcacgaaccaaattcaatctaatgggatagtttatttaaattttttttccaccaagaacattttgtaaaaagatgtttttcatttctattttttttttggggaacattatttagttattttttctgatttcataaaacggaaagaagaaaatatgtctagttttaggagtttgaaattcaactatcttctgaatcatcaatctaatccttttttttttaactttagaaaattctattcttccaactgcaaatttaagtggaacataaactaccatcttaattggctgctttcttttttcaaaatcttgcaagctttacaatctttcttatttctgtatgtattctttgtaggagatttcaaggtaactcttttgaaggtcctattc

SEQ ID NO: 75351 - DNA, 929 bp, Carica papaya
  Intron number 3 from transcript evm.model.supercontig_78.5 4 (locus evm.TU.supercontig_78.54) derived from phytozome v7.0 (chr-ID supercontig_78; pos 682053 to 682981)
cttcttggtgctgcaaagatacttaaggaaaatattcaacaaatttaggttctttcctttctttttcattcatataaagtcactggttgctgttatgttaccgattttaattgtgagttattgaacagtttagggagaaaaaaaaaagaagaaattgcttttcttttcatttttcttattcatggagccacgaatgatgaaaacccagaatgtactgggtaggaataatatttagtttcaaatatttttactgttaaattgctgtatcatctgacttagctggtatatacctgtaaaatgatcgattggttgcatatttgtagtgattatgattcaacagtcatatagaatacagatgaaatcatgttagttcataattctatcgagaaactacatgtaatctactgtagattgattctctgatattagaattatcttcaaatgtctatgtaggtatagggataggaaatgttcgtccttggttgatttcgtggggtaagacttggcactagagttaatatcttggacgtttgaacttcaccaataaacaattataaatgcaaacttaacattggagctggcatcattgccccttaaaactatcgatgccccagggcgaacatgcgtattgaaattttgtagtttgacatgtcgattgagaaactcaaactagaaaagtggaaagggaagttacaaggtaactgaactcaatacaatcatcccaaagacataagaacctggctattgatgcaagatgtaaggggagggaagctccacaccaaacatgactcttaattagagatacaaacatatgttaaagatatgtctccattgaatgtgaatattgtacgtgtaacttaattttattttcgtttcttaccctcctatttttagaggttcattacggtggagcataaatttcctagggt

SEQ ID NO: 75352 - DNA, 529 bp, Carica papaya
  Intron number 1 from transcript evm.TU.contig_41245.1 (loc us evm.TU.contig_41245) derived from phytozome v7.0 (chr-I D contig_41245; pos 436 to 964 reverse strand)
ctttggctaataaaaggtggaggtgcctcaactgaccttatgggaggtaaatctttatcattattttggttgtatacatatatattcatgtccaaatccactacatgttatgccaagtaatgtatatatatgtgtttctaaaagataaactatgatgctgatgaagaaagtgcaagttacaaaattttcagagggtgtacaagaggtaaaagatgcttaatgcacctcttatgttttctttggttgctataagaatcactttggggattgtcagtgccgcacctacatttattatacacagaatacacaaccctaatctccccttatcatcactctggcttaatgattacacagattgaaagtttcatctttaagactttatgttgactatacgtaaaatcaaggtttcatgatcatgttttttgattaacgaccaagcttgatcaccactttcaattgaaatttaaatgcatgtgccatcttccaccttgtagttcacaaatccctacagtgctagcggcaacatctg

SEQ ID NO: 75353 - DNA, 636 bp, Carica papaya
  Intron number 1 from transcript evm.model.supercontig_6.32 0 (locus evm.TU.supercontig_6.320) derived from phytozome v7.0 (chr-ID supercontig_6; pos 2330330 to 2330965)
ccctgactatcttcaagcttccctccttgtttcaggtccctccctctgtatatacacgatttttgtatttatttattgcgtagcctatttgctccagtattaagtaacttgcgtttggattattttaattagtttaaatttcttcttcttttgctatctataagagtatgccttacggtaggtaagtaggtttgtggtttgatgtggtcattgatcaaaacgaggatgccgataaccttgtaattcccggtggtctttctactgtatttggtaatttatttttgtaatcataaaatttcgttgctgtaactttttaagttcataagttctcctaattctggatcaacttgtctggttttaatagtttccagttatataaccaattcaaatgcaatatataatgaatattcaattcaatttcttgattcaatatatgcagctcgttagtaaaattaatttggtttccttttcgttgtataatttgccattcagtagattttgttccagatttaacttcctttctttagagggggaggggcggggaagtggtgtttcttttcatttttcttttgtctatatatgcatccttaaatttgcgttgcttcaactactgcagagaccatcttgcactaccgc

SEQ ID NO: 75354 - DNA, 770 bp, Carica papaya
  Intron number 1 from transcript evm.model.supercontig_25.5 9 (locus evm.TU.supercontig_25.59) derived from phytozome v7.0 (chr-ID supercontig_25; pos 757719 to 758488)
accggcgaccccacttcctaccgtgaccggcgaaggtaaatctcctagtatttatgttattgtggataaatcatctacattatatgtctgcatatgtattttatgtaatgttgtgtttgcttcatttttttttttttaataattcgtttcggtcaagtttgagttcactctgggtttaattagggtttattgcatactaaatatgtttggatatttgttttttctcaagggaacccgaattccttgctggcccgtttgacttaaatggtttctttcatagtttgtgattttgtgtttattaactcgaataatgtcaataaattggttagttttgttcgattcatgtgttaacaatgtcgttatatctcggagctaaaattatatgtttatgggttctttttgtgctagctttttcttcttctttttctctttttgggtaaacttttgtttgcataattctattttcacgctgattgaatttgtttcaagcacgttaaaatgttagtttctgtgagtttaatttctttactgcctggtatccggcaaggccaaatggtgactaggtaattgcatgagggatggatattgctcttcccctcccatgtgaatcagatgcactttcttcaaacatacttttgtttaacccttgtgcaagtttgcccttcttagctacacataaaattgatacagactttttcaaccataccaatattttttttcatgagttttgcttatgttcagtgattcagggtttggtggggcttcaacat

SEQ ID NO: 75355 - DNA, 573 bp, Carica papaya
  Intron number 2 from transcript evm.model.supercontig_77.4 (locus evm.TU.supercontig_77.4) derived from phytozome v7 .0 (chr-ID supercontig_77; pos 39023 to 39595 reverse stra nd)
tgtgggagcattggtcaaaaccttatattgaagaggtgattagatctggacatttttgctttggcagaagaaccttaaatccaaattgtgatgcaattgcttactaagattgtcgtactctggctttaaaatatacccaaattcaacttttaggttcataattgaacgcatttcatacataattgacttgttccaagctgtgtcctgtttttttgttttttaaatgcctttcttttttaagttagatcaccatgatctgctgcatgaacgacaagtctttagaatctatgccatggttttaatggcaataccatcaaatttttttctttcaaactgaaaattcttagggaacaagggatgctgtgttactccaattactgaaggtaaatttctaaatgtggtgaaccttattgttttgctggagtcttgtttgtttaactcatttccagtttcatatgttaatgtgctcctatacttctttctacctcacttgacgtaggatatgtacttctagtatgaaaatttcttctgtggtgtgcttaaattgcagattgtgcgtacggttagaaataa

SEQ ID NO: 75356 - DNA, 1003 bp, Carica papaya
  Intron number 1 from transcript evm.model.supercontig_27.7 2 (locus evm.TU.supercontig_27.72) derived from phytozome v7.0 (chr-ID supercontig_27; pos 724463 to 725465 reverse strand)
acctattgcactcctcctgtatcagagacaacaaggtatagccaccaagaaccattcatgcaacttgaaagggaaaaaaaaaagaaattgaaaattacgcttaaaaatggttaaaatacttgactgtttaaacatgactctcagggaggaaaatacagatgataattttccattcttgcttacagaggactcttctggacattcttgtcaaggacccatatcatgaaaaattttgacagtttcagcgaatccattgtagaccctaattttagtatgaacttctttggttttgcccagaactgatttgtggaactttgaacattttttaccatttcagcgaacattctgtagaacctaaatggcaataactgtacgaactaaacttgaactgtgtgaaatttgcataaaattctccagatgcttgttataaagctgtcgaaggtttcacagtttcggacaaaccagtattataaaatgtctgaacttgattgatttaaattttcaacataatatgaactgaacagagtagttgagtttatattcctgaagtccctgaaaatggtactttttgatggaaacttcttatgctgagaatattccatgtgattctgaaaattcacacctgcttaatctggctgtgcgtgtataatggatgctattatgtttagatggacaggatgatggtattttgatgaactatatactgggttttcactggattataatgtagaaatcatgagactttgcttagcatgcttctagtactagctgtatttcatggttctgagaagcagaagcccttgtttttttatcccatccgaaaatttcgggaatttcatgataggtagtaagaaacaaactgtgtcgtttattctattgatcgattcttcttctttcatgttatatttgtttgtatattattaatgaagctatctgtacaagatagacaaatcacaagcattgatggccattattattattgtggtgcctccagactgcagtt

SEQ ID NO: 75357 - DNA, 776 bp, Carica papaya
  Intron number 1 from transcript evm.model.supercontig_357. 9 (locus evm.TU.supercontig_357.9) derived from phytozome v7.0 (chr-ID supercontig_357; pos 41113 to 41888)
ctctggacgtgggtgaccgcattttggcagagaaggtaaaccaatatggtatcatttgacctgaattttatagttctggccatgactttactcttgcttttgtaccttattcattattggtgaatactgtggaatactcttattgatcggttggtgaggaaccgtattaatcttcatttttttccaaaaaattttacctgctttgacgacaagaatagtagcacatcgcgaaccatagattgtccttttattttaaggaatcttctatgcgtggtaaagcctgcggattagatcagttcttgaatttcaatattttcatagattatccttcaatgggatttgagccagaagtttgttattggcaatttaatcagaaacacgatgcattcatcatgatttgaatttcagctatctaaatatcaccttgaatgatccttcgtgtttccagtcattcattttacatgccaagtaaattattttgactgatcagataattttcaaatgagagatttttctagtgttcttcaattaggaattttattgatttccattgttaaattatatgttaaatttttacctctgatggaaaagttgtttgatattagatccatttagcaacttgattaaattgaggtgaaatgacaaactgctactggttataaattggatgtaagatggtttgctgctgatgattgactgaggtttctattccttttttttttctttttttttttttgttaggtttcatatttcttcaggaagcctgaggtttcaga

SEQ ID NO: 75358 - DNA, 290 bp, Carica papaya
  Intron number 1 from transcript evm.model.supercontig_21.1 76 (locus evm.TU.supercontig_21.176) derived from phytozom e v7.0 (chr-ID supercontig_21; pos 1712250 to 1712539)
tctcgtctgtcgctcacttgagctgtgacaccgaggtaagcaacgtgattcttgttttttatttttttcctttttaatcggctggttgccgagaaaatttttaactttgatctaattgactagaatgcaagaaatcatctttaacagaaatgaaaaagacaaaaaatggtttgttggagtgttttctcttttctcttttcttcagaattgatataatgaaagccatattctgtttaattaagtggaatttgagttaagaatgaactattgttcaacttagaaggggccgg

SEQ ID NO: 75359 - DNA, 902 bp, Carica papaya
  Intron number 2 from transcript evm.model.supercontig_4.54 (locus evm.TU.supercontig_4.54) derived from phytozome v7 .0 (chr-ID supercontig_4; pos 1407927 to 1408828 reverse s trand)
gcacactgtgcaagtgaagctgcggctggttgtgcgtgtggctgtctatccatgttggaggatatgatgccgctaatggaggctggcttctgatgctggaaactggtctatggtgggctggtggctagtttgtggtgggcgacaatggaggctggtctcttacggttttgttgcttattttggcaatgaatgcaaataaggatttgtgaaggaggcctaaggttttctccctagagctttgatattttgtcaagaatgattgtgtgcgtaatttattgaaatattgtactcctatatattcaggttttttaaaatagaaaagaaaataaaccattaattatattaattatataggatatattttgccctaatgtctgttaacgtaattacatattctcttttaacattttctaatagtttttcaccatttcccttttagaactaagagaatatttttaaataaattccacaaacatattttgtttgttccgatcataccctttaaagggtgtacaaatgattataagctcgtaaccttcaaacaaagagtcccgtatattctactaagatgatgaactaaaaattattaggtgcttataagtatctttgagcagtattaagtttattttttgtatgttcaattctttatttatcctttcatcagtttttgaaccacaacagaagtgtttattcttttttaataaacacaagtatcttcttaatgagtttgaactaacactgagcaaagtccaaaatcatgattttaatattaaatttggttttcaacggagaagtggaaggctggagttgttatcacatgcttattaaactttttctggttaaataatttgtatgacccaattaaattggtgcagggtttaactccacgttgaggcaaggaa

SEQ ID NO: 75360 - DNA, 440 bp, Carica papaya
  Intron number 1 from transcript evm.model.supercontig_63.4 (locus evm.TU.supercontig_63.4) derived from phytozome v7 .0 (chr-ID supercontig_63; pos 255513 to 255952 reverse st rand)
catcggacaatatcagcaattcctgttctctcaatgtaagtactttttgcctctcagttagaacaagttgctgcattattttactttttgggccgcagcaagacaagtcatagatatagcagatattctgcttctctgcacttagctttctgtgttgtgcatataatctagaatccttgcatttcctctgcttctgcaattcaagaattgaattgtagtttgttttggagaccatacttctgctctttcatttttgatacgaaggttcttcttgtaatggttaattgcataaaacttttcaccttatgattcctcagttactttggatgtctttcatctttgtcttcttaggttgagttacatccttactttgttttgatctcatattttgattttgttttttaggtttttgactaaacttctcacagaggatttgccaa

SEQ ID NO: 75361 - DNA, 844 bp, Carica papaya
  Intron number 3 from transcript evm.model.supercontig_85.3 (locus evm.TU.supercontig_85.3) derived from phytozome v7 .0 (chr-ID supercontig_85; pos 29464 to 30307 reverse stra nd)
caatcaattcagtcggagacgatctgtaaggaagggtaactctctcgtctcttcgactgattatttatgtttttgagcagtttgatttaatttcctcaatatttcttttgcaacataaattttagatattattttaagcaaaatctaacgtaatctaagttttttgaatttgcggaatttgatcctctatagtttttttatgacattcatatttatctaaacactatatgtaatatacacatacacacgaccatatatatatatatatgagatggatcttaaactataactaagaaacttcttgttttaaatctgacgaacattagcgagagatctttttagtatatatttctacaaatattgtcctgcattagcagatgagttatttaacaactttaagatcattaagagattcaactttgagttgatatacacacacatataagtaaatgttaaatatagttacttcaattattttaccaaaaattttaagcaaatttataaatgggtagcaattgttatatttattttcatcaatttttatatcaaaaatatagttggtaaaaacttgaatttatcctgaattggctgatgagttacttattggagatctttaaagattcatggttgagttgatatctgtaaccaatagagagcaagtatcaaaacttggattgttccttttttaagccattgagtagtactaggatgctcatttaattttgctgtataaggtcctagtgatgatttttctgttagtcctgcgtgtttaattagtgtttttgctgttctcttttcgattgttgcagaaacactacacctgttcaattcagctgagagtgat

SEQ ID NO: 75362 - DNA, 835 bp, Carica papaya
  Intron number 1 from transcript evm.model.supercontig_128. 42 (locus evm.TU.supercontig_128.42) derived from phytozom e v7.0 (chr-ID supercontig_128; pos 313676 to 314510)
catttcctattgcttcaagatctgatctcagtctggtaagagttgttttctgcaattctagttttctctgttgttgggttaagttttacttcagtttactgattattgattgatatcaagtttcttttttttttcttcccttcttttgaagtatttcagtggatttgaatttttcttttcagagttgtattgagaacatgtttattaatgggtagttggctatagagatggagacaattgctttttgtgagtatggggggggggggggaagggatttgagattttatttgggttttattgtcacttagatcttgctcagattggtatttcttgtttgtttcctttttcctttttccttttttctttttttaatctaacattgcatcatgagttattcatttcatgccgaaacttctaaaatggtctgacaatatctatcatattagattttgattcaatattttcctaacttggatggggcaaggtttctggtatccatcattttacttttgtttctagttcagcaaattcttctgatgccagttaattaaataccttttcatagtattgttttgtctttttttttttgtctttacctttttttaaactgaatcaagaacctagttaagagtatggcagactcatttgaagagcctatgctgaaaatgaacaagaggattattccttatttgttatgcacgtccattttacagtgaggctttactttcggatagcatcttccaaaatttaaaagctttttatgtagcactgacttcggtctccttgtctaaaagggtctaaactatattgcttgtacagctggagcgagggttac

SEQ ID NO: 75363 - DNA, 667 bp, Carica papaya
  Intron number 1 from transcript evm.model.supercontig_49.1 13 (locus evm.TU.supercontig_49.113) derived from phytozom e v7.0 (chr-ID supercontig_49; pos 807149 to 807815)
ttggactgagcagaaatctccctacgagactctaggtaaccatctctctctctctgacttttttttttcccttttatagtcactctagctggtttcctcctttcagttttctgtttagttgtcgagaaatattgaggtgaagatattgtgtagaaattgccgagcaaaatttctcgttgagaatctttcttaatatttttttattctcattaattgcagagccatgaacaaggaaattatgacagttttaacattctttttctattgcactgttagttgctgataagtaaagagaataatgtttctgaatttgatgaacttgaattttggcaagtaggaaatgcctgcttaagcataatatttgattaccttcaagacattttagatgacgttaattatagatgtgacttctacgggcactgtcattggatactccatgaagtaaattagttacccatctggtgcaaagctcatctgttgcgcgcatgtttgccatagctatgagatactttctttcagagtacatgaggtgtcgctcaagaaaattgcatgaaaggctgctgcttcttttctatgttttctcattgttcagtctatagtcagttgattcaatctatgtcggttataaatttcctccaattttcattttggacagaattagaaagaa

SEQ ID NO: 75364 - DNA, 326 bp, Carica papaya
  Intron number 1 from transcript evm.model.supercontig_170. 60 (locus evm.TU.supercontig_170.60) derived from phytozom e v7.0 (chr-ID supercontig_170; pos 342654 to 342979 rever se strand)
attggtttgtaaatatttttgtacatgggtttgtacacccttggtgcttgttaatgatactatatatttcttatcaaaaaaatatttctttcacttttttagataaaaaataaatagtaaagaaaagaaaataattgtgagcatccacttgtccttaaaatactcatcactcaaatgaagaactggaaatttaactttggtataaattttaagttatgtcttttgctattatttgtctgatatgaggtgccttgttgctatacctaaagtattgaagtgataaggacaagaccatttgtttgtcttgataaatcaaagtcaaggat

SEQ ID NO: 75365 - DNA, 455 bp, Carica papaya
  Intron number 2 from transcript evm.model.supercontig_152. 38 (locus evm.TU.supercontig_152.38) derived from phytozom e v7.0 (chr-ID supercontig_152; pos 283867 to 284321)
gttgtttgtcacaagtgatacaaacaaatgaagaattgagaaattttactgtttaatccgagaaagtcgatgtttttctaagtttattttgttaatttgttttattttcacccatttgactccataaacatctctacaattatcaagactgttcgtttttttctattaaaagaagcaaacttatttgacagcgatggtagttttaatcttgatcattttaataattaaaaaaataatatcttttcgacgaacaagatgaattccgattcaaagaaatcgacctacgatcatgacgtgcgatagatatcttaaaatttgttgcttcaagacagtgattctcgcaagaatatgtgtgtgaatgttattcttttatagcgatcttacttaataaatttcacaatataattattattaataaagtcggttacgtttgagcgcggaagcagtctatttaa

SEQ ID NO: 75366 - DNA, 658 bp, Carica papaya
  Intron number 1 from transcript evm.model.supercontig_48.9 (locus evm.TU.supercontig_48.9) derived from phytozome v7 .0 (chr-ID supercontig_48; pos 43765 to 44422)
tccatatcaattttgtcactgttaggaagctcactgtaagaatttttgttctagattatcctttcttttgttaatgactcttgatgaacagtaggaaatttcagttgtaagattgtaggaaattgttacgaagtctgtaattggtcattgaggaaaccgggagaaagaaaatggaaaatggagttctaaactttggttttttagctattaaaaacaaatatgcagagattcaaattcctcagtatttgttttccatttatttactgcaagttgtgaataaaataatatttgaatttgaatttgatttatgccaattatgtgtctaactcaacaaaggtagtttcataatcattcccttgacaagttaacaaaacatacatttactataaagctaaaagtatgtatggaatagttcaattttgtatcagataatagatatgaaagcaaatggcctataagcttttgattgttgaggacttatcttaccagataatggttagtgctaagaaaattagtagctaactagattcggttatacagtcttggcaaaagtctgtaatttgtgaaatagaacacatgatcaaacagtttataagtggttggagtttgaggttttgcatactgaggatagatagcatttggttgcagagcaaagctg

SEQ ID NO: 75367 - DNA, 659 bp, Carica papaya
  Intron number 1 from transcript evm.model.supercontig_54.8 0 (locus evm.TU.supercontig_54.80) derived from phytozome v7.0 (chr-ID supercontig_54; pos 1388745 to 1389403 revers e strand)
caccggattcccatcactcgtcttcggacaaaacggtactttcttacctcatctatgtatctctctcttctgcttctcccatgctgtgttatcaatgttgtatattttgcgattttggtctttaattaaggcttcttcagttttattaggattttagcctggtgactaaatggtgaaaatgactacctaatcaatgtcacatgtcttccatataaccttttttgttgacttcgatttatcgtgattaatgggtgcgttactgtaatggaattcggttgttacgttcaccttttattttagggcaagcaatgggtctctttagattcacaaatcacatggaagatgatggatgttgattgtaaaaaattagggttttgggcatagtcatatctatgttaattgtacatgtgtgatgaaacggagttctaggtttcatgtgttcgtagatttagtatcgaccccgttttgatttgtgcagtcaggtgtgattgctatctccttcttagaataaaaaatcgcgggaacaaaggtttttatttttttggtgtggaaattaggctttgaatattctctttctagctactggccatgtctgagtgatggggttttgctttgatggtgcaggtgagggttgtgattaaagggtgggtccagggtgt

SEQ ID NO: 75368 - DNA, 745 bp, Carica papaya
  Intron number 1 from transcript evm.model.supercontig_5.11 6 (locus evm.TU.supercontig_5.116) derived from phytozome v7.0 (chr-ID supercontig_5; pos 874203 to 874947 reverse s trand)
ttaaggtttggttgaagagagaagatttgcagcccgtaagttatttattttttggttttttcccctcattacgtgatttgattctctgatatctgtatttggtcgtttcatttttgtgctcgtttcaatgtgttggctttgggggctttttagtggtcatgtatttggtcgtgtaagtttctgggtttctctaggtgtctgtaataatagataactttcttagttcatgtatttattaattttgttatatgtgaattgacggatattggattatggtttagttaagttgtcactggcatatcagcattttctcttttaaatttgtaccaggaggtttatatctgctccaccaatcttatgcagctttctcatctacttttattcaaccaagctgaagctcccctcacccattgttttagttgtaactaggaaattaattgatttgagcttcagacctcgtaccattttctttttaaagttttccccttttatctactgaggattaattttgttaacttttgttacttgggctgtcagataagaaagaaatttcttttacatggtgggtgttaaagatgctattttttgctttttggaattttcaattacttgagatataaaatgttttatatcaaggtattcatgtcttcttttctgtgtgaatggataatggctcttacatttcatggattttgtcatgttgatctcaggttttctcgtttaagcttcgtggggcttacaatat

SEQ ID NO: 75369 - DNA, 398 bp, Carica papaya
  Intron number 1 from transcript evm.model.supercontig_21.1 22 (locus evm.TU.supercontig_21.122) derived from phytozom e v7.0 (chr-ID supercontig_21; pos 1403298 to 1403695 reve rse strand)
gtaggtcagacatctggttggccacttgaaatcctgagttggtgggcatgcagtgattgtgggatcatcttgatgtaaaactgttgcacaacgtatgactgggttatattgtcagtgctgttactatgacctttgggtgttaggttggtggaccatatcaccagaaccataataaatattgactttaagaacacgattataatatttattccaattatgtaaatcttgagacaaattattgaggagataaaagtcactattttttcaatttttcatctttgatgtttctgattgtatggcatgcgtactgcaactgttgatcgtgttatccttttatcttaaagtttttcttttctgattcagaattcaatttttgcatcttcttctcttcatctcag

SEQ ID NO: 75370 - DNA, 875 bp, Carica papaya
  Intron number 4 from transcript evm.model.supercontig_12.1 04 (locus evm.TU.supercontig_12.104) derived from phytozom e v7.0 (chr-ID supercontig_12; pos 930155 to 931029 revers e strand)
aggattggaggtaaggctatgcatatcatggttgtggttgacccatttattttctcctttattaaacactgcataattttccgtgaatttctactatgtttctacctgctactgttgtcattcttgtaaatggggatttaaagagcgttaattattattctgtgatcttcatcatttcatatcaaatagccatgatagtatataaggagtcacttggaagctagatacatcgttgagaaaggaaaatggtttctaggattttatatctgcatgcattaaatctcttcatccttccggctgctcccttcttcttctattcacatgagatgtgcttcaattttattgcattatagttttattcagtcgcacaatagcatataatgagttaatcaaggggcttcttagcctctatcctctttggatagggatagaaaaactgtatcccttaacatacaagaattgagctcatttttgtagtgtctgtgatatgatctgcctctgttggtgatcggacaagtcacgtgagatatgctatctgggagtggtacgtttcaattaatttttttttaattggaactctggtatatatgtattctactctcaagattattgttgtttagaaattggagtgtattggtgctataattttagagagaaatatacattgtaatatttagaacttgttcttgtaatcaaatctatttccctagaataggtaatctgactgaacccagtaattttttttctttttgtccttatttttctgttttgatctgattgtttattattattatttttaatcacgaaatagagtttacggattgcatgacttatttccaggaaaacgtagagctctgatacctccgtctgtggga

SEQ ID NO: 75371 - DNA, 818 bp, Carica papaya
  Intron number 1 from transcript evm.model.supercontig_176. 1 (locus evm.TU.supercontig_176.1) derived from phytozome v7.0 (chr-ID supercontig_176; pos 14184 to 15001)
tggcctggacccatcccttgtgggttgagcaaaaagtaatgtagaataagttgaatgttaatgctgttttttcattatttttttcttggggtccatttccactcttctttcactcagcttcttgcccttgcttcagtaattccagtcttcagaaatcattaagtaattgttagtagaatttgttctgcaagtttagtttttatgtcacaaaattttgaagagaggccagacatactgctgatggagcattagtgcattttcagcaacttggacatgcttgatgctattgtagttttgatcttaaccaaagccatgtcaagtcttcattttaatttcttgacatctttgggaagttttgattgctcaaatagagcaatggaactttataaggccatgtgctattatgatgaagggcattctagtatctttataacttaattcggatatattaagattaactggcacatttcttatccttttcaaagctgaaagttggctgtcttttctcttcccaataaataagtattatcgtgacttattggtggatgattgattcagatcaataatttatattttagatttctttaaaattattagttgcattcataatctagaagtgctgcctttatcattaacatccattctgaatgatggcctgtctgctacaattacaatatccattcttctacgcagaaatgctcttctttctggctgtttatgctctatccacagcccactggcccattagttaatagttgttctatttccttataatactattttctttttgcatagggatattctaaccacctcaactt

SEQ ID NO: 75372 - DNA, 443 bp, Carica papaya
  Intron number 2 from transcript evm.model.supercontig_10.1 9 (locus evm.TU.supercontig_10.19) derived from phytozome v7.0 (chr-ID supercontig_10; pos 441681 to 442123 reverse strand)
aagtataaggtattaaattgatgtcttgtgtcctcctcatctttcttttgatagttgtcatgaatactgtcaataactttaaaaatctcatctgaattctgtgttttctggctcttttacgaaaacagactaataaaggaatataacaagaagtttgggcttaatctctatatggtactgggaaatgagaaacagctatgtcgggaatttgatatgatatttatgtgtttatgcatataggtggcatttagtcactttgccaccatatgatcttatacaaagtttgaagttttttttaatgtttttggtctatgcaaaacagtttggtttcaataaaataattgtaaataactgattttttcttttctaatgtttttgatctatgcaaaacagtttggtttcaataaaataattgtaactgacttcttttctgatttttaagc

SEQ ID NO: 75373 - DNA, 741 bp, Carica papaya
  Intron number 2 from transcript evm.model.supercontig_49.1 58 (locus evm.TU.supercontig_49.158) derived from phytozom e v7.0 (chr-ID supercontig_49; pos 1350040 to 1350780)
ccagaattagggacaagtatccagatagaattccagtgagaattatgctttaaccttctctcttccaatcccctttgtttccttcctctctaattccattgtacttcattatgctttcttcctagtttccaatttgctcttttatgtttcagtttgctagttgtcaaatgtgaacatttggtgcagttttatatacaaattttttttttattaatttctgaaaactggaactcactcatatttgtaaatgctccaagatttgctgtaatgatttgtaggtctccttgcgcccagcaaaataatttggacttgaatgaataggataaagtttgcctctgcacggtggcatggcaatgtagttttaccctttgtgcatcattaggttcctagtggagaagctgttattgtgaattaaaagaatttgcaggcggatactgattgcgttggcttattgtttgtatcttaaatctggtctttcacctgtttgtttttgggaactattgatttcatgccatttgatatcttaattaagaacttctcaattcaataaggcatgtccctcagcttattggtcttcgacatccttgctttgattgagtagggataatgctctcttaggggatagtttcattttgcatctagttgattcagtgttggctcagcttgacctttgatgtgttcttgtgtgtggattttctttttgtaggtgattgtggaaaaggcggagagaagtgatattcc

SEQ ID NO: 75374 - DNA, 334 bp, Carica papaya
  Intron number 3 from transcript evm.model.supercontig_49.1 58 (locus evm.TU.supercontig_49.158) derived from phytozom e v7.0 (chr-ID supercontig_49; pos 1350764 to 1351097)
gagagaagtgatattcctaacatcgataagaagaagtaattatgtattttcatgcagcaaatttcctaaaatagagcttgcttgttaattttgattttgctgatagctatgaattctattcttgtggttgtctgatgttgtctggttgctcctattattaagttcttatctgcttggaatttgataaagaaaatcccaacaggaactaatcctccctgtttgtgcatcgaatactttgagagcagttgtactacaagtatctattttgagtctttgacatgtttgaaaaaaattcacagatatcttgttccggccgacttgacagtaggtcaat

SEQ ID NO: 75375 - DNA, 415 bp, Carica papaya
  Intron number 1 from transcript evm.model.supercontig_33.1 29 (locus evm.TU.supercontig_33.129) derived from phytozom e v7.0 (chr-ID supercontig_33; pos 1277208 to 1277622 reve rse strand)
ccgcaattcgcgccgcgggtgcggccaaactccaggtttattgttctttttttttgtttcacttcttgttcaagtattgtaattggcggctttaccttctgatacgttgcttgcaatacgtaaaaaagacgggaatgatttacaaagatatttatgttagtatataccaatatattaattgtactcatttggatttgttcatctttgctagatattctaatcttctatataggtgcagtgccacaataatgatgtgctatattagaggattggtttttccaagtatgaatttagaataatgacttgtcatagtttattagtaggaattcgaagtatgtgtagcatgcgcagtctgcatgattctactggcattgtgtttatttgggttttgattatcaggtaattgctgattttg

SEQ ID NO: 75376 - DNA, 718 bp, Carica papaya
  Intron number 1 from transcript evm.model.supercontig_16.3 5 (locus evm.TU.supercontig_16.35) derived from phytozome v7.0 (chr-ID supercontig_16; pos 781979 to 782696 reverse strand)
aagaaggcaaagtgggctttggactggattaagaggtgcctattgcattcttattctacattttctatacttattttatcaagccatctaaataaggacgctatagctgttaatgcttagtgcttattgttaaatggatttaatgcaagttacttaatctagtatttttctagaattctgttggtctttcaacttgaatatttcactcacttcaggaactttggtgctgtttgggatgggtcttaatgccgatacattcttgaaccttaataaataagcattagtctgatagattcttgtgtatttacatggctaagcatgactagtgatcatgttgagtgccaaacctagcgccaccagtgcttagcttggtgtagtccatgagtcagtgggcctgacatggagatcactcgaattatctaatgtacctttcaagaaagagaaaattaagtttgtttgtttttttttctcctttgaaggacctcttgttctgtactgatgtacttctctcttttcttttcctgataagatttctttttttagtaaaaaagaaccacatctgttatccttaaatatggatgtttttgaatctgggcttcatttgtaattagagcacattcactatgttttagtggaggcatgaaattctttctttaaaaaatcttcattatgcttttttgcagttcgacttcatttgcagaaagacttgttgcttttg

SEQ ID NO: 75377 - DNA, 892 bp, Carica papaya
  Intron number 1 from transcript evm.model.supercontig_120. 11 (locus evm.TU.supercontig_120.11) derived from phytozom e v7.0 (chr-ID supercontig_120; pos 229208 to 230099 rever se strand)
ggaaattcgattacgggtcggatctgaggcctaaggtgactgattatgttggatttgcttgtgtttgcttcatgggtttctattttttgcttgattctatttgacctttgaggttgatcctctttggcgactgtgcgtatgttcgtatatgcgcatgtatacgtgcattgattaatgggtatctacggatctgccattttggtttgtcttgatttggattttctacaacagcggggtgattatgtgattgaggcgattctaggtgtcttattactcaatcatttccaaagcgtatgtttatatggatgtggtgaagtgtattttttgtttgattcggataatattcttcatttattctgtcattttctgatatataaattcgcttatgcatatggattaagacaaattgctcagtacgtatgttacagatggttttttttccccctttttataggtctgaatcatcgcctgtagaaataggaatttgtagtctagaagcttaaatgttatgcttactcacctaatgagagactaaaaataaatggatctgttgggaatttctgtttggaagagaatctttatgtttattgctttatgatgactgagcaatttgtcactggtttataaatgatgtctaaactgattctgatgttattctcttgtgcagttgatggaactttatcttttgtatttgttatatcgttcttgctcttacctgggtttgggtctgcttcaaaatattttttgttttattccttgcccaagaaattttgctcatcctacaataaagtagttctgctgtcaccccaattttttttgtctttttaaaaaagaaaaggtctgataaaagctgtttttgatttttctctttgctgtttgctgtatgacagat

SEQ ID NO: 75378 - DNA, 869 bp, Carica papaya
  Intron number 1 from transcript evm.model.supercontig_2.27 3 (locus evm.TU.supercontig_2.273) derived from phytozome v7.0 (chr-ID supercontig_2; pos 3425590 to 3426458)
tcacttacaatgtaagtaattattttaattttgttgtttggtcttcctaattagggtttcttctatcagggacattagggttttttgggctttctccaataagtacttcgaattgtgtgctggtctttaaggttaggggtattgtcgtttttaactgcatttaaggaattagaaattatcaaagagagctatggtttgtgtgtttgctgtttcgtttaacgctggaaacgtgtataatttaagttaccatgatctttctagcccaaactaatcttgaatggaggtatccaaacttcctaccgcttgctgagttctttctaattttgcttatcgttgagttccctgatggtttttttttttcatgatttctcttcggcatgctgattttggttatctttgacaatttggtgcttacattatccgaaaagagataactgtatgtacaacatttacttatggaatgaagttagttgtagatttgtagcatttgccttttgggtaaaaaaaatccagctttgagataactgttttatctcacttatgtggttttctgctttcatgacgtattataaacgtaatctgttgtttcttattatggttgcaacagttcacagttttcactgctaactgctgacagcatgtttatttggttttacatgctgatattattttctctcttgtatgtgaaaattaagcaagttaacaatgtcatgttaatatctgcgtctcatggccgtcagatggaattttgcctatatatagtcaaagatttgtatattgtgttttcgcaaagttatccagcctagattttgacagtctctttacttatcttaggatattggagggtgcgacattcaaaagcaggaaat

SEQ ID NO: 75379 - DNA, 750 bp, Carica papaya
  Intron number 2 from transcript evm.model.supercontig_489. 2 (locus evm.TU.supercontig_489.2) derived from phytozome v7.0 (chr-ID supercontig_489; pos 14125 to 14874 reverse s trand)
tgattgtggaggagatcagcatcttgttgctcttggtattccctcctcctatactcccttggtgcttcttcttcttcttcttttaaatatcttacgtaaaaactagcatgcaaattggggatttggttaatttgagattttggccgtaatttggaagatgttgcagtttaggtttgggtggtatgaaataattctggcctattatgcatttttgctaaagaaataacaaatttttatgagtaagcttttgggtctgtcttcaacatggatttaaagatacaaagtgaagatattttttaatagttatttccgaacttcttattgtgagatggaagtttctctataaaacgttcaaattaggatgcttctcacactattgcaattttttttttttttttgaatctcagtctcagtgccaataagcattgatgtttcttcaagttaagtttaaagaaatttaaacctatagttttctcttgttgggccatgtataaatgcatgttttttagcaagtatgggaaaaaatatttgatttttaacattgagtatgcgaactgtgaatttttctcttctagtttagttggtaatgaaggtttgtgaatcttgttgatattcctagttcttagctgcggcaatgtatacattgggttcactatattgaatttctgaagttcaataatttgatttttgatatcactaagttgaatttctgcagattgtggttctggtattgggagaatcaccaagaat

SEQ ID NO: 75380 - DNA, 524 bp, Carica papaya
  Intron number 1 from transcript evm.model.supercontig_50.1 46 (locus evm.TU.supercontig_50.146) derived from phytozom e v7.0 (chr-ID supercontig_50; pos 1389892 to 1390415 reve rse strand)
ggaggtatatatatccacacacacacacacacagctaatatataaccatagtactaaattttttcctatatatgtatttttcatgtagagtctttttttgatagcaaatttggattctctcatgtggagtatgttaactaaatcaaatcatgtaaattctctatctttatatttctcaacttttgtttgcctggtaaagttatcatattatggaacgggtatgtatgaagtgttgaattctatccacatgatcatatatgataatttagaaaattttgtaagttgtgtatgtaaaattttagttttttttcttctttatttttatagtcgaattcctatacttttttatgagatttttgtgtattaaaattcgggtctgagaaataattgactgaactgcgtaaattttttgtttgtttactttttattttacttgattcgtctatttaatatatgaaacaatacaacaattacatatcaaaatttggattcgacaattctaggaattcggaggtcaagaagat

SEQ ID NO: 75381 - DNA, 411 bp, Carica papaya
  Intron number 2 from transcript evm.model.supercontig_21.1 08 (locus evm.TU.supercontig_21.108) derived from phytozom e v7.0 (chr-ID supercontig_21; pos 1294498 to 1294908)
ctggtgtaaacttcaataaaggttaactgccattcaatccgattaattttctttctttatatactatgctgctttttttttttttttaacgagtttaaatgcagtggttttagattgagattagagaccaattcccatggttgtaactgcgttttgcttttagactgaaatataaaaaattgatattctggctgacgttttatctaaagtcaaaatggaggaagtgagtgctagttagcatttgaaaaatttctatggaatatcattcgttgtacgacatgtttattacatctattatcttatgtggctcacacagaaaaactcttcaaatttattattttcattaactaaaagcttatatcagttttatctgaaggaagcaatcatattcctagtcagtcagttgtgcaa

SEQ ID NO: 75382 - DNA, 953 bp, Carica papaya
  Intron number 2 from transcript evm.model.supercontig_14.7 9 (locus evm.TU.supercontig_14.79) derived from phytozome v7.0 (chr-ID supercontig_14; pos 911707 to 912659)
ttgtggtaataatcactcttttttttttttcttttttttttctgtattcgtgctaattatataaaggtataatatatatatatatatatatatatatagtgtttattttatgcactcgagatttgtttgggtaagacccatttaactttttttggagttttttaatagctttaatttaattaggtacatatgtcccagatattggaaaggaagatgatatgaagtgggctacttggctttcaattaattaaaaatatatctgttttactttttattttttccttttttaataatcatcaagtttgcaaagcaggatccttgattaatctgttcagtctttctttttaatttgctgtttgatgcatcacctgtgacatgggtcagggctaacatggtgggcgctgagtcatttccactcgtttttgttatcttacgagagtcacaattttgaaacaattaaaacattttgctttatgggctcattagaaaacaaaagtattagtccaagattaacactaatgccgtcttttctttaaattcttgtttctgggttgttctgattataaatgttactggtgaatctaagtaatcttcaaaagaaaaaaagaaaaaaaaatttgtggtcattaatgattagaaggttaaaagaagagcgtaaatgtaaagagatagagattgtaatttgcttttatggagtctagatggacagtatcaatatcattgaaactttatactcaagataaacttttgggtattccatgttcatgattgtcacagtaaagttgaaaagaaaaaaaaaagaaagatttcataggcacactgaatattcttgtttagtgagtttcttacagtaataaatcctggtttgtgactcatgaattcagtttcattttttgttcctcttttttcttcttaaagggacttgtggctgtaacatcaacagcattagctcg

SEQ ID NO: 75383 - DNA, 700 bp, Carica papaya
  Intron number 1 from transcript evm.model.supercontig_306. 2 (locus evm.TU.supercontig_306.2) derived from phytozome v7.0 (chr-ID supercontig_306; pos 3235 to 3934)
ctcaaagaggttttcatctatatcttcctgctttgacgtgttatttctttcattaatgaatctatgatcatgctactttcatattggctcctcagcctgtgtttgctttccttttttctttttttgttttttttttggggcggtggggttggggttggggttgtgagggggtttggtctttgtgtttgaggtcttggactttttgctggatacagcaataccagttacctttaggattcaaatgctgtagacatatccaggatacaacaatttttttcttctgaaaggatttcatgattcaacatttatgtacatattggcaattaatatgcagttttttttctctcaaaattcatgcatagtttccagctctcagacattgttgatttgctttatgtctatcctgggagattttaaattctgatgctatattcatggttattctgtatttgatttttgtgatggttgctcctctctttagtgctttcttccaagtcttctaagaactttttcttattaatcaatattgccattctgatcatcacttcatcattcttgatgtttatattgtttgtgttgctattgtgcatatgtcgaagaatctcgttttttcttttcatttttcttttaaaaaactgcttaatgactaatattcctctttgcaggctgaccatttgattaaagaggaagctcaatttct

SEQ ID NO: 75384 - DNA, 520 bp, Carica papaya
  Intron number 1 from transcript evm.model.supercontig_17.8 3 (locus evm.TU.supercontig_17.83) derived from phytozome v7.0 (chr-ID supercontig_17; pos 1084484 to 1085003)
gttctttctttttattctagtaataaagccagtttaggatttgtgagaaacttaggattattgtttacctctaataccatgttaagaatggtttgatttgtattcaattaaatattacaatcctacatatatagctgtattagcatggaaaatagtatagacagtaaagtacaattgattacagggtacctttaacctaagttaccatttctttaaccatcttgatatttctgcattcggtgaaactgaacaagtggtatttgatggagttaatgtatacattgtaatatttgtaattttatgtggttttctttggtggtaagtatgattctcttgcctttagattttgtatctatctcaggtttcatttaatctggaattggtgaatctaactcttcatctatacgcaaagatagttgcattttacattaatagatttatgatctctggatatttaacattgaatttggtggtattttgagcagagtcaacttttggcttccttgttgagcagtggaag

SEQ ID NO: 75385 - DNA, 1043 bp, Carica papaya
  Intron number 1 from transcript evm.model.supercontig_20.5 8 (locus evm.TU.supercontig_20.58) derived from phytozome v7.0 (chr-ID supercontig_20; pos 636452 to 637494 reverse strand)
acagagtcttcttcgtcaccaactccgggaaaaaggtacttttctcctctttattcttaaagatgctctgtgagtgttgtatgtatttgtgcgtatctaagtgcaaatgcatattcatatatgtgtaccggttagggtctttttttgcttgtttagaaaatgcgagaatgagggaggatatggagaaattggtttcttccatgtgtgcgattcgcgtttagaaaccaaggcaatgtaaaaggacggggaaaaccatcgagactctctgtttattgtaaaaggattattttttagccccgaaatttcttgttcttccatttgcccgatttgcttggttgccgaggagggtgagttaaaggtttttttgttttttttttttgtttttaatcttcaatctacgttattctggattagctgttacatgctgacactgaatgttacagaactatttgaatcgatatgctgttaaaattggttgtcgtttatttttttcgtccttttttttttcaattagatgttcttcctctcagttgtttcctaagctagtattgaaaggaaaagattcccatttttatctgttaatggcctttcattagatggcttgcatagctatgacagtggagcattttattttaaaaaagaaaagctatgatcgtggagcatcgcgtttcctttgataactgctgtataaccttctaacagaaagattcgttcttatgaattataaagaattgagttgtgatggaaataagctgaattagataatctactgaaaagctacaaattttctcagtgacggggatcttggctgaaagtgaaaatacaaggatcttgagttaatctatatttaaaaagaaggatcttgaattaatcttaaaagaaagaggaagtttgagctggtggttaacactgtatgcatgaattgccctgttttggtatgaataatcattctgcatcatgtcctaagtatctactcattcaagcatgttttcccctaatcaatggaagaattttgtcactggctttgcagatttctccttggc

SEQ ID NO: 75386 - DNA, 455 bp, Carica papaya
  Intron number 1 from transcript evm.model.supercontig_13.2 6 (locus evm.TU.supercontig_13.26) derived from phytozome v7.0 (chr-ID supercontig_13; pos 273305 to 273759 reverse strand)
ttggatcgactctgattgtccactcgcatcccaaggtgaagcttgtctacatagttatacacatcttatcttcctgtatttgtccatggaaattcattagaaagaaaaattttaggggttatattttacaaattaacattgtttgtttagtttatgttaagattcttttaaaaagttcatgttgagatcaaatccgtttgtatctctcagttgaatctgcagtggaattgtttttttctttttatagtttcagattacctgtaaatagcaggaattttgattaacaaaaggatgaacttaaggcacctccctcgtaaaatatccaatccaaacaacagattttcttaaaaaagaaaaaaggaattacttaggaaatagttgctatttgtattgatgttcccgagcgtcattgttatgcagagagatttacagttgtatcgtataatatactggga

SEQ ID NO: 75387 - DNA, 736 bp, Carica papaya
  Intron number 1 from transcript evm.model.supercontig_13.1 74 (locus evm.TU.supercontig_13.174) derived from phytozom e v7.0 (chr-ID supercontig_13; pos 1557599 to 1558334)
ctcgcggctacagcggtctcttctctcagatcgaggttctctcgccgccattctgaattttactcatttctttatttattacgttggttgctcaaaagtgttatctagattagtggaactagtgtctcaatcgcttcggtaagatgatgaacgacactgttctaagttctgctatcattgaatttgattctgaattaaatttaagagttaagtctttcaaggctagtggtctaagttacagaatggagaattttggctaaattagagcattttctttgcctccttttagccgaatagaggctaaaacgcccatagttgcattgttgactttactctggcaaatgcagtaacttcgttggtagcctgatatgtggaagaaacttttgaattactgctgagactcatttgctatatcctaacttgttagattgacattcgccattttcatctgattttttgtttctatgattagtagcacgagaatttgagatgaggaggccactagaaatcttaaaagatataggttctgggaattaacaagcttcgtattctggagctcatggtttatattttaagaattgcaggattgagttcgtatctgctgaaaaactgttttaagtatgacctatgcttggatttttagtaccttttttaattacctgtgtgatagttcctgactgctctgcataaatgatttgcagttatctttttctgcaacagatttgcgtgacacaga

SEQ ID NO: 75388 - DNA, 910 bp, Carica papaya
  Intron number 2 from transcript evm.model.supercontig_13.1 74 (locus evm.TU.supercontig_13.174) derived from phytozom e v7.0 (chr-ID supercontig_13; pos 1558337 to 1559246)
tgttttccaaggtttgcttcttctattttctaagttccaacaatatgaaataacacactttactttctttctctctttatggtacgcataattgttcagaattgattcttacaggctttctctacattcctaaaaggtttagatgattgtgacatttaattcacattaatgcctaaaataatattatgatttattttgcgagaatcagtaattctttcagtaggcatgagaatactggtacaaaaattaatgttaaatctgagattaacggtgaagctatatcactccactttgagagtcaatggaccctctctcgtattgatgaagattgttcctccactttgatattctaaaatttaacatctagttgcttgtgattaagattctgttatgataaaagttttgcaaattagaaatccaagctatttggaaacttatggtagatgcacaatgtgactctacattaatgatttaaatgttagattaaattaaaggctaggagctgaagtcagttttctaattagttcttggagtgctaattatatttaatcactataacagtagccaacatgacagagagagttataaatgtttatttggattttaccgtaggtaaaatttgaatattatggcattcaaggggtgtttcaagttgctttccatagttatatactgttgatatgatcttgaatctctaattgttctaaggttgatttttgttgtctttttcttataggtggattgttttctttaggattctagtttctttcacatttagctgttttgagtttacttatatcatttatttatcgtgcagtcagtcttcatttttcagtcaccaacagtgtatttttgttgcagaaagcttagcatgttatctcatacgttttatttgctttagagtgatcca

SEQ ID NO: 75389 - DNA, 888 bp, Carica papaya
  Intron number 3 from transcript evm.model.supercontig_56.7 7 (locus evm.TU.supercontig_56.77) derived from phytozome v7.0 (chr-ID supercontig_56; pos 1071879 to 1072766)
aaacacttgccaaacatcttttccactgtgagttctccgtttctaagccaagccatttccttcttttttgaatttaatttcactatattcaacttaaatgtatatacatgtaagcaatgacgttgtagtttagaaaatttgaacatgatgtgggttctgttatttatttgcattactaatcacgcaatagcagtgttaatgtcattgttcttattattattgctgaaatagtgttaagatcattatatttgttaagacttcaatgttgtctcttcaaaggatcggttatcttaaagtgctcaaaaggaggtggtggttggcttcgtggtagtacttttttttttttcctttttcaaaagataaagaagacaacaatatctggttggcctttatggactcttcatcatatgcccttctttctttcatgaaaataaaattgaaaaatttcgggttctaaatttgcttcagtaatcacagacgcttgagataataaaaatactaattaggtaaatgaagttactaaccaaacaataatgtgattaatgcaattctttttttttttttctttttttgctcttctgactagagagagtgagaaacgaaccaaatagcactgctaaatggtggtatgaccaaatttgattggtctgtcttatgacatatagaactccagggtcaaggatgaaggattttaattttatcctaggaaatccttacgcgacatgtagaactctagcaaatatcacctctgttttttgcttcttctaacataggtttttgtgaatgtgtgagggtgtgtgtgtgggtgtgtttgtgtgtgtttatgcatgatgtctgctcatttaatgatttttaagttattgaattggtgtaggggagaaccagccc

SEQ ID NO: 75390 - DNA, 749 bp, Carica papaya
  Intron number 1 from transcript evm.model.supercontig_173. 6 (locus evm.TU.supercontig_173.6) derived from phytozome v7.0 (chr-ID supercontig_173; pos 80189 to 80937 reverse s trand)
ccattagtttgcagactcctcaggctcccgtcgatgttagtttctgcttcttcatcactcctttaattttgccttcatattttatatatttttgtacgtgtatctgtttttcttttttttttttcttgcctggatgttgcgttgccttttctgaattccattttttttagaaaaaaacatgttcacatattattcaagtgattccctgggaatttttgcttgttctttttgttttcttctccttgcttgaatttgacttagtttcaccgtcatttttcttttccactctggttttatatgtttattttgaacgagtcaatatgcaaaatttaatagatctttttggaatgtgatgattctgagctattgacatgttgtccgttgcttttctttttgtgatttttccatggaatatcactgttattaacaatctcattttccgttttaccaccagtagtgatgtaccagaatctctgcttgttagtatagcacagaagaactgctgatcagaatgaattctcttaacctgtatatttcacagtgcagttgcctgcaatgcaggagattatgctacaatattgacatggagacattaatctcttgtttagcttatatattcatttctcttttggaaacctaagagtaagttccatgctctgtagtagaaaaatatcaaagatagagggctccaccattttagctctaataatgccgtggttcactcactccgtcttttgctgcaggagttg

SEQ ID NO: 75391 - DNA, 757 bp, Carica papaya
  Intron number 4 from transcript evm.model.supercontig_130. 63 (locus evm.TU.supercontig_130.63) derived from phytozom e v7.0 (chr-ID supercontig_130; pos 704472 to 705228)
aagaaatattctgctgagctttctgcaacagtaattctctgaaagcctttgtcctatagcaacagaatttccgaattcttgagcgtcatgttggctcattttcagtggattactgaacttttgtgattattttcctcaagctagggcacatggaactgcaacttgaagaacttcttaatactgtgatgtccaagtgcaggtattctttgttttgtgggaaatcagatctgtcatttgttgcatgaaagcaaactattaactagtaagtatatggtttatgatgaggctaaacttaggctttgtttagaacaagtgaattccacccaaaaaatgctaaatgcatttgcaaatttctacttttatccatgttctgaaaaaaaaaaatgcggattcacaaataaatatctcacttttgatggaaagtaaaaaaaatgaaactaattttatgaaatttatctggaaattctagttttgttaagttattttcatcttagtcataatatcatcacttttattaaacttctgttggtaggagaagaggaatgtggttaagtcatgtcagtaacagtaatactggcacagtgttgtcaacataaggaaaaattcatcacattgagattcttcattgtactggttatcatgtctattgcttcctaatgtgaacccccaactgacaggcctatgactcttgctgagaagaagatcttaaaactttgattcagaagttaccatctggaagccttgaccgggtagtaga

SEQ ID NO: 75392 - DNA, 883 bp, Carica papaya
  Intron number 3 from transcript evm.model.supercontig_36.2 0 (locus evm.TU.supercontig_36.20) derived from phytozome v7.0 (chr-ID supercontig_36; pos 191532 to 192414 reverse strand)
aaattttgtcagcattttataaaggtatttctcttcattttgcatatctttgaccgtataggcttagggtcttattcactatcaacactttcaatctaggagaaaataatttgagagaatagctcaaaaatgaagaatgagctactgatcttctttctcttcatttactaacgtttcatttatatccggttacaacaatgatatgaaaaaatctagtctgctgagctgcactaacagttaacaactaatttacaactaatttctaactagctaactgattaactaagtttacacactacaacttacttcttctcgtctatggtgttacagtgtttgtatgcttggtgcgcggttatatttcattgttttcaattcccatcttattctttttgcttaatggttggcatatccattacatgtagattaagataataaattttcatgcttgaaccactcagtccctggcttcaattcctcagaaagaaacctaattcctacttaagatttaagaactttaaacacattttcctagcctacatctcggatgttataaggtgatgggtgttttcctgactccctaacaaaaaaagaataggctagtgactttcctcaacgagaaggctaaatagaaagcttatgctgttgcaacaatgaatttcaagtccaatattactaaaaaggtgttgccttctgggaccagagattactaattattgtctgtcactatcctcttaatattgacaaagttgtttagtgcctcttgcttcttcttattagtttgctcacgggattgtaacttcagtaggattagtatatttttgcaaaacattgcatccagtgcgcccaggacatttaaaggtggttacaatttgctttttggcag

SEQ ID NO: 75393 - DNA, 795 bp, Carica papaya
  Intron number 1 from transcript evm.model.supercontig_3.18 3 (locus evm.TU.supercontig_3.183) derived from phytozome v7.0 (chr-ID supercontig_3; pos 1299218 to 1300012 reverse strand)
gacatcgggttgggacggttttgcggctactaaaggtaatttttagggttgttgcaggcaattatcgggtctgataggctttagtcagggctattttttattggttgttcggttaagcggctggaaagatttgaagtttgcctaatctttagtttaatagatgattcagttactagtgtgctaatttccactttgatggaactctgctctaattgtgcactattgttcatccacctcctgagagtggggagttatttgtgatagacagtgcagaaacttcaaaatcaagtttagtcgttggttttgtattggatttattgtaggtttttagttaagattttgggggtaaattttctttgttaagcctactgactagcttgatgggaagattgtgtgaagcaaactaattttcatctcaattttatttggatatgtagaacaattctgtatatttttattcattcttacatatattgtttcaacccggttcgttgatatacatggtatatacgcttatgatttattgatcattaaatacttttacattgatctgtgtcctttacttcatggtcattggacatcccaggaatatttagcaatctgattactgacaactagttgaatccggtttggatcagattattctccatatcaattcaatgacaatataggtttagtcatgatgacaccttcaccgattgcttgttatggccatttaaagtatggtagattcgtaccagtcgtttgtttgatgatgtagattcctacggtacctaagatctcggttccattgaa

SEQ ID NO: 75394 - DNA, 571 bp, Carica papaya
  Intron number 1 from transcript evm.model.supercontig_37.1 57 (locus evm.TU.supercontig_37.157) derived from phytozom e v7.0 (chr-ID supercontig_37; pos 1296847 to 1297417)
ctttctgaaattggtatgtaatcgtgactgattgctttgcatttctgattttgtattggccaacttatgtttggataaagctgtaatttttttaaacactgatcgcatctatacaatcatgccaattgcctctgtacttcttttggttatctctatgggacattaactgtgatgttgctttcaacaagagtgaatacatatttcattgtaagatatacttctttaggtcctcattcctccatggcagagtcgagtagtgtgaatccatacattgttgagtttttcttcagtccttatagtatgtatattgtcatatcagtttctcttccagttcatagaaggaaaatatgataactgaatggatgaaaattctagtgcaaaaaccgaattcctaatgttagttcgtctcatcctaccttgactacattgttgaaactttgaatgtttatttgccattttgtttattttgttttaacttctttattgattctactagtccagttatatgatgaattcgcctttgaattaattttccagatttgatttaatgtggatttatctcagggaaaat

SEQ ID NO: 75395 - DNA, 709 bp, Carica papaya
  Intron number 1 from transcript evm.model.supercontig_197. 13 (locus evm.TU.supercontig_197.13) derived from phytozom e v7.0 (chr-ID supercontig_197; pos 279882 to 280590)
ccgataaaaactctgaaagacctctcgcacatcaagtactgttgtatatacatgaaatttgtttatgtgtcatgttgagagtgtgtctttgtgtttgtttgctagatagttttcattttctgggaagacaaaaaggtcttgccttttctttgggtcattatcacatgaaagtttacgtctttgcttatgcatttgtttgttcactcgttttggctactcggttcagcacattattgttggtgtgtgtaatgggtatttgtttttgttttttttttttcctttttgtaattaagcccaactaaaacctttgctggaaatggtgagtttttttcttttgtaattaagctcttcaacaatgtgttttattggaaaataaagtacatatttttatgtgcccaaaattgttttgggtaaagccaagaaatgtacgggtccaaagtcagatgtagttggctcatagctgataatctgataagtgtagttgtgaataatccttgcctttgaggtaagaaaacatgggaaagagaaaaagagcatggtgaccatgcatattcttgtttggatgagtcgtttactgtgtattgatctcagagttccttagttttctttgcaccgggagtttttctttccttcagttctgctattttccttggggtaatttagttcaaattggatatacaggggtgtcgggaagtggattttaaagctg

SEQ ID NO: 75396 - DNA, 352 bp, Carica papaya
  Intron number 1 from transcript evm.model.supercontig_2.39 6 (locus evm.TU.supercontig_2.396) derived from phytozome v7.0 (chr-ID supercontig_2; pos 4368705 to 4369056 reverse strand)
atgtatatgtggtatgacatgaatgacagttgtgtagaacttaattgggtgaagtttaaaattaattaccatatatataagcttcatacatgcatataaccacaaacaaaaagaaaagaaattcaaactccaatgtgcaatgaatttcatcaatttaggaaattgtcattacacttcaaccaaaaatgaaaattacttaattttttaacaaatatcttatctctaaaaatagaatccacttaaatggtcattaatagtttgtgaactagttagattttatatggtgaaaaagttgtttttgtccatataaataaaaggatacaagtaccttcttcatctccagaaaagctct

SEQ ID NO: 75397 - DNA, 785 bp, Carica papaya
  Intron number 1 from transcript evm.model.supercontig_32.1 49 (locus evm.TU.supercontig_32.149) derived from phytozom e v7.0 (chr-ID supercontig_32; pos 1848551 to 1849335 reve rse strand)
tattattgccctcattgaccactccatttttttgggtaagttgaagagagaaataaaagagttttttcatggttcctaactacttaatctaagacatctttggtcccggaatttaatatttttttgtttaaggtcttacttctaatggagagattagtgaactcattatgttttatgaacttttctgtactgttttcttttacatggcttgctctcgttggtgctcgcgtatttcattcttttcttgaaaaaatatgtactgttttacgtacatatatcatttttaggcaaacatgctatcttacttcactcgcttcaatcaaaacaaagttgggttgaaaatttttatttacctttttcattattttcatataagggtctactatgtactctctacttcctgttttcattaaaaattttgttattatcgttttgtaaactcccaatgttagttctttccctagctttgtcatatatccattcgatttcaataatttattggataaaagtagaaatttcatttgaaacaaagaaagagaatgtacaaaatagggggatacaatactcatccaacagattgaaaaaagaaaactacaaaactagcagacattgatacaagacagtaatataatccctttgcagagagcatatttggaggcttaagaggggcaagaaacactaatctggtcatatgaacaggggagattgtccatgatgtttaagaactctgtctttcctttcgaatgacagaaatatcttaccagcaaaggtagcttattccataa

SEQ ID NO: 75398 - DNA, 488 bp, Carica papaya
  Intron number 3 from transcript evm.model.supercontig_25.5 0 (locus evm.TU.supercontig_25.50) derived from phytozome v7.0 (chr-ID supercontig_25; pos 690168 to 690655 reverse strand)
cagtgtagatatatcagacattgatcctgttaaaggtattctttcatcttcatttacataatatttctttcatctctgtttgattgatgcgaaaacgtgtttaggcctcttggttttttactccttttccactcaacttgtctgctttttatttgtcagtttcatctgattattttctttcaccgatcatcgctcatgtagttagtgatattatttatttcgttaacttaggctgctatccttaatacgtcacttgcatagtttttctctttgataccaatgtaattccaaaaatatccagataaatctattaataactgagtcttgatccttgaacagttacgtactattttgagctgaagctgtgaaattcattacgtatttgtttgaatgattaatatagctggaattcttattttaccagtcaagtctattaattcatctgttggcatgtaattgcgggagtttcagagtttggatttattgtg

SEQ ID NO: 75399 - DNA, 553 bp, Carica papaya
  Intron number 3 from transcript evm.model.supercontig_18.1 80 (locus evm.TU.supercontig_18.180) derived from phytozom e v7.0 (chr-ID supercontig_18; pos 1661793 to 1662345 reve rse strand)
atcaggtagatagatatatataacatgctcgtggtacatgcagctttattccttggtttatgatattttctttttttgttgctgactgtgcatccatctatcatttccgtatgatttgtattttagctaagactgcttgtttatgattaatttttggggtcaagcaatttttacttggttcttcctaaatcttcaatttggaaatatatagttaaaccagattttatgagtagtaaattccagagatattcagcatgcacactacagatgcctggtgacattgttactctaaagcatggaggtcctctaattatatttatctttactttatgagcatattttttgctttctggggataacatgtttgaatttctcacacattaaaagcacttaccatgctacccttttggctttttcctgtgaaaagttggatactccttatgcacgaacgatatcacaaccattcaagtgtgagtacactgtaaatgtcactttcttgcttgttttgaaaattttagattgaaaaggttgtcttgtttctgctggaacaaca

SEQ ID NO: 75400 - DNA, 430 bp, Carica papaya
  Intron number 1 from transcript evm.model.supercontig_189. 35 (locus evm.TU.supercontig_189.35) derived from phytozom e v7.0 (chr-ID supercontig_189; pos 293532 to 293961)
agacctgattctttcatcggcagttttatcaaaaggtactaaattactctattaatcatcttacttttcttttaatctcttccatatatgtatatgtatatatgtatgagctttctctttgattataaactagaaaaagtagtggtacatgaagtagaatctagatataaatatacatacacagacaaaactaattgaaagagtcgatgacagaggtatagaatctgaacgagctttcacataaaccttgagatagaaattaaagatattagagagacataatccgagatcaaagtggtattaattatttttgtttgttgtcttttgtggattcatcttggtaaatactataaaatctactatactaatatttaatgcgatatatattatagtttatgtttatattattgtttatctaaaatacacagat

SEQ ID NO: 75401 - DNA, 640 bp, Carica papaya
  Intron number 2 from transcript evm.model.supercontig_122. 17 (locus evm.TU.supercontig_122.17) derived from phytozom e v7.0 (chr-ID supercontig_122; pos 395176 to 395815)
ttgtggagctacttgtgtttgagttagttactagggttattatgttacaatgtgaaggaaaaagaaagaagtttctctgaaaggagttttgaccagttcggagatctgcggagctatattcgattgtatgtactggttgaatagttaatatggatcttctagtaaaatttatagcacagaaacaaaaagacaataatgggaatattatatcatatgattgattccttggttagttgctttgctttccttaattaggcaagttttctaaatttattatacatttcaaaaccttgctggctgctgaaataattcaaaattcttctgcaattaaacctaagaagctgaatgtgtcagtttattctagttagaaaccaatggttgcgggatatgatagccttggatggttaagagttgcatactgaaaataacaagtgagtttgtttagttgatatatcattgtccatccaactaaatttagtttacccccaacttgcggaaaggcttcagtaagatgtttctagccatttccaaagaggttggaaggctaatgttacaagaggctagatttcctccaacattgatctttttcgtcatttatatttcagccagagagtgcaggcagtttgagaagacatattgc

SEQ ID NO: 75402 - DNA, 663 bp, Carica papaya
  Intron number 1 from transcript evm.model.supercontig_483. 1 (locus evm.TU.supercontig_483.1) derived from phytozome v7.0 (chr-ID supercontig_483; pos 4019 to 4681 reverse str and)
cactggagaattctgattccagtcgtttaagtaaggtcaggttttgttttttaatgttcgtttatctattatattccttcctgtttggttgctgagaaaacttttgtaagtttcttttgatgtgattagtctgattataccgtttctgatcgcgtgagactgctttttctttataatttcttgttgtacgctgccagccgtctagttatttttgtatcttgcttcatttactgtcttaagagtatgtttttcggtgtttcatgaaatgtttctgatttactgtttcagttgtagatattgctactagttgtacttcaatacctacatatgtatttctgtttaaaatcttgttccttttgactttctttcagtcactaaaagaaacatattctcaattatcaatagcatttcctatgttatactttatatgatattgtctttgtcttgtagtatctcgtttcgctgtttcccctgtcaatgattatgttttctacagtgttgaaggcataaattactgaaacttctcagaaagaagttatttaatttttaaaagaagagtcaatttttcaatatgggatggagggagtactgtaatgttttcattttggtacttaagtaccccaagtggatgttttgaaagttttagtttattttcctgttagg

SEQ ID NO: 75403 - DNA, 694 bp, Carica papaya
  Intron number 2 from transcript evm.model.supercontig_12.2 57 (locus evm.TU.supercontig_12.257) derived from phytozom e v7.0 (chr-ID supercontig_12; pos 2312202 to 2312895 reve rse strand)
gtcctgggcaacatcccactcaggtctttgcaaaacttctgttcatgtcaatgctagagaaaattttattttgaatagttcttgaattttctcttcaaaaattccttcacctctattgtttattggttaaactaatttttgcaaaatcaaatttctatcaaactattaatggaaatgtgataccacatcaacctgtaccttattacgccaagtagtttctccctgtataaattttaggccttaaaaaggttgaaaaggttagttgactttgtttttgtttatgattctataataattgtcaattgaggacagttcatctcttccactccctcttccacccccttttgacaattggacaaattgaaatactgcttgttgacaagtttgtcataattttggtactggaaactgaataccaatcttatatggtagtacaaagaaacagattattataactgtcttattccgcttatcttaggaagcttatagaacaatgttgattacacaaccatctgccactactttctttgttcttttagtgattacataatatgccaactgtttgcttcattgttgtccagatgaaatatgaatcttttctttcttcagcctctccatttacatattgtggcaaatttcaattgtccagctaaagactgcttgttttctccctatgatgaacaggctcttttag

SEQ ID NO: 75404 - DNA, 494 bp, Carica papaya
  Intron number 1 from transcript evm.model.supercontig_1.12 7 (locus evm.TU.supercontig_1.127) derived from phytozome v7.0 (chr-ID supercontig_1; pos 1973248 to 1973741 reverse strand)
ttgcaagcgccttaagtcaaacaaggatcaagctggtaaagatattaacattacttgctggtggctttaatggcctcaaaagcttttggtgccacttttaagggaagatttgagtttgttagaggaacagaaaagaaattctagatgtaacaagatattagccttgtttaatgttttctattgttcattttttttttccaattgacgtattcaagacaaaagtatataaggaaattatttgtgaaaaccactaggacaatatttatagactgtttttaagagaagcataaggaagttgctgtttctactggatttggtgcttctaattaaagcttccaactataaaggttccttctaacttttggcagtttttcttctgtatgataaataataagttgctaggattctaatctgtctggtgtaaattttttacttttgatttatagaatgatataatgtttaagttgctgtcaatgtgtttttgtttgtttcag

SEQ ID NO: 75405 - DNA, 454 bp, Carica papaya
  Intron number 2 from transcript evm.model.supercontig_119. 26 (locus evm.TU.supercontig_119.26) derived from phytozom e v7.0 (chr-ID supercontig_119; pos 138734 to 139187 rever se strand)
agccaggtaattcttgcttgcctattttcttatgtttttcctatcttctaatctcccattaggttgctttaggcagatgggtgtgtttaatcctgttagtctataatggtgttaaatattgccgaggggttgctctatatgatatcagtacataatattattatatcaaagcttttttttggctgcctaatatcagatgagtatgctgggtctcttgcaatttggaagaaatgtatctatttgtttatcattgtaatttgtgttttttttttctgtatcttttggttccatttttgctctgatggtcgactttagcattttaggaactatattaaagtaaaaattcctttggtttccgagcacttcgtaactcttttgcttgatgctaaggattttggggccttttttaaatcaatatatcattgtgcactttcaggtacatcagcttgcccaa

SEQ ID NO: 75406 - DNA, 411 bp, Carica papaya
  Intron number 1 from transcript evm.model.supercontig_131. 46 (locus evm.TU.supercontig_131.46) derived from phytozom e v7.0 (chr-ID supercontig_131; pos 344779 to 345189)
attttgaacctctggtatggcagtccctcttctttacttgcagcaattcaaatctgcaaagttggtttctaccatacataaaagttccattagacataattatttcttcttccctacagtggtaagatattgtagatgttgataacgctattagacaaagagatactagaaattcaaaatttggacaggggagccctagttgttttctatctcatgcacaatgctttgtggaattgcatttgcattgtacactacagggaatagcttgaaaactgtttgttcttagatattgctattatatgtttgaggagcatgatagtgcagtattattttcagtctgtggaggtagtgagctgtactttgttttctttgctaggttggagattttggtcttgcaaggtggcaacctga

SEQ ID NO: 75407 - DNA, 639 bp, Carica papaya
  Intron number 1 from transcript evm.model.supercontig_19.2 21 (locus evm.TU.supercontig_19.221) derived from phytozom e v7.0 (chr-ID supercontig_19; pos 1715200 to 1715838 reve rse strand)
ctccaccttctatttctccttcctttagctccaaggtgcatattactacaacatacacgtatgcagattagtatatctcacatatgcttgcactagctaacatcttcatgtcaagcttttctatatatacacacatatttgatgtagtaagctacttgttagtcattaatttcgactttttttcttttattatctaaattttcaagataattgacacctcaatatatttgattagtaagaaagtgagtgtcatactcagatatcaaactttatatgaggattcaagttgtgaactactaataatttgttttggaattgaatttgagttatgagaaagtgtatatattgattaataagtaagattatgactattatatatgttcttgataataaatgattaacagccggtaacttgagcttttgagtactaattagaggaaactagtaatttcatgctgaggattgtaatttcataaaattctgcttacttgacaaatatagtatatagaatatattcaaatagaattgtacgcgaaagaatttctactcacatggctattttcttataagtttgttgttgatcgatgtacaaaatggatgacagagtctaaaatcaagctcactatttggagaatcatt

SEQ ID NO: 75408 - DNA, 915 bp, Carica papaya
  Intron number 1 from transcript evm.model.supercontig_14.1 44 (locus evm.TU.supercontig_14.144) derived from phytozom e v7.0 (chr-ID supercontig_14; pos 1725860 to 1726774)
gtccttttctcaataggcgtactattaggactgaggtcagtttctttacagtattcttggttttgttagatttcaatgatttctctatcttttcatggattaccttttcattaaattgtgaagagaatagatgaaaatttgattgttgtgtatagtgtgaagaatatatagcaagggggtatttgcacgattatcattttccctgtttttctatcatcttccagaatttccatggcataaatttgaaaacttatgttgtaatatctcgatcgcagaaataatcttttggcttacacgctcacatcaggattatatttaagcttcttctcttttctaaataaatattgcatagcgttcttttaagtcttcataaattctactttgactgaaattttaatcaatcttttaattgtggaattataggttcataagttattattctgttttcaagttgaaaaacctgcttgtaaaggaataatggcttgtgaaaaataattattacactagcctttcttattttatttattttaagaagttacaggtctctaagagctccatctttggtctgcctttcatctgatgatttgttccattgcatttcaaaaatttctttctatgctatctcctctttcagcgaatcagcaatgacctagtgttccatctgcatatgttttcttccttaagctttgttctattcaaattaagaaatataattaaatggagaacagttttctggatttctttctctcccttctgaattggaaattacaatcaaaaagctttttctcatatttctatcagttcattaaagtccaagaataaattaaaccgggtattgcaccaagaactttacttgtgattgtggctgtcatctcacctcacttcatgtttcgttcaggctgtgaaagactccat

SEQ ID NO: 75409 - DNA, 941 bp, Carica papaya
  Intron number 1 from transcript evm.model.supercontig_12.2 19 (locus evm.TU.supercontig_12.219) derived from phytozom e v7.0 (chr-ID supercontig_12; pos 1945348 to 1946288 reve rse strand)
atctaccactgctagtccctggaaaacacttagcggtaagtggcttgtctagctctagtctgtgttcagactattgctatctccttgctgaggatgagctgagaaatatatgagaaaatgtgttctgcttcattttattcttttttctcgaccgcttcatctggatttttctcgtgtttttgttggatcttttttggtcttcagctgtagttgctgaaaattagttgaggaataaatgagaaaatgcattttggttccttttctttggattatctcgtttcatgagcttttttaaagtttccagttgctgctactgcttagttgctgagaaattaccgggaacatcctagaaaatggcttgcttcctcattttctcttcatatttttctttggatatttgtcatgtttctcataaattctttgtttaaagttgtttctgcttggttaattataaaatgaaggacaaagttagaaaatggagaggggaaaatgagaaaatgcagagcttctctcaagtttgaacttgattcggtcgatactcatctttatacccttttgcgggttcccaagcaattaatttggtttcacgcttctattaggaaactatctttcttctcttttttgtttgctagatatgtcgaagaattttggaatttaagatttcagtttagtttttccccttggacgattaaaagaatcatgcaatattatttcctatcttgatggattgagaaactgaagtttcggttttattttgtcttttcatttcccaacaatttttggttgctgtggttttaaaagatccatagctaatgatgcgtccgtctggttgctgtactcttattagtaactgtgatacaataatctgtattttcatcaaactcacatgttgatctctctttgcaggaaatcctcctctagttatagcacgaggtgggttt

SEQ ID NO: 75410 - DNA, 381 bp, Carica papaya
  Intron number 2 from transcript evm.model.supercontig_18.2 06 (locus evm.TU.supercontig_18.206) derived from phytozom e v7.0 (chr-ID supercontig_18; pos 2315957 to 2316337)
ttgtgtcgaggttacttaaggttgtaacctctgagttaatttttctgtgttttgatatgctagaggccatcatggacaacagcttttaatttattgattaaggttttctaatgaagcaagaatcagtttttgccccaattttctcttctcttctcttgttgttgatacggccagcatctgctaatattttatttaaattattttttgaatgggcttctttctgttacatcaatcctttttcttacattagccctctttcttgtaggactttacaagggagcttaagaggaaacgtatagtttcccccccaagaaagtgaacaggttgaagcagaccactgctccaagagtgaagttgtggacccaatttctccttctacag

SEQ ID NO: 75411 - DNA, 828 bp, Carica papaya
  Intron number 3 from transcript evm.model.supercontig_178. 2 (locus evm.TU.supercontig_178.2) derived from phytozome v7.0 (chr-ID supercontig_178; pos 11240 to 12067 reverse s trand)
ctggcaaaaggaagacgggtaaagttttaccatcatcttttttttgttatatcttgtgtttcacagatgattgtttttctatatttctttggggatagaggagaagaacataaactaatgtgtaacaaacgtttaatggagtgttggatacatcgttgttgactggggagtttgtgaaggtttattacatgtgaatatcacagataaaaagggcgggtatgatttgagtgtttaatcaggtccagttctttctgaattaaatcaatatgcagtaatatatcagtggagtttgatttagtaaccttcatagagatcacgactaattgagcactttttctgttttgactattattttagttttatttttcaatagtcattggtttcatctgattttttaaaatcaatttttgatgctccaacaattttgtttttaattagtagcattttgaaaaatctaaaatatgattacaagaatcttcgtatccttgtatctatatatgtctaatacgtttccttctgggtttttttttttaaataccatctggtatgttgtgacaagttgtttttcataaagaatgactttttaagttacaaggaggttaaaaaggtttgtatatgaggtacgttataaactgtaaataatttgacaaatcttactagttaccaacatcattgtacctcattttcctttttcctattctgattcatctcttgatttataatgttaccatttttattttttgttgattttaccaataattcggcatcggatgctgacatcaccttgattattttctttttgttcaggtgggaagaaaaaacagcttc

SEQ ID NO: 75412 - DNA, 153 bp, Carica papaya
  Intron number 2 from transcript evm.model.supercontig_178. 2 (locus evm.TU.supercontig_178.2) derived from phytozome v7.0 (chr-ID supercontig_178; pos 12175 to 12327 reverse s trand)
aggtatgttgaattatcttttttctttctttgctcaaaatgaaaacagtttctgaactggctggataatgcttttacttttttccttttgattaactgatctagatattttgttgcagaaaagttaccactacattggtttacttaaggcagt

SEQ ID NO: 75413 - DNA, 785 bp, Carica papaya
  Intron number 1 from transcript evm.model.supercontig_25.1 59 (locus evm.TU.supercontig_25.159) derived from phytozom e v7.0 (chr-ID supercontig_25; pos 1639243 to 1640027 reve rse strand)
agcagggtaaactaataatttatgattgttttcataattatttattctcatatattcggaattattgttgatgataatgcctgcgccagcacatatttaacatggttgtttctgactttgaatttatgcatgctaatgtactactacttttttttttaaaaaaaaatttatacattaaaaatagagatttattgacctctccttctcagtagtggaagtggggaaatatgtcatcttatacatgtctgacaattattttacttaagtcttttatcttcagacacttctaggtattgagaaatgattcttttgtgaattcagggccttacgccactatgaaattattgaaggttaggtctttccccaaagtatggggaaattactcttggggaaagcctctaggctatattagtgatagatatcttttggtaatcaaattttgcaacggtgttgccaagggtcacaatctggaatcaacaaaatgcatttgccgttgctttggcaaggacatatgataatcttagcagtcataccacaatggcaattttgtaaagagcaggataattaaaccttctgattccttcgtgagcacgaacattctgacaggcgattaccagtttgttttgtttgtaattttttttttcgattgtctagttttgtgcttacagtgattacttgctggagttttattaagtttttatcaacgctcttctgagttcgtaagtgaatattttgttctgtttgctgcagttcaagccttaaacagctctatccctgtgccccca

SEQ ID NO: 75414 - DNA, 746 bp, Carica papaya
  Intron number 2 from transcript evm.model.supercontig_10.2 34 (locus evm.TU.supercontig_10.234) derived from phytozom e v7.0 (chr-ID supercontig_10; pos 2928637 to 2929382 reve rse strand)
aaatcaatcccaaagacaatcacatttctttccaggtaaattttcaaaacctaatctctttatttgttttgagtttacgtgattgatttgacatcacgatagtttatttaataatgcaattctttatgatttcgattttgatgtcatgtggaggcaaagtggatcacgacattgacatggcttgattcatgtatcaccataatacgtacaagaaaataagagcctcacaaatttgcaggcagaggagtctatgaaaatattgtttgattcagaatgcgaacaaatggaaaaagacaaatttcaagaaaaagaatatgtttacgcaaatctttctttccaacagcttataatgaatatattgactattttttctttactttcccatcactcgagaacgaacaaaacaaacatcttgttctttctttaataaatttctaatcactagtggagttctcagtgacatcttgttcttttttaataattttttttttttatctttaatggaactctcagtaaaattcgaacccagatgatgaatttttgatcatatgtcacataaaaaaaaaggaacggatgagtcttgtagatttcttctttctgaaatagttgattatttgtccgcttttcatgttctgtggataatatcataacatctcacgtacccccgctcaggtttcctttcttttctttctcacttaaacaatccctcatttacgtgaaaaatattgaatgtgcagtgtgagaac

SEQ ID NO: 75415 - DNA, 1047 bp, Carica papaya
  Intron number 1 from transcript evm.model.supercontig_223. 13 (locus evm.TU.supercontig_223.13) derived from phytozom e v7.0 (chr-ID supercontig_223; pos 163883 to 164929 rever se strand)
cacatcttcagtttcttatcccctcttccaggtacttcagtcaacctttttttttttctcttcttatctccatgtatgccgtcggcacttaatttatggtcaattttgttgtttttcctatacgctggtgtgtgtgtgtgtgtataagtatcgtaaagtagcttttattttgatttctctttttggaattgagcatttctcgcttgttcatggtagactggtttaatgatgattagctagggtttgctctgtaatgtcttccagctaattgtttagccgattaattgtgctttttttctctgctagtgtttgggtgcttaatacttcaaatgagttaggcagtggaccctaaccgggaagaaaaagaaggatgtaagagatttttgtaactatgttgacatggatttacgttgaggttttgtggttgatggtttcatttgacaacttactaacagggcatatgggcttgacaccttataagctttctttgttggtttagaggtttcctttgttggattagaggtttcctttgtctagttatagattttctttgagcttcgtgtggctttagagtgtatgagaattcgaaacttaagcgctgtttagtaaatcaaaatattttttgaacgttttttctgctgaattcatatatgttaatagataaaattatgaatttttttaaaatcattttctaacccttgtttttattttcaacaatttatatattttatagataaatatgtttctttcgaaacaaaactagagaagatattcatagctctccacctgatgcagctgttgctaaatgcctatatataggcatcccatttagtaccagatacatcattttagtctttgaatgaaagtttttccacctaaagtgttctcttttctatgctctctgggttctttggcatacatttggctcgttcagtgcgtgcaagacatccttattatttttttaatgcatagataatttatatgatctctttgacatattcttgttgagtttgcagatcgctataacgctgcccgcgtttgccagag

SEQ ID NO: 75416 - DNA, 520 bp, Carica papaya
  Intron number 2 from transcript evm.model.supercontig_36.1 67 (locus evm.TU.supercontig_36.167) derived from phytozom e v7.0 (chr-ID supercontig_36; pos 1225459 to 1225978 reve rse strand)
ctctaaagcatcccaatattgttcaattcaaagaggtttgttctgtgttcttcaaaagttgattttctttcctatgtgtaaggttgattcagagtaggaggctaaagctttatttgttcaaagagataatcattgggattttgactcttttattacgctcttttctttttcctttctttttggtaatagagaatcaactagaatgttaaaaaatggtttttatatgttagaaacttacgaaacttaaacttgtggaaggacttctttgttgagtggatttctctgtttctttattcataattaaatttaaggacttctacttaagaattccagttgaagaaatttcttatgtcagtaatctctactcccagcttgaatttatcagaggagatgtttcattgtgtactttgaatcgaatagaaaatgttcgaaacgaaatctaaacatttaaaatattaagtgattcgcaactctaatccttgcaggtcctactaactccaacacacttagccatagtcat

SEQ ID NO: 75417 - DNA, 811 bp, Carica papaya
  Intron number 1 from transcript evm.model.supercontig_40.5 2 (locus evm.TU.supercontig_40.52) derived from phytozome v7.0 (chr-ID supercontig_40; pos 875559 to 876369)
tttgcgagcgactttgtgctgagttcccatctgaggtgtttctttttattatttcaaatttattttccttaaataaactgttgttcagggttaaagaacagttttattttcagtctcacgtcgtttgttcttgttcgtctttttctttttcaaaatttcctggtgacaaaaatttaactgtctggagctattaagatccgttatgtgttgctgactcagtcactaatttcgggaatttttcgctgtctaatatctttggttctggtatcgtattccaaagattctttcactcttaaaggcactatcttctaattaatatgacgtttgtgtttggtagccatttttttctgtgaaaagaaaaagatttgtgtttaatagctatttgtttttgtcagttctgttgctactgattaggtctgctttaagtttagtttaagttagaaaccattttctggatttgattttgtcttttgtttgatataaacaaaatgttttagctttaagcattgggtatgggcggagatgcacagtagatgtctttacattggaggctacttattttgaaaaatgtggtggattgaagtacaagacggattcttgtacatcggttcactggtactgcttttgaacttgtatatggagcattaaatgaaactcaagtagtattgtttgttttgtatccagccagtaacctgtccagaattgctcaatggttatggttcttggttctgttatgttttcggagactgcttgacagtcccttttccgtcatgcaggtgaatttgcagctgttagctagttgctacttgca

SEQ ID NO: 75418 - DNA, 740 bp, Carica papaya
  Intron number 1 from transcript evm.model.supercontig_17.1 92 (locus evm.TU.supercontig_17.192) derived from phytozom e v7.0 (chr-ID supercontig_17; pos 2338680 to 2339419 reve rse strand)
cttctgggtacgtctcctttctctctatgttttttacacacacttgttcttgtgatttttttcttgggttaatgacatgggttttattttctgttgcataaagaaatttagggatgacacaattttttaataagtgaagaatggtccaaatttgacaagaatacgatttttatgttttattctgctgcatttttcgttctaatgattggtgatgagattatggtgttgagaaatatttcacgggttgcaggaaaacaatttttatattgacaggtagggggtttaggcgggttgtagattgtacagtgaattttgaaagcgtttttaataaaaaattgttgatgtttggtaaaaataactgtaaaaagtcttatcattttgaaaagatagaaaagttttttgtttggtaaaactgacttttgaaattttaagtatgaatttttaataaaacccaaaactatttttctaaaatttgcatttgtagcttttggttttaaacctatcaaaggtagattttggttttgggtgttggtaaacgcattttactttcaacccattttacacagctttattgccgtacctaacgtaggaaattggagcttggtaaagtacagcaatatatttgcatctgaattttggttggaccttattaaacccaaagctttgtatattaccatttgagaaaaaacaaaatggaagatttatcagctagatatcttgtaggcttgacatagttgatc

SEQ ID NO: 75419 - DNA, 580 bp, Carica papaya
  Intron number 1 from transcript evm.model.supercontig_39.9 1 (locus evm.TU.supercontig_39.91) derived from phytozome v7.0 (chr-ID supercontig_39; pos 1772045 to 1772624)
caggtttatcaacgaatttcgcccgtaacctccatgtaagcctgtttctaattctcaattatcaattatcaatttgtaaaataagaagaaaatgagaagcatctgatgttgatgatcatctagtttccataaattttccggcaggggattttggaattggttatttattttttatttttcctaacaattgaactgtctcaatttagtcttgcatgcagattttggttgacgatcatggtttattgtggttaccgtgcatgttaggtcttgcagtggtgtgactgtgccgatcgcaaagcgaggagtcgatttgtttatttctggtctttgattcacttattaaataattaattatcaatttattctcgagatacgaattctctgtcaaaattatgagaagacagagaaaacatcatccgctagttaagatcttgacaatgaaagaaggcttatagagattttatactctttttttttttttttttaattttccatcttcttgatgtggttgatgtattaatgtctatctgtgcggctacaagcaggcgtctccagggagcaaaaagattgttggggtgtt

SEQ ID NO: 75420 - DNA, 345 bp, Carica papaya
  Intron number 2 from transcript evm.model.supercontig_43.1 38 (locus evm.TU.supercontig_43.138) derived from phytozom e v7.0 (chr-ID supercontig_43; pos 1678074 to 1678418 reve rse strand)
ctccctgtcagtattcttcctcctttggtttggtggtcatctaatatcaaaataaagatgttttctgctggtggatgctgatcctcttctttactgcttttttagaaacccatgtgatattgttaatgactttatgatgaagtgtgatgtaacttttagtataatttatccataataatttgatagcattaatcaatgatcataatctttgttgatgatgatatagttctttgaacagtagaataatttcctctatgtttctatgaattatcttatggttcttgatataatattgagtataatgttgcagtgggttattgttccttctacgggaaaaaggtggat

SEQ ID NO: 75421 - DNA, 677 bp, Carica papaya
  Intron number 1 from transcript evm.model.supercontig_43.1 38 (locus evm.TU.supercontig_43.138) derived from phytozom e v7.0 (chr-ID supercontig_43; pos 1678447 to 1679123 reve rse strand)
gtctatttctcataggttctttcaccaccccaccagtaagctctctctctctctcttcatcttcttaaacccttctctttatctctctatacatcatatatagtatgtaggtagggtactgtgagcaatctgtctccatctcttctcttttttttcccttcagatttactggttttgttcatatgtttttaccttttataacctgggtatgtttgattttgagttgaggaatcttattcacctttcccttttcattttcttttgttctggacaaataggaaatcgtggttttcttgcagcgcatttcgcttttccatttttctaaaatcttactgttactgtaatctatttggttataagagcagattgtacagagatttttcatatgcagcaaacagttattagcttgtgggtttcactattggtgtggtttttgtcttttcaatatttactttttcttctgtagatttagtatttttcatggcttttttactgttcgatttcctggaggcataccctcttttctcctgtgattttactttgcttgatccttaaaattacattccaagagcagaagataggaccctttgtttttggctttttgtgaaccccttctttttggattaattgcaaaagatttttcccgtttaattattttataaggaactttggcttca

SEQ ID NO: 75422 - DNA, 481 bp, Carica papaya
  Intron number 1 from transcript evm.model.supercontig_2.23 1 (locus evm.TU.supercontig_2.231) derived from phytozome v7.0 (chr-ID supercontig_2; pos 3048436 to 3048916 reverse strand)
cttactccagacttctcctcagccgagccgttagggtacgttcctcttattactccactattattttaccactctttctcttttattttgtcgttatttctctgggtaaattttctttgctgctcctgaaaggctgattcaatctatgattcaagattttctttttctacctcggttcacgagtagttaccgtggccgcgtagcaggaattttgaaccatactatatatatatatatgcataaatattatataggtcctagtttttctgaaaggtcgcttttcttaaattttgtttttgtttatttaatatttttatttcaataaaaacttaaaattaatgaatcatagttgtaaggattgagtaaatatacagtgcgtatttgttaaaggttatgtttaaaatatcgcgagaaaatgaccgttgcaagagacggttatggtgtaggttttcgagtttgctgacaggcaccggggagcgta

SEQ ID NO: 75423 - DNA, 879 bp, Carica papaya
  Intron number 2 from transcript evm.model.supercontig_53.4 6 (locus evm.TU.supercontig_53.46) derived from phytozome v7.0 (chr-ID supercontig_53; pos 242240 to 243118)
cagaaaacatcgatttactaaaaaccagaaaactagtcagtagtatcatattacattgatcatttttacttgaatccactccatatacctagatattttggaccttgtttgcttttatatttttcacttagatcttctcaaatttaatgtgataatagtggaatttaagagaacttcttctacttatgaatgcactctttaaggctttgggcaccaaaaagtgaaaatgagttgttttatgaaagaatcccggtacgaaataaaagatgtgtttcattgtttgatatttttgtaactgctgttcatgctttaagcccttaggtgagtctagattcttatgtttatgcactgggctatatgttaaaatggttaactgtttatttggtaggactagctagttgcgagtgagtagtatttctacatgtaggtctgcttgtcctttattttctgcctattttatgttgtcaatgatcaaatggttaactgccccatataatgcactgtcacggtcagaaagaagaagtcttcatggtgcttcttgatgtgttattgaactggtacaataataaaaacctcatgttgtttcctcatttgatttggtaatcagtccctttcattgtcatttttgcaagaatatgcctatttgtgttagattttctgttttatgtggtctctctctctctctttctctctctctctctctctctttctctctctctttctctctctctttctctctagtaatatctctctttttctatgtctgcctattctgttccagttataaatctaaatattaagtataatccactatggtttttgacttggatggtgttacccttaggaaactgcggaaacgaaacggaagattgcaaagcg

SEQ ID NO: 75424 - DNA, 131 bp, Carica papaya
  Intron number 3 from transcript evm.model.supercontig_171. 27 (locus evm.TU.supercontig_171.27) derived from phytozom e v7.0 (chr-ID supercontig_171; pos 355467 to 355597 rever se strand)
taaaggtgtatagattattgttaattacttctgaatttgtttttttttttcttttgattatgtattgtgattataatcttgatcttccttccacagctcatcatcctaatattaattccgctgttgaacta

SEQ ID NO: 75425 - DNA, 771 bp, Carica papaya
  Intron number 1 from transcript evm.model.supercontig_37.2 08 (locus evm.TU.supercontig_37.208) derived from phytozom e v7.0 (chr-ID supercontig_37; pos 1605424 to 1606194 reve rse strand)
tgcccagaagataccttcgttgatatcacctctaggttgacttcttgcttatgaggagaaattaatttgagattacataaaaaaaaaaaaatgaaaagaaaaagttttggtcaattttttttttattttttttttccttatgtaaagttcttattgtttttcttaatctgttctctgttctttgttttgggagaactttgtggtaaaatccttgtacaaaattctcctcttgtttacaagagaatgatttaagtataatgctaattttctctatatcattcttcccttctttcttaagtttatgtatctgtaagttctccatagcatcaattttctttgatgagcactcagaaatttacgatgaagatattttttaagatttatttttgaagtcaactatatttatgcacatatttattgagaaaggtacaaaacttacatatttctagaattattataatataaaaaataattttttttttttttttttttattgtcatctttgcattgctaaccaatttatataattttatgaatgatatattcctactattacttcgtagctaaaaagatggaaactaatattgcagatacaaactgtaacaataatggatcataatcttaaaatctctatatgatatttatacaaccattaatacatttataaggaaaaaaaaaggaaaaagaatatctaaagcttgctcctctaaattaataaactcttaagcttgattaggactcctcccgtggccactgccttgtactttattt

SEQ ID NO: 75426 - DNA, 508 bp, Carica papaya
  Intron number 3 from transcript evm.model.supercontig_5.21 2 (locus evm.TU.supercontig_5.212) derived from phytozome v7.0 (chr-ID supercontig_5; pos 1824517 to 1825024 reverse strand)
attgctcaagaaaatcaaagtaagcttttggtttctattcctttgtcttttttctctttctcttacttgcatcattatattcctctgttttttccctcaatcattttccactttgggttgatcatttttctttttatgcttataaaaattatgtatattctctcaaaaatcttttaccagatttgattttttttttcccccaatcccaaaatgatgatatttaactaaagaaaaagttgcagagataatgggtcttgttattattgccacttgctaatgagtgaaaaagtcaatggaaatctcttggaatattttgtcacccactttcctatcaaaacaaatcatgctcaagatattcagggatttaaagaaaaaattggttttctcaaatgggtcctctttattgatgaagaataatcacagtgatccaataaaatttacagacgttcgtttggtttctctgattttgcaggaatcttcatctctaagaaacataccggtagttatc

SEQ ID NO: 75427 - DNA, 794 bp, Carica papaya
  Intron number 1 from transcript evm.model.supercontig_50.1 19 (locus evm.TU.supercontig_50.119) derived from phytozom e v7.0 (chr-ID supercontig_50; pos 1061482 to 1062275 reve rse strand)
ctttccaggtgaaagaacttgttctgcttcttcaggtaatctgtgctttgagcttttgtgcctattgatattactgatgctgtggaattcataattagctattctatatacctcaattcaaatataaatattggatgttactacaagttcctgttttcattcaacttccatgtgctttatattgatctggagagtccaataaccagccccatatggatatataatgcactatattctaactagtttttcggagagccaaaagtagaaactcttccattttgaaatcaaagttctaggcaatggattttgatcctgttaccacatacaataccatttgcttgtctcatagttgtgcttatgtgcatgtttgatcggaaactaacagggcaagatgatttccaggagattttcaacttatggtgttatttctctcccaatatttgtctgcatttacattttgtctttaaagtgttaatgtttaaatgttatcccaggcttagattgacatattcccaatcaaatagattctctgtttcctagtgatgttaaatctgatagtctgtaaagctcttgatctcaactttttgaattcaaatggtagaagtgtttctttgtctcctcaagattagcgtctgtgagtttctttagctttgagaaagagacagtcttgcagagagaacatgctgtatttgtcaatggtagttgaccttccagatattttagtttgaattatcattctgactcaacatctgcatgcagcgtcgtctgctagattttgtcgagaaggcttttgt

SEQ ID NO: 75428 - DNA, 955 bp, Carica papaya
  Intron number 1 from transcript evm.model.supercontig_18.4 5 (locus evm.TU.supercontig_18.45) derived from phytozome v7.0 (chr-ID supercontig_18; pos 342383 to 343337)
tggctccgtctcagcttctgctgttgaaggtacttttgagatcaaatacaatactttttatcttttcttgaaatgttgctcggaataggttcttagttgtgaagaattgtggcagtgtaggtgcttgattgattctcttctagtagttgacctgtgtttatttggattgatcgattgctggatgacgttagtgcgaactctatctgaagtttaatatcttgaatatgtgaatggagttggatttgccttgttttgattgattctcttgtacggaagtatttcgcgaagcagagattgtggtatctagtagttgacctttgtttctttgaccggaatgttgaatttagtataactgtttttaaaatttgatgtattgactcttttaatgaagttggactccgttgtttgctgaagtattttccaaagcagagattttagtctctagtagttgacctttgtttctttgaataagttgatagcaggctgaatttagtgtcagctgtatttgaaatttaatatcttgaatctgttgatggagttggatttgccttgttttgatgcattgagcgaagcagagactttattttataacttaaattacatactttccaaatagtagtagttacgtacttatttctgttcagtctctcaatatctaacttgtcctttctctcctcggattcgtttgattactgagctgattatgtctggcattattattttaacattaggtatgaatgttttgtggtactgtctctgtcctgtgatccaaagcttaatggtattttatcagattgtgtttttcctaaccttcaatgatctttgcaagaccatacttgtttaaagatttttggatggaggggtgatcagaagcaaatatctaatagtaagcgatgcttatttcgattcataatatgcagagtcagcaattggagttggatatcgtctccctgtt

SEQ ID NO: 75429 - DNA, 637 bp, Carica papaya
  Intron number 1 from transcript evm.model.supercontig_260. 4 (locus evm.TU.supercontig_260.4) derived from phytozome v7.0 (chr-ID supercontig_260; pos 25992 to 26628)
aggtgtgtgttcattgttaaacatttcatgtttataagtttattggaaaattttgctatgattcataacgggttgattggaataatgtaagtcggtcatttccagtagtaatttcagtttttcatgttaattgttaaagattatgtgtagttttttttttttttttaattaatttcatgtcttcgatattatagttggatggagtaagtgttatcttattatcttcattgttgtagtgtgtccaacattttgaagtcaaattattaaatttcttcaggttttcttcaaagtggtatgaatatgaaatgagttacacaaatttctttcttttatcagtttaaaatggttttcctcaattagtttgcttggtttctagtttctaaacgatgtgaatatgtattccacgtgtcttagctaatcgacaagggatctttgagacacgtaaaagttgggattggagtcaattatggctcttccgacgatcttggagaatttatgcttgctttaattagtgtttattattttgttctgctaacaccttatttgtttggagcgttttgattccaacagtcaataatcttctattgtctttctgcatatagttggtaaaaactattttcagaaataacaacaataa

SEQ ID NO: 75430 - DNA, 512 bp, Carica papaya
  Intron number 1 from transcript evm.model.supercontig_49.2 3 (locus evm.TU.supercontig_49.23) derived from phytozome v7.0 (chr-ID supercontig_49; pos 115043 to 115554 reverse strand)
gagaggtgcaattttgcgtaactctttatgctctttgatttccgctcccactcgaactcatttctgttgaattctggcgttcctttgaaaacttggcgtcgtgttaactgtacactcactttttttttttttcttgagtatgtataatcagtatcttatgagttcaatttaaggtcaacttcagtcatgctattgtttatatttctccgtgtttaagatttgtctatttcagttttctagttttccgattgggtttcttttatatattatactaatatatattgatttggatagatgtattgagtattattattgacttttattttgtttgccttttgtttgctccatttttcttcgatattggtctttgacctgtgtgttaacactaattagaaacgagaacagagaggtgaacttaattgcgtccttttcccctgtttacaaccttatcggacatggttccttcttatatttcagacggcgtacacttcagaggaaagcgcaagaagctc

SEQ ID NO: 75431 - DNA, 400 bp, Carica papaya
  Intron number 4 from transcript evm.model.supercontig_183. 27 (locus evm.TU.supercontig_183.27) derived from phytozom e v7.0 (chr-ID supercontig_183; pos 255076 to 255475 rever se strand)
ctattgtgtgaggtaattgatttcacttccttttgtatatttattgatataatgattttggataagtagcgaactagttcaaaatctcaatgaattcatctgtttttgtattttttcttctggaagagaatctgggtttctgttttcttatcaaaagtcttattgccattaacctgtatagtttagttgcggtgacagtatgtgtttgggtccttgaaacagtaaaaatgaaagtaggccagacctagaattaattgccacaccccttgtctctcaaaagttcaacaccatagcagccattaattttgagcttgcatgagtgtttttatcccattattgaatcttcttggaatatcatgaattgagactctgtgcaggctcaaaaaatatttggtaatag

SEQ ID NO: 75432 - DNA, 442 bp, Carica papaya
  Intron number 4 from transcript evm.model.supercontig_12.2 83 (locus evm.TU.supercontig_12.283) derived from phytozom e v7.0 (chr-ID supercontig_12; pos 2580178 to 2580619 reve rse strand)
caaactattcagggaaaagtatttacataaagcaggtagtttcactcttctaggattgcgctctctttctctctctctctctctcttgctctcccctccttgcaatctttgtacgtatttttctgagtcttccaggtctgttaaattgtttcttatgttaaatctttcaaagcatccctggttaagcatgtatcaaattgttttgatcatttttctattatagaaagaacaaagggggtaaaatttgttttagtgcctgcattgacattttatcttcagttcaatatgtgtaacttatccaattttaagtaatatggcataagaattggccatttattctccttccttttactttagaacttgagtgtagattgattgatgcttaaaggattagcctccattttcaggtggctttaattgtcttcctttcgcacattggaag

SEQ ID NO: 75433 - DNA, 336 bp, Carica papaya
  Intron number 1 from transcript evm.model.supercontig_177. 21 (locus evm.TU.supercontig_177.21) derived from phytozom e v7.0 (chr-ID supercontig_177; pos 476550 to 476885 rever se strand)
atcaacaagtacaaagctctgcctctccaattcaggtattctcactgtttttttgttttttttttttttcttcttttgaacgtcgtggttacgattgtatcacggtttagcaatcaactgattaacttcgtaattctcctaagatttgggcgattggccaatgccttcgtgaaccacagacctctcctttcttctgctccgttcatatttttcctaaattctgtcatttaatctatttcaaaacaaaaacaaaaacaaaaaaaatgtttgtcatgtaaataagttttatggtactcgtctccttggcttgtaattctttggttatacagtgctggt

SEQ ID NO: 75434 - DNA, 938 bp, Carica papaya
  Intron number 2 from transcript evm.model.supercontig_17.2 24 (locus evm.TU.supercontig_17.224) derived from phytozom e v7.0 (chr-ID supercontig_17; pos 2610479 to 2611416 reve rse strand)
tctctctctaagttgtcagattcctcatccaagaggtactatacgcaattttcttctctttctgatttttttcttatctaatttatagttagttggatgcaaaaattacttgaggtttggcgtttgtcagtgtcggtaagtggcgatttgtttttgtttgacaaaaagggtcaaagagaaatgggcgtctcgaaatttgattgatttgtttgattttggttcaaattttcttttttctggtgaatcgggagtgaattttaaagggtttaactggatcatgtttaggaaggaattggaagatggactcttgttaaaaggtgtcttcatttgaacgttctgttttcataataaagcaaatttgtacttctcggtattttgcttcatggcatccttctgcggaatgtaaaaaaagaaaaaaggtttaccgcgaaaaggaaagagaagaaagttacagacggccaaatataaatgggatttttgggaaagcaaaagtacacgtattttctgcagaaatccccgaaagaacagtgaggtcttggtggtggtggtggtggtgaagtcaagtcgtatagtagattattatgtagatgaacttaagtggcttaagtttgttttgaacgagggagaggcttgactaaagtggaaaatgccctgtttctttatttttaggttatgatggtaatgatatgaactttaagggggagatgtaagtggtagatgttgattaaactttagcaataagttagacactcacaaaaccaaatttaattatgaaatgaattcaaaaagttaagttgtacttgaaatacttgataccaagcacatatatgatatctttgtttcagttctttttaccatctctgtttctcagaataatggatttagctaattggctgtccttgttcagggggcgacctgcatccactgtcagtaagagc

SEQ ID NO: 75435 - DNA, 413 bp, Carica papaya
  Intron number 1 from transcript evm.model.supercontig_0.13 5 (locus evm.TU.supercontig_0.135) derived from phytozome v7.0 (chr-ID supercontig_0; pos 3947306 to 3947718 reverse strand)
ctcttggctgttgcagaggactacaaatatttgaggtttgtttgtaatatgcttttgcttaattataatctggggaaattgacttatattgtggttatacataatgctttatgttcacagtttgcttcttgaagggaacgatattatcctcgtattcctttttcttttcctttgaaattctacttttttgagagaagaataaaatatcataaaaaggtgcaaggcgcctataacacaagaacggcataattagatatcagaaatcaaaatgtcaataattttctcaaatccacatcattgaggatggaatgcactggtaacaaaatatccagggactggaaccaacagtttctaattttatcaaaagagagcaagttccctaaaaatatactaatttatttctttctttccag

SEQ ID NO: 75436 - DNA, 809 bp, Carica papaya
  Intron number 1 from transcript evm.model.supercontig_23.1 41 (locus evm.TU.supercontig_23.141) derived from phytozom e v7.0 (chr-ID supercontig_23; pos 2173152 to 2173960)
agtggatctggaacgccgcgcaccacacttccctcgttctccttctccttctccttcttcttcttcttcttcttcttcttcttcttcttctgctgctgctgctgtcagccgaatcttcctctctcctttgcttccccagccctgtccctctttcttctagggcttcttttttttttctcttctggcctgggcctggattttctcctctcccttgggcctggttattacactcttctaataactttgaatatttccagtaaatattgtatatctttatcataataagagcaccatgaattcaagtcctttgatgtttaatgcattaatcatgtctcgagtacataattcatttttctattttgatgattctgatcccggtatgtagataataaaatatgtagcacataaataaataagtaatgatgccaaatgctcttatatgataagggggtggtatcatgaactaaaagctctttttatggctaattctgggctactttgttagcagaaatgtaagctagaataatttcataaggataggtttccaacaagtgatttgtggaattgaaggggcttttagtctttgtatgtcagatggctgctgtttggcatttggttttgctaataccttctacgtccattgacaaaattccctttgaggttttggtcgggtggcattaaggatttcttttccaactacattcctggtcaatttcaaatgaggatttggttatgtttttgatttggagttgagatatcaaaattgtcttgaagagtgcaatttagttacagcacccctctaggaaaat

SEQ ID NO: 75437 - DNA, 199 bp, Carica papaya
  Intron number 1 from transcript evm.model.supercontig_4.22 0 (locus evm.TU.supercontig_4.220) derived from phytozome v7.0 (chr-ID supercontig_4; pos 3843146 to 3843344)
cctcaagatccaacctttcaagcttccagctcttggtactttcactgttccttcacagcacatattcctatacatatacatatatgcccagtacagctcttttttttttcttttcttttctagtgagtttgtttgatttaattgagttttaatggctttattctgaatcataagtactgttgtggatttgtaggacctt

SEQ ID NO: 75438 - DNA, 350 bp, Carica papaya
  Intron number 2 from transcript evm.model.supercontig_4.22 0 (locus evm.TU.supercontig_4.220) derived from phytozome v7.0 (chr-ID supercontig_4; pos 3843393 to 3843742)
ttcacttcctcaaggtaatttccacccagagctatttgtttctgtttctgatttagtattttgaattaatcttcccatatgaaaattaaattgaagaaactctaaacatttaatctatcttttttagcttcacttgcttagacatatagattatagggctttctttggcttacaaattcaaatgtgttataaataaattaataagttaatcatcatttaatttaacaaaggaaagcaccaaatttacatctgtaatatagcaaatcccccttcttcaatgttttcttatgttttctaaattttaaatcctattagaccttgagacttgcacattttgaagtgaaagaacc

SEQ ID NO: 75439 - DNA, 750 bp, Carica papaya
  Intron number 2 from transcript evm.model.supercontig_33.1 55 (locus evm.TU.supercontig_33.155) derived from phytozom e v7.0 (chr-ID supercontig_33; pos 1589350 to 1590099 reve rse strand)
ctaaagttgatactctcattagctttgctcataatgtttgtaaatctatgcatgcattattcacatgtatgtgtctgcccgtgcaaatgcttatgactgtatggttctgctgacctgcagccaggttccccaacattttcaaaatagtagtaataataataactgacaagataatcgtgattgtacataaattctctttctgaaaaactgcacataaattcctatcaaagtgcttttctttccactaatggtccagcataatgcagttaagctattgatacttcatgtaattaatctcatgcataaatatgtactttccagatttacagtaaatacttgttatctatttttgtgatcattgcttgtatggaaatgttttcactagtggattgagatggagcttgtcagactgcagaaacttgtggattttgctaacatcaagggatggagaagagaatatccttttgggacacagactttataacacaacctgattctttggtgtttcctctataagaaagcaattgccaaaatgcttttgaccccatccagtaccacattttcatttttcgttttgaatcttaaatttgagattcaagctattgatatttggtatgccatgtcgaaaatttttctggaaataatgctgcaatttgcctttgaactgtttatacagacatcagcattcgtgtcaccaggtctgctatttccataaatataaaccttaacatgatttttttgccaaggttg

SEQ ID NO: 75440 - DNA, 834 bp, Carica papaya
  Intron number 2 from transcript evm.model.supercontig_49.9 6 (locus evm.TU.supercontig_49.96) derived from phytozome v7.0 (chr-ID supercontig_49; pos 677043 to 677876)
tggttattttttcagtaaaaccccaagttggtatttcccttgctcgcctaaattgctattgtaaattactatgttgttcttttccttttggcagttttaatgtctctaacaatgatggtgtatatgataatatggtttatatctgtagtttttagccatatgcttcagatactgaaatgtaaaaaacaattgttgacatgttctccgtttacatggaaattttgatatcttatgtttctcttctcaaaaattttcctaagaagtggaggaaataaacatcgtccggtataaagtgcaatatggatacacagtgagaaattgacacatggcagcctgatttcgcaactcttggacttacataacttatttaggtcaattattattctagtccttgaactattccctacattgaaattagatcacaaaaaattttttccctacaatctggtccttcaatttataaaattttttataattcattttttgttatgttattcaagtaattcagccagaattttcgctattctgtaaaagttttcaataaaaatcacatttgagacaatattgtaaactaaggactttgctagaaatgaataaatgccatggatgtttgtgtagataaggacatgaaacgaagagcaagaataaacctacgaggcgaatagtctaccctaagttgtttactttttttatgtatatccgagatataaaattattggtaaagaatttctctttaacgtgattaacaaaaattatttgattgtgttatgtgtcttatttctgtaatagtaaacctagtcatttcaaccttcttatggttatttgtagtgaaag

SEQ ID NO: 75441 - DNA, 614 bp, Carica papaya
  Intron number 1 from transcript evm.model.supercontig_1212 .1 (locus evm.TU.supercontig_1212.1) derived from phytozom e v7.0 (chr-ID supercontig_1212; pos 2307 to 2920 reverse strand)
tcccaagaagcaacgagctctccgcaaaaatccaagtacgcgagctaataatatcatgtccttctttagttttgtttactgcttagaacttgcagctttaagtatcttaactttttttttttttgcctgtttctatatatttgagtgcacattagttcaccaaccattacattgaagggtattttctgtcagaagtttgtgttatatgtgtcatgattagcaagttgtgttatcattatatttgtagatattaaccaagtaataaactgtatgaatttccatacaaaaagtatgcattacttccgtccatccagttatctgactgctaaaatttcacacttgttggaagaagaaaaattgtggaattatgcataagattgaaacatgttagggaaaaataattatccatcaacatcttttaagggattaatggttcatatttggtttttggaattgatgcttaatttatggggactttgaaattctgatatcaagctggatatgcttagcttctttggtacttcatatatatacacctgtatttatatattttctcttatttcattgcttctatgttgaaatttttcttctgtgcttgctttatacaagattat

SEQ ID NO: 75442 - DNA, 461 bp, Carica papaya
  Intron number 1 from transcript evm.model.supercontig_1084 .1 (locus evm.TU.supercontig_1084.1) derived from phytozom e v7.0 (chr-ID supercontig_1084; pos 869 to 1329 reverse s trand)
ccaacaaacaagaatctgcaactcctgtaagtgcttattgggtgtttttttttttttctatcctgctatagccttctctgttctttattttgttttctggatgttgcttttactgttaatcaatgtatggaagtcaagaatatattgaagtcaagcaatggccacgttgacaaagttttttgaaaggactaggtaattatcttataggtttgcatatctagacgtttcctaagtggataaatgatatgcttattcgacacggaatcgattgagtttcttgctcttgttctttgagatacttttatttgattaactatgtacattttcctatatactcgttgctattttctttaccttattcttttactcttttctcttataaggataagaaatactcctatttttacacgtaaaatttacataatgatgcagcctttcgctctaatttcaggatactgagg

SEQ ID NO: 75443 - DNA, 787 bp, Carica papaya
  Intron number 1 from transcript evm.model.supercontig_37.1 27 (locus evm.TU.supercontig_37.127) derived from phytozom e v7.0 (chr-ID supercontig_37; pos 1035453 to 1036239)
tctccctgactcgcaaggtacctctcttaatcctcattgatcatattcgctttctttctgcattttgattaatctcgtcattttcaattctgctagaactgtaatcgccagagattacaatttctttcttcgtaaataatgtaaaaagacggggttgaatttagaatatgtataacatacaggggcgagaaagagagaaattaatcaaaacttaaaaataatgattatctaagtcaacttttttataaaaaaaatagtattcttgagaattaatttttaaaaatacaaaaaaagtgacgaatccgtgccacctactacttatcagaaccctaaaaatcttgttagaaaaatatattattttcctccattggcatttgtaatacagtgatcacactttgtcttcatttgcttttttttttttggaaaaaaagactcaagatatcgccataggtgaaagtgaaggttcggtttgagaattctattaatataattggtggtattaaagattttttagcgaaattatttttataaatcaaatggatttcgtattatactcattgttaattccattcaaataattaatttataacttatgctcaacataaatttaagtaattattgttttcttaattttttaaaaaaattatattatcgtgttaaagttagataatgtgccgctcttgcttaacattaagtatgataaaacgaaaataatcctgattttttttgggtcaaaatggaaataaacatagctgggagcggaattcgtgggaacatttatcctgat

SEQ ID NO: 75444 - DNA, 930 bp, Carica papaya
  Intron number 1 from transcript evm.model.supercontig_114. 25 (locus evm.TU.supercontig_114.25) derived from phytozom e v7.0 (chr-ID supercontig_114; pos 415297 to 416226 rever se strand)
gggtatgttttctctttcaggtttctccttttcgctaattctgacggcatggctttcaacatcccccaattttattagataaattagcgtttttttgctccatgcggtaatgtgatttcagcattcacgggtatgttcttactgtacagttttgtgaggtttattcttgttttggttctttgtttctaacttgatggatgttttaggattagctggattataggctatttgcagcagattcatattttgatttgttttcttgcaatttttaattttcgactagagtctaggttaaattattcctcttgaagtgagacaattgggaatggaactaaaaattagtttattcctttacattattctgaagaaaaatcagctaagcttgtttttaagtttgagagagtgtatgtaaacccctgaaactaaattgactcggaaattaaacttcaatgatgataggaaggcactctcatttaaagagtaaaagcgtatttttgtatcatttgattttttcaacaagaaaacattaagtttgtggtattatgtcagttgcttgaaggtagatctggcatctagtccactttgatgtcaaacatgtttctggtttgtatatgtaaatgttaaaactgttaagggactcgaagcaattttttttagaatgtcaagttccatatatatatatatatatgtatatggaaaatactaaaatgtcttaaaacaagcagacatgggtgccccttgatactgtttattctaattgggtgaactcttatttataagtaattagaatgtcaattgtaatattataatattgtttgaattcaaaattcttcttatcaagacagaaaagcaaatcggtttcaatgttttacttttcattctgtgataaatatgtaaacaatgagtattcttctcaggaagacacgtggt

SEQ ID NO: 75445 - DNA, 992 bp, Carica papaya
  Intron number 2 from transcript evm.model.supercontig_29.1 66 (locus evm.TU.supercontig_29.166) derived from phytozom e v7.0 (chr-ID supercontig_29; pos 1822755 to 1823746 reve rse strand)
gaaatcttactcaagcccagcgtcttgatgtgagtagcttggaatatatcactttctttatctgactttaccaatttcacatgagaatattggttcatgcggaagtacgaacatgttaggcagcaccttaaagtacttcccctgtttgctgatttggttatgatatttattccatggtgatctagatgacctatctagggttttggacactcaacacctagcaccatgatcttcatgtagttattatttcctttagcagtcaatcagatgcaattaatttcttatcgtttttggacatgggtaaaactgtctctgtacacagttaatgaatttcctatcctcttttctgtcaggaaaatgtcagtgatcaattagaataatgccctatgctgtcctctatttgtctggtcaatttctgtgagaaaatgttttcttatcaaatgtgtttattttactctccttgtgtttgccaaaggttattgtttttttgaaacaatggcttccaaagcaaggcatgtttttcaaagcaccttttttaaaacgttttatgttgttttctagagatgttacaagaataaatttttttaaaaaattgtagagagaaattttcatcaaagtgaaaaaccatattccatgaatgaaaaaacaaagcttgaaggatgatagctatgcaaagaattttttggaaaaatgcagttgagaaagcagataaatgtttctatgattttttgggaaaaaatataggaaataggtcttgacatgctttctggcttttaccaaacttgttttcttattttaattgatagttaaaagagttgattttgtgcaaattaaaagttcttatggttagtctttggaattgcttttcctcacatttttatttcagaaaaatctttgacattgcttttgcatttacaataatgggcctgaacatgctacttttggatatttgtgtaggccttggaaattttcaggaagcaacaagtggattt

SEQ ID NO: 75446 - DNA, 505 bp, Carica papaya
  Intron number 1 from transcript evm.model.supercontig_504. 3 (locus evm.TU.supercontig_504.3) derived from phytozome v7.0 (chr-ID supercontig_504; pos 21719 to 22223 reverse s trand)
gtgacggctgatagcagaggtgttccggagagtggtggatctgggtgttgaagttgtagttttagttagatgatgattgatatgccatctttctgtcacagttatgcgcatttaatatatgcctgcgaaatttgactagcggttgggcaatttttctttagatctgaagtttagcagatattgtcagaaaaactgatgttgagtgtaaagctaatttagtatgcatctttttggttcataatgtacctccagattgataatctgtgggaccttttggggatataggctagcagttgatatctttgtcatcgtagtgatgcttttttgaatttacctctatatcaatagtattggtttggacccaaagtgggatttctactctttaatttccttttaatatctatctgatgatcgatgaacagaagagagatgaaaaatcatttcatagttattttggttattgtttgcagggattgtggcttggactttcagtggttgagcagaa

SEQ ID NO: 75447 - DNA, 515 bp, Carica papaya
  Intron number 3 from transcript evm.model.supercontig_104. 61 (locus evm.TU.supercontig_104.61) derived from phytozom e v7.0 (chr-ID supercontig_104; pos 389526 to 390040 rever se strand)
gtgtttgagaggatcgtggatatcttcgtatcgtatgcaaagttgtatcagttatatctcagacagcttaaatttccatggaaatcacaatagaaaatgatctctgcacatgaaggacacagtatctgcataaattgtccagaaactatgccctattgcacaggaaatatgaatgtggacagaaaggagtttagagattacaatattatttttacctttgtcaaaccctttaccaaaatctcaataacatacacacacacacacatatatataaataaataaaaaaaaactcaaatagattccattatactgcaggagcttcttccttactgttctccaacgcagtaacacataattttctctgatattttatcttgtgaaataaaaatatattagaacagacatgattttaagaaatatactctagagtaacttgccccgacatcaagttaccgtgattactatagacggttatatttccgatgtcctaatccatcttacgttacaggttacct

SEQ ID NO: 75448 - DNA, 875 bp, Carica papaya
  Intron number 2 from transcript evm.model.supercontig_463. 4 (locus evm.TU.supercontig_463.4) derived from phytozome v7.0 (chr-ID supercontig_463; pos 24929 to 25803)
ttattgtacggcaggtaatttctcatgctattccacatggtggtatgtggactctacatgtgttagaacctttcctttttgatgctacgtaagatttgaattcatcatttatagctgggattcactgagaggactgttgtcaacctgtttttgcaatttgaatgctatggacatgcattcctcactgcaaattgtaacatcttgctgctttaaacttaatgacaccctcttctagttctgccagttgctctaaatttcagtcccagtttcttacatgattcagagctttgtgacagctacctacaagcatggtcgttgcatatgcatccactcagatcttggtcaatattgactaatctgaaatgccatgtatcaagtaacccaatgtaccacttcctctctagtacctcttgggaacaaaaacttggagtaaataaagttttatcctatttatgtgtttgtgccttgaagattttcacaaccaaaattgcttatgtctgttctgggaaattgctgttgtttatatgatcaaagtacattttccggtccaatccattttataaattcatactgggattacgtctctatgtatgtgtatagatccaacttaatttgctaaaatttgggaatttacactaactcaaaatgtttgctggtatacaatatattgaatgaaaatgatgcaatgaggaaagttaataatttactgtgatgaccaaagtagtcttgtgctctcctctcctccttccaaacagatccttacgagaacttggaactaatgtttttgagggacttggaagttttcctgctaatcttgtttagttgctgtaatatttcaaggttgcttctactggctggtctgagggagagtgcaa

SEQ ID NO: 75449 - DNA, 875 bp, Carica papaya
  Intron number 1 from transcript evm.model.supercontig_369. 6 (locus evm.TU.supercontig_369.6) derived from phytozome v7.0 (chr-ID supercontig_369; pos 34697 to 35571 reverse s trand)
cgtctccgacaccgaaactgtttctgatcttaagagtaatcttctgtgcttccctttgtttttgtaattaattcgaggcactactttttgcatctttatcatttttgagtttcatagtagtaatccaaccgctacttggttttagaagcaagacaattgcatttgtcttagaatgatttggtttttgttaattcttgccctagtttctaattatttcctttagaattttcttcccaattttttgcttgcattttgggagtgctttgtaaaactattgtactttatttttccctcaacttattgaacttcttggagtttgagtgttcaataaagctgcaaacggataatcgtaggttttgtttttttaatgtgacattggtttggagagttctgctttcacaaggatctttcatcgtttcaatgaagatagtcgataatgtagttttcccgcaatgtcaatattagaaaccctaacaaaacccaatatactgatgacgtacataacatttgttgaagtccctaaggataaaagtattaattccaaattcacttttaacaagtgaacattatgttcgcaaagagttagaattactcaagcagatgaatgagtgtataggttcactgcaaataccatgtgatataagggagtagaaatggtccctcgcacaatcttcagtgcattttatgctggtactgatgtgcaaagttctttatttctcaaattgttttcatgcctgtggacaaaatgtttggaatcatctctatatcaagctcgtatatgatttatgagcaatgtagactaatttgaattataaactgctattttctgcttgaaatgacatctgtattctgcttctgttcagagaaaataattt

SEQ ID NO: 75450 - DNA, 780 bp, Carica papaya
  Intron number 1 from transcript evm.model.supercontig_26.3 04 (locus evm.TU.supercontig_26.304) derived from phytozom e v7.0 (chr-ID supercontig_26; pos 1957784 to 1958563 reve rse strand)
tgctgatttcctacaccagcaacactttccctacggtcagtcatccccacattccgtagtttccttcttttttgctttatattcctcattcttactcttcgtttttctttttcctcttttgttggtgatattctacttcgaagaagcaagttgctttctggtttttatttctattgcgacggtagatgagtatgagaagcatttcgtaagagaaagagaatttttttttttttggtgctgcatgctaatcaagttattaagagccaaattttcgtattccgatcggcgtaaaaaaggaaaaaaattggtgaagtgacttctatgcacatttgttgcttttcttttcctttggtgtaggaagggtcttatttagttcagaacttattggaaagtttccatttactcaaaattgattttggaaatgtagttttgacatatcagattggtttgattctgtcaatatctcagtccagttttgtgatcaatcgcttgcatactctctagactagtatctagaaagttttagtagtatttttcggctaacaagtggagttttttccttttgttggtctccatacttgtgtcaaaatttgacaatctggaaaggtttttgttgtatattgcctttgctgctgtggactagtgtaattacattaccgaatagaagttattttgccacccaactctttctgtttttattgggttgtctgctttggatagtttaatatggagaaactaattattgagttaattgttgtcctatgatgaggaaacaggact

SEQ ID NO: 75451 - DNA, 492 bp, Carica papaya
  Intron number 2 from transcript evm.model.supercontig_37.2 01 (locus evm.TU.supercontig_37.201) derived from phytozom e v7.0 (chr-ID supercontig_37; pos 1551148 to 1551639 reve rse strand)
aaaaagttcaatctaacagaggacaacgattcattgtgcggttattttgcttcatttaatcttcttgttcgtttgtgtgttttttcttttttcaattgttttaagatgacagttagggtttactaccatttttctttgctttttcttttttttttttttaatggaaaaagatggtcttacagaatttttactaccagttttcactaatttctgataatgaatacttgctgccagaatttatcaattttattagtttttatttataaattaaactggcatctagacatgttacattaattagtgatgctgtttgcagaaaagttgattttttttttcaggtattcctttcacaaggttctggtttagagcttgttttgggtatttgaattaacagctttgcctgatgaactaagtggttattgatgtaatctctctctgtatgaacacaatgttgcaggtttccagaagcagtcccttgggtccggtaccgtg

SEQ ID NO: 75452 - DNA, 912 bp, Carica papaya
  Intron number 1 from transcript evm.model.supercontig_147. 21 (locus evm.TU.supercontig_147.21) derived from phytozom e v7.0 (chr-ID supercontig_147; pos 399013 to 399924 rever se strand)
gtctcgagcctttcaccactcaagaccctgcaactgtatgatcttcactcctactgtctcttaaatttggcttcttattttgtccttttgcctgattttttatggtcttggtaatctgactaactagatgcatttctagtcataatcttttttgtattcgtgttctttgtttttttaaactgaagaatatatgctgttagattagtgtttctgcgagcaccgttcactgacttttgctgattgaaatgcctttgattgtttctctcctgtttctggtggaaataatataggtcactgccgaaattgttcatgtttattttctaatgtgggagttaattaggatttgctatgagatgagttcttatgatcttcagtaactttcactactgttttctcgctggatgattgcatttataggcttgtaaaaaacgaatgtcgattttctctttactcacgctgtttgtttagtcaaattcaggttcaatacgttgccttttcttcgttgatagcttataaaaatggtctatttagttcttactttaagagttcaactctctaattgctaccgataaatttgctaaaaatagcaaaactagctttcagaggtcagttcatagcaagctgatttgtaatttatttttttgtcaacgtgtgcacattttggctaacaaattggatttctgagcatttttctggcatataaactagtattaagaatgatttctgatgattacgattactttcacttttctgcttgtgtgaaaagatagtttagatagttttcttcttgcctatgtcttggttcaattcttatgatttctaattattttacagctccatatttggttggtctaattctgtcctgagcatcaactttttggattctgttgtttcaggtcaccagttgcaagc

SEQ ID NO: 75453 - DNA, 731 bp, Carica papaya
  Intron number 1 from transcript evm.model.supercontig_3.44 8 (locus evm.TU.supercontig_3.448) derived from phytozome v7.0 (chr-ID supercontig_3; pos 3235046 to 3235776)
gtttaaggcttatctcggtgatcgtcttccagtgtgtaagtctacattaatctgccataaacctagaatttctgatctttaatttcatttcagatcgagtcgagttatcggaattgtgtcaaaaaaaaaaaaaaaaaacttgctatccatagttttttcatgagaggttgagtcgtgttatcaaaattgtgtcaaaaaaacctattattcttagtgttcttcatgagaaaccctatgtgagttctaacaatttagaaggttaggaaaacaaactgttatagtatattagaattcttagatgaagtttatttggttatagataaggttactcagcaaacatacaaattattacagatacattatacatatatatatatttatctgaatactttcttttagtcttaagttgtagagaaaattattttcttatctagtacgaaagtctgagatcatagtttttgtcctcccttttctcatatttgataaatattataggtttaatttcccttgggaagctgtaagtatcttggtcattctgcttacacgtaattttgcttgaatgtaagaattgttaaaatacattgtaaattatgaaattaagttttcctacatgtttaagcttttgatataattaattataatttatatatactgaaatcctaactaaagttatttcttaatatattgtttcttttttttttttccgaatttcagatacgatttcaagaaag

SEQ ID NO: 75454 - DNA, 833 bp, Carica papaya
  Intron number 4 from transcript evm.model.supercontig_30.5 1 (locus evm.TU.supercontig_30.51) derived from phytozome v7.0 (chr-ID supercontig_30; pos 762064 to 762896)
aaattgtgaggaatatttatatatctttctgtgacaacttttggaaatcaaatgaatttctattcatgctagccattgtcttaaatttatttttttccctttagttcatgtttgtgagattttgtagtctcgactcttgttgatcatacaggcataaactgctatttacacgtagtttcatctaaatatataaaactttggagaattcatagattagggaagccaaacatgaaaagtttgcatagttctttggaaattaagatgtcagaactgtaggtagggaggcctttgggacctttaaatgaataaatcaggttgcattgttctaacacgattcttcatcactaaggcatataaatctcctattaaatgaggtattgaatgttctgcaaaccccaatttatcccatgaaaatgtaacctacacacttgtttttttggagaataccatatctgaggatatttggtcttatctggatgaaaggaaaagcatcataacattgagatgcaaacttcctcttgttgatgctatgttcggttagtcaatggaaaagaaaagaatagaaatattttgaactttattgtcctaatattggaaattatcctcttcctgattgccaacaatgcagaggtgtgatgacaagatcctcttagtaccataaatatgtgatgattcttaaaaatgttaaccgtactaaaatatttcttcattgtgaaatcatatataaattaatgagtatcctattgcatttggatttcccggtggccggatccttacaagatgtttaatgcgtgctagttgattgacaaagcaagagaatatctaggactatc

SEQ ID NO: 75455 - DNA, 844 bp, Carica papaya
  Intron number 2 from transcript evm.model.supercontig_165. 33 (locus evm.TU.supercontig_165.33) derived from phytozom e v7.0 (chr-ID supercontig_165; pos 204753 to 205596)
taaaagtcttctgtttgttcgtcttcttctgcagggtaagtctcgattcatcaccactagtctgggcaacaatcgtttactttttcaaagctcctggtttactattggggggaataaaatgatgaaatgacagaggataagataaacgaaaagcaaaacgacattggtatttgtgttttacctttacctaaaaatagtacataaaattaatattacaagcccaatcgaagcattatagcttataaattatatataatccaatttcgacatggaatcactttacctatttatgcttttagcctattgaacatgtagtctttttatatgtggtacatgctatctatatcaaacaggtaccatgtgcccgttaaaccaattaaataagttatgaagaattcaacctactctgttaatgggtataattatggataccccaagtacaacttttcatgcatggctaaaattagcctagaggattcccatttactcgaatagatagatattcagtctccactttcattcattacttgactcgtagatctggtggattgggtaatttccttaacgtcaacaatttaatgctaacatgttagtggaggtctgagtcatttgttcttagaattatggttttttcaccaaagccagctgtctggcatcggtgtagttttcggtttgtttggtaaattcaaaatattaattgaatcgaatcaatttaaagtcgtatgtatttttattttatgaccacaatgagagtagaaaaatgaattgcagatacacttactactaaacataaaacttaaaatttattcctaataaattgatgtaatttgtccgtagcagacgg

SEQ ID NO: 75456 - DNA, 364 bp, Carica papaya
  Intron number 2 from transcript evm.model.supercontig_32.7 2 (locus evm.TU.supercontig_32.72) derived from phytozome v7.0 (chr-ID supercontig_32; pos 881647 to 882010)
catttttcgagttggaaaatttaacccaggtaagttgttaatattcatttgattaaattatttttatttttaaaaatattttttatatttatttcgagagatattgtgttttttttaaaaaaaaattctgtacaaaagaattataatctgttgataatgtattaccaaattataatagtaaaatttttatttattaatcttaactgttaatgtagacatacttgtcgaatcacattaaattttatatttttttctcatttttactctattttattgtgattgtgcgcattttggaattaattttcttaataatttaattaaattactcttcttatgtattgagatatgattaaattgtaggtaa

SEQ ID NO: 75457 - DNA, 257 bp, Carica papaya
  Intron number 1 from transcript evm.model.supercontig_179. 44 (locus evm.TU.supercontig_179.44) derived from phytozom e v7.0 (chr-ID supercontig_179; pos 302880 to 303136 rever se strand)
tgcttaccttgttcgtatcaccgttcaaaaccaaggtatcttttatatttacgtacacacgcacaaatacatatgggtttcttcttcttatcttcctcttcttcttcttcttcttcttttggtactttattaccaaacttgagtcaagtgaggattttgattattattttttagtaactggaattagttaattaattaagtagttgggtttgattttgtgaatgaaaattttggtctgaaaagtggaaattgaggag

SEQ ID NO: 75458 - DNA, 847 bp, Carica papaya
  Intron number 1 from transcript evm.model.supercontig_34.1 07 (locus evm.TU.supercontig_34.107) derived from phytozom e v7.0 (chr-ID supercontig_34; pos 914095 to 914941)
atttactcagcgccgtggtctcgctggcgccgctggtaatctccatgtgcacttcctcgtttatctacacacacacacacactcacatatatatatgtatgtttatgctgctgcgtatttcttccggatctgcaggcccttacggctttagcactcgcaatatttaaatagaattcacttcaatccgtgatctgatttacctatggattataacataattatcgccgacttcataataaatttggatggaaggagattatcaaaaatacttatggacgtgagtacttttatttgctattggtcctctaaggagcgaaaagttaggttgggttaatactttttggtagctattgattcttaagttcatgttatatttacatatataggactttgagctgaggatatctgatgcaattataactttttttgctggtgaagtttaaagcttgaagttaacctatgaataaaaacttatataatgtgcttcctaaatgtgtgaattctaatatgagcgtgaagagaaggtgaagatggtggaaagaaattgcttcatttgtggcagtaataatttcaattaccatggatggtgttattggatagattttatgcgtatgaattttgatttccacttttctcacggttaaagggatatatatcttaaattttgcatggttctttctgaaataatttttttgataatttactgatttgtcaattttctgctgatgaacttgtaaagttactgcatagtccatatatcttgcaatgtaatgcttgatccttatgtatttttacttccatatgttttctagaacaccacggacctccaaaggttaactgttggcaa

SEQ ID NO: 75459 - DNA, 565 bp, Carica papaya
  Intron number 2 from transcript evm.model.supercontig_34.1 07 (locus evm.TU.supercontig_34.107) derived from phytozom e v7.0 (chr-ID supercontig_34; pos 914965 to 915529)
gaaggaagagcacgtaagtccccttttggttctttaagcaccacaaagcaatctctcatttctcaaatgtgtctctgtttgatattataaggaagagcatgtaagtccccttttaatatggagaggaagctgtctgcaaaagcttgttgtttttcttgcaatacatggtctctatcgcatgcatatacacatgtttcaagtctatgcttttatactgcaaatttggatgctgttaccttagacatttcacctgcttggcattgcctatcttgtacgcaatttctgcctaacagggttaatgagcctgtttgtgcttatgaggattatgattacagagatataacttcagccttattttcagatgttctttagtagggttttgcattttgccattatgcacttaagctgagcaaattgtttactccattattccttaaatagagcaggtgtctgtggcaaaataaatttactatagactaggcaagacatgtagatttgaatttctttgattggttgttatgtttttgcagtttgtaatcgtctccttgtctggttggggtctact

SEQ ID NO: 75460 - DNA, 364 bp, Carica papaya
  Intron number 1 from transcript evm.model.supercontig_39.3 3 (locus evm.TU.supercontig_39.33) derived from phytozome v7.0 (chr-ID supercontig_39; pos 643244 to 643607)
tcggcgtattaggctatcgtgtccacgcatgttccatgttttgtatatctgaatgtatatttaatcttaagtttgtgatgaaacttaaaattaggtatcatcattaattatgaattttgatttcttttgcaattataaacattatatcgtaaaccaatacattcaagcataccgacatgcatatacataagacattatgcgtctaacttcattagatttcatatttatacataagatataatttcattaagaaaatatttcaattctttttttttatttgtattattagattgatcaaacttaacatttttttttcttcactctttcagtgaccactactgaatcaggagttgttgctgtaaac

SEQ ID NO: 75461 - DNA, 817 bp, Carica papaya
  Intron number 1 from transcript evm.model.supercontig_167. 7 (locus evm.TU.supercontig_167.7) derived from phytozome v7.0 (chr-ID supercontig_167; pos 146756 to 147572)
ccgccggacacaacaagcgcaagatcattcagcaggtcactcgctttatcatcttcttcctttgtgcttttggcttttcctctttcaatgtggcgattaagatgcgagttctaatgggttatttgattatgtagattgtttaattaaataatttcatgctgtttctggatttcctggaattagtttcagcacttgtgaacccaatgatgaagtgggataacatgttcattattttttttattgcatattgggataaattgggagttcatatgttaattagttttgtgggtagcgagaaaaaaaagttcttttcctgggataattttgttgagttttagtgatatagtgtcctccaaaagctcatcaaatctgaaatgtccctttccttttggaaattttgtctagttatccttgagaaaggatgaaattttggaagagaatagtatcccttgttcagaacttatcctaaaattggctactgcagaatcgagtttattgagtatcagcatggtctttatgaaggattgtatgaaatggagttgtttaataagtttaacagtaaagttggtgtcagtcatgtaaaactccatttactaattatcagcatggtctttgtgtaggggtagtctatgaaatggagttgtttgaataggtttaacagtaaagacagtcggtcatgtaataccaattcaaccttaagttttcttcttgtgattgcattttctctcttttttagggaatattattttctttattttttatgctcctgctcctagtgcagctttctaataggtttctttgttataggccatcttta

SEQ ID NO: 75462 - DNA, 602 bp, Carica papaya
  Intron number 4 from transcript evm.model.supercontig_107. 49 (locus evm.TU.supercontig_107.49) derived from phytozom e v7.0 (chr-ID supercontig_107; pos 230407 to 231008 rever se strand)
aagcatctattgaggctgagctcaaaaagattgaggtgaagctcaattttccttcgtttgttcttttgactctctgggtttttttaattaaagttaattaagtggttaattatttcaaatgctttgtcttaaaagggacgtcccaactttatcattagtcaaaaagttgataataatatttgagaatccagcttaatcaataatgagagcatacttgaattgggttaaaagttgattataatcatttacctaattttaactttctggtaattccataatcgtagagaaaagcttatggttatctcttaaacaaggaagaaaaagatcttactcatttttttaagttaatttctactttattccttcacttaaatcataaaactactcttaatatatatatatgtataaccacataatagacatcacgtgtattttatatttgttttgttatgtataaaatacacacacacacactcatatgccttaaaattctcttgcctaccatgtgttgtctataagagtgacatattacataggctcgtaaatctcaactcactgttcaatgaatataggagaagttagagaagcagaaagcagagtac

SEQ ID NO: 75463 - DNA, 811 bp, Carica papaya
  Intron number 1 from transcript evm.model.supercontig_452. 5 (locus evm.TU.supercontig_452.5) derived from phytozome v7.0 (chr-ID supercontig_452; pos 23472 to 24282)
gaaagaggggtctgtcaactatttggaggctttgatgggtgaatgttccatctcctgtctatttgaagattgaagaaatggacaaaaatgtatattcaccagtgtacaacagaggtgaagggagagaaaaagggctgctatcgaaagacttaaaagactgtaaactaaaattggaatagctatgggtggtgaaaagggatctttgacatgattttacaaagcacttctcatggctatgcgctgaagaattcaaggaaactctggacataatagatttaatgaatttgcctcttaaaggtgatcagagattcaacctggcatgctctagaattgatagatttttggtatcggtgtcttgtcagttacaaacaactggcatgtgccaataacttcttcaatggaccatctttgatcacttttctatttgcgtactttccgatggatttaagttgggtctctgtcctttcagatttgaggacaagtggctcatagttaatagtttctgtgacaaggtccaagattgatgctgttattaatattatattttacactttatatttttaaaaaaattacaaattattgtttatgttcatattccaaatgttattagtcactttctatgtggcactcaggaagacaagcccattactgcaagaaataggtgggtgggaaaagttaattttgttgagatccgatcattctggcacattttcaggagctttgataggatgtggagtttttttattctatgcttacaggtatttacatccttccactgcatttttcatgtactttctgttcatgaattagc

SEQ ID NO: 75464 - DNA, 940 bp, Carica papaya
  Intron number 1 from transcript evm.model.supercontig_13.7 (locus evm.TU.supercontig_13.7) derived from phytozome v7 .0 (chr-ID supercontig_13; pos 132967 to 133906)
aagatttggttgagtattttattccactagtgaaggttggctatcaaattcgatcatcattgttggctttttatgttttcttgacattcaattttgttctcttccataggacttgatacttctttttcatatggtgtatgaaacttttgtagtttagtggtgctcatgtgaatttactggtaaataaagtattctctatgtagagaataatctgtcacgttttactgtttccgagtaaattttaggaactataagtatttgcacaaacaagtgaaattggtgcttagaaggcttttgatagaatctagaattgagttttaaagctttcatgattgcgttacaaataagaaaaacttcttttaacaaaaagaagtaaaaaaaaaaaagatttaaagggggaagttttagttgtaagtaatagtcttaaagagagggaggtttcaaccattcatgtgcaaccaagccattctcttgcaatatgtgatcctgtaacacaaacactattctttgatatccgactctgatactctccagtgtgcttcagttgtttcctttttccattttgctgtaaaagcttcttattggataaaagaaatagcattattaggaagaaaggaaaattaagtgtagaagacaagcaaagttaatgtaagaatatctgctcaatccctttctaaatagctgaagagatctgctggtaaaacagtgagccttaacccgaggggacgccaaaaaaaccaatctgtcccacaggaacaaagggaattggaagcagtccttgagtaaatgcatatgtttctgtgattttatctggcttccatgtgttttctatctctgttgacattcatctgtatgtgacgtgatcttatctttaaaataacaatgacctttttctttggaatggtgcaatcttgaacctctagagactagctgctggaga

SEQ ID NO: 75465 - DNA, 993 bp, Carica papaya
  Intron number 1 from transcript evm.model.supercontig_5.22 2 (locus evm.TU.supercontig_5.222) derived from phytozome v7.0 (chr-ID supercontig_5; pos 1911433 to 1912425 reverse strand)
atatcaacgtacgtactctccgtctctaatctttaattgcccctactcctggtctggttaaatatttcgccttccacttagtcatggagttcagttggtaattgatttaggttttttgttgggacaacaaaaatattatctgaatttggcattaaacatttgtcgtggagtccatgaccctaattctttgttgctattcaatgtttgaatggatttgttcggttcaatgattctatgtccatttttgcttaatgaaaacgtggttgtgtttaaagtttgttagttggagttgatgttagaaattacttggataattcgtatgtttgccatgcctgaaatgtggtgttgtcttgtttctcaaaaagacaaggaaataaaagggtgaaatttattatgttattgtggttgatggtaataaaaggatctatggtaaagcattgtggctgatggtgataaaaggatctgtcaaaaggcgtagagattactctcagaatccaaaagtttgagcttccttataactctattcttgtccatcatgttgatgactgccagatcctttacatggtttagttggaatctttccttgagatggtaattaagtatctgataataaacgatgctactgttgtaaatcttgctcttacaatttgtttgaagtgaccattatgtcgttttagatcactgcaaagtgtttagaaggatttttatggtgtttcatacttttgagcttttatggtggatgcccaaattcagtcagttcttatcttttacttattcataccagtggtgaaatacagtcaatgattttcttttctggcgtttcttacctttttcttcttccattttcttctctgttgctagtcattgtcaaccagcattgaaggaggagccaaatggttggttaacaaaataaaaggcatggcattttccttgcttcatattgttccataacgtttttgttttcaataacatagctttcacatcacaggaaaa

SEQ ID NO: 75466 - DNA, 436 bp, Carica papaya
  Intron number 2 from transcript evm.model.supercontig_27.9 5 (locus evm.TU.supercontig_27.95) derived from phytozome v7.0 (chr-ID supercontig_27; pos 1107287 to 1107722)
atctttgggcgattggcaagcctacttctttagttagtttatatctttctattatctgcttttctttgagttttagtaactttcctttgggttattaaattttttttttttactgaagatagaatgctaactgcatctaataatctaattaatgtaatttcagctagatcagctaattaaattaggatcatatattttgtgttgtgtgttatataaggtcaaaaaatagcagttcatggctgaattcacttttcaggatcgggtgctgactattgaatagaattgagagtcttagttattggtttaatgcattttgtccaaatatattttgttttatttaatgcttttggttgtgcctgtttggatgaaagaataaaaacatatttgggtgttataaacagagcctgtgtggccatacaagtccagttgagtctgt

SEQ ID NO: 75467 - DNA, 928 bp, Carica papaya
  Intron number 1 from transcript evm.model.supercontig_2204 .1 (locus evm.TU.supercontig_2204.1) derived from phytozom e v7.0 (chr-ID supercontig_2204; pos 8853 to 9780)
ttgcaggtcagtcacccacctgagctagttcttcttttttcttttcttttttttttaatagtttaaaaataaccagttcttttatttatctttcaattgaaataaaagtcccctcctttttgttcatggatacccatttctcgtttttgtttgcatattttacggtttgcttccattttttaaaaattttagtggatgccttctttaattttgaaaaaagctaaaatttttgtggatcattaagttaagactcagttcttatcagcaaaacttgaggttgtttggttccatattactgccgacagagaaagaatgagagagtttacttggtaattgttcaagagcattttgtttcattgtttaatgagccaagggatgcaatgcctgccctaccttttttttctcctttgcaatttggattcctcttttttatttgtttattactgaagcatatatagatttagattcttttacctaaattaaagtatttatattgcactgcattttacttttcttgaagatgttcttgattagctatcattagatgtactcttatggaatccgtgacccgtacacgggtttttgggttgaatttttcagttcaactcaaaaaaacttggatgatgatggtttatttatttctcttaaagaaagggaaaaaagagaactttcatgtgaaaccagctgttggttaatgtcatatcaataaaaaattgggaaaatatttattagtgagtcctacatcaggaaactgtgattcttttagatatttttatgttaatatatagtgattagaataatcaatattggagtctttcaccaagttaagatctattccttatgttgtgattttactgacagtattttttatttttgtcaactgtcgaccgcagtaaagctacttgactggggtgaagaaggccatagg

SEQ ID NO: 75468 - DNA, 796 bp, Carica papaya
  Intron number 3 from transcript evm.model.supercontig_27.1 18 (locus evm.TU.supercontig_27.118) derived from phytozom e v7.0 (chr-ID supercontig_27; pos 1301474 to 1302269 reve rse strand)
aggtcagtacttttgagttcctcatatagtcttcatctgtctttttatgttgctggcatagctgttggcgttataagtttgaaacttaaagtttcctacctattcagaaattcaccgtatacttgtgagtttgatttcgttgtattcctatatattaagccttctgtgaattttaagccatttcccatgctttacatgactgtcataagtttgaggaagttaacgttttcagtatcatatggtgagatataaatgtaaagctgtttactgtggttattttaggcataagttttgcacaagtataatatcaatttgcttgctcttcatttagcgtagttttctaaaatagtatagcgttattagtatagagttattatatttgaggatttttatttcttttttagttagaattattgtgcggttaatagtttcatgtttatcatactagtttttgtttgtctaaaaaaaatcatattagtttttgtggacaccctataatggatacttctttatcgatataaaattggcaatgaatgaagtacattgatattctcttgccagtttttgacaactttatgattgtggttgttatttttctaaatctatatgattgtgaactgccattcttgattatgaattagaacctccctgatataggataaattaggataatatttgtctacttaaagatttaagggtgaaacctttaatcatcacatacatattatagtttcatttatttcgttattatggacttccaggtaattgcaaatagagctgctgagatccttgggca

SEQ ID NO: 75469 - DNA, 801 bp, Carica papaya
  Intron number 1 from transcript evm.model.supercontig_32.1 17 (locus evm.TU.supercontig_32.117) derived from phytozom e v7.0 (chr-ID supercontig_32; pos 1437864 to 1438664 reve rse strand)
aggtagatacatgtattatacgaacatgcatataaatatacaaagtgaggccaagaaacattggtgtgaatatatatgatttgagctttgtcttctcatgtgtctttgataattttctcaccaaccaaacaagaaaggcaacacatacttctcatgtcatctttttcaacgcctaactttatctcatttggttataatgtttgattataatgtttagtctctttgacaattttctcaccaaccaaacaagaaaggcaacacatacttctcatgtcatctttttcaacgcctaactttatcttatttggttataatgtttagtctctttgacaattttctcaccaagccgacctaacatttttcagtcaaaaaaaagccaaattaataaaacagttttctttttttagtttttatccataaaaattttgatttcatgacttgaaaaagagctttttatttatttatttatttatttttatttgacttcactactcatttaatttataattaaaaaaatgaaaaactaaacaaattttaacacgtgtatatatatatatatatgtgtaaatataataaatatcttaagtttttaatagttatatcctctaatttaatagatataattatatttcatttatcttttagctatttggatatttgataatattcaaaaagttgaattgaatatgttttatagtaggaaaaagcttggcttttattgttgaaaattgaaagttagtaattaactattgaattgtatgtacaggtgatagagaaggagttgtttagagtggtaaagga

SEQ ID NO: 75470 - DNA, 392 bp, Carica papaya
  Intron number 1 from transcript evm.model.supercontig_47.3 1 (locus evm.TU.supercontig_47.31) derived from phytozome v7.0 (chr-ID supercontig_47; pos 410319 to 410710 reverse strand)
atgtaagcccctaaatttcgatttctttttctttttttttttttgaaatatttagtttcttgcttcttaagtttacactttctttattcctatccttcctaatgatctctctgttcttttctctctattagatatttaattgtatttatatttgttacaaccatttgaagtgacaaggtactaagatgacaatcggtattattattattattattttccgatgaagcgtagaataagattaggttatttgatttagaataagatttattgcataattattgtttaatttcaattttttttcatgaatttttattttattttatttagctagctaacaagtttgtttttatgttgaaggtgtcaatcactcctgaggtatcatctaagaagac

SEQ ID NO: 75471 - DNA, 740 bp, Carica papaya
  Intron number 2 from transcript evm.model.supercontig_200. 8 (locus evm.TU.supercontig_200.8) derived from phytozome v7.0 (chr-ID supercontig_200; pos 99140 to 99879)
ctggggaagagtttattgaatccattccgtttcaggtgaatttcgtgttcaatcgggggaaattttggttttgtaatcggatcggaatttggaatttcatactgctgaatccagattctaataatcgtggatgatgttgtaaaaaattttggtgtaagtagttcggaaaatgtatgtcgtgtatttggatcttagaaatggttgacctgataatctgcatgcctttcattctttcaagggtacttgagtagtcttggtagtttgttaagattgacaaatctagcaagataagtgttgagtgcttagttaagagttcacaagttcattcttaatgagcccataaattagattcaaaataggtgaagggaaggaaaccaagaaatactcagaactttttatctaagaattctatgtaaaacgacccataactagatccattggtaggcactctaccacaggggcgctctagattcttttgtcaataactggaagcattagagtgttcatgggatagctgcagaggaagagtagaacataaattacaatgacaatagattaagatggtgccaataattaaaggagtttacagaaagaatgatggtaaactgaaaaagttgtttgttaaattgacatttagagtcttcataccataagcattggatagtgctctagttaaaaattttccttcttattctttggatataggtcttaagttggagaccaagagctctttacttccc

SEQ ID NO: 75472 - DNA, 734 bp, Carica papaya
  Intron number 2 from transcript evm.model.supercontig_10.2 25 (locus evm.TU.supercontig_10.225) derived from phytozom e v7.0 (chr-ID supercontig_10; pos 2862157 to 2862890 reve rse strand)
gaccctcttctgcaactgatctccatcgcctagaggttcttactcattcttccaagggtgtcatatatatatatatatatacatatatgcatgtttattcatacaccatctaattaggcaaccatgtaagtttcataattggagttgaattacaaagatctttcaagcgaaacttcatctgttgcaataatagagtattacttacatatcaatatttgcatgagaacagaatttaactcttaacttacaccctcacaaacaggagtaaaattactaattcttgaagtaacggatagttggttttcattagataaattttgtgcaggttatacccgaaaaataatattgagtaggctatatctatgttgtagttttcttattatgttagtttttaaagtagattacatcccccaaaaaacaatattttgattccccttgaagagatgaattagaatataatattaaaaattaagctattcttgtcaatttaatcctaataatcaatcaagaaactaaactatgccgcacagacacctagtttgctatcaaatctgttgcacaagagaaaaatcagttcatttgaactcatgccaaaacggattaaaagctctagcaaattaattaccaatttcatgtgcattgaccagaatgatctcttaccttacagaactccactggtatattgatatcatgatacaggttcttgcaggaagctacttgtgtgttgcaggagc

SEQ ID NO: 75473 - DNA, 465 bp, Carica papaya
  Intron number 1 from transcript evm.model.supercontig_10.2 25 (locus evm.TU.supercontig_10.225) derived from phytozom e v7.0 (chr-ID supercontig_10; pos 2863053 to 2863517 reve rse strand)
ttccttgtcatcgtatttcaggtccctcttttcaggttctcatcgttttaaccctacaatacaatcatcttcatgataatgataacgatggctgcctcattcattatcatccaaataaatggtattaaaaggaacgaaatgttgctttcgtttcttcttttttctttggcgatcctccatttgtttttaaccacattttactggaatgctacattttctctgcgaatttgttaatgaatacgactctgattttgattttaggtatttctaccccctttaccctgtcaaaaatatacgaaaacatcttattctgccctgtatatacttgtaattaatatatatatatatatatatatgttatggtgtttgaatttgtttagcgatgtgtgggagattttgaaattagggtttatatatatgatttttacagagtaccgtgtcgaagaggaacgtgtgcaacaccaa

SEQ ID NO: 75474 - DNA, 488 bp, Carica papaya
  Intron number 1 from transcript evm.model.supercontig_19.2 03 (locus evm.TU.supercontig_19.203) derived from phytozom e v7.0 (chr-ID supercontig_19; pos 1476747 to 1477234 reve rse strand)
acgccaagcgcaacgccagagactcccacgttccagtacgtcctcatatctcttccttttttttttattaaaaaaaaaaaaaaaaaactgaacttgggtttaatagaaatttgaattacagtttaatgtataattttgaactgctacaaattctgctaattacttttagtaattatattccataatttttttcttaaaaatatttaattgaaatgtttattttgttttaataaatattaagattaattaggacattgatagtgaaacaataattagttttttaggtaaatttatgggtgtaaaataactccaataaatataatacaataaaaattataaaataaattatttacaatttggtgagaataaatgaaagtcttcttttattattttgatcattactaaactaatctaaatttctccatacataattatatgtttgtgattggacagattttggcacctctaccaattgggttcgcagtgtt

SEQ ID NO: 75475 - DNA, 834 bp, Carica papaya
  Intron number 2 from transcript evm.model.supercontig_1312 .2 (locus evm.TU.supercontig_1312.2) derived from phytozom e v7.0 (chr-ID supercontig_1312; pos 12263 to 13096 revers e strand)
caagctttgttatcaacggagtcgaagttaccaacgtaatagttctcgattcttttacagttttgctattctgatttgaagattaattaattcttagtttcttttacattttttttttttatgttgcaaaacatgatgagcatatgcataagtcaatatgatctataatggtgcatgttcatacttcttagcatttaaaatgcatgcttattataggcatttgggctgaaattttactcattatatgttccatttttcctgcatttcaataatttttctaatggttcattttgttttgtcatatattttcttttgttaagttcactgtttaataatttaccacaatgaagtttggcgcaatatttcctcaaggaagtatctgcaaagtgatttgctttcagaaactgaggttcattcttttaccaaatgtgacgccaatgtttataggtttgcctgatattacatccatcaagataaagcctcttgagaagttgtgattacattgcatttcctccaaggatggatgtagaatttgtatctatatatacacagatgtcttcaagttgtaacattgtaaatgaaaatgaacttaagaaaaaaaacaaaagaagcacatacttctggattttatttaattgttcttgtaacggtgacttttgctatttatttttgcacatttaatggggtcaaaacaaaaaggaaatataaaaaaattttcttgaagtagttgctccattccccccactgtagctctattcttgattacctctccgccgtttaactttttaatgggccatttgaaatattttcttggttcaggttacgctggttggg

SEQ ID NO: 75476 - DNA, 734 bp, Carica papaya
  Intron number 2 from transcript evm.model.supercontig_1639 .3 (locus evm.TU.supercontig_1639.3) derived from phytozom e v7.0 (chr-ID supercontig_1639; pos 6325 to 7058)
gctcaccacttgctgcacttacggtactcttttggtttttaattttaaaatttttgctcatacagcactttaagaaattgaaaatttcttcttctctagaatatatgatgtaaaaactgtaggcctgatagtatgcaattactttttaactagaagttgtcttttgtagaaaaatctaaaactggaggctactataatgatgaatgatatgttgggtctctatgggctagaggaatgacccgaagttttgttgtttctctgtctgatctatactgttttggtaattagattctttatttttatttcccccattcttacatcattttgtaggtaaggttaaaatctgcttatataagaactctttaaccaataggttactggctagagagttttcctttcttgttcttttataaacttttttggtggcccatggcgcttttatgagttgaatttgcaaccataaactccccaaggagagtagtaaaccattgaactaccgatcaggtgtaattgagtttttttttattaactttaaatgaaagaagaaaaaatggaaatattcgccatacttttggggaaaataatacttgctagctgttttcagctgcaatatcacaccaaaacgatgtaggactactgtattttcaagttttgcttgtttttctctagaatagttcagttttgatgtggtaataagcagttacaagttgtttaaagcagattctgaagaaaat

SEQ ID NO: 75477 - DNA, 429 bp, Carica papaya
  Intron number 1 from transcript evm.model.supercontig_441. 2 (locus evm.TU.supercontig_441.2) derived from phytozome v7.0 (chr-ID supercontig_441; pos 10123 to 10551)
ttgacaaggtactttaattttagaccaatgtgcctttcaaattttttctcattcacgtgtactgaattcttatgcaattggaatctgtttaatataaatttttgggtttattttgttcaagtggttaaagtcatatagtagccaagcttttgctcgactttgaagattattaaagacattcataagaaaaagctattaaatggactgattaaggtgtgattccacttagtttgatggacgacacttctagatataaggagtatatggtgttgtcttcaagtctaacttacaccccatctaggtctgttttaaacagaaagtcaaaaaaagtggtcatattttctatagctgctgagggaggttgtgtctagtgaatctgaaagtatttctttcctcagttatgcaatgtactacctaatacaggtgtat

SEQ ID NO: 75478 - DNA, 369 bp, Carica papaya
  Intron number 1 from transcript evm.model.supercontig_148. 1 (locus evm.TU.supercontig_148.1) derived from phytozome v7.0 (chr-ID supercontig_148; pos 11844 to 12212)
gttttggccacgctactcgtgtcgttgaggttttcttctttccacttctttctcactttcttttttttggtttcttcttttttcttcttgctaggaattacgtttcgagatttgtaaggtcattactattatgtttgatttgttttatgatgattatattcgtctcctggtgaatatgcttttttttttctcttctttttctcgtttcccgttgattctaaatgcggttagtttcaattattcgtttgattttagcctggtttggtcatgatgatgatgatgatttgatgggaatttatatgattgattaattcatgttcatgatttaattgggtaattaggtcgttcggcacctgattgcggcggggc

SEQ ID NO: 75479 - DNA, 710 bp, Carica papaya
  Intron number 1 from transcript evm.model.supercontig_25.2 07 (locus evm.TU.supercontig_25.207) derived from phytozom e v7.0 (chr-ID supercontig_25; pos 2114088 to 2114797 reve rse strand)
cagataaggtgaattttgagattcttggggctctatttagttgtagtcagagaacattttgtgttggtgaacttttgttcttttcaatttgtgtatgtttgcatgtaaaaacatgtataattgttgaaaatgaaatcaggtttcggaaatggatagacaaaatatgggttgagtttgaaaagaatgaaaaagctattttcaaacttatgccatattttcattctcattttctaaattttgtttccattttcgaaaaactatacatatttttgtatataaaacatttatgcatatagatgatagaaactcaaaacaaaaataaaaatggcatcgatgttttattcatagaaaaaattcatttccatttatattatgttttacactagcatgacatagttatgcttttaatctcatttgttctaatttttcaaatgcaatattatatttattctttgcgttctatggttatccatcttgatgcaaatccatactaacgcacgtggcttctgaacttcagaatgtggtagaaacacccactttgtatgacttgtgagaattcaattgtgattgtaattccgtgcatctcaactatgaacaacaacagttctgcatatggactgaattgcatgaaccatgattatcttttgttcatatgtgctggaattgaactttttttttcgtgtaaaatatgaaggtattgaaccaaaacg

SEQ ID NO: 75480 - DNA, 746 bp, Carica papaya
  Intron number 1 from transcript evm.model.supercontig_5.20 (locus evm.TU.supercontig_5.20) derived from phytozome v7 .0 (chr-ID supercontig_5; pos 107464 to 108209)
accgaaaattgtatcacagtatgctctctatctttcttgagaagattcgctatgcctctttatttgatgaattatttttctctaaatttgtactgttttatggattttgattccttgattttatcggctttgcgggattcagtattgtattcgatgtttcggctctctaatccgttcagtttgtgagaaatcctgcgaaaggaaattactgtttcagtttgttcccttatttcataaacgggaatcagtaatctgctgctgattgaaatttatttatctggaaacaattacaatatagaagcatctgctttgtttccatcttttcctcgttctttcggggtttcgtagcaattcggggtttcctccaaatattcttcataaacatttgtgcagaaatgctttttagtgtgctgtttgttttataaggtcttgatttcaaataattggcatatttctaactttgtcgcatcgagtttattcttctgttatccctcctattttccttggaggatcggtatttggaggttgctttttgttgttggaaaaggttaatattttcttatatagtggtgtaacttgtaattaaaaagtgaatttatattgttcaactgctggaatttctattcttgtattttggggggagtattttgttgattctctgactatcgcctgattttgcaaaaacgtaaattgtggtagtatcacgattatatatgccttaacctttgcaaaattccttacagaga

SEQ ID NO: 75481 - DNA, 897 bp, Carica papaya
  Intron number 1 from transcript evm.model.supercontig_22.6 3 (locus evm.TU.supercontig_22.63) derived from phytozome v7.0 (chr-ID supercontig_22; pos 1402265 to 1403161 revers e strand)
aatcccgagtagtatgttcgtttgatcttttgctttttctctgtgtattctaagatttgttagctgtgtaatgttacttgggtgttttcaccataacttgataagttttgatcttttgctttttggaaatacttgatttggtaattagttaattattcgagttttagatctatcaattgaatctaggtgttcttgtagggatttgcttgttgatgtacgcaagcagtttagtttatctcgtcttttccagttcaaatctcatgcgaatcaccttatcttgttatttgctatttcttcgtcggttatgttgttttggctttcaattttcttggtgattaaagttaggaagagaacttataatcacactaacacacctgctcttcaatggtggtgttgtttcgatctgcattttgtacccaccatttcttatggagacagaattagtttagagaatctggaatctctagtttattatttttagtatcttagatggaacatattaagatttaactttctgtcttcacaaaactataaagatgtcaccaacaaagaagatgtgacttgtcttaagtaaataaacttattgagataactggcaaatggaattcaattttgcctccagggtaactgctagttatttgttggattttcgaatgtgatcagtggaaacaaataaagcatcttaaacagtttagctttcatcacttcagtaaattgattgcattcactcaactcttttgcactctgtctctctattgtggctgaatggattgtttgtgttagagaacaaaatgcattcttatttgtccctttaacccatgtgctgcagaaaagttatttttgtttttgctctaacttgcagtgactatctgttcaagcttctccttattggggatt

SEQ ID NO: 75482 - DNA, 488 bp, Carica papaya
  Intron number 1 from transcript evm.model.supercontig_1.31 9 (locus evm.TU.supercontig_1.319) derived from phytozome v7.0 (chr-ID supercontig_1; pos 4377626 to 4378113 reverse strand)
tccattttttggtcgaaagaggaaaagatagccatgtacaattattatattttccactgaaagaaatgatatgaggttgttttataaatagaatggcaaaattgtaattagatagaaaatgatgtcctttttgtaagtagcagaattagtataaatacctgttttctagatatgtaaaagtagatactgaaactcattttgtttactcagttttctagaatcttcaatcaagaatatgtctcttctgcaaattttgtgttttagttcagattaatggatgtcgtctcgtttaatcattgttgtatgttgcaaagtttaacatggtatcagagcaattgagtttctccttcgattttgattttgtaaagtcgaaaaccctaagttcttgaagacggaacttgatatcttgaggattgatgtttgctgcctaacaagtacacatggaaacttcagccagcacagactcatcaaagttttgaaggaagtat

SEQ ID NO: 75483 - DNA, 522 bp, Carica papaya
  Intron number 1 from transcript evm.model.supercontig_115. 9 (locus evm.TU.supercontig_115.9) derived from phytozome v7.0 (chr-ID supercontig_115; pos 279339 to 279860 reverse strand)
ttcgagctctgctctgcaacctgaagtcaaagaaggtctcacttttctcaccgtactccttttaaagtaattattctttgcggtaattattcaacgatgaatagtttcggatcgtgaaggtagctttaattttgatgaatatggcttttcgcatcctcaatggttcagttcttcgcgattctcagagtaaatcggaaatcccacatatcgattttgtagaatgtgatgtttcttcatgcgggcagagattgctttttttatacgtactatttttttatgaatgttatcttaatcttattcatattgagcttcaaagggaaaaaaatccgtgtatctcgaaaattcccttataggttttgttgtatcctagattctctcatcccggcctctaaattttagctttgatcacttttcccgataaaattcattgagatcaacaggattttttctcttcgagaaactagtatttctccttacatttatgcatcagcattaaattatcttccaaacctgttatcaggc

SEQ ID NO: 75484 - DNA, 499 bp, Carica papaya
  Intron number 2 from transcript evm.model.supercontig_43.5 4 (locus evm.TU.supercontig_43.54) derived from phytozome v7.0 (chr-ID supercontig_43; pos 649157 to 649655)
aggcggagatcactgagcagaagtcactgcttctggtaatcaacaatcaatatcatattttaacttatttggaactttagtttgatctttcctctcattcgatcgaagagtgtataatccaacttattgttctttcactgttggacctctacgtgattgtgcgctgttcttatccatttgaatatttcttcttctgcttcagctaaacatcatacggacagatgcacgggagacaactcaaaatcgctttcgtttctattcttgttgttaatccgaataatatgctttgttgtcaatcatttatctgcgtgcatcatgtatgtgtacttcataggtttgtttgtcaattaaaaaaaaaagaaacgtctgtttgtcgtcagatcattgcatttgtcgttgtattcttcatcagtgccttttctgtttcatggattcactcattgttttatattttcttctaacagacgaggaatttgctccgtattgccatattcaatat

SEQ ID NO: 75485 - DNA, 602 bp, Carica papaya
  Intron number 1 from transcript evm.model.supercontig_18.8 3 (locus evm.TU.supercontig_18.83) derived from phytozome v7.0 (chr-ID supercontig_18; pos 555786 to 556387)
tgggagcaattacattgactcgtcgggtccaaagagttatttaagcagtgacgagtaatcatccaatggcgaggcagatgttgtgtctaggaggaggagctcatttttcagattcgactcaaacactgattgctctcactacgcacttgatatgttatttgaggatgagaaggcttttatgaaagtcattatgaagtatgcagtagtaagaaaaatgcaattcaattgaagaagaaagaaccaaacagagttcgggttgtttgtaggagcaatggcctatgactattataggctagtacctcctgttaagataagtcatttacgatagaaacactcatgcagagcataatttcatgagaggataagattaagattatttctgttccagtcaatgagaatagaactcaaggaaaaccaaatattaaattgcggatactgaaatagttatgaaaagagaagttgaagataaacatcacattgagtaaaatgccaacgagccaagatgattgtttcagaggagttgagaggttcatataagtctcaatatgaaactttttgactatgcagaggaactgataaatagaaatcctaggtcaacagag

SEQ ID NO: 75486 - DNA, 443 bp, Carica papaya
  Intron number 2 from transcript evm.model.supercontig_13.2 77 (locus evm.TU.supercontig_13.277) derived from phytozom e v7.0 (chr-ID supercontig_13; pos 2529247 to 2529689 reve rse strand)
ccgccgcaaaggttactcttcatctcctttttctcttatttttcttttttaataataaaataattatttgtattatcttaaaaacaaaatatattcaaaataaaattaacttctatagttttgtgccaaattttcagagttataaaaaattacaaatcaaaataaatttgtaatttaaagataaaattgtaacaaaatgttttgaaaaatgatcttaatataaacataattgaagttctaaaataataactttgccttaaaatttataatgtaatttattatatgaaaatcaatttattatttgaaaaaaaatttaatgagagatatatatatatatacatacatacatacatatatgtgggtgataagttcataaaatgatgaaagaattaattagacttggctaagatgagtatatatgagcaagcaggcagcccgagagc

SEQ ID NO: 75487 - DNA, 443 bp, Carica papaya
  Intron number 1 from transcript evm.model.supercontig_21.1 93 (locus evm.TU.supercontig_21.193) derived from phytozom e v7.0 (chr-ID supercontig_21; pos 1829679 to 1830121)
aagctgaggtatgcattgcgtgccaattcttgttaccgtgttggtagttgtatgtttgtagtgatttgattgtgtttaaattgatgaaattgtaactgtccgatttaggcgacaattcagagttagtgttaatctgagattaacaatgaaactttcatgggactcttattaagctttcactatctaagtgataattcaactgtttatggatgttatcaagcaaaaggtacacattgaagtatgatgtgctgaattgaatagaatgaaaattcgccagcacctactggacattggggcatgaaaggagatgaatgtttcaatcacttgcttaattctgtctttattcttaatcttcttccatttcagttcttggaattggagcttatgttttacacagatttaagctggttcttgtctgacagctcgctcgtagagttcgtgaa

SEQ ID NO: 75488 - DNA, 896 bp, Carica papaya
  Intron number 1 from transcript evm.model.supercontig_277. 17 (locus evm.TU.supercontig_277.17) derived from phytozom e v7.0 (chr-ID supercontig_277; pos 83437 to 84332 reverse strand)
ttttcatctgggtcacctcttcagagattacacaggtctgttttcttaccctctcaaatctcaactatttgtttaaaaaatttttatttttactgcaattttatggttcatattcctcataaattacactattttgtaaatatgtaaattttgatttcaaattttaagatcaaattcattcaactaaattagatggagctttctgaaaaaaacttggatggagggtaaaagtagaaatgattttacaaacactgtccaaaattataatcataaactaatatgcattgaaaaaagtataaacttcatgttgatttctgtgtactttgagttgataggttgtaccagtgggatatggaaatggttgctgatgggtttatcaatatccatgtgtgtatatatacatatataatctgtgtaaaaatgataagttgacttgtcattgttaatgtgattctatttttacttcatatttccaaaattgacaaattttttagagacatggtaagaattcaacaattcaaaaaaaaaaaaaaaaaagcttgaactgttaattcacatgtaagtaacttctatatatatatatgtgtgtgtgtgtgtgtgtgtgtgttcaattttgggttaattgatttttaactcttttctttttcaaattgctttgattgctaaatgggaaattgggagggtgtcctggaatttgcttctgggaacttccttcatgggcatcaggtttttcacccaataagtcaatctcctatatgtatttttcagaagattcaccggttcaacatcttgcttccttgttcaatttattagggtttctggagatctttacatggcttatttgcttttgcatgaaaatagggaattttcacaagctacagacatccatttgcagt

SEQ ID NO: 75489 - DNA, 746 bp, Carica papaya
  Intron number 1 from transcript evm.model.supercontig_234. 14 (locus evm.TU.supercontig_234.14) derived from phytozom e v7.0 (chr-ID supercontig_234; pos 231588 to 232333)
tgcctctgggcaatcttcaagacaaacagacattggtaattactgtttattaataatctttttatttggatggacaacagacgaaggtctttatttatcttttggtctttaggctaaaaaatataaacaggaaggagttacaagttaatttatcttcaatatgataatagtttttgtcgctgcactagtctcatttatgttctggtgagaactgtttgcttttccatgttttgaccattttgatttcttaactatcggagttgtcataagtagctcatggctgagaacggttttccagtatcctaaactattatacctagcttgttttagaagtggccctctagaaaaatttccttcatgtccttgtcttttcagtcctggtgttaatctcttaatgcacttactgtttccaataagaatcatttgaatagttgtgtaaaattgaattctcacccttccttaagtaagctgttattgaggaaaaaatctgggtgtatgtcttctgtgatcttgagctggtggatggaggacaaaacattcttgaatatttcttgtctcctgaatgcagcttataccttaagtaccaatcaagattggtggaaagagatgttcaatgaaagatttggaatatgtggcaggcctgctacaagagtaatttgcattcccttgttcatgctctcggtattaatcagttttataagtgatatgcagcaccaccttccccaagtgatcctacagtgaagaaa

SEQ ID NO: 75490 - DNA, 692 bp, Carica papaya
  Intron number 1 from transcript evm.model.supercontig_3.46 5 (locus evm.TU.supercontig_3.465) derived from phytozome v7.0 (chr-ID supercontig_3; pos 3393391 to 3394082)
aaggcctatccgctctgttcttggaggaggaaaaggtattttcgttttgtatgaatacatgtcatttgttcttgtctttgacttaaatcaggtaaacataaaacattttcattactgtttatgctgtaattcacatcaccccaaattgcatccatctaattcttaactgggtatttatatattgtgtttttaatactcttgatatgtcgacatcacatatattttatattttgagttttattgagttattctgtcatatgtagtgtacgaaattcattacgttaaaataatattataaactaatgtgagtgaaaatttatttattaggagagtttttttaaataaattcatactttattgcattatatactaataataacacaataaatatgatatcaaactaaaaacatatacagaattacaagtgaaatttgaatttatgatttctaacaaaaaaacaagcatagcaactattcagttaaataatattttgtgaacaacttatattacatagttaatataatattacaaagaaatgaaaactaaaaggcccttctccctctctctctctctatatctatatatatatatatgtatgtataaatttggttggtgaattaatacatattggtggctgtattgactaataaaattgagaagtgttgagtttttgcagttgctgatttattgtt

SEQ ID NO: 75491 - DNA, 840 bp, Carica papaya
  Intron number 1 from transcript evm.model.supercontig_4.14 (locus evm.TU.supercontig_4.14) derived from phytozome v7 .0 (chr-ID supercontig_4; pos 547966 to 548805 reverse str and)
cgcgtacaacgcgcagtgcccccgcgggtgctttcttgtgagattttttccccttttcttgttttctcctgaaaattatttatttaaaaaaataataaaaataattaacaaaatttggttaaattaaataaaataataaaattggcataatttatgaattatgatgtaaaactgtgaaataaaattaaatgaattcagtgtgaccttaaaacccaaataaataagattttctaaatacattttagcatggtggtaagcacggtgttacagttacacaagcaaaaactctcttttcatttgcaattaatttgattccagattcttgaacaacgcagtaacttcggtagcttccatgtataaatctggttttcattgatgttagctaattcatttaatttgcatttagcaatctgtttaatttggtaaactacatttctcatatctgatttcatccataacttgaattctttgcatagttttcttatattaactcaatgtaaatagtgaagtagattcaaatataagacttacattctaattcaaatgttttgttgccttaaatggtttaatttttgttttattcaagagttggtatgacattgaatcataacaaaattatatataattacatagaaaatttaagacagcgagaacctataattagtaaatgaatttaatatagaaagaaatttagaactgaaccaaccaagacaatctatgttgaaacagtgatggctatggcagaatctaaacccaagtttggctatggtagaatctaaacccaagtttcttgttttccttttagagcaaacataattcagtagacttcaatagggctgc

SEQ ID NO: 75492 - DNA, 454 bp, Carica papaya
  Intron number 1 from transcript evm.model.supercontig_140. 14 (locus evm.TU.supercontig_140.14) derived from phytozom e v7.0 (chr-ID supercontig_140; pos 311438 to 311891)
ttctcttgcctccactcgtttgcctacctcatcaggtaatcatattaaaccctgagatgatgatgggttttcttttttctgttcttttttttttttttgtttctctcatcgtctttctgccttttggactgtatgaatccacaattttaatttctgaagaaacatattggtttataaagtccaaattagctaacatgtttcaggaatttccaaactagagtaccatatcatttgcgtgtctcagatcaagtccgtctccgtagtcttccacccactttcttttttctttcttttcaaatgattcttaccactgtttcttggtaaaacttacgacatagtttcttcaaattggctaaaattcctccattgtcttttcaatcaaatacttaatattttttgttttatttgaaattcattagggttagaaatagaaaacttcccacaagaagtgaat

SEQ ID NO: 75493 - DNA, 916 bp, Carica papaya
  Intron number 1 from transcript evm.model.supercontig_28.4 0 (locus evm.TU.supercontig_28.40) derived from phytozome v7.0 (chr-ID supercontig_28; pos 566053 to 566968)
cacgatttagaggaggttttgccaatcaggtaagtttgtttgaatttttaagattatatatagattttttttcaactgttgaacttgtgagaagggttttcgttcgatgtatctaattattggttgtaaaataatcatttgtttctaatttaatcgagtatgtatattaagtttgagagagtaatttttagcagtaatttattaacacataaatcactagtatggatttgagtaattaatcattggggttgtgaagtaacggtacagttaggtctttggttccaactctaagcctactttatatctggggttacataccctctagagtagtcagattgctcaattaattgatgatgttaagatgcacttttgaattttaatgtcctaaaacgcgtggctgtaggaaatatgagcatctaagttttttgccctaaagttgttgttcttgaaagtttttgactgagtaatggtggaatttattgttccctttctttttgtggaagtgatgcgacgaggtgactactcgtagtttggctagtgaaggcgccatgtttatgtttgagagcattattattcacagactttgtttccttccgacaattgaagtatgggaagagcatacggttattagttatatttagcaactgaatcagaatacagtcttgtaaggagattattttagtttccacttattatagagcctcacatttatgccatacatgggcatattgtcaaacatggatcggcataagctaaaatttatggaataaatcatgacttgaatgaagcaggcacattttaatgttgtctgatgttcacttatgctaccacttttggttggtccttgcagtttttatggtgttttcttttgcatattttagggtaggcatatcgaaattttatagtggcaaatcaa

SEQ ID NO: 75494 - DNA, 834 bp, Carica papaya
  Intron number 1 from transcript evm.model.supercontig_48.2 7 (locus evm.TU.supercontig_48.27) derived from phytozome v7.0 (chr-ID supercontig_48; pos 185731 to 186564)
aggagagttctggattttatcaagtttgtggagtaatgtttgtttttcaggctcttctgcattgattgtttatttttcttgtttggaaagttttttaggatcttggagatactccgtttgttccttaatttacattcaattctactagcagtagattatgcaagttatattagaagatggtgaaaattgaattcatatggaatgcatgtacaattggaacatcaagtttgatgtaaaattgtacgtgaagtcaattttcactatattaggaagtattttcataatcttttagttgaattaagtatgaatttgtaaacaaattttcataaagattctgaaaacacagcctttgaaatgattcaagattcaatggattttttcttttttcctatcccagttgtctgaccctttgaaaacatagccttagaaaacatagccgtaggtatacaccacttttattatgaagaataggttttatccagaaatatatggtaaattgattaagcttcataaggagagtagtgttgttaagctgattggtaataaggttgaagtgggtggtacaagtatttagtctttgtaatgcttgaagtgggaaaaacagacatgttatattcgttgctcttcttgaatggaaaacttttctcgtggattttgctctttacaagatagtcattgccagatatcacatggttcaatattcttggattgggaatattgtttgtaagttttattttggttcatttaatctcttcatgaacaaagtgaaattaattttcatcagacgagttgtgttctaatttcctgttctttccacacgcagattccaaaagt

SEQ ID NO: 75495 - DNA, 737 bp, Carica papaya
  Intron number 2 from transcript evm.model.supercontig_6.31 2 (locus evm.TU.supercontig_6.312) derived from phytozome v7.0 (chr-ID supercontig_6; pos 2296600 to 2297336 reverse strand)
gggaacctagagctgtgatttatcataatttcttggtgagttatccctttccttttactggttaatcgattttccctctatatttatttactaaaatttgcagtgctgcatgttctttcagttaaataacttgactctcatactctcgattgttcccttttttccattttctttcgatctacacatattcggaagtatttgtgcagttgaatatttatatattttccattttgatcaatttttatttgcatgcgttagaattttgcaacacaaggtatattactactgacattactctgtaactggaactacagtcatctaagatatgcactgaaaaggaaatgcaatatacattatgatggactttgggccattttttctcatgatttagacacgagcctagtggtaaatcacaaatcctacttaagtatctgtgaaattgagtgtaaggtggaaatgcttaatgagtgtatggggtgaggaaaagcaaaaaatttacacatgggaacacatctattgtgtattgagtaactaaaactcaagttacctgtttcttttctagtttcaacagaaaaaaaaaaaaaaaaataataataataataataataataattctcttttctctggtatatatcagacagattcttatttttatttggattcactgaggcttcactttgattgcttctgctgattttttttttttttcttttcttttctcgatagagcaaagagga

SEQ ID NO: 75496 - DNA, 664 bp, Carica papaya
  Intron number 3 from transcript evm.model.supercontig_151. 9 (locus evm.TU.supercontig_151.9) derived from phytozome v7.0 (chr-ID supercontig_151; pos 79494 to 80157 reverse s trand)
tcccagtggctgaaggttcccacgtgacaatcaccgtatgtattgtattcatccttcacaaattcagtttactggttgttttgtatgttctcatggctcttcagattttttttccgtgttattcccatattcaaattctccagcccttttctttaatttgctgtattttttgagagaaatatagatctaggatgaattataggattattttaggtgttcttgaaattctgatcatatttgatcaaagtaaaaaaaaattagtggagcattctgcttttcttgaagaacgaatgaagttcctctaatttttcttcttcaataagaatctaaacctgagattgatcgttttagcgtatatgcttaatagataagcataataggctacagtcagtgattgatgtctcgtaatacaggaaaagtcctgatttccgtgtgagtgggtggaaaattcttgtttgttaaacctctatcaatcgttgaattttccctgttgcattgtgttcccttttgctcccacggttaaacatgagtcttagtctaggcacgtgattggatctaatgatattcatcctggtgagtgattgagcctaatgatttagcaactcattgcttttctctttactgtaaagaaaggtacaaaacttcgcattgctgattttgtgca

SEQ ID NO: 75497 - DNA, 826 bp, Carica papaya
  Intron number 1 from transcript evm.model.supercontig_48.1 31 (locus evm.TU.supercontig_48.131) derived from phytozom e v7.0 (chr-ID supercontig_48; pos 781921 to 782746)
ctaggtatgccctactcctcctttctctctatatttatttgcttgtagattgttcgagattggagttcatttcagttggcatattgatgtaattacgtttgcttcatttttttaactttttgttttcagtaatttgatggaagtggtgtagaaaagttgtgtggttgatattaggagttctattagctctttaatttggttcggtttgttgtcagtaattttggtttctatctcaattctattggcgacagcttcattgagacgagcatttgtgtgtgttcggtaaaatttaggggctttaggtgcaaaattctttccttcaaaagtttagacctgtctatatgtaacggacatttttcttgtcgaataaattttgatgatctgagtaatataaactgtttgctatatgaggtggtagaggagcaaagagaaagcaagggagaaatatttttatctctgcaatatgattgtttgcttttcttttagtgttttaaatagctaatagcattggtacacttgcatctacacatgtttatatacatgtagaatgcaaacgtttcgtacgataaagaataatacaaacatatcgtatatgctatcactattgggagttgtatgtggtaggaactatagttcgtggtattcactactaaggttagactttagcaattacaatttacaaattacttttgtttttatctttttttcttgttcatctttcagctatataaataaactcattcgcaagaatttttaacaaggctgttaaacattattgtacttgtttgcagtagaggtgcacttacagtgggtttaccaccggctt

SEQ ID NO: 75498 - DNA, 888 bp, Carica papaya
  Intron number 1 from transcript evm.model.supercontig_298. 2 (locus evm.TU.supercontig_298.2) derived from phytozome v7.0 (chr-ID supercontig_298; pos 59020 to 59907 reverse s trand)
ccactattgacaaaggacaaagcgaaagtggaggggtatgcgtgtcaatttgtttcatttttaataattccgacttaattcaacagctgtggaacatacgtattgtattgcaatttcactttcttgttatgggactcatcacaatgttcactttaactattaagggctctcacatgccactttcactctaataatctccctgcaaagacaaaactcaacaacatatgtgaattttctgatttcccattttatttttgaagtaaaaattactcgaagaaaaagcccgagggccaataaatacggctttcttgtcttctattcttgcgtatcattaaaacttcctcacctgcttatacaccactgtagtgtgtataggttgatatgtaatgaccatctttaatgttcaagcattttagtactttcttttatttgtctcctcgaagtagcatgtgtagcataagttacctaattttgggctttatcttaatcggttttcttggcatccaggtttgagtttcaaaatacagctttttaattaaatggataaatattccaaaaattgaatgctatatccatcaatggggtggataagcgaattgactttactgattggtagaattggcagcctgctttagttttttatttctatccttgctttaagagcttctgtaagtgagactgaatttttgtactgttcacgaggtcctactttctctcacaactggataagttactttttctctacttggtctgcaaccagaaggttccaagcctccttttttctcctaatgcttgagattttcgaattgacgttatcgtgatgtgtgcaactctagattacataatataattcttgattaaccttatcctcttattctcagataaaca

SEQ ID NO: 75499 - DNA, 784 bp, Carica papaya
  Intron number 1 from transcript evm.model.supercontig_148. 46 (locus evm.TU.supercontig_148.46) derived from phytozom e v7.0 (chr-ID supercontig_148; pos 585022 to 585805)
ttgcttttgacccttccaatcccgagctcctcttggtactcatcttttgctcgctcactctctctatctctacatctcttttctgaataaggtttcttggtagccgaacaactttttacgttgtctttcctttctctttaaaaaagaaaaaaattattttcgagcgcatctcttcttatctttacgttttcccgtgaaattttatacattctttcattttttctttttaaaaaaattctgccttgtgatactatcattacttgatgaaatgactagataaaaacatccaatttagatttgtggctaaacattgtgggattaattcaaacctgcactactgatattttgtttctgttttttttttttggtgaaaaaaattattctactgaaagaatcgggtacttgccttaaactcaatccatctttggtcagctgatattttagtgttgaaacacaacctgaaaatatcctcttgttcctctgcaacttcagttctatggcattgtagctttatatatacggttcctatctatataaagcaggaatcttatctgctgaaacccttttctttttctgggagaaaattacgtgttttttatggcgggaaaattatggaggaaggcttgtgcttgggttatttgattctcctctaagctgttgaggaaaatcactgaaaagagctgatgaggagctccttcgtatcctgtgttctttatttttacagttctgcttcttcttttacccttttattgacgcattttttttatgtggttgtgataggttc

SEQ ID NO: 75500 - DNA, 624 bp, Carica papaya
  Intron number 1 from transcript evm.model.supercontig_130. 45 (locus evm.TU.supercontig_130.45) derived from phytozom e v7.0 (chr-ID supercontig_130; pos 511419 to 512042)
gtggtagctacaaacaggcagggtcttcgtgttcttgattggcaaaattttacacattttttgagttctattacttatctttctcataaaagatttaacatttccatgctctgcatatgttatatatgttaattgagtttgaagttggaagtggtagccatgataaactgtcttgttttttgatttgctgcaaaatttctacacctatgatctgtgtgcatgcttaagtgtgtaaatcaatatttgattgtgaatttatggattcactgagataagtttaccatctcatatatattttatttttctgtattgattttgaaagaaaaaagagaggttcctatctctttcccctggaaataaaagagaatgggttatagtgtaagtattgagctaatgtttcaaaaacaaatgtgagcattgagctaggagataggttaaaggctcgatgtttgactgttagtaaggaacacatcctgtcaaccattcagttgtgcatctttatgattagctgtaaaatatatgtagtcagatggtttactgatgcaacttgagtatttgcatgggtagttggtttgattcaaattgtttaggttggtcatgcatagatggcttttagtatcagac

SEQ ID NO: 75501 - DNA, 476 bp, Carica papaya
  Intron number 3 from transcript evm.model.supercontig_58.1 04 (locus evm.TU.supercontig_58.104) derived from phytozom e v7.0 (chr-ID supercontig_58; pos 965409 to 965884)
cagaagcaaagggtcttatcaagccaggacaggtttgttgtcttttctgatctgcaactagagtatcttactcaaataatgcggtattacaagcctggcaaataagtgctatcttctttcagtttttttttaatttttgtttcataaattaattgactcaaaatactcaaatttaaaaagcacatgagggctacaaacttaatgttctattgagttaatattttttataatcctattgttggtttctggttgatcattacaacctcttgtacataatcttaagatactcaatttgtaaaagaacaacaaatgttttgaatcctgagattttctaaatctcagcttgacaaaaggttgtcaggttttataattcttagaggaaccggttagatgctaatctttattgatttggactttctttgctgtgaatggttgctgaagagtactctcattgaacctactagtggaaatactgg

SEQ ID NO: 75502 - DNA, 867 bp, Carica papaya
  Intron number 1 from transcript evm.model.supercontig_36.2 5 (locus evm.TU.supercontig_36.25) derived from phytozome v7.0 (chr-ID supercontig_36; pos 209064 to 209930 reverse strand)
caaaacaaggaatattaagcacatacctgagtaaggtctcttttcttgccttatgcttctttcatcatcccttatttgtttatttatttattttttaattaaaaggaagccatatcccttagtttaaggggcactacatatatttgtttccactacttatgtgaatggtttttttttttaatttgttttctgtttgacaaaatgcattcttcaaattcatttttagaaaaatataatttgtggttgtaggaaaaatccaactacaatatttctagctgcatttagatttccaatttttgtgctggtttttcttcttcactgttcaccctgagttataagaagttcacacttgctaaaagttataagacttcttcattgttgctctttttgatatattatcctattttaacttattatttcgtgcaacatgaaacaatgttcgagcagaaaattgtttgagataaatggctattgaacgaacatagataagaacataagatgaagtgtaaccaggatattatgggtatagcctacttagcttctggctttctttccgcttgatgactattggactcattttgacttttgggctcatgttatatgttaaaccgagctacattagccacatgtctccttgtggaatatgttgtctggttgttcttttgggataccatcattgactgggtgctcgccaataagttggaagagaagataaaaagcgtttgaaataaagttaatcataatgtggacaatggctagataaaagtaacatgccaatattgggaactagtttatttttgtttttcctgaatcatgtgtctagtgacaataagcatacatgattgatgtcacagatatactggggac

SEQ ID NO: 75503 - DNA, 152 bp, Carica papaya
  Intron number 2 from transcript evm.model.supercontig_20.2 33 (locus evm.TU.supercontig_20.233) derived from phytozom e v7.0 (chr-ID supercontig_20; pos 2482491 to 2482642)
gagtttctcttggtaattaataacataagttttttcttcatgatgccatgataacatttctttctcaatcacaaattttgtatttgattgatagatttattttttattttggtttctggtagatttggaaaacaagatctcatctagaagaa

SEQ ID NO: 75504 - DNA, 454 bp, Carica papaya
  Intron number 3 from transcript evm.model.supercontig_20.2 33 (locus evm.TU.supercontig_20.233) derived from phytozom e v7.0 (chr-ID supercontig_20; pos 2482666 to 2483119)
agaaaaagcttctcaggtatggtattcattttaatatgatatctgatgaagatatatacatatatagagctagagctaacataattgatgggtcagtcttctttttttttcattttatattgaatttatataatgggtgcacgtttagtaggacactaattaccccttgcataattctggtagttgtattcttattttttctctctttcttgtgaacttaaaacttgggtggttcacctaacaacttgattatatggtacacactgacaaaaataatgaggaataagagttaattgcattgaatctttcgtttaccatttgaaaaaaaaaaattgtttgattaatttagactccagaaacttgtaacgaaaaaaaaaaaatcaaatcatgcatggtcctaatttcttatctactctcagaaagagagactagtcctggaattgaaggcctcaac

SEQ ID NO: 75505 - DNA, 645 bp, Carica papaya
  Intron number 1 from transcript evm.model.supercontig_12.1 27 (locus evm.TU.supercontig_12.127) derived from phytozom e v7.0 (chr-ID supercontig_12; pos 1161913 to 1162557 reve rse strand)
cttaaaggttcatgaactataagctatcagaagataagtgaaatatatgtttggtttttgtacttctatttgactttaagttttgcataataatcagtactggtaaaagagtgattataagttgaaaagttggtaaaatgactaaaagaacctgtgtcaaaattttggtgtatttccttgaaaatcataaagacgaaataggcctaattgcatggctcataagtaaaaaggaagcaaattttgataggtttttatttgggattattagctaattctggaccaagcaaatgttcttctgcgtttttaacttttattagggttctctagttatagttggattagggttttatacttgagcactacaatgacctttttaatatcccttttaatatcaatccttgtttgaataattatttataagaaaattctaaatattgggttgtatatgcaattaaatcttaaatgtgatacttaagaacttctcaggtatgacatgacgttttcgaaactttatgtggtggctttaatttttcctacatcattaccctgttttgaattatctatgtcctttgctaggatgaagaatgatttgtttttttttttaatttttatattctaactcctttatttgacgctgcagctgtg

SEQ ID NO: 75506 - DNA, 759 bp, Carica papaya
  Intron number 1 from transcript evm.model.supercontig_56.1 14 (locus evm.TU.supercontig_56.114) derived from phytozom e v7.0 (chr-ID supercontig_56; pos 1349789 to 1350547 reve rse strand)
ttggttggtcaaattctttccttggcatcgttcaggtacccttcacatctttctctttgcccttttgttttttgtttttttttttttttcatttttgcaaactcgtcgttttcgtgttccccaaaaagaaaaggtcaaaaattaaaaaaaataaaataaataattcaatcaaaagtattgtttattactggtacggcaaaactacaatttttgtttgtggctgtacgaaatattagttttaaatttcttatctaaaaattacgaaattagaagggaaaaaaaaaaaaaaaaaaagttaaatgcagattgtcaagtttaatgtattttagttattttattatgtacaatataacataaaaataaattcagaaccgtcacccaaatttactagttttaattatgttacgtttttttctttttatgttattaacttattataatttcttaaaaaagattgtacatttatatatataaggattaaagagatcaggtgtggttgtcgagagagccatttgttgatccggtcaaaaaaccaagtgccaacacataatacaacttcaagttttcaacactttaatttaatgtctttggtaacagtgtatatatatatatatttttttaataagtcttatcgttaattttacaagtaaatgtggaactgtctatttcgtattgtgatttaacatccatactaataaaattttaaataacgtatgtatcgaagtcatcatttctttggggatacatattctcgtcagt

SEQ ID NO: 75507 - DNA, 499 bp, Carica papaya
  Intron number 2 from transcript evm.model.supercontig_27.6 7 (locus evm.TU.supercontig_27.67) derived from phytozome v7.0 (chr-ID supercontig_27; pos 671946 to 672444 reverse strand)
agcacaaaattcagcatctcctgcaacaagtcagggtcagtatgaaatagtcttttgtgctactgaaaattatccaaaaaatatatgaccttcataattttttcaatgttcccaaccaaatgactcaatggccaaagcactggtgtgaatgtttgtttagaaacatttaggtatgcttaaaggtacctatgggctagcccaatggttagttccttccctgtttcgtaagagggtgaggtttgaatcttgcctttacattagaagaataaagggtatgctatagaggcaggcaatctgctggctttaatgtagtctttcttattcactggtggttaatatgtgttcttgttaaggtacattacgtaagtctgctttgagttcttttattctgttttcttccttccatctcttgtcgttgctaaagcaacatttcctctgaaattgtttgaacatgtttcttacagctggtcaaagtggtacgacaagttccacaggaagc

SEQ ID NO: 75508 - DNA, 678 bp, Carica papaya
  Intron number 2 from transcript evm.model.supercontig_55.7 9 (locus evm.TU.supercontig_55.79) derived from phytozome v7.0 (chr-ID supercontig_55; pos 496103 to 496780)
gacacgtgtgcttcaatcgcacgtgcctccaccaggtacgattcgtctctgttgagctgatattgttattgattccctggctccgaaaagaaatgtaaggaataatattctgacacggggttgcaacttctaactttacctttaaaaagatatataaccaacaatggagcatgttgatcgtagctttcttttatttatatcatttattttagaatttaataatatttttacgttttttttttaggaaaagagctttacgtaccttactgggttgtaagtaattacggaaacgagcttgtaagctttttgtttttgttcgtaagtttagataaaagcttagcaatagttttatatctcatacgaccttactgataacatctataagtttacatttcagatatgtatatgcatatatgtgtttacattgtgtgtcttctatttaaaagaagttagtatttggtgagattgagtgtactggagcaaaggagcgtttttgagaattgatgacttaatactcagataacagtcgtcatatttgttacatgaaggaaaaaattgttttgtcttgtcattaagggccatgctagtagtgttgatgtaccagatgaaagcaaatttttcttggccttccacaaaataccatggagtcctaatatcacttatatttcctatacaggc

SEQ ID NO: 75509 - DNA, 635 bp, Carica papaya
  Intron number 1 from transcript evm.model.supercontig_252. 5 (locus evm.TU.supercontig_252.5) derived from phytozome v7.0 (chr-ID supercontig_252; pos 16021 to 16655)
tcgggcttacttaatgtactgctgcttaaccctagatgtgctcaaactcagtacacatcccaaccattcatctagctgataaatctgttttctatttcaaggcatgaaggcgatatatagcctgtaggcatgcttacttcgtgagcactgatcatgtgttttgactctttgtatggttggtgtcagaacagttattatattttggttttaggtccgtaactcctaattcacctatgtgcgaatttcagaggtccatgcatgtgactactttttgcatattttgggattttctaatccagcattctcacttattctacttacggttgtaaatatcctagaatctggagtgcaattttgcctatgataagtatcctggagtatctcttttgattctaccttcatgagtcttctattcacaatctatacgatgttcacagttctaaatttctaaggtttactggaataaacatttaatcttcaagaaactgttacttttgcatccttgatgctgtatatgttatctctatgttgtgatctttcttctctttgtgatttcttttggattgtatgcgctttgtgaccactatattttcactgcaaaccatgatgtgctttggggctgcagtcctctatca

SEQ ID NO: 75510 - DNA, 959 bp, Carica papaya
  Intron number 1 from transcript evm.model.supercontig_2.19 8 (locus evm.TU.supercontig_2.198) derived from phytozome v7.0 (chr-ID supercontig_2; pos 2737275 to 2738233)
ttgctgccaagcgaggacacttgggtatgatatttctgattcagtgacttttcgctgctttcgaattcattttccaattgtgcttctgtttaatatttaatattcttttggtattatcactgattatgttacatatttcgaatctgcaatactcacttttttaattccctcaaattatttcagtgtgttatcattagctcaataaatgaggatgtcgtggtatatcaaggtttcactttctgtttttttggatgggtatcctggagatgctttctgatttatcactcttttatgcttttaatttttgctggaattgggtttttcagtttttgaattttttggtttttgatggtttttcttttgggattttgttattgctccttttcttttttttgtttcctttaccagataaccaaagctaaatcattttgatgttgcccccccctttttttcccgaagaaaattatgtgctgctattgagccattaattctttggttttactcaccaaaaaagaaaaaaaagtcttcgtttaaacaacccctaagatgtatgaaattggcaagaagatgggcatagaccttccttttctggtttggtgcagtagattctcaaattagcttgagaatgagatggaaatctttgtgttttgagcctaaatatgcttttgttttatgcgaaagccataacaacggctaggtaaggtatcctattgatggagatgaatcttctcccatttatttcctggtaaggtatcctattgacttagaatttgtttcacgtcattgctccgaacttgaatcttatagtctgactgtgattaattagtcaaatttcttttatttgtattgggaatagtgtttcacattagagacgatgcaattcactgggttatgtctttcctagttttttctcagctcaaaattttattttcagacattgtgaaggaacttttgatcat

SEQ ID NO: 75511 - DNA, 796 bp, Carica papaya
  Intron number 3 from transcript evm.model.supercontig_3.27 4 (locus evm.TU.supercontig_3.274) derived from phytozome v7.0 (chr-ID supercontig_3; pos 1933781 to 1934576)
gaggatctgattaccttggaaaaggtgtcctcaaggtgtgtcaattttccttatgcaaaatcactgttgtttgaggaaaataggacatgttagcaagttgtttgactcactgttatgttaacattaaaaccaaatgagatggcattttttgaatttgaggctaaaaagggtgcgaggaatcgctggagaatgcttcgtggtttgttctgctccgttggatattcttacttttttccgtttgtgttatccgattttaactaatactaacaacttggttatttgtatttgtatttttttctttgaattttctatcaaaagaaaaaatccttgatctcaattacttgatgtgtaaaattagatcgtgattttcatattctcattcaaaattgaattagtttcattcatctattaactctcatggcgattagatttctattgccagctcatgcttttgagcccaactgattgtaggcctaaagtccaaaaggtgcaactaattataaactcgaaaacctcagtaattattttttttgtagattgaccaactaatattgctgttagagatctccttaaaactgatgttttaagttcttctaattttatgtttactacatgtaccatgaattttggcagtttttgatatagatgaatggaaatttgatgctgtatttagattttttggaatggaggaagtcaggagcattattatgcatttttaacttttgcgagataaagctgaaaactaccacaatgacatgtttctttttcgtgtttcaatgatggcaggctgtggaga

SEQ ID NO: 75512 - DNA, 701 bp, Carica papaya
  Intron number 1 from transcript evm.model.supercontig_178. 36 (locus evm.TU.supercontig_178.36) derived from phytozom e v7.0 (chr-ID supercontig_178; pos 321168 to 321868)
agtaccgggcactcaggcggaagtatttgttgttggaggaagaaagttttggatttggggaaagagttgaaagatgttgaagatgatgttggagctcttgaaaaggagaagctggcacttcttgaccaactagttgtattagagggtctggtggatccatcagagattcaataccgttaactgtaaagttttttattatccaacttacagttgtttgtgaaaatacagaatatagtctgggagtgtcggattctcaacagttaatgtatccagattattagggtataaattgagctattcagcgctcttctttgataatggcattcttgccaatactaagtaaagatttagagagcctgtcgaatcagagtatgatgggttagttattggttcttattgaattgtgtattgttggatagtctatgttttttgttatataaattttatgtatgttttaaaaaaaaaataatgatttttatgtatgtttcgaatatatatatatatatatatatatatatatttttttaaaaagggcttttagattaatttttttaaaaaaattgtctttgatgacatatttattaatttatataattttataatttatttatatttttatatattttaaaaaattactaccattagattctttacagatttttgtagctggctgatttgcactccctatcctaaaagcctaa

SEQ ID NO: 75513 - DNA, 871 bp, Carica papaya
  Intron number 1 from transcript evm.model.supercontig_6.41 7 (locus evm.TU.supercontig_6.417) derived from phytozome v7.0 (chr-ID supercontig_6; pos 3122851 to 3123721 reverse strand)
aagattacaagagtgcaattgaatattattcaaaggtacttaaacccttatcctattcctgtcatggttaatccaaaattagatagtgatcttctcctggattttttatggtaattctgccaactacgcacttgcgttttgaatagtaatcagtccaaatgcttatggctttgtttatattatttaaacatttgctagaacttatttccaacattaagtttgattagttagattatcttaacattaatttcatttatgggcttgcataactcaagggatttagaagtctttctttttctttgcaaggattaaggggattaaattttaatctgcactttttggagttttcggggatgggttctttgttctttcccttgaaaaatgtttgggcatgagctctagatgtcacttgcatgttccaatagagcataatgtttgttcctccaatgctatgagtgacatcattttactgccgaaaagtggttttgatgtcatgttacttccggaaaacggttctctctttctgaatgtctatcccaaataaaataagacaaatcaaaagccatattgagaatagaattagtgcaagggctttatctatgagtgataggatgttcctatttgctgcattaatgttttacccccttagatatgctagaatgaactgataccagcatttatcgagttctttcaaattctgagttcctatatgttctcataaatcaacttgtaagatatcatattattttccaacaatttgcagtgcatggctgtttctcttttagctcttattctgcttgttaagcatttttgcaagttattgattgtcagaatttcatggatttttcttctgaaacagttggttgtcacg

SEQ ID NO: 75514 - DNA, 551 bp, Carica papaya
  Intron number 1 from transcript evm.model.supercontig_106. 100 (locus evm.TU.supercontig_106.100) derived from phytoz ome v7.0 (chr-ID supercontig_106; pos 871955 to 872505 rev erse strand)
tcgagcccgccggttatccttgcactgaacacacagtactctctttactctctcttaatggttggtggatatcttgattgttttgattgatattcgcttggtttcggagaaactggaggaaaagaaaaagaaacagaagaggagaaatgagagctgttctggtttttcgttaagcatagaaaagtagaatttctgtttttttattgaaagtgtctaaaggaacttggttagtttcctagtttattggaagctactagtttggcttttcttaattggcaaggtttacttccagttcaagactgtttttagggaagtttgcttccagtatttggatcgcattgagaaacttttgagttaagttgagtttctaactttatttactatgaataacggagaaattgaatgttatctagtgatattttacgtatacgactgagttttcagtgggattttggaggcggggagaggagttattacttgtaagggattcttggtttattttaattgaaatccggttttgtattgcacttatctccagattcagacagagg

SEQ ID NO: 75515 - DNA, 651 bp, Carica papaya
  Intron number 1 from transcript evm.model.supercontig_3.14 7 (locus evm.TU.supercontig_3.147) derived from phytozome v7.0 (chr-ID supercontig_3; pos 1096733 to 1097383)
tttctcctttcggtaagtttcttttccgatcctgtgttaattttctcaaatgaaaattctaaattcaataactaaaacccatttgtgatttcagccgggattgcggctgtttatttatctgctcccctgttctctgagcttgctctgttattcccttatctaataagtaatcaaatcatggaaaagcttactgggttttctgattatgaagcattctaattgggattaggtaaattttaggtgggtgattttcgttcttatcaattcttttcttgccgtcagcttttccatcagctatcagtagtgtatacgttttagatgccctgctttttcccttcccagtaagtaaacaggttgaaggaacttgatgctgctttccagctaaaagcaggagtgaaaaagaaaagactcttgcatgaaaagaactgaaggagtcatctttttacagtaaaagaaaaagtaaaaaagaaatattccatggcataatctcataacctgcgacaaaccaatcataactgatcgttttctggaccaacgtaacttcaacatgtaatcatattcaagaaaacatgttctgtatattccgacaatgaattcagccgaaaattaacatggcgaagcattccaggcttattagatcccctgtctccg

SEQ ID NO: 75516 - DNA, 864 bp, Carica papaya
  Intron number 1 from transcript evm.model.supercontig_3.15 5 (locus evm.TU.supercontig_3.155) derived from phytozome v7.0 (chr-ID supercontig_3; pos 1187349 to 1188212 reverse strand)
aggatttgagttttgttaattggagttatccggaggtgggttcatttctgtaccagtttctatatttgatttgtttattttaacactgtccgatactgcagtcattaatggtgattatatccattgcttctttattcttttcgttagtttttgtttacactttttattgtttcaattcactgagattcatagatgttgtcatctctttcactgatatagcacatttctgttctgggttctccgaattctttgctgtttttcttcattttgattattggtatatgatcctctgtttccctcctgagtgcccttctcttgataagactgaattccctttctgatacatgcatatacgatagtatacatccattataatcactatttacagaattgatgtaatcttcgattatgaaaatctgggttctgaaacaggtgttcatctccagtcttcatggtctgtgagttgatattaaaatgttgatttagttcctctttgaacccacaaggaggcaattcggctctttcctttgtattcttctcttttaatctctttcaatttcattactacaaatgatgaagatcacgagtggtattaaaagtttatattgtcattccattcattatctcaattatttgttacaaatcctatgattgtcgtatcatttctacatacacaaacacgtataaagttttgtagtttaaactgaactagttttgttcaaaacatcttgagtgtattcgtactagatggctacgggtctggaatcatttctatcgtaaagtaggaattgtacaggggaaatcaccggagaagagattccgctggtattaaaatgatctggtttttggattgataggatattg

SEQ ID NO: 75517 - DNA, 622 bp, Carica papaya
  Intron number 2 from transcript evm.model.supercontig_2.35 8 (locus evm.TU.supercontig_2.358) derived from phytozome v7.0 (chr-ID supercontig_2; pos 4089483 to 4090104 reverse strand)
aactaggtcctcgctaactttttaattactttgccgttattctttgtgttgtttaagatttctttttatgtttagccaatatacttatatttgtgtcagaattgatgatttgatagcaatttgcaattttgataatgtatttttgaacattggtcatttcctaggttggattaaattttagaccttttttctcctgtaaaagttttaaaaattcaatcattgttatgaataggattattgtcttaaacttctataacattgtcttgtcgctgattttctatttttgcaaccctttttgccgtatttaaacattctattgttatttttaagaaagtttttctttcaaacaacgtttcctgaaacttcctgctcaagtttatttgaagatttggaagtaggttttagaccagtacatgcatggagaattagcaattgaagctacaaacttaatatcgctatttttaagtgattagttagtgtagctctgagctgtttctttaaggtgatgagaaactgaaacttttttgaggttcctcttgcaatgctggcactgggataatgtattgcatgctttaggctgtttacagagtctcattctggtttttgatctctgttgcaggat

SEQ ID NO: 75518 - DNA, 585 bp, Carica papaya
  Intron number 1 from transcript evm.model.supercontig_2.38 9 (locus evm.TU.supercontig_2.389) derived from phytozome v7.0 (chr-ID supercontig_2; pos 4307859 to 4308443)
cagggtcttggcgctgagattggtatctacttttgcaagcttgttctttttgcttttgattgttcagtctgatgcttggtaatggttttttttttttttttgaaaagtcggtaaaagggtttttggcgttggattatgtatatcatttttcctatgtttctaaattttgttttagttttcaattagtctttgtttcagtgggtatcgttattcttatctaacctagctctcgttaacccttaaggaaatgatacgtatatatttgcccttctaggatatgcttgatctgtatctgttggatttggatttttttgggtgcttaagtgatgcacatcttattgagacgagcgagtgatcatcaaatattagcatgataataggctttctgttatggcataatactaggtattgctatagtaaataatgatgctattgtagaaactattattatgataacaagaaaaaagatatgttatttaatgtttaatgacggctaatgttgctcatattttctttttcttcgtcttaagttgtgaattcatttttgcagcaaagaaccttgttcttgccggtgtcaagtctgtg

SEQ ID NO: 75519 - DNA, 951 bp, Carica papaya
  Intron number 1 from transcript evm.model.supercontig_57.4 (locus evm.TU.supercontig_57.4) derived from phytozome v7 .0 (chr-ID supercontig_57; pos 115848 to 116798)
aagacaacaggtacattgatttcatttctctcttctgtctcttcttcaatctttcgtcctacctccttgtttgttttttattaagtcaattctgttctgggttattttcagtttacaccgtatatgccatggaaaacaaaaaagatcaaccaagaatttatttgctcatctggcttcctgttcttggacatctttgatcctatatggattataatgtgtttctgataaattatcattcactccttccctattctttttcattttaattgctgaactaatttccaattcccgcttggtagaaataattcaaacttaaaatcaattattcaattctatatatcaaaatcataagttgagcaaagaaataaagtaaaaatttagtagtaatataactaaacgaaccaataatggtattcaaacatcattcagtattatgaaatgggcacatcttcctctcttacattcttccatttttgcataaaactatttgattgatctccaacagtgaatcaaacttctcgaatttctacagtaaattctcgtgataaaactgggaaatccctcctttcacatgtattcttgtgattacaaaagaaaagattatggtttgattggaacaaatctagaaacttatggaatttatctgcaaatcaaatttagtttaactagtagatgatgcaaattctactaggaaatgataaacatagatgaaatcaatttttatcaattcatgaaatattttcacctaaacatagcctttgaatgtcaatttctggttctttctcttctgcaacaagtactggacatggtagttctgttgtcaagaagtaatgaaacagaagatatgttgaagttctagtgtcattcttttggggattatgattaagttgatgcgtttcgcattgatgctgatcagttcatattttgcatcattagctgcagcccagatag

SEQ ID NO: 75520 - DNA, 696 bp, Carica papaya
  Intron number 1 from transcript evm.model.supercontig_34.9 (locus evm.TU.supercontig_34.9) derived from phytozome v7 .0 (chr-ID supercontig_34; pos 71333 to 72028)
ggtgtttcacttgaaggtatggaaaatttatcctatttctttttctctgaaattgaaaaaagaaatctgctaaaaaagaataccgggcattcacttaaagagaagaagaaaatgagtcatggtacctctagggagttaaaaagactggaatcctccataaattatgaaggtagaaaagaagctggaaaggcggcaagtggagataggatattttgcaaatgataggaaagattgtctcctggaatgtccgtggaattaactgtagggggaaaagactgattataagaggttgtttgaagaaatgaaagctttccattgtatgcttgcaagaaacgaaagtggctgacttatcaactgaaatgatcaaaagtctatggtgggataacagtagggactggcatgcaattccttctaatgggtcggctgaagggatggttattctttggaggaaggattgtgtgagctgcatagatgtgattaaaggtgaatacaccttgttgtgtgttttcgaaaacggtagaggtaatgttgagtggatgttcaccggggtttattgtaggggcaatcatgtggataaaacgaaacttgggaagaattgacagcatgtagatccaaatggggtgttaagtgggttattggaggtgattttaacatgatcttgagaaggtggtaataatttctcaaggattgaagctg

SEQ ID NO: 75521 - DNA, 615 bp, Carica papaya
  Intron number 1 from transcript evm.model.supercontig_48.1 54 (locus evm.TU.supercontig_48.154) derived from phytozom e v7.0 (chr-ID supercontig_48; pos 888608 to 889222 revers e strand)
actcggctgagttgggtcgagttagtgaaggttcgtctctgtatgtttatgtcgcttttaatttggtgggtatattttgaattttcaagatcggccatttgctatatatatgtgcttggctggtaattgaagtattgaactgtttaagctgagcctaatactaggtatagaatagaactatttgcccccttctttttgaagaaaaagaaattaattaattatttgctttcttgaaacatagcagaaaaacgaatagaacgaaacctattagttttcagcatgcagagaaaaaaaagacactaagctgcaaatgattaagaggagctaagtttctggtcttccaaaattgttctgtactaacatgactgtgggtaggatgcttatatctgcctagcatatagaactgaaagctcgtgatatataagtagagtttctagtctttcaggtttttccttactagattcacgctagcattcttagatcagactagtacattgaactgaaatgctttgtatctaatgccttaaatggtgcactattttctgaggtgctaaaatttcactgtatgatccagtttcagggatccagataagcaagcgtgagctccatcttgcc

SEQ ID NO: 75522 - DNA, 976 bp, Carica papaya
  Intron number 3 from transcript evm.model.supercontig_3.50 0 (locus evm.TU.supercontig_3.500) derived from phytozome v7.0 (chr-ID supercontig_3; pos 3557262 to 3558237 reverse strand)
ttgtgagggagcttgagaagaagttcagtggaaaggtgaataacaaaacaaataagttgtatgaatcttaatttttctcactttgtgtgattgcacgaccaggctcttgtgatggtcttcgatattacataaaatgctcgggttgtgggggaaggaattgtttcattctgttagattcattattaacaagatgctgtattgcgagcaaaaactaagaaatgttatattcaacatttgaattattaagaaattttttagctaacctgttgccgcctaatatatgctatgttgtaatcctgggtgactgcagaaaggtgttagcaagcctgttcttgctatgctacactttgtgttagatgcatacttattaggaaatagttcttccctaaattctctactacattatatgactattagcagaaagatagcaaatcactgtctggcagagtagatgttggagtaaataagcttctttatgttattgggttatccttcattaaaagaaattgttgctttctttgaaaatgttattcggtatttgggttaccttctttaccgaatggttgtaattttaaccaaaacttttgttcttccattaagttaattaactattatggtcatgtttcccttctgttggaaggattttggtcctttggaaaaagagtagaacaacttaatgggggtgtttgggtgcaggcagggacacttctaattgctgttgtctatcagacttgtattctctttctactttttgctttttgaattctactatgtgtctgggtttttatgttccagtctttactccaaccagttttatgaggagcagaggtactaggctttgtcgatgtcagttttggtttctgctcatgtcaattggcttttctattctggttttatgcttgtcgtgtgtattgatctactggtactgttaatatttttcgtgattgtaagttgcgatatataactatcttgtagg

SEQ ID NO: 75523 - DNA, 623 bp, Carica papaya
  Intron number 2 from transcript evm.model.supercontig_2.75 (locus evm.TU.supercontig_2.75) derived from phytozome v7 .0 (chr-ID supercontig_2; pos 1308424 to 1309046 reverse s trand)
gacgagtaccctgtcactacagagcttcaggtctaatttctctctgttttgacattcaaaattgtgtttttaagggattaaattcagttttctgaaatttttaacctatatataagatggaagatgatataagagatgaacgtgtaacttaaatctggtttggtgaagaaatgattttacattttttcgcacttagatttaaattttagtttaaacatatgattaatcaagtaatttcttaacggttaactaaatgatttttgccttagtcttttttacatattacagagtcattttttattttaaactatcgttcttattatatactacgttatatcaaaaatttaatccttaataagcatcgtttagtaaaaaaaaaaaaacaatttgccaaatttaagtaataaaaaaattaaaaatcttgatacaaatcgaacaaagggaaataagattttatttacatttttatgaattaaccaggcattgaaatttatggatcaagggatttattaaagaaattgagaaattgataatatgtaaaatttggaatcaaatattattttttgataagaaaagtcctaatatgcattagttgataatatgtacagaatcggtgtgtgaat

SEQ ID NO: 75524 - DNA, 897 bp, Carica papaya
  Intron number 1 from transcript evm.model.supercontig_55.1 33 (locus evm.TU.supercontig_55.133) derived from phytozom e v7.0 (chr-ID supercontig_55; pos 838134 to 839030)
tactggaaggccggcaagcacaacgagagagccgtgtgagttgcatgtcctccctttactttatgttaatctatttcttatattttgttcgtgtcttgttttacgtcctcagattggttgctctgccaaaatggaggaaaagtgaataagtttggaacttcctttttagttgttattttaccttagccacaaagcagagttttgtatcggatatgtttagttatttactgccttaactttgaatatagcatgagttgttttgttagtcaagttagtatgttttcccgggaagataactggttttggttgcttcatgtgcggtttaccctgattcttggaaaagtcttcagtttatttagtgacacagacttaatgaatacttacttcaacaccattctaaaccatttggactttacttgtaaatgtgtactgcactttagtttatttggctgctcattttgttggattgctacatagccttctatctcttattccttgtttgggtgctggaaaatgataggtcattatatggcactaaaggaagttaagggaaaggaaaatgatttgcaaaaccaatgtgtggtcaaatgcctgttttaatgaggtttagactaatgtgagacttcatctgagaggatttcaactgtcagacattcgacagggttggaagaatggtaataggatcgaattaacagactgatcggggggcagtctgatgggctgtccgtgtggttggcaacttattttctttgctttaatataccaactttctactttctgtctgaaaagaaaacaaaaaaaggtttaagtctgctgttttcctgtctgagaagtcttttgtatggtttacaatgtccttcaggtttgatttatattttcggaagaatccttttggtg

SEQ ID NO: 75525 - DNA, 853 bp, Carica papaya
  Intron number 1 from transcript evm.model.supercontig_34.1 58 (locus evm.TU.supercontig_34.158) derived from phytozom e v7.0 (chr-ID supercontig_34; pos 1368358 to 1369210 reve rse strand)
ccttcaacttcacttcagattccaatcatcacgaggtaaaaatttccagatcaattccagggtccttattgtttttttgttttcaattttcttcaccttaggttaaatggggcttttctgtttttttttttaattctgggttttcaccatttttggtgcccgagaaaattctcttgatttttcgatttttatgtgaaagttgttaaaattaattaatgggttttctgtcttgatatatgttatcagtttcctctctttctcaccatgcatcgtttcctagaaaattctgtcaaagaaaattttctctgtctgttcttcatcatgtttggtttcctagaaaattctctcttttcgttttattgacgagaattgtcaaaattaatttgtgggtttttctgttttgatatcttttttcagtttcctctgtttttcacgatacttcctttcctagaaaattctcccaaataaaattttctctgttcttaatcatgtttggtttcgaagaaaattctccctaactttccttttaaagatgaaaattgtcaaaattaatatatgggtttttctgttttgagtcctttcttttcagaaagtcaatttaatttttctgcctccttaatttttttcttgttttggcaaaagtaatcttctactttcatgtcctttttcccctgttttctggaattgacaagaaatcaaatcactcctttactaaatttaatagtgttattttaacaaaaataataactattattatatatatatatatatatatatatacatttgaattaatttaagtgggaaattttcttttttaggattcaaagaaaaatcaagagagctctgcaagtaa

SEQ ID NO: 75526 - DNA, 345 bp, Carica papaya
  Intron number 1 from transcript evm.model.supercontig_184. 12 (locus evm.TU.supercontig_184.12) derived from phytozom e v7.0 (chr-ID supercontig_184; pos 105732 to 106076 rever se strand)
aacattttggttatagaaaaccccagttggcattggttagtaatcaaattattatctttcctggggtcattttgttttcttcaagcgattttgatcagtagttcaagttttagacttgctttttttcctcctttcaagatgcatgttgttgacgggtctctgatttttctgttcttcaccgatttccttgtagctcaattttagtttgtttttattttgtctctgtggtcaacttcgggattgatggcttatcttcttgttttttttttttttttcggaggatttactcaacttcgctttcttttcgaaggtgtttgctgatctattagtagatccacatcaact

SEQ ID NO: 75527 - DNA, 854 bp, Carica papaya
  Intron number 1 from transcript evm.model.supercontig_42.1 41 (locus evm.TU.supercontig_42.141) derived from phytozom e v7.0 (chr-ID supercontig_42; pos 1316129 to 1316982)
aaacggaaagagcagcttcagaggcatgtgagcagtttctctaattctattacacttgccagcttttttatttcaaatgtggaaagtaccatggtatcgatgtgcccgatctagtctatcatttaggataggcaattgttaaatctcttttggtggttgacttccaacatagttctatggggtattgagggcctgtgagattgttatttgaaaaataagcaaaaggagaaattaaattgattatattaaaaaaaataaccaaattgcatagggtgttatttttcattgcttgaaaattacatttttcccctttttgaggagagtgtgaaagttactttcaagcacctaataagtatcctgcttatatgttaccatagtaaatttaagcaaaacgctaaatgttatttataaacaccaaaaaaaatgtcatctctttttttttaaaaaaaaatacttcaaatagtcatatttaaagctaattacattatttgagaccaatccgttttttgcagtatttatccagcttaatcaagatgttgatgtcccttgatttatgcaattttgaattctttgttattattattttttgcatttgtcttataaatatggcatttaatctctctcttctaacaatagagattattgacgtagtagctttactattattgccaggatagttatctggtaggagttgctgtttattgtttgatttcagtcattgacaggtttctatttatctacttgttgttttatattttggtcttggtggttccccctcttttttattcccaaacttctgtcaccttacaaggctttaatatttacccattgttttgctttctactctagcgaaa

SEQ ID NO: 75528 - DNA, 939 bp, Carica papaya
  Intron number 4 from transcript evm.model.supercontig_26.1 22 (locus evm.TU.supercontig_26.122) derived from phytozom e v7.0 (chr-ID supercontig_26; pos 951370 to 952308 revers e strand)
tatcatcttctcttacggcattcaaaccagtacagtaccacactcaaaactctagattgtgtaaattaagcatgtatcgccatttaaattaactgctctatctctggtctcatgggttttacttcctggtttccatatgatgtgcctgagaccgccttgggaaaatcattttttgaaatttcttcaaatcgtcagcttgtgctaggagattggaatccagtcaatatgtcaatgtgggtgtggggcattgttttccagcccatttggttgctggaactttcgaagaagggattgagtaattttttttttcatttgatagattgcatctatccttaagtcgcatcattcttatctaacaattgaggggagatcgcgagctcaatgtgaagactgatttgaaactctggcctttcccctgacaccaatataccaacttagcttagtagacctgaataaagggtgtctgatcaattttcacttcattggatataccccccctttgtttttgcacaatccatctctaagaatgctgtattttatgcatcacaggattcaaggtacattatagaattgttaatgatttttcacttaattttttctttttcaagccttggaaggcttttaaattcaccttgcattgcttgattcaagagcaaagcatggtgggtcctgtcttagaatatttggttcatattggggtttaatttagagaaatggttagattctgcttctttacttggtaattaatgcatccatgtggtttcactggcttacatgcatctagctcttctttgggacacgtgctttctactctacgtgccccaactttctgtcaaaaccctcaactttctgtctcactctctctctctctccctctcctttcttctctttacattaaagtttaatttcttattctttggtatatctatttaaacagga

SEQ ID NO: 75529 - DNA, 459 bp, Carica papaya
  Intron number 1 from transcript evm.model.supercontig_131. 85 (locus evm.TU.supercontig_131.85) derived from phytozom e v7.0 (chr-ID supercontig_131; pos 677857 to 678315 rever se strand)
tttcaattcttgtcgctccctcagtttctccacaagtatatctaacaatgtcttctccaaaggtggtttctctctctctctctctctcggttcatgttctatctccttataatagtttattatgcggatttctgcataaatgcgtgaagtatctcagttctttgttgtcttcttgttgatttcacgggcaattaccatatttatgtagccggaaattggggcagagaactgttaatttgacgtttcattttccgggttcttgtagaaatttggagtcctaaacccaggattaagtctttatattatccgcatttgtttgggtggggttgagttggggaatgagcgatgttcattatggctcttatcaatttggtgtttgaaaatgaagagttcaaaattctagtggagcttgttgggaatttggattatgatcttttgtgaatttcaggcagcttatct

SEQ ID NO: 75530 - DNA, 670 bp, Carica papaya
  Intron number 1 from transcript evm.model.supercontig_3.99 (locus evm.TU.supercontig_3.99) derived from phytozome v7 .0 (chr-ID supercontig_3; pos 804787 to 805456)
tgcagcagagcttgcttttctctgatagccttaaggtattcctcactccgtagttaagtgctttgcgtcgattcatagctttgctagttggataacatcttcatttcagccttgtgttatttctgaaaatttgctgttaagttcttttgatggtcagaagtccataataggtaggatattagtatttcacattggtatttcttaaaggtttttatgggttgatgactgtatgtcattttgattctattgctcgaggtttcggattaggatctgtcttttaagttatttcatgcggttcttttttattctatttttcagtaaatcttacttgattttcagattagggcgtttatttcggagttagtttacagtctatgtttctgaagctatttgcttttggatgctaccatgcttatcttcatattattgagagtatttcacagtcaactcattcacttagcgatgtcttgaggccaagagtttagtttctttagcttcattatgcgatcatagttcttgcttgtgtgaccttggacactgatacaatcacacgaagtcttggcataaatgaagttttttaacaagatttcgggcatttaagtcgtcatgacatcgtattcttttggtatcttcaggacttgaagaatctcagaacacagttgtattcggc

SEQ ID NO: 75531 - DNA, 258 bp, Carica papaya
  Intron number 1 from transcript evm.model.supercontig_16.1 80 (locus evm.TU.supercontig_16.180) derived from phytozom e v7.0 (chr-ID supercontig_16; pos 2711515 to 2711772 reve rse strand)
aattttgtggctgagagttctttgattggggttaatcgcagagtttgtggatttgaatcgcgtttttcagagagcactttcatgttctgcttagaattcaaattctcaactccttgtgagtcttgttgtttggactattaaagttgctgattgaaattattatgtgtttctaattcttcttttttccttttgttttctgtgtgataaggattgataagatcttgaaagttggctccgcaaagacgatcgcagcgccac

SEQ ID NO: 75532 - DNA, 577 bp, Carica papaya
  Intron number 1 from transcript evm.model.supercontig_57.3 7 (locus evm.TU.supercontig_57.37) derived from phytozome v7.0 (chr-ID supercontig_57; pos 650319 to 650895 reverse strand)
aggcagaacacctcaactgaatctcaccaaagccagtacgttgtttctttaattgatgcacaatcaagacttttaattgcgatcaggtcatttaattaagttaactttgaacggcgacttgatttgtccttttctatgggttatatgactaggtctcctttgtgtgtagtgcatgaaaagattagtgaacatgttctaatggaatcatcttctcgtttagtttcttccgtattgtttgtgtgtttaagctacaagtattcttcctgtgttcttcaagccagtctaaattcaaactactaaaacaatataccaactattcaatttgaagaaagcttttttcccgctttcaggttaagaaagtgagtagtgattttaaatcatgttaaactctcgagagatcttatttcaatatgttaatttggtgggtagttattttgaattcaaagtcatattcagattcattgacccattaaatgagagacttgtttactcttctgagtttgttgcttgctagattctcctgatttcttttgttcctacaggctctgacgattcattagatcctcgggcccttact

SEQ ID NO: 75533 - DNA, 752 bp, Carica papaya
  Intron number 2 from transcript evm.model.supercontig_14.4 9 (locus evm.TU.supercontig_14.49) derived from phytozome v7.0 (chr-ID supercontig_14; pos 553011 to 553762 reverse strand)
ttttgattattgagaaagggaaacctctatcaaaggttattctttttttggctgattaagttcatgtatataaatgtataccaagttgatttgttttaagttctataaatttcttcttgcgttatgttaaaatctattctgttatattgtttaatttttacattttagattatttgattaagtaggattttgtgataattacatatttaacggataaacatactaaccgcagttacatttttaagttcatatgtataaatttgtatctctacgtctctattagagaaattatagaaacattgattgggtaaatattagtaaaggaatagagaggaaataaaaaaatttattaatagaatgagaattaagttgtgagtatgaaataaaaaatctagtgtaaaattcttaatcatttttcttttcttcctatttggattctggaggaatgtaagcattaaagctttgagagaaagagaggatgtcacttctactttctttacttgtataatttttatccaaacaaaagaaatgattaagaatattccttcctttccttttcctcatcttccatcaatcaaaatatattgttatttgaagattatataggattaacttggaattagaatgttatttcattaaaatttccatctcgtttgtactttatttatttctattttataaaattgaaatttgaatgaaactcaatatcactgtttcttatgggcttaggtaaagatttctgggggtggcag

SEQ ID NO: 75534 - DNA, 806 bp, Carica papaya
  Intron number 1 from transcript evm.model.supercontig_25.2 01 (locus evm.TU.supercontig_25.201) derived from phytozom e v7.0 (chr-ID supercontig_25; pos 2075869 to 2076674 reve rse strand)
cctttgctaggtacccttattgcccttctctttctttcgccacacccactttagttttcttttgaagcttggattttgaaactatatgctgctcgagatttttctcggggttcatttggtgtttctaagcttaaagcttcatgggttttgcaagaaaatgttaatgcttaattttttgcctggttgtcagttgtatttctctgtgggtttgcttttctgggtttgctaaactagacatgtcttttgacatggaaattgcccttctgtttccgctgcaaatttgagcctgatgacaaataaatttccaatatgcacaaaatcacacaaaataaagagtattgacatggtttggcaagtatgtataggttaaagggtaaaaccagaacaaactttccactattataaaatgagagtacatcactatagcggtataaatctttatatagacaaagtattagggttttcctcctgtatattctccatgatgtgcacgtaatatgtttcaggatatacacaaaatattccccttgatatacataaaatatttccaaaatcaagttatatcaacaaagcctaatctcatgattcgtttgtggcttttgttccttattttcagttccagttgcttttaagtaggtaggctagttgggtttatgtttctgcttatggttttcccctggatttcataatttcttatctaaattgatgccgaatttttctaatagcttatagaggtcttatagtgttttttttttcttttttctgggccagatattgctacctttcagccttccttgcaaaatata

SEQ ID NO: 75535 - DNA, 624 bp, Carica papaya
  Intron number 1 from transcript evm.model.supercontig_13.2 86 (locus evm.TU.supercontig_13.286) derived from phytozom e v7.0 (chr-ID supercontig_13; pos 2613026 to 2613649)
ggtacgcagttcttgtttcctttgatttttctattacatttcatgtttcaatgtcatctaaacccatccatttgcttggctagtgtcacagtcatttcataatccgtttacatactcgttacttacacaaatctgcaagattatgccgtaacacttcaattttttttttcatttaaaggtattttgagtttctgattcatgggtctatagttattgttttcttcattctttttttttttttaatatgaaatcgccttttgtcttaagtttagggaagaaggaactcaccatcttcagtgtcctgttatgttgctctctgtatattggtttcataccgtgtttatgattcaacaaattgactgatgggtattttagtttctttatattttgcaacccgtgattgcaatgcgtttactgtatgagttttatattcatcgttaggtttatctaagctgagaagaccatgatctagctagccatggatgtttggaaatgatacttttagtttctgtatattggaaccttctgaaaaaagtttttgtattttctttaatagcagaacttccataatgatgtttttggtattatataaaaatcaggggcttacaagtacgtgtctgagct

SEQ ID NO: 75536 - DNA, 922 bp, Carica papaya
  Intron number 2 from transcript evm.model.supercontig_13.2 86 (locus evm.TU.supercontig_13.286) derived from phytozom e v7.0 (chr-ID supercontig_13; pos 2613757 to 2614678)
acaaggctcgtcgcttgggttacaaggccaagcaggtaatttcatttgaaggttcttatttagctaactttgattccgagtcctgagatttacgtcatcaagtagcactttgttaacttaatctgtcatgatattttactgatgtggttgtagtttgtctattactaatcttgacatgcatgtgtaaattattcacatccttgtttgtttccattcttttcccctctaaactgaatggatcaaatggtgttatacaaggaggaagattataagttagtaatgtacatagaaatatttttaatttttaattttaatttttaatcaatatattttatcgcaaagacatatgttaataatgaagaaaacaaatgtgaattaatggagtttaaaatttttaaaatctacttgaggaacagcaatcaatgcgataacaaatacagaagttgtagtcaataaagtagggctcatcgaaacaacaacccatctgatgtaaagatgggtttcagtgctagttatccagttataaaagcgaaccataggctttctcttttgtgtctctaaaattacagtcgtaaaatcttgggttcccttaaccaagccactgcctgtgagatgccagctcatttttcgacaggaatgaggttagagcccttggctcatcccactgcttgggagcaaaaggttgaacaagtacctccatgaattttagatcagagtgctgttacttggattttgtgatgtaatttgccttcatggaatcttgtcgtatcactatcttttttctttgactactccaatgtatatttttcagttctaccaaacaagaatagaggaatctgttggttccgaatatttttattgctttgagcgaccaattattggactaatggactttggctttgttgacactccttacagggtt

SEQ ID NO: 75537 - DNA, 437 bp, Carica papaya
  Intron number 1 from transcript evm.model.supercontig_6.51 (locus evm.TU.supercontig_6.51) derived from phytozome v7 .0 (chr-ID supercontig_6; pos 319832 to 320268)
ggttagaaatcgaggttccttttgaacaaagaccggtatgtttatgtactactactgagtactggttagcactatcagcactttgacccagaaaatctccagcctccgatttcctgattcttgatattagagaggtgaaaagaacatgaagaactgtaaaatttagaaccaatagagcaaaatatatatatatatatatatatacacacacacacacacatatatatataaggaatcaatatattcagatggatttaggacattgattgtctagcaggaaaaatatgccagagtcgtctacacttggttacttatttggttcattaattcaaatataactgagtaaacgatatcacttgtaggaaatatgacacaatagttaacacttaagagttcttttgttcaatattaggtgaacgagtactcgtccctgaaag

SEQ ID NO: 75538 - DNA, 801 bp, Carica papaya
  Intron number 1 from transcript evm.model.supercontig_1213 .3 (locus evm.TU.supercontig_1213.3) derived from phytozom e v7.0 (chr-ID supercontig_1213; pos 14325 to 15125 revers e strand)
gatccgtacgtactcttatatacatatacatatatatatatatatatataaaataacacttagtattatataacaatgacaaattagtttgatataaagcatatacttttatttaatacttttttaagaaaaaaatatttgttaatctttcatttgcatgcaaatttgattgattggtttgtgaattgatggcatagaatatcatatacactatattgtagagaatatatatatatttatatacttatattataattttgtgaaatgttcacttgcttgcttaaattatgcggaggataatgcattttggtagtgaatcttagtttggttcatgtttggtgggtgggtgtaccttttggtgcaacttgcaagctatacctgtatacattgttaatagactgctatatatatatatatatatatgagtacaatagattctgttcttgaattataaataaatgaatcaattatttaaaagaattcagtagttaaaatctatatttatgtcttttattttattatttatttaattaatttttaatttattattacttatttttatatttaaatttcagtgatattaatttacagtttgtttaaaaactaatattttatatgttaatttttatggggattatataatatttcattaaatcaattatttaaaatccataccatttttttttttttttatcttcagcaaaaatctaatcaacttgtcttattatacatgtatagatatagcaattgtaactatttatttatttattttaattttgataaatttatagggaaaccaag

SEQ ID NO: 75539 - DNA, 957 bp, Carica papaya
  Intron number 1 from transcript evm.model.supercontig_11.1 09 (locus evm.TU.supercontig_11.109) derived from phytozom e v7.0 (chr-ID supercontig_11; pos 1175255 to 1176211 reve rse strand)
atccagattcttttgatatagtgactatggtgaaaatggaaaatcgtccgagtttatattacgagatggattactctaaaatgatcacaactatgtgttccaagaaaagcaaatcatatacaatggatgcgaaaagctcatacttcgaaagtagcatgacactttggagtaaacaagactgtacaaaatcttcaacgttatgtctactggccccggatgcaacaagatgcaataccttttgttaaagcgtgtgtgctatgtagcacttcaaagccatcaaatagaaagattggactgtacataccatcaccaattccaagtagactatgggaaagtatttctatggattttatgggaggtctaccaactactaaatgaggatataacaacctatatgtagtagtagatagattttcgaaaatgataatattaataccatgcaagaagaccatcacagtcagaaaaaacatcaaaaaatttcttcagacatgtctgaacacgttttgggttaccaagctctattgattcagatcgtgatagtcattttcttggatgaagatctttgtagcctatgatggatacgaagttgaacagaagtacagcttttcattctcaaactgatggtcaaactgaagttatcaaccggaccatcgtacatcttctacgagattataatgctcgacatcctaaaacttgggataagagcttaccatatctgcaatttgcatttaagcgagcaattcatagctctattaataagttgccatttgaagtttgtcttgggctacttaccacaaaacccatttgacattgagtttacacttgagtcaacatcaaaagaagtgcaggataagaacggttcagagaaggctcaaaagttcttacaatgaattcgacgggtctatggtgaagtagaaaagcaattgcagaaagctcaacaaaaagataaagctagac

SEQ ID NO: 75540 - DNA, 746 bp, Carica papaya
  Intron number 1 from transcript evm.model.supercontig_2.24 6 (locus evm.TU.supercontig_2.246) derived from phytozome v7.0 (chr-ID supercontig_2; pos 3239988 to 3240733)
cagtgttgggtgagagcttgaaagcacaggaattatcaagactgttgttacttcaatttattcaagacgtagcaaaagaggccagagtgggaataagacagatttggtatgacaaatttctctatttggttgagggaaaattaagatttcttataaaatgtgtcacaacgttacctttgggaaccgaaaggccttttttagtcttgctcttttttcatgttctccctgattcttggaagaaaggcctttttttctgttatattgaaattatgggaacagaaaataactgctattttagctattatgtatgagacagctaatactgtgaatacctttgaagacattctttcttttagtagtgactgtcattgagttttttattttgttctgcgtggatttacttggcttctgatcgaagttaatggttggctttattttgtgaaaatgataggcaataacagttattattgtttagctaagaatgcattgaagataatcttttgatttagttccatgcaattcaacaaaagaaatgaatttttagttttgttaggatcctgctagtgcatatgctttatggccatagcttgttatattcaattcctgctttctcagacttctgtcttaaacaaagctcctcattgtttattagatatttttgtgtccttagtagccaactaattgtattttgtccttgaaggtttatgaattgacaggtttggtaagttttctgtgcttcagagtat

SEQ ID NO: 75541 - DNA, 320 bp, Carica papaya
  Intron number 1 from transcript evm.model.supercontig_16.4 3 (locus evm.TU.supercontig_16.43) derived from phytozome v7.0 (chr-ID supercontig_16; pos 832808 to 833127)
gctattggattgttaatccaaaccattcaattaaatttattaataactgacatttattttcaattgattctagtcttaaaggcagctcaaaccacaatcaagaacgtgaatttaagacctagtcatcctagattgcatcaagcataattgtttaataatttggagaagtaccgaagtgtttgatgttattgtattgtgtttcctcttgtatgtctgccagtcttctttcaaaattttctctcaaaaaaatttcttcttgaactaatctcattttctactgaaaagaaaacttgcagacaaggttgcagcagctggatatt

SEQ ID NO: 75542 - DNA, 719 bp, Carica papaya
  Intron number 2 from transcript evm.model.supercontig_56.1 15 (locus evm.TU.supercontig_56.115) derived from phytozom e v7.0 (chr-ID supercontig_56; pos 1355047 to 1355765)
ggcgttttgtagcagctggagaggtacattttcgttttcttttatagttactgctttctcgtaagttttagaattccttttgccttttctagtgatttatttgttttctctcatttgggtttttatttcgacatggatgtaatgtatgggaatcatctccgaagattaagctgatgccaaatgtaccatcattttgtaatatctaacagtgtttgatttaaaatggttgttgactaccgtttcttttcgtttggctataaatttcccaaatttaggttggttactgtctcctggttggccctagtttatctggatgctctagttcatggatctcttgaaggtgcaatttgttacgtataagctacttcattctcatgcaattttcagtggatatgtttagggactcagatgagagtcgacttgttgacttggtgaagaatctggagagaattgtgttttatttggttagaaggatttatttgctgctattattaagaacacaatctaaataagagattgagtctattttctatatctttagggatccctatgccaagaaaaggagaactatgaatgggaaaattaactaaaaagaaagacttatgctaaaaaataactatgtaataaatatatttattctatgttatggcaatactaatgtgcatttttaacttggttttacagtcagggaatcaacctgcagtcttagtgtgggacta

SEQ ID NO: 75543 - DNA, 494 bp, Carica papaya
  Intron number 1 from transcript evm.model.supercontig_231. 3 (locus evm.TU.supercontig_231.3) derived from phytozome v7.0 (chr-ID supercontig_231; pos 16020 to 16513)
ccggccaggaggccccacgcggtgagctcatcaatgttagttggctagttttgatttgtgtcatttcctttttttttccttttttttatttctgaaaatgtgctgacatctctttatccaacatcttagtttagttgtaatttttctgttccttagactatgcatcagtgaaggaatggtgattgaggaaagaggaaaagaatcgatgttaagaaaaaatgatagaggattttttccctcaataattgttatatttctgtttggttaaattttgaagacaatgtgttgtttaaaaaatagtcattaatttgttttagaagaagaattatcattgtaatccctagattatattatgaaaatgcattaactatattgaatactacagtaatttttgttatagacaaatatgcatacaagtgaagtaggcatctgcaatttcgtgaaatgtctactgttatgttattggtaggttcactacactgcaagatttgctg

SEQ ID NO: 75544 - DNA, 949 bp, Carica papaya
  Intron number 2 from transcript evm.model.supercontig_231. 3 (locus evm.TU.supercontig_231.3) derived from phytozome v7.0 (chr-ID supercontig_231; pos 16564 to 17512)
cgtattggtgttggcaaggtatgatgttatgatgctgttaaactattagctcaatcaagtttcattggcaatatagtggcctgaaatctaataatatacaatcatattgaacaatgtttggacattctaatgctaaggcaagaggatcagtattttatgtattcctttgtaggtagaattcctcaacttgttattacttccttcttttagtatattttttcttttgataaaaaaaaaaagaaggatctttatttcagaaaaaaaaaaaaaggaaaggatctgtttttgacttcctgaatatttgaagaacattcttgtgtcctattgctacccctttgtcatgtgttagatatgattccacggaaaaggaaaatacaagcaaaattattcaacagaagtttcatgcttgggaagaagcagtggatgctgagtgcagcaatgtgtgaaacttcatctaggaaagagagatggactttgtcttgtgaagtcgtatatatgtgtgcttgcatgtggttctagctgcctcctagaggtcaagtagtaacaccttcatgattctgccaatttgttggctgttaatttggtacctgcaaagttttgaaaataaagtactttgtcgcttcaaattgtggcaagcaaatttattagtgggaatagtaacctacctgtattatctcataatcagaggccaataaaaataaataatatagcagttgtaatgaataacgcctgctgtataaagtttggttgacattttgaaatgtgattcagataccatatgcttaatgcttgtcctatgtgaaaacataataggacagctgttgttcagttataactcctcttgggcattcctatatctatgtattaacaatctgctggcaattgctctaattataatatctttctgtattcaggttaataagggagtggatcaagggattttgggggg

SEQ ID NO: 75545 - DNA, 904 bp, Carica papaya
  Intron number 4 from transcript evm.model.supercontig_1868 .1 (locus evm.TU.supercontig_1868.1) derived from phytozom e v7.0 (chr-ID supercontig_1868; pos 1599 to 2502)
tctacaagagagggagttcgtcacattcaatataggtaaaatggattcctcccctcctttaagttttttgcattatttgattggtggcgtaatgacatgaaccttgtcattttctgcctccaatgcaatcgtacaaaatttctgtctttacaattttcttcaactgttttacctttcaattccattaataattgcccttctccatctttattcccgaatgtgttcaactctacatgattttgggtatgatcatcagatccttatctgacatctagtttttattgttacatcttatggaaggtaaaactacaggtgatattgctttgtagttacatataatggaagataaaactagagatgtcatacccacatggtcatacagataggacctaagaaattttcttgagctgattttgcatttttcgtaatactctttatcttcattagcccaactggatgtgggatcatctcaattattcgggaaggtgtattctcatatgatgaagaatgctttccaagaatattcttagtgtaagagtcttgctagtatatgattatctttgtatcttattagcttgtgtcttgttgtctattgtattcttatttaataattctactcatactagattacgtaaacaccctataatgcacgagtggtttacagacgaggtatgtataaaaatgattggtattctctcgttgttgttgaattgaataattgtttttttctaactggatattttcatcctagatgaattcttgggtattttcttgaatcagcctaactttttaactttttttactaaactgttaaatcgacatataaatttgaattaaaccgtaaaaacagtatagcgggatttgtgggtatgactaacaattttaattttcatgacagtttgtg

SEQ ID NO: 75546 - DNA, 706 bp, Carica papaya
  Intron number 1 from transcript evm.model.supercontig_10.1 77 (locus evm.TU.supercontig_10.177) derived from phytozom e v7.0 (chr-ID supercontig_10; pos 2260469 to 2261174)
agagggattttggttgattggcttgtggaggttaatttagctttattatccttaagttctttaatttataaacatggacttggttatggattttaaagttattgataattgctcaggtttctcaagcttgatcactacagtatttttgagaaatcatttattatttaaatttttagtggagaaattattttattatctgaattttatatcacccaatgttttgccatgatgatgcaactattttattccataatcatttgctttacatgttttctttaaataataaatgttgacactttcttcatgagaatgcacaatgctttgtccttgccttagaactgtcatttagacatgcagttttgactttttactaactgttgcttctgttgttgtattttgaaattattaggatttatgtttatattaagtaaatggtgttggataaaagattgttaatagtttggacctgtttctctattattttaaagattattttttggctatgttacattgtttatgttgtgaaactttttatttatctgaattgtaattgtttttagcgttgaatcatctgaagagagatgcacttggtagtacaaaataatttatggttataattattttatgtgaagaccagtacaaattatcatcatatttcaatcttgatttaggtatcagaggagtatcagttggtggtagatactct

SEQ ID NO: 75547 - DNA, 604 bp, Carica papaya
  Intron number 3 from transcript evm.model.supercontig_49.3 (locus evm.TU.supercontig_49.3) derived from phytozome v7 .0 (chr-ID supercontig_49; pos 14065 to 14668)
gaaaactcaccaaaggcaattttgttgctcagttggtaaaatttgttgcctgtttcaaatcagttgtctttgttttctttctgggtctgcataaactgttaagcacagtggatatttgatatttcggatgataaacgagggatatgccaatttatgaagaaaggtctttctcttttttgggtaattttggcagagctgatgttcatactaacattgacatagttaactctgttactccttaactatattaactgagattttgcttgtgactaggtgtatatttttggtcttaatgcattttttattcaggttgtcagtccctagatttgattcctccagtttattttatgtttatatttggaaagagaaggaaaattcaattccttgtagcctttaagctctgccattctttaaactttttttttgctattgatacttcatttataatggagaatcctttgcgatgaagtctgaatttcacttggttattccttgatattatgtgttaattctacctaatgtgcatctgcaaaattttgatcttgttcactaacgaccagtggttcttcataacttcaatgctttcagattattgaacggttta

SEQ ID NO: 75548 - DNA, 718 bp, Carica papaya
  Intron number 1 from transcript evm.model.supercontig_36.4 5 (locus evm.TU.supercontig_36.45) derived from phytozome v7.0 (chr-ID supercontig_36; pos 371887 to 372604)
tcgatttgcaggcaagtatatctctatatttctttatccttctatgtgtttaaatgtatgtatgtatgcatgtgtgcgagtatgtataaattgaaatggatttgcttgggtttttctaggtgagggatattaccagcaatccagagtgggaaaaagcttaccagtatgagataccggttttggcaagagtagtttctgatggcactgaggtttgtgttattcggcttgccttcctctgttttgttttcttgttttttttttttttttttttgtggtgggtggttgttttaagctttttgtctaattgtgtcatgcttggttattgtttttaatgggaatttctttaatgttaggaagtattgcagttcagaaatccacattttgggaagactcccttggttggttttcagtctgcaactttgccattaaatacattggttgattttcagtccgtaactttgccattaaataccttggaatcacattcatcgagggggaagaagaacatatcttcgaatagtgttgaagcaagaatttattgaaagcatagcgagattgaatagttatcattatactaaaagaactcattggggagtgagatgataggtgaacctaaatatgttacatctaagtggcaaaaagctttgagaggtttcattttaaaatcttgttaaaatttcctttttttttctttgtggttttataccttgcagatatt

SEQ ID NO: 75549 - DNA, 594 bp, Carica papaya
  Intron number 2 from transcript evm.model.supercontig_43.1 52 (locus evm.TU.supercontig_43.152) derived from phytozom e v7.0 (chr-ID supercontig_43; pos 1855284 to 1855877 reve rse strand)
gctggtaatattgcattaattgctttcttccttttttcttttttcatggttgatttacacttttttttcttttttaatgttgatgaattagaatcacttgaagtcaaatatcattttttcctgccttttcatatgataagaacctaaaacattattaacaacctatctatttttactcctgtgctgctccttacattttaacaggaacgttaattggagttcactttgattactagtcatctgttaacaagtataatatttgctatttttcttccataaatattgtcgatattgttcaaaaagtgtattttgatttttccccttttatataaaagttaagtttattttgattctcttcccgggatgttgtcaatatggaagtcattgaaaaagcatgaaattttaccagggcatccatgttgttactataggttctagttagttaaagcttttggagatcattggtcattctcatggatttgaatatttgttctttttctgctatttatgtttttctgtatgatctttgaaccctggtggatttttgttttaaatacaggggttgtttgcagggttgcttgggaacctatcttt

SEQ ID NO: 75550 - DNA, 695 bp, Carica papaya
  Intron number 1 from transcript evm.model.supercontig_132. 18 (locus evm.TU.supercontig_132.18) derived from phytozom e v7.0 (chr-ID supercontig_132; pos 197529 to 198223)
atctcggcttctccgttgcccgacctccttcccaggtaccatctccctctaaactcaccagttccgaaatgtagttcttcaaatttagggtcttattctccataattttggaattcgtcaactgagttcattaatttgttgttatgctcgtattgggtgttatattttttttgggtgccttatgggtttctgttaatttctgagcaccctgattagggccatatgttcagtcatagaagaagaaaattacttaatttgcaggctagattgttacttgcttgcggcatttatcccaattcaaaaacaccagtatgatagggtaatttttgttttttaatttagtaactttgagattctagaggagggatttagtgataattggggaatctctgctgaacaataaatatttagtgttaaccaatgaagactagcggtgaagaagttgttaaatctttgctgaagcatttccaaatacacccattttctcaagttcattgtttgtgcggattcatacaagaaagatattgttttgttaatgaattttagggtttcatctggtacctggctgagaacatttacagtgtcttaaaatgaaccttttaacagaatctaagtcatatactttgaaatttctaccggattctttggcttctcttgtaggaagatctccaaaatttatcttctgcaacagggga

SEQ ID NO: 75551 - DNA, 312 bp, Carica papaya
  Intron number 1 from transcript evm.model.supercontig_27.1 85 (locus evm.TU.supercontig_27.185) derived from phytozom e v7.0 (chr-ID supercontig_27; pos 1903320 to 1903631 reve rse strand)
ccgtggcacagcttggtggtccagaccgtgagtctactttatccattagatccttaatccttacatttactgatattttcttttggacaagagttacttctcttttattctaaatttcttagccatagcattttgagagcaagattgtggaagtatacataaaagcatcaaagttgacagctttattcagtttcttgattgcgaagagttctcctgaataacagtaattcatgaaattttgtgtagcctaaaatattgaaccaagtttcttatttctctccaggggctacaccaaaaggtgtgctcagagtg

SEQ ID NO: 75552 - DNA, 927 bp, Carica papaya
  Intron number 2 from transcript evm.model.supercontig_26.4 1 (locus evm.TU.supercontig_26.41) derived from phytozome v7.0 (chr-ID supercontig_26; pos 403189 to 404115 reverse strand)
tggtaaattttcattgttgcagttaatttagtttcccgtttttcctttgatgtcaatctgtgttcagttgatactttaagttcgtagtatgccacatacctcgtccaatcatgtgcagcaggtattcaatgtagctgttattttgtcaatctaaggacttgaagttattttagctctggtctatgaaactgtttcctgttaggttgacatgggcatctttttaagaaagtggcctttatgtgggagacttccttcttaattatctgtttaggtgtatggagtacttaattcttgaacatataagtattttctgaacatactgggagacatatctcaattcaaccaatcagatattggtagaagtttctgttctgtggtcttcaataagttgttagagctgctttacatttctgtattttaggcatttatctttatatcactccttaacaaatgtaatttgctgaattttaggttttgcatcctattaccttgtcaattgaggtgatgggttttctttttattacattacctttgcgggcttgaatagttaattttttaccaccttattaagtgagctcaaaattgaagcctaaatcctttagtttaagagaatctagtaaagagaatcttgaacttaaaacaaagaacaaaacgggcatgcaataattttcttttatgttcttgtcaatttggacacgatagcttattctccttcaggttgtctctcctctttccttttctgatatgcattgtgagtctcggtttactagagtatagctgttgcttcaaacacatttttatagtaatcagtattttatttacagatcttaacatcttttgattctgtggtaaattatttgctgaacttcttctagtatgttgcataactacttgctgtcttctttttactttgatataggtaattcc

SEQ ID NO: 75553 - DNA, 750 bp, Carica papaya
  Intron number 1 from transcript evm.model.supercontig_25.7 2 (locus evm.TU.supercontig_25.72) derived from phytozome v7.0 (chr-ID supercontig_25; pos 842381 to 843130)
gcggaacggaagccagattgttcgtcaagtatgcttttctttttcttcttttttcttttcatgttctatttgaaatcgcagcaatttttgctatagatttgattttgtgagggctgtcgcataatattgtcttgtaatcatttgataggaaatgggccttgcataaaactgatctcgatttctcgttgatctttactaacaaagatacccgttattcggttacttgttttctggatttagttattgtaatattgcatctaggttcatcttgtggtcaatggctttgtagattcatgcagacgtatgtgaaatcattatcagagtagggtactcatttaggaggagatatttcttcttggacaacttcagcaatcatcttttcttgtttattttgatgtttgccggtttttcaaaaaaaaaaaaaaatttgttaatttgtttcttttagattgtcacccacttatttatccataagaggatattctattctttcccattttctctatatattcttttcaccctcgatgcaatattagttgttcataagtgtggaattttgttacaaaatctgatgcatgcagttttttagtgtgtatatatatagttcctcaaatatatatgtgtatatatatatatggcacattaaatatgtaattcctttccttgaaaagttcagtggtaatcttagatttatcttggacatgtataatcaaaacatgttgactatttattgctacatgaaagaaaaag

SEQ ID NO: 75554 - DNA, 593 bp, Carica papaya
  Intron number 1 from transcript evm.model.supercontig_59.4 3 (locus evm.TU.supercontig_59.43) derived from phytozome v7.0 (chr-ID supercontig_59; pos 471649 to 472241)
ttctgaggaggaaatctcttgttgcctccgggagtgttatgtggataaggcatcggggctgacagcttcaacatgaaatttttgcaagatttctggcctgtaattaaaaaggacgtggttgaaatgttcaatgaattccacaaaactggttcttttgtaaagtctctggactccacttttctggtcttgatccccaagaaagaaggcgctaataatgtcaaggactttagacccatcatcatggttggttgtgtatacaaacttatgtccaagattaagtcttggggcagattataggaaattgtcagaatgctttcattggtggaagacagattacatatgttattttgattgccaatgaagttgttgatgatatggctaacaacaagagggaaggtattctctataaacttgatatggagaaggtgtttgaccatgtttgttgagattttcttgattatatgctagacaaaaatggggtttggttggaggtggagaaagtggatcagatggtgtatttctaccactaatttgcagtggaggccttctgtttttaaggcttcaaggggcctaagataggcgatccgctctct

SEQ ID NO: 75555 - DNA, 977 bp, Carica papaya
  Intron number 1 from transcript evm.model.supercontig_161. 17 (locus evm.TU.supercontig_161.17) derived from phytozom e v7.0 (chr-ID supercontig_161; pos 217224 to 218200)
tgctcagtacttacatatatactcctctcttttcttttacatatacatatatatatatatatatatgtacgcacgaaatttcttttggtgaataatcttactcttgtaattgtaattgggcgccttcttcttcttcttatattttaattagcttctgtatactcagtcttggcaagcttatatatatatgactctatatgtatcggaccagttttatactgcaacttgcgatacgtaaataatatatttatacgggagatgtttcattagggtgatacaatgggatgatgtctgtttgatgataattggcatacgtatgattctatatattctctgttagaaattaagcagagagctgttgatataattgtacactccatgtatatattttcaagtctattaggaattagacctatagaaattaaagctaaattcggtaccttactatgtctctttggtttatttcttatttaatttctagttttggtaattgtaagagctctaatttgtataattagaatgtgatatttcctcttttctgtgattgatttttcccatctccatcatgagaattcaattttttatatcttatttagaaaaaaaattattaggtttttggaatacaaattaggtagaagatttcgtaaatgtgattaaacgttattcataccgtgtttaaatgccgggcttggcacaaattctaaccacattattaaaaatagtagaatatatagctacagaagtatataaatgattttcttgcttagttttgatcatattagatgttaaataattgattataggtttattttgaaactcgatcaacttgaactcgttgaaattgtgtggaatttaattccccaactatggtttagcactttattttgccttaccaagcaagtagaattgaatgatcacacaacccctcttgaattctcgtagggaattagccatctctgtcgacacgttggtacgag

SEQ ID NO: 75556 - DNA, 718 bp, Carica papaya
  Intron number 2 from transcript evm.model.supercontig_107. 27 (locus evm.TU.supercontig_107.27) derived from phytozom e v7.0 (chr-ID supercontig_107; pos 142360 to 143077)
ctgcctggagagagcgtgtagtgttgcggccgaaggtctgttctttctgctgattttatattctttgagatctggaactcattttctctctcgtggacttgttgtagttactgaatttagcatcgctctaaggttgtcagctgcagtcttttgtgcatttacaaaaattgattataaatgatttgttgcccattctttgtttaattgacaaaataatggaatggaaaatatgttatggagtttaacaactgactgacataaaccctatgttaaaaaataaaaataaaatatatccaaaaaaaaactgacaaaaaccccaatgaggtgtgacgaagtgtattctgtctctaacttccaaagcacagctcaaatagaacatcaggtttctgcctctttaaggttttacttgttgcttattttacctgtggtctttcttcaccaatattccatatccgataaacctgccagttctgaggcgtgcacaaattacgtccaaacaagtcattgtttgtagtcaccatgttaaattgtttaagtattgatgaccattccatttaattgtccctgactgttctaaatgtttctcagtatggatatgctgttagtttcctgttatttactgatgatcgttgtattttagctgttgcatttacactcaccaatgaattgacatatatttccagggtgcgggcacgaactttgtgtgaggtgtgcactt

SEQ ID NO: 75557 - DNA, 951 bp, Carica papaya
  Intron number 1 from transcript evm.model.supercontig_28.1 5 (locus evm.TU.supercontig_28.15) derived from phytozome v7.0 (chr-ID supercontig_28; pos 200234 to 201184)
cgttcttctctccaaatctcaacttccctctcaatgtaattttcttccccttcttttcttttttgaactttttacgttcgccgttgactttcttcttaatgttctttatgattatgtttcttctcttgattagaaatttactctgtgggatctctgtctgattatttaacacgtctccatcctattgattgatgtcctttctttacttccctttttcggatgcgcttttatttccggatttgctttgaatgaatctcgcacgtcaatatcgtataaaaagaaactgagggctaagctctgtcatttaccttcatctgattcctgttagtatcgaaaattggatttgcatttggtttgaaatcatgagtgacaacgcttgagtccgctcatctgagggtctatactacaatccgtaatccaataatccgatgctgaccgaggggttttatctgctgtctattcacgattctgcttcgtgtgtaaccatgagttatcctgtaactccttgcttggcgtggggtaatgatctaaggaatggaatagttttatacaaaagattaaaatattaagagttaagcaggcaatgttttgatcacttgacgtttatctgatttataattaataatcttcttatgtctgcagttgaatcattcagcttcttgtcttttcaatgttaaaaccagtatagtttgtcagatttcaatattcagggatgtctgattatgtcattactcattttagaagtcataatttgcataagaatgaataatattgaatgaaaaataaactctctgttccactttaatcctgaatgcgttacaatttgaaatcccactttacttgtttccatttaagattctttgatgtaacttctttttagccctcagttattgtcttttttaaaccttcttcacagacaaagtagatcgtccagtcagctcttgtatatat

SEQ ID NO: 75558 - DNA, 488 bp, Carica papaya
  Intron number 2 from transcript evm.model.supercontig_161. 10 (locus evm.TU.supercontig_161.10) derived from phytozom e v7.0 (chr-ID supercontig_161; pos 175217 to 175704 rever se strand)
acaaggcagtgactgagtacaaggaggctaaggcggtatgtgctcataaactactttggcttatgttgcaattttcctatgcaagtgccctaatagtaatatgttcttttcctaagagaagtacgaccgatgaaccataataatccattgatttaggctagatagctgaatgttattgaacaatcaatgggtaaaggttcaacatttattttcagcttattttgagtctgaaatttacgatagatcaaacctttgtacctagtttgtgatgccttgcagaagttggtagccagttgttttttatgttgtatgcgccctgggtttagcagtatattgaccggacccataacacctaccataggtttcattcgtcatatatttgatagttttttatcctcttttactaccaattgaactgtcaattctcaagatccttttctgtttgtcatgcagcttggcgtagatacagtcccagtccttgttggtcc

SEQ ID NO: 75559 - DNA, 854 bp, Carica papaya
  Intron number 1 from transcript evm.model.supercontig_343. 3 (locus evm.TU.supercontig_343.3) derived from phytozome v7.0 (chr-ID supercontig_343; pos 19457 to 20310 reverse s trand)
gcctacagcagctagccgaaacgcgccgtttcaaggtaacctatgatgaactatctgacccccaattttttagtttcccggaaaataaaaaggaatttgaatggtagtcctccatttcttctcggtttaacatttcttctgagcgatttcgttcttattagttagaaatgataattggttggtgctttcttggtggggtagcaagtacttcttactcgtgaaagaagtctactattttggattttaaattgttcgaattattttgaactgtaattcaaatgattttgatatttgaaataagtgctgcgtgctgcaaattttaccgtgtgtactctgctaaatttggaagttaagattcgtatttgttgcatgttatgtaattttgtttttttcttaagtcaagagccgtacttgaattgcattttagtaggagatacccatgacatgtcagccatttatgggataattactttatatgtaggttaattagattactgttggttagaaaaccagtaatcaatcaaataacttcacttgaaagtatgaagagtctgacagtcaattttccgttgtatcttactagaaaaatgactgtcatattgtgctttgaaaatatatagaaatgtaggtcctagaagatgattggaactgtaggttctaatttgagacacagaattacaagctaactttaagtaatttattcattttagatttggtttctctttttggaaggatagatgtcagatatggaaactcctcaatattgtgtatttatgttggcatatgaaaatattagtgtgttcttgtctacatggatgtctgacgcaatcacttattttgatattcacacaggc

SEQ ID NO: 75560 - DNA, 449 bp, Carica papaya
  Intron number 1 from transcript evm.model.supercontig_199. 21 (locus evm.TU.supercontig_199.21) derived from phytozom e v7.0 (chr-ID supercontig_199; pos 248484 to 248932)
gaggtgaaaagaaacataacgctaacttgtttgttttttctagctgcttgtttgcgattatactatcctggttttgaattaatgtggttaatagacttttatatgcatcctacatttttttcttctacttttaatttacacttttttttagtttgatttatgtggattgttgtttggttcttatgtttgattagttatgtatattcttgtttggtttgcttttgatattactgacaacagtgatagttttgtaatcctatgtttggttaacacttctgggaatatggtgaattatatgtgagttttttattaactgcttcaagcaaaactttcattgactttattatggggcttgtgtttaacttgatttgtggtggtggaaataaacagtttgtttaatttacatttggtaaattgcaataatggaggtttatttctttagggcctgg

SEQ ID NO: 75561 - DNA, 710 bp, Carica papaya
  Intron number 1 from transcript evm.model.supercontig_106. 85 (locus evm.TU.supercontig_106.85) derived from phytozom e v7.0 (chr-ID supercontig_106; pos 799332 to 800041)
agaagcaactccaggttgaaatttttattattatcttctttgcaactttcaattcggaagaacactctctgtttcttttgctactttcgttaatttatctccgagtatattttatatgcatgagactgaagaactctatttttttcccagaacttttcctgaaagaaaattgtgaagtttcgatttttaggagtacccctattccatcttcatgaaaatgtgaaatttgaatttgattatgggttgctgtttctgaatgtataagctttggatcctccttaatcttgttatctttgaaaattttatgtttgggggattatttgcattattggttggtgattaattgtgtacctatatttggtggaatcagaactttagggtttttgtgtcttactttttggattgtatggaacagtttctgcagataattgagttcatttatggattatgatgtaccagaatggattttctcattggaaatgactttttcttttcctttatatatatatacatgtgtgtgtgtgtgtgcttcttcttgtcggtcattaattgcaattagcaagcagaaacaattcttcaaagcactgaagggatgataattaactgccatgactctaatttaagagaataatcaggcaatttcatctaattgattacattttttattgacctttagtctattaacaggagttgacatcatcatctggatc

SEQ ID NO: 75562 - DNA, 475 bp, Carica papaya
  Intron number 3 from transcript evm.model.supercontig_127. 27 (locus evm.TU.supercontig_127.27) derived from phytozom e v7.0 (chr-ID supercontig_127; pos 459603 to 460077)
ccctgtcaaaaagaaggtggcctttgacattctttttaattaatatttttctctctatttaatttgtaattaattttttttcatgagaaaacattttattttttcttctattacatattgtagtagtaggaaaaacaaattcaaagaaatccgtgacatttactcaacattaaatgataaataatattttaatagctaatatttttataaaacattatgtgtttgagtcgggtaatgtctttttatatttattcattagaaaattgtattataatttatgcgaatgtgttaattaattaatgaaatgtatacaatttttattaaaaaaaaaagatataaaattaaattaatatttaataattaaaaaccagtagttgcactggacaatgcttgagaaatttatgaatattaattaaatttatatataatatgaattttaggtccaaagatccttagaggacagttcaattctgat

SEQ ID NO: 75563 - DNA, 906 bp, Carica papaya
  Intron number 2 from transcript evm.model.supercontig_29.8 7 (locus evm.TU.supercontig_29.87) derived from phytozome v7.0 (chr-ID supercontig_29; pos 836172 to 837077)
acattggtaggaagaaaaattttgagcaggttatttcctccattccctctttaatatcttctgctgtattatttctgggtgatttgagataagtaatttctgttacagttttccttgccatgcaaactaaaatttcatagaacaaaaagcaataaagagttaaaacacatctctgccatttggcgtggaggaggtcatgatttagaaacacattcacttttttgaaaaccaggtttggctttgccaaagatcatgttggtattgtttggtcaacttgaggtcctaaacctgatatctaggtgattttttttgctgatcttcaaattgcttttccagcatgattaagtttattaagacttcctactttcagttttgactttaacaagggatatttgttgatcatgtcctttggtgaaattccaaccaacttaggaaatgaatcgtatttctttaattaacctgcatgaaagcttttagtatgaaactgggttgagatgatgagatggccggccgggctgcagttgctcctagtaaaatgaagttcattctttcaatttgtacgccgcacatgcttagaccctcttgaatcctgatccaacaactatacattcagggaaacttaacctcaggtcatgcaaaaaatggtacatgaattatcatgtaccatgctactacaataaactatccatatacattaactgatgccggatctttttgcgtattcaactatggatatcgaagactatatttcccttttcatcataatatatgtagaatttgttagttcccatatatgcagttactttgtttagtaatcctccatggacaatgaaaatttaatgataggttattattatttggtggtaatcaggtgttggggatagataagagatactggttcatccc

SEQ ID NO: 75564 - DNA, 407 bp, Carica papaya
  Intron number 1 from transcript evm.model.supercontig_1.30 3 (locus evm.TU.supercontig_1.303) derived from phytozome v7.0 (chr-ID supercontig_1; pos 4178926 to 4179332)
agacggtagctacggtggacccgaaatccatcgaggtaatctagtttactttatcagctttttcattactgtttttgattgtctagccgaagttacgccaatgcttttttgttacaataaattttcctttggtggaggatttgttactttgtttgtggagatgattgtagttggagcatattctgctataattttcgacttaggtgaatagcattaacttccacgaaaattcctctgtttagtttatggctcgcagaggattgaactctattcatattttttcttgcataaaaaacacttttctttctcagatctaattgcatttctcatttttttggcagtttttggatgacaagtttagcgatgtaattgatctttatttcccttttcttttccccagaatcgat

SEQ ID NO: 75565 - DNA, 567 bp, Carica papaya
  Intron number 1 from transcript evm.model.supercontig_25.1 17 (locus evm.TU.supercontig_25.117) derived from phytozom e v7.0 (chr-ID supercontig_25; pos 1174713 to 1175279)
tttaagagaaggcagctgctcaaggtgaaagaccggtatgaaacgtgctctaactgaattcctcagttaaagtctcaacaagtcttttcgccaatgttcttgtacctagagggtttctctcaaggtgcgcggtttattggaagaaaatttttttgatgaggattttaatagagttgggggctcattggcaatccgattcctattctttaacgaggatgagtggcgccatcacgattgattggagtaaagatgtctccattttaagttacagttcctctgtaaatggtaattattgatgacagtttctgatattttattttcttggcttttttctttcctcggggtctcatctatatctcttacaattcaaagtagaagaaaagcttttgcgtcttgcgtcattctttctttaccattttcatctaacctgtgtgaatgttgtgaaaccatggaaggattacaatgaccatatctagttcttcacgtgtggtaaaattgactcctgattcgttctgtaagatttgtgttgtttgattttatattgctcttgccagcttgagagaaaca

SEQ ID NO: 75566 - DNA, 372 bp, Carica papaya
  Intron number 2 from transcript evm.model.supercontig_545. 3 (locus evm.TU.supercontig_545.3) derived from phytozome v7.0 (chr-ID supercontig_545; pos 27124 to 27495 reverse s trand)
cggcagcagctgcaaactgtaaatgtaggttctcttactcttcttctgtttataattatgtgcaacaaattaaaaattcaacttttttccttatatagttatgtatgcaacacgcaattaagtcccattttgtgtagttgagtagaagtttagtactttataccagtcttatctccccttgtttatgcaattcaattctcgcatacttttagtgggtatttataacaacttcctttttttgtttcatgagagatcattatggtagctgcttgaattggaagatggttaagtagttttcaatctgtatgggtgttttttaaggaaatttatgagattttatttgattgtttcttcaggcatcagcagcaactg

SEQ ID NO: 75567 - DNA, 637 bp, Carica papaya
  Intron number 2 from transcript evm.model.supercontig_524. 3 (locus evm.TU.supercontig_524.3) derived from phytozome v7.0 (chr-ID supercontig_524; pos 26932 to 27568 reverse s trand)
ggaaattattcattcagcccttgagggtttcagtaataatatgccttttttcttttaatttgtcctgttaacataaaactaagctgtgatttgctttcatttaagatttgtttttggtttttttctctctttttaatggagaaattgctaagtagatggaatgttatacgtcataggcttctccttttgcatatcaaatgcactctaggggcagtgagagactcgagcatgattttaatccattatttctgccacttcctaatattttcagagaagtcaaagatcatttctcatgtgcagtttagcaacaatactctctttttaattaaaaggaataaaccgataaaaagtgatggtaggacagtagactgaattcaagcagatttttgaggaactttgaggactgacattagccaaggataggaattaacaagttgaatgtaactactttaccatataaaatttcagtatattagagtatgaacatgtcttcaggatgttcttggcatccttttgatattagcgatcggataaacagataaaatgcttggtctaaacggcatggctaagaaaatttctttcttcggttgaatctattgcaggaactgcatttgcatacggacagactagcagtgga

SEQ ID NO: 75568 - DNA, 250 bp, Carica papaya
  Intron number 1 from transcript evm.model.supercontig_524. 3 (locus evm.TU.supercontig_524.3) derived from phytozome v7.0 (chr-ID supercontig_524; pos 27592 to 27841 reverse s trand)
tggaactcctatctccggcgtttcttacgcatttggtatataattatcatctccatggccctcatatttgattttcttccgcttcatcttcctatcttcgtatttttttgcttctgtttccttcccaagttctttttggaatttgagatttgatttgatttgacttggtattgttttgtaaagaattgaataatttcactcggttcttttggcagatcacatttttgacgagacttgtactaattccaga

SEQ ID NO: 75569 - DNA, 1041 bp, Carica papaya
  Intron number 1 from transcript evm.model.supercontig_39.8 0 (locus evm.TU.supercontig_39.80) derived from phytozome v7.0 (chr-ID supercontig_39; pos 1638067 to 1639107)
gtcgtcttatcatagattttgcaggtaaagataataaagctgctattactttctgttctttttttttttttttttttcctttctataacacctccaaatagatggaattaggttgtctacggaagaaatgagcgattaaattcctttcttagttgaattctatgaggagtttatcagtttttcttactttgattaggaacttgtaaaataaagttttatgtacttttggttctgcatttctagtcttgcgtatttcgagtatgtttttatttttccatagttacttgtctcttaaatcagtttagttcatttttaaatttcactaatttggtactagtttgaaatgtatgattttcaattttgaatttaacttagaattcatttggaattgagtttttatattcgctaaaattctgaataaaaagaagctaagatttaaaaattaatcccataattttattgaaactcacagttccaaacactctctaaagttaatattggaagattaagtggtgcttgattgttgttgcttacttatgatgaaagctttaaggattcttggcttatgcattcataaattagttggggtctttccaatttagttttgtgaaagctattttggaggcaacaactagtttattaaattaggaaaaaggatttgtttgttttttagaatgatcataaacattcttcctggaaagttccatgtctgttagccattcaatcaaaaaagaagatcaaatggaagggaacttaaaatatagtaggaacttatgggatggctttctctctctttcactagctggtcatgtctaggtgacataaatgttaacaacaagaaaagataaagaagctaccatcctaatcttgctgcagtaaataagttgccaaaactctgtcttttgtaaaggagcaaccctaatttttgtttgttacaacaattgtattcatgtgtattttatacatgtatagatacataaacattttcattggcttttccatgcagctgagaaccttggtttaccatatctgagtccatac

SEQ ID NO: 75570 - DNA, 658 bp, Carica papaya
  Intron number 1 from transcript evm.model.supercontig_21.1 55 (locus evm.TU.supercontig_21.155) derived from phytozom e v7.0 (chr-ID supercontig_21; pos 1586135 to 1586792 reve rse strand)
tcgtcgccgcctccacaactgttaagctccctcaggtactgtttacgggaaaccaaacccttaatctgccgtctgtttttttttttttcatttttaatcaagttcttggtgatctgcctactgttacgagcaaaaacatgttagatctcgcttggtaatctggagatttcggtgtaatttttgtttgattatattgaaatggaaaaggactacgattcctcgtgagtacaatgttcttagctgattataggccaaattttcttgccttgaattcgtttggagatgacattgcaactagatcattcgatggagcgtgattagcattttcctgcataagtttctgggattttgacttcagaaaagtgcttcttgcttagtagctatttgaaaaatgttccaggcactaccaaacgaggagcagatttaaaatttctggcggagacttagggacatctctgttttcgtttgcacaagttgaattattctcttgctacgcctgattaatttttcttcatgacttcactttgtttaggattaggaaagtttggtcgagggttttgatggaatctgttttataggactttcactctgttatgctgagtatttttaatatataattgcagatattaaaaattttgaagcatagaagtgtaagagg

SEQ ID NO: 75571 - DNA, 916 bp, Carica papaya
  Intron number 2 from transcript evm.model.supercontig_44.2 4 (locus evm.TU.supercontig_44.24) derived from phytozome v7.0 (chr-ID supercontig_44; pos 225540 to 226455)
tgaaggattcacctaacaaggtatgcacgggaagaagtatgctttgtcttttcttaataaaaatggcaagaagcatatattacagtataaagtaagtgtagttagcccttgattacgataattggcttaccctgtatatgattaattgactaaaattcttatatctaaagttttttttttttaaataaaaagtgtataaatatattaacatggtaccaaacaaccgggagaaatatattaacatggtaccaaacaatcaggagtatcgcccctatacagaaagttttacaatgtagttagtgagtcaatgacatacccaaaatccacatcactaatcatgttatggcctaacaataaaaactcaaaataatgcatacacctctttcaatctatacaaatcagttggtttaccctcaaaagctttagaatttatttccttccatcgaatcaaagacagagataatggaatgatatatttcaagtttttatctaattgtatctcttcccaagcccacaattcctccctaatagatccagccatcacccaactaacgccaatcatactataaatagcactccacaacccaaaagccagcggacaccacaataaaatatgcctgcaactttccgcatcagccatacacaaataacatcggttgggaatgaccagcccccttgcaattaaattgtcaattgtcaaaatgtattctctacttgtttcccatgcaaaaatgacaatttgattcctctcaagcacgattgtggccaacaacccctctgttttttcaataagctgttgtaagaaccttcatattactctcggatgcagctttaatgtcaaaaagacataaatgcttgatctagttgtccaatgcatttgatgaaagctcttgcggagtgttcctgttcctgtgag

SEQ ID NO: 75572 - DNA, 506 bp, Carica papaya
  Intron number 1 from transcript evm.model.supercontig_156. 10 (locus evm.TU.supercontig_156.10) derived from phytozom e v7.0 (chr-ID supercontig_156; pos 236331 to 236836 rever se strand)
acaagcttattacttagctcctctttcctttcccagtaagcttcctacttatgttatccttttctttccaatgccaatacaccttataataacattttccttcttcgtgatagagtgcagatcgattatgcaattttttggttgttgctgcaaccacttcttctttgaacactagagcttcttccatcactttttggaaaccagaatttaattaacctttagtaaggataatagcgatgtttttatacttcaaatgggttttctacattgttaaaaaataatcaaaatatgcatgtacgaattgctttttttttaatgtaaaattatcaaattcttgttgatgtttttcttggattcgatttaaaaatttgattgttatgtttatgcatgtttaagtgtgtatttggagagatgaaaatgcatatgagtaatcgagacaagtcaaaaagagaaaaaaaatggggcatcaaggtgttgaatataggttgtagcacaggcaccactac

SEQ ID NO: 75573 - DNA, 845 bp, Carica papaya
  Intron number 2 from transcript evm.model.supercontig_6.18 6 (locus evm.TU.supercontig_6.186) derived from phytozome v7.0 (chr-ID supercontig_6; pos 1501737 to 1502581 reverse strand)
gtaaacttctactccaaccgaggagcactgaggaggtctacttattcttttcccggaatttctgctcttcttttttttgtttatctattgcattctacgtgagtttcaatttattcttgcaaacatgagatggatgggattctgagcttgatgatgcatgcatgtttggtgtcaaaggtctacatccttagactttgatgattaaaaaccgaagcttgtgctagtagttgctcatgtagattcacaaggtttcacatgtatctataaaagttgaaactaattccttttatttcacttggcaaatcaccttgaaggtgtaaagtcgtgcatgataaagttgacccttggtgttgaggtttcttaggaagttccaagttcagataatttgttatagcacctctctttttccccataaatcacctgaaccatcaatgatgtgattacttcaacaatcaccagagtcttggtgacagaatgcccacatggatattttccctgtcttcaatatttgtgcaatgttaaaaacaaatgagatgtttcacctgaaattccttaccattttttcgatcacagttcttgggtctatgatggacagcttgcatatcaaacaatcacaatcatgctgtttcatgttggtaatatattacgtcgtcaattcactaggttaaactgtttgccttactgcctgtcaactaaatgcgcttcttatctctgtgactagatcatcgtggtctctttttccccaataacatttaacatgcactgcctattactgagtctactgtttgcattcttgtccattttcttttgcaggtctctcagattcttaaatactgcaactctag

SEQ ID NO: 75574 - DNA, 519 bp, Carica papaya
  Intron number 1 from transcript evm.model.supercontig_6.18 6 (locus evm.TU.supercontig_6.186) derived from phytozome v7.0 (chr-ID supercontig_6; pos 1502848 to 1503366 reverse strand)
taattctgagaattcaatttctcgatcgggttcaggtgtttctttttctccacctctgacttttttgtttgacttgtgtgtgtggatgcgagtgaatattgtcgtgcaggagggtttgatgtgataaagttaagcaggcaatggagatcataaatttgagtgtttctatctgatagttcgatacaatttcctgtttagtttgtgagaaaacgctatcaattttatcttagcgcaagaagagagctgaaatcggttgtaagatataagtttatgtgcattcttaatatctgatgcttacttcacccaagaaaatgagtatctatatctctaactgctatctttttgttttgtggatttctgcgcttttctgttcagtcgtaaaagtggttctcctctttgataaaaggaaacgaattataatgaaattttgacagtactttcttatatttaatcaaaatctctggttttaatatctggtttttggcattactcagagcgggactgcaaaactctccaacc

SEQ ID NO: 75575 - DNA, 1009 bp, Carica papaya
  Intron number 2 from transcript evm.model.supercontig_4.29 (locus evm.TU.supercontig_4.29) derived from phytozome v7 .0 (chr-ID supercontig_4; pos 963040 to 964048 reverse str and)
atcccaccacccttaatcgccaggtaactattggacaaccttctcagttcggcttactgttctgaccgtggcttcaatactctttaaaatttccttttaatgattgttttcttttccctgtttcatgtgtaaaatttactaaattttataatatatcaacatgctataacgtgtcgaggatgattttcagaatagctattcatgttattagaaaaatatataaggattagagatattcagggagactgtctggtgagcctcgcggtcgattagttggaggctaatctacgtgtaaaaatatgtaaaccagtttgggtaaggatgctcgagtttttatctgcgtttgcagtctgataattaagttaatatttagaaacgatggaaatatctgaagaatggttcaatgctgatgcatattcttgtggcggttcatagtccatatataaacttatttctgaatgctcgctcattaagggtttgatagtggagactaatttgagactaaaatagaacataaatgaaattgtgtattaatcaaagatcatgtcaagggtttggattagtagactttccatgcaaaggctgtctgagcttgcacatttgttgctgggttatttttcaatactttggtcattcaattttgttgtttcataaggaaattgaatgttgtctttgatgtgtgaaaaggatgttgttaggagaagtaagctgtatcagggatgtgggaatttatgggatagagatgatgactttctgtctgttgatgggaaacgaagtcccaatgctgggataccttgcttgataaggactagaattttgttatctcggagtagtttcaatgtaagctttgaatgtgatcatgtgtttggttcaagactttcttttttaaatattaaatgattagttcaagacttgatttgcacatgcacacaagagaaaagctattaacgttgagattttgtttcatttgtcagggtggagatataggggcacaatacagatcgggagt

SEQ ID NO: 75576 - DNA, 497 bp, Carica papaya
  Intron number 3 from transcript evm.model.supercontig_272. 2 (locus evm.TU.supercontig_272.2) derived from phytozome v7.0 (chr-ID supercontig_272; pos 8308 to 8804 reverse str and)
gtggtgggaagtcgtggtcttggtccttttcaaaggtccagttcctcttgtttaagtagatgcttggtcttttgttactgctgatagtctcacgtatttgctttgctgatgaaattttctgttgtttttccttttgtcttcttattattaaaagttcactggtgaattgggcattttatttatatctttgagatactttattttgctacaaagcttttgcgagcaattgtgtgcctttgagtgggagggaagtaactaataagctgttagccctggggggcagtaatttatataaatggaagaatgacaaaagcctgtttttttctttcaacataagatgttatcggaaacattgttattggaactagtgcatcataattgtgcccgtgctatttgtaattgaaaattttgctttctgtgtactgagagctattgcttccgcaattaacactgtgtactttggcagagtttttgttggaactgtaagtgaattctgc

SEQ ID NO: 75577 - DNA, 366 bp, Carica papaya
  Intron number 2 from transcript evm.model.supercontig_272. 2 (locus evm.TU.supercontig_272.2) derived from phytozome v7.0 (chr-ID supercontig_272; pos 8875 to 9240 reverse str and)
actttaaagatctcacaaggagctttgaagaaacagtttttaagtcttcaaatcaaagagagaaaaagaataggcttctgccatcactgtttcagccttaaaatgccctgaagttcaccttttaggattatttaatcaccaagaacttccttggtgagggaaactgtgtgtttgacagaaccagccaaaagaacacacaggacagacacttagaaagtaggcctctctctttccctctatagacactttaaacgtgtcaaacctatagatcatgatatgtgatttgctttgtggagaagctaggcatttgcatcacaagacatagtttatgtttttgttggcatgattgtaggttgcctgtgaagc

SEQ ID NO: 75578 - DNA, 706 bp, Carica papaya
  Intron number 1 from transcript evm.model.supercontig_209. 9 (locus evm.TU.supercontig_209.9) derived from phytozome v7.0 (chr-ID supercontig_209; pos 45683 to 46388 reverse s trand)
aaagatcctgttcgagctctttattctggtgagatcggtttatctctgtatttatatataaaaataacataaattttgattttagataaattttattaacttaaacatgattcgtttataaaatttgacttaaaaagtaactcagtgttattttcgttttgttttatatattttaaaaataatatgtactgagattaaattatcatctatgaatatttttaaaaaaatattattgtaatactatatctaattttcaatattaagtttttaaaattaaattggtaagtcctttctaacataaaaagtatgttaattttttaaactacataatccaaatttatttattaaatataagctgtgtaaatatatatatatatagatttataataaccatggtggaattgtaaccgagttatatagatagcagacacatgatactacagaactagcttttatttgttctgtttttcttgtcaaaatcaataagctttgaaattcagtaatcaagttttcttttttcttttccaacattgaagtagataaaacacaacattccataatatttgattaatttggtaaatcacaaaaagacttgcaaaaatagatttaatcacatatttttttgaaatataatgaagtattatttagagttaatcacatacatacaattaatttattaatgcagcaagaactctaatcaagaagc

SEQ ID NO: 75579 - DNA, 301 bp, Carica papaya
  Intron number 1 from transcript evm.model.supercontig_14.1 41 (locus evm.TU.supercontig_14.141) derived from phytozom e v7.0 (chr-ID supercontig_14; pos 1690747 to 1691047 reve rse strand)
tctctgcccaatttccacttctctcttccaaggtctaccctttttttttttttttttttttttttttttttgttttcacatactatgattgtaaaacagataaaatatatgggtttattctgtttcaagaataataaaataacagaaaaaggtttctggggtcatgggtttttgtagctgaatgtgaatgaaaaagattgttgctttattttatttcttatcatcgttattcttttgattaaactattattagtttctttacgcaggtggattggactgttccagtgcggaaatattcaga

SEQ ID NO: 75580 - DNA, 729 bp, Carica papaya
  Intron number 1 from transcript evm.model.supercontig_20.3 3 (locus evm.TU.supercontig_20.33) derived from phytozome v7.0 (chr-ID supercontig_20; pos 364995 to 365723)
tcagacacgcatagatctgatttcttctcccgctggtcagccttctggtcagacgcgcgcaaatctcctttcttcccttctctatctcatatttgactttgtagggtagtgataagagtagattttgataaatggatactaatctagcctattgtactattttagagtttgaatacaatcctgaaattaaaactctaaaataattttatctgcatatgatataatgtcggtttttagaaaaataataataattttatttatcacattctagattattacacttaagatatttatcaaatttctaatttacagatagaaaaattcttattttactagaattctaattatatgagattattattttcacatagttttaattacataatattaattaattaaataaaaaattaaaataataaaatatgatagtaaacacatttatataagttttcatctaataaattctaattgaatacaaagactagactttaattgaaactctaaaaaaaatctatcattagaactaaaggactttaataaaataatactttagcatgatcttaatcttaaaataataattaattaatcataagaataaaacttaacattaaaatactaattaaatattaataaaatatttaactagataattctcctctcttttaccataatttccatgtgttttatttcttcatgtagactccttagaaaatcagccatcaaaaacac

SEQ ID NO: 75581 - DNA, 731 bp, Carica papaya
  Intron number 1 from transcript evm.model.supercontig_27.2 50 (locus evm.TU.supercontig_27.250) derived from phytozom e v7.0 (chr-ID supercontig_27; pos 2350771 to 2351501)
gggaatttccactccgacgaggacccaacgcaaaggtatgttttctttgatgagttcttccgtcattgcagttcatttttctattttaacctttgaatttgagcctccttttgccgatgattctggtttgctggggtgagttttgactgtttcatctttgaatagtttgtatttgtggattgttgagcaggagcagaaatgtggcttactgcatgtccgttaatgaaatatctggggcattttgaaatggatttatgggtaattaggcgtaatggggattagattcttaaataaaagttctttgcttgggcattctgaaatgggttttcagcttgggttcatttgaatgttccatattgttgattgagttgcttgacttctagattaggtattttaccattggggttatctgtgaatctgttttgctacagtgagcatggagattttgctgagtactttctgttcatttcaaactaattttatttgtcagattgttattcaaagaagaaaaaattctttatttgtcaatattccggtctctatgtcccttccagtcattgagctcaatttatcgcctattctgtgatgatatagtgtttttctccaactacatagatttgatgtttttcttgtttttctgtggaaagacactctgttttgtttcctttactcatcaatttagcttcacctgaatgcatgttttaattgatgcagatcaaggagaaagaaga

SEQ ID NO: 75582 - DNA, 849 bp, Carica papaya
  Intron number 1 from transcript evm.model.supercontig_106. 113 (locus evm.TU.supercontig_106.113) derived from phytoz ome v7.0 (chr-ID supercontig_106; pos 932208 to 933056)
gggcggcgtcgcatccgaaattctccagcttaacggtactcctaaatcctaatccattttgcgtttattttttcgcttctggctttatttacttatttaacttctggatttgattttttcttcagtggccggatatgaaacttaaaaaatgtatataaatgggtattttttaacctgtcttttctgaaaaataaaaatgcagttataccgctggttcatactctgtagtagtattggttttttttttttttttcctttacatgggagatgtggttggtttctgagaaaacagaagggaaaatggtttgtttatatatatatatattatgaatatatataatattacattttctcctttgtttattttttttcctctttccttatatattaaaatatgtccattgggttctaaatttctttctgcttcccaatctttggctttacagttaagagttatcatcttcgaagttatttacgtgaatttgtgaatataatttggagcatttttggtggaggagaagcccacgaaagagcatggtaaaaaataaaaaacttcatgtttgaggttaaaacgatattatggaacttcctctgaactggggtagatattttattaatttatggtggtgctcttcttttttgtttttttgggtggaatcctcatggtttactataccaaattttcgcaattttgttaccctctgtttccccttttcttccttttcttttggcaattatgtagagtgcataaatatcagttggactttagcagcactggaaaagataattgttctcttattttattttattgtagaagatacactttggactggcactccggggaattac

SEQ ID NO: 75583 - DNA, 856 bp, Carica papaya
  Intron number 1 from transcript evm.model.supercontig_228. 9 (locus evm.TU.supercontig_228.9) derived from phytozome v7.0 (chr-ID supercontig_228; pos 38448 to 39303)
aacataacaagaaggaggtttgttttctttttttttttttttcttttgttcttttttgttttttaattttggactgatttgggatgattaaaagaaaagatttatctgcaaaacatttttgtcatgaaattttttaaagttttttgtaaatttaatctcatcattatctattcataacacatcgttttcaatgttttttttttttttttcatcttctctgttcatttaccaaattttagtaaaatctttttttagagacaatgatttttttttttttttcaattccagagagcactaattttccgacctgtgatcatgttgtgcctccctatttctttcttttttttttttgcatttattttgtgtttttgaattattttcataatctacgttagaggtttgtatgtgaggaagaagaacgtcaattaacaaaaaaaattatttcagtagggataataaacaaagtgaagaaacacaagggagatggtgaaactgcaactctttgtgactagtaaagtgaacgaagggtaatacggtcataatcaaaccaaatgtggtgataagaaacatatatcgttaatgtcatttgcttgctcttttgtgcctttttctggatcaatatacgtttttgatgtctaaatgaaaatgtctcttcaaccgatcaaatcaacaatgaacatactggaaaagtgaataaccattacagggtgcacgtacctaaacccgagtctgagttgcattgaaataatagttttattgtcacctcgctttttcccctcgttctttcattttattttgactaattttggttacataaacaaaaactgctccctaacataaagtttttatttgaaga

SEQ ID NO: 75584 - DNA, 345 bp, Carica papaya
  Intron number 1 from transcript evm.model.supercontig_19.2 53 (locus evm.TU.supercontig_19.253) derived from phytozom e v7.0 (chr-ID supercontig_19; pos 1928526 to 1928870)
ggttcaaagatttcaggttagttttctctctctctctctctctctctctcttgtttttcctgttttacctttcctagctctgtttggttggtgggaaaacgggggaaaagacgggatttttgaatattacggcttcaaagtgactgagaatactgtttgatctttgtttaataaactaaagaagagaaaaaaatgactttcaaaattcatcaattgtcttattttttgtttctaattcctgattagcgaattttaaacttaaaacccattaatttgaaatttaaaccttctttacttaatctttctttgggttcttcttttttttgaatttgaatagagattgaa

SEQ ID NO: 75585 - DNA, 869 bp, Carica papaya
  Intron number 1 from transcript evm.model.supercontig_139. 22 (locus evm.TU.supercontig_139.22) derived from phytozom e v7.0 (chr-ID supercontig_139; pos 134978 to 135846 rever se strand)
atcaaacgcaacctagttcaggttctttttttttttttttattttgataagattttgaaaatttttgaaactacatgcgttgtatttggtctttaatttcattttccttttctcgagctttccctcatttcttatgggttgttctctgtgatatttgttctttcccagattgataaagatggataaattgatttttgttgggttattttttttttctctctttagattaaaaaataaagtcgccttttttcttttctgaaatttctttattcgtgtttattttttcctcagtctattttgggttagttttttgttggtttttgattcttgatagttttctttattgaaatttacatttttccattttctatgcattcacttaatgttctgttgtttgggttctctccctgtctctcgctctcttcagtttaattttaggtcaagcggtgttgatcttcatcttctttctgagtaagttattagagaactggcagctttgattgtgtgaaatggtagtcaaattacaccaatcattaatcttcctacttgattagacagtatagttccctatgtagtaatgcttgttttggtgtttatatagctattatgccgtgtttgtttgcatgatgagaaggaagccaatccgtagtccaaaaacctgtcctttgaggttcttttttgtccgtgtatcttctttgtttgcttttaaattttgcatgattgtaatctttttttggagacactttttgtaaaagttatattgaagtaattttttggccttccctccccatgtgcattatctcttatgtctttttctttgttcttattcctttttttatttgtttgtatgtggatgtgttacagataca

SEQ ID NO: 75586 - DNA, 963 bp, Carica papaya
  Intron number 1 from transcript evm.model.supercontig_120. 15 (locus evm.TU.supercontig_120.15) derived from phytozom e v7.0 (chr-ID supercontig_120; pos 299602 to 300564 rever se strand)
ttgaagaactgttgcaagtatttgcaacacagcaggtgttaaattctgaggatcaaatagtgtagaaactggaaaagaaaggaatttctctgttactttgtattacaaccatctgagtagtatgggaggtgctgtcaggatagattttcctgctaaactcatttggaaaaccattgtttctccatggactgctttttttgcttgggaggcatgttgggagagaatcttaaccattgacaagctgagaattagaggtcggatactggtgaattgctgctactgctatgtgaaggcagaggaaacatgtaagcatcttttattatggtgccctacagtatacagcttggggtgtatgatctatgggtttttagggattgattgggttattgctggctccgttggtgagaaggaaaggctgatacatttttaattcaattttcaaatcaaattctctctctctctttcttcgcagttcctgttttgcttaaccgattcagtcattagtccatgaataaggttcctgacagagtattaatcccaataaaactttataatagtgttctttttatgtatgtggaggtaatcccaaccatatgctgccataggacgcatgcttcatatcggttacggtctttcttgttttgtttcgtactttttgtataatattatgaggcactaagaggagccacctatgtgcaaaaaaatgttacaagttagtcaaaatatctaacatgttccctccattctcctcaaaggagaaagggtgatactcaatcaagtttatgttattggacacaaatattgtcgtatttttattcttgccttcttgaccttcctcactggtttagtttacacctataatgtaattcagctgaccatagtatttccatatttttccagtgtaaccgtttcctttctttgtatacagattatagctgctattacttatcaaatagtccctgc

SEQ ID NO: 75587 - DNA, 576 bp, Carica papaya
  Intron number 1 from transcript evm.model.supercontig_33.1 2 (locus evm.TU.supercontig_33.12) derived from phytozome v7.0 (chr-ID supercontig_33; pos 88194 to 88769 reverse st rand)
ttctcctcccaaggctacttccacttctgccaaaggttctaattggttgttcattttggttctgtacgtagttagataattgcctgttttaattcaacggcattttggatttactttttgggcaaaataaggggcttaaatcgactaaactgatgtcggaagtcaaggtctccgtccttttgggtggtcccagatgttgtcattgacaaactcatgatttcttttccccgctcctttagtttgactttacgaggaaacaaactggatatcgtataagcgtttctttggcaaggattgtcgtagttgatcttcatttgccccaaaaaatagtatggtaaatggatctttacttgactgatgaactcggaatttgttatattgtcctcataagtcctatgatacatttttgcttccttcaaacttatttttgctccaaattgccaacagagaaaatggtgtctcacaattccaaaagttttctattatagtagtgcactcagctttaaaattggctagcatcatcttattgacgcacgggatataaattttctgatttgctgtttaggaattcaaata

SEQ ID NO: 75588 - DNA, 635 bp, Carica papaya
  Intron number 4 from transcript evm.model.supercontig_6.25 6 (locus evm.TU.supercontig_6.256) derived from phytozome v7.0 (chr-ID supercontig_6; pos 2008241 to 2008875)
tccggtttaagcttaagttcttcgagattttgcaggtaagctcatttgtgtttttgcttatgcgaactggaaattaatgtgtgggtgtttgcaggatataatgtggacttgtggtgcatggtatactttcctttttgagttatagtaattatatccatttttattaaggttatgtctggaacaaattcagaaatttttttatgaaatttatttgcaaattcacatttatctctttatttcatataaagtattatgtagaatttgaataatatgttatacattatataagttttgatcgaatttgttgtgcattaatccaattgcatatagcatttcacatgatatcttttttctctttcttcattttaaagaaggatttcatgatattttagataaactaagttaaccttataaatgagttcgacaacaattctagatttgttccaatatatcctaaattagcaagtagaaagtatgaatgttgatttgggactttggtcttgcatgcatcatatctgttgcttaggggtccaagtcgaaatttaaccacatagatgaggccctacacggttgccatggtgggcataaattgtttaattcagttgatggacatttgaacttttgctgtagaaaag

SEQ ID NO: 75589 - DNA, 685 bp, Carica papaya
  Intron number 2 from transcript evm.model.supercontig_289. 4 (locus evm.TU.supercontig_289.4) derived from phytozome v7.0 (chr-ID supercontig_289; pos 24834 to 25518 reverse s trand)
ccacgcttgtccttgcgactgttaaggtaatttcttttctttccttgtttgttgtctgttatcgtcttttgtgacagttggtgtcgagaatctttttgaagttccctacaaagtttgtgttatttttcgagttcattttggaaaacttgtgctatttggtaagcgtgatagtgtagttcaatgctgctcgattacttgttcatgtatgaagcaaacgtcttcgctgtctatgagaaatatgtctgaaagggaaagcgaggtttgtccatttgggtccatcgaaatagttctgtctatgttttagtgaattcctatattgtctgcccttcttttttggctagcggattcagatttgattagcagagaacaatggattggcattagtttatgatagtcgtctttttggaaaaaaaaaagttgcaacgtggtgatatttgacacattaaacagatttgatgttatcctgcatctggcatgcgtaccagaagatgtctaatgctcagtaaaggccttatgccttgtagttaggcttttagaccatcatcattgtcatccatttggtatcttcttcaatagtatttagttttgtgaagacttagctaacatttcaaattttgtttgaatataaaataaatttttttctttcttataattattttgttgcagcaaatctcaaggttaagat

SEQ ID NO: 75590 - DNA, 931 bp, Carica papaya
  Intron number 1 from transcript evm.model.supercontig_16.1 40 (locus evm.TU.supercontig_16.140) derived from phytozom e v7.0 (chr-ID supercontig_16; pos 2132533 to 2133463 reve rse strand)
gtttgcctcttgctgcaaagttccttggaggtcttttgcgatttaggaaaactagagaacaatgggaaaacgtgttagataaccaaatatgagagctaaaagaggctatagaagacctttttcctcatttactgttgagttattatgatttgccttctgaagtaaggtagtgtttcttacattgtgccatcttcccaaaagattataggaaatataaagagaagttgattaaattatggatggcacaaagatatcttaaagaggatatggaaactgttggtcaggtgtactttgataatttggctatgagctccttttttcaagactttgaaaatggttgttttggattcacatgcaagatgcatggcatagtgcatgattttgctcagtttttaacaaaaaatgaatattttttttatagaggctaatgatattcaagtgtcgaaaataaagtctttatatgaaaaaatgctcaatgatgtttatcggataaaattcaccattttctgtctctgtttacaagttaaagaagttacgaagcctcttagttaagtttcctcgccatgagtttaggagtgatagacctctacttaatttatttggtcaattgacatatcttaggtcattagatttgagcatgcctagtgacaagggtaattcaatcagtaaacttccgaaaaagttaggacaactgatacatttgagacttctttacttgtcatggaatttaaaattaatataattatctgaatcgttgtgttttttatacaacctttaaatcctgaatattcattagtgcagtaatcttaaagaacttcctcatgggatgggaacactaatcaatttaagacatttagataatatgataactgaaaggttaatagtttttcccaaagggttaggaagattaacttctcttcgtactttagaa

SEQ ID NO: 75591 - DNA, 977 bp, Carica papaya
  Intron number 2 from transcript evm.model.supercontig_2586 .1 (locus evm.TU.supercontig_2586.1) derived from phytozom e v7.0 (chr-ID supercontig_2586; pos 3162 to 4138)
tggaatttgctatactcatccagggaggctaccaggtatatatttacatatgtatattatatatctatacactttatgctcaatatacttataccattatcaattgcaccccgttatattaatgggaatttgcttatatattgatatcatgtaagtgtttgcggctggtaaaattcaaacttaaacgtgtatatatataaaattctttggaattgttttggttattaaaaaaccttgaattagattttgaattagacaatataatatgtagtttatgttgttaattatatataggtgtgaatatatacctttcttcttaattaaatcattgtgtgaactgatattctcttccttaagctgcatatctattgatttgacacggctctaataagaaacataaagaaattattataaatgtttcttcagttcctctatgatggtgatggtgagtatatgaattatatatcatctaataaataatttcttactccttaaaagaaatgacaaatgggtgtccttcattctcttagataaattacaatttatctcttaataattttgttttttgaaaattttttaattaccaactcaattaattgttatataagtaaatctcttaatgtaattgaaaatgctaattggtgtgttaggagggctatgggagtctacgattgtgtaaaatacatctcattttaggtttaatttatttacactcaattcacatattataaatagtttaagaaactagaaaagactacaatactttcagtaaaatatttttcacttgggaattatcatttgtattattgagattataaaatagaaaagactagtctttgtattgtataataattttttttatattttatattatatgatatcatattaaaatgaacttttttaattattttaagcttttgaaataattagtaattaacacttgatcatattataatcgaatgcaggagtaagcaaag

SEQ ID NO: 75592 - DNA, 735 bp, Carica papaya
  Intron number 2 from transcript evm.model.supercontig_128. 13 (locus evm.TU.supercontig_128.13) derived from phytozom e v7.0 (chr-ID supercontig_128; pos 109639 to 110373)
aactactagacttcctatcttctccatctccctctgtaagtttttctacttaaacactacgttagagtctcatgaagttggaggacgaagattaaaaatccccaaaataattacgaatcagagtttaaactcacggttactagatgtccgagtttttcttcaatttccctactactgttgctaagcgaacctcaaaaagtagaattatgaaaatttaaattgataatcaatcaaactctaccttaaaagatttgctgttgttgttctttttgctattttggctaacaattgaattcagtatttaaagaagtttgttcaagtcttcgattaaagtgtcatttatcgttcttttagtctacagaattcttgtccttgttgtacattaaaggtttaaaatgagcatttcgaggtgtttatttttaatgtgaactaccactgccagttgtttcaacaagaaaaatgttctttaactatttattttttggagttgaaactggtctcatctatcttataggtgcttgattgttaactgaacgcaaaaagctaacatatcagataattttcttcagaaatgaattaaagtttgtctgcttcattggtttcatgtgattatattgcttaatgctttctaattcttcatttttaaaacttcgactgtatacattttcaacgtatgatctctatggatttaaacatataggtgaaaaaggcagctgttgatattgttcgtggatt

SEQ ID NO: 75593 - DNA, 637 bp, Carica papaya
  Intron number 1 from transcript evm.model.supercontig_2085 .2 (locus evm.TU.supercontig_2085.2) derived from phytozom e v7.0 (chr-ID supercontig_2085; pos 8819 to 9455)
ctctcaatcagtgtaactctgtttctgaaggtgacaattgctaagcttacccctttaatggaattttttttgtttatgagttttctcctaaattgcttttgactgttccatgaccaatgttgtgttagtttatgctttcgaatatatttctttgttttaggggttacacgttcatgtttttgaggtttttcccttatttactgagtcaatatatggaagtgaaggaagaattgactggcgagtaatctagtatataacaaagtttttccctttgtattgcatgaacagtttagatgagcaaagtgggtatttttgggcagttggcttggtataataaatgactgaaagttattctaaattcattcgaactctgtcatattttgtaaaataaattatccaagacaacgtataatgtagggaagcaagttacatggagtataataaagtagaaataggaagtttaatgttattctcccccttttttaagtaaaaaagactgtaatggagtatgacattaataatatgggatatgagggaattttgttgcttagtccttaccaattgaattttcatgtgaaatgatattaaagaatgttccgtgttctctgtagatctaagtttttaatttgcagggatt

SEQ ID NO: 75594 - DNA, 446 bp, Carica papaya
  Intron number 3 from transcript evm.model.supercontig_48.2 07 (locus evm.TU.supercontig_48.207) derived from phytozom e v7.0 (chr-ID supercontig_48; pos 1137774 to 1138219 reve rse strand)
gtctaatcaattagttggaggaagctctttacagggtaagccttttactgcgcacgaaaccatattcaagaaatttctatgctccatgaagcttactttcttccttaagtgtactttcaggaatgtttctcattgtgtattgtaatggtcggatgctcttgaatgataattcagttgtaagggaatgtttagaacaaattaacaattttggagattttatttgaaaacatacccttaatttatttgagaaatttgattctaaataaatttgaagtgtaactgaaactatacatatcaatactaacatcactactaatattaagtttgaacttgacgtccatgaaaaattaaataaaatttacttttaagagttttattctctattcatgcttttctttttctctgagcataatggctttctaacaggcaacgtggtcagagatagc

SEQ ID NO: 75595 - DNA, 596 bp, Carica papaya
  Intron number 2 from transcript evm.model.supercontig_19.1 65 (locus evm.TU.supercontig_19.165) derived from phytozom e v7.0 (chr-ID supercontig_19; pos 1090671 to 1091266 reve rse strand)
acaaaattgggtctctgtctgtgtttagaattgaggtaaatttaatttaatttaattttttacttccacaagtatatttatttttttaaaaaaaaattgaaaaaataaatattgaattttatgtaattttctaattttgctggataaagaacagagttgattggaattgaagttatgtcttattcttgattaattagatatctttaaaaagatgtgtcaaatgctctttgagatttactgttataacattaattatactttatacgaaataatattttaaatcaaataattgtgttcgatattttgtgtattatttagacattaattttaataacggggaaattttggcaccacttgaatttttttattttataatatatagtttcttggcattgggattttgaacctcccccctctacccccccccccccaaaaaaaaagacaagaaattattatttatggctatacatatttttgtcccccaaatctaacgagatagaatgtagagaaaatattttgtggacctacttgtctattaaatattatgttcatgattttgagtttattcaattcaattttgtaatttcaggattata

SEQ ID NO: 75596 - DNA, 745 bp, Carica papaya
  Intron number 1 from transcript evm.model.supercontig_117. 67 (locus evm.TU.supercontig_117.67) derived from phytozom e v7.0 (chr-ID supercontig_117; pos 700203 to 700947 rever se strand)
agcgttagtaatttttccaccttttcagctttaatttgtgttttttcctttgcaagactttcttttctgagttttttggattctgggtattcttgcttttgttggcttttaggggattttaaaggtttgattggagatttttttggttgtcgtttctgattttttttcaatcctcgtagatgagcttgaaaggaatctctggtgaatataaatgtggtaaaattttcaactaaatttacgttctgaaagttagggagctagcttagaaatgaggtgatattgtagaccttatctatattgaagagcttataatgatacaactgagatagaagaaattggacagtgaggatttaaaaaaaaatagtaagttaacttgacccattaacatctgcttaagatggaattaacagatgattctctcttctggcgaacaacctgttagagaatagaaggttatgttcctatcagtttcctaatctcaagccataccagaataatgcagcacagaaagcttctacttaataaactgatgcaagcaacatatttgattatataatgtaaataaattatggaaagcagtattcttttccgggtattacttgcttaattgtaagatacacttggctttgttgattgtgttgaatattttactagttggaggtattgcctttcctcacacctataaatgtttttggtggtatactttccagctccgaagggtttgtttcctccagaacctgaacat

SEQ ID NO: 75597 - DNA, 576 bp, Carica papaya
  Intron number 3 from transcript evm.model.supercontig_43.8 (locus evm.TU.supercontig_43.8) derived from phytozome v7 .0 (chr-ID supercontig_43; pos 84133 to 84708)
tggaaatgtgagtacattctttaatttctagttattcaacttgcaggcttatactgtttgtttgattcctcatctaaatcttcttatcgtgacgtagagctgataaacaatgagatcttttaatctatttatagacagttttactctgatcaattcattcacctagaccctgcttaatgaaactagtgatattcttcaacttaagaaatacttgataatttgagctcctttggatctatttacagctgcttaaataactttctgagactgtaccagaaatttggaaatagtcatgtggtttatccccccacccatttccacattgtgtctgcaaccatgtccttaccttcatattgtcatttttgtgatggaactgactatttgattcatatttgttcacgttctaattagaattattaaaataggctgagtttagttccaaattccttgataagaggagaactgtatagaagggattggttctgttcaagaaaacagaaaaaagattaggggaagaatttatttctttaaaagaatgtgaatgaatgatagaaaaacttttgtataggattctaa

SEQ ID NO: 75598 - DNA, 873 bp, Carica papaya
  Intron number 1 from transcript evm.model.supercontig_344. 4 (locus evm.TU.supercontig_344.4) derived from phytozome v7.0 (chr-ID supercontig_344; pos 96562 to 97434)
gccctttccctgttgagcagcttcaggtaccatcttcttcaagattgatttctatgataatcatccaattacgttcactttgtttgtcgttgggatcaaattagatgctgacccaaccgggttcttcttgaatttgctgaaaggcgacattttgtaaaaaaattccatcattttttctttgtatgtcggggagggttttatttgtttcagtgtcccaccaattcttgcacaacgttgtgtaaggccataacctaaatgggtttcatggattctcacaaaaggttctaactcgcttattatggttgaaactgggccttctgtcagtcttgagttgtttgccccaattgcgacagagggagagttagggtttgtaggtttcctaatagagcaggtttaatttggatcggtttatggctagatggctgcttcttttcctacaaaagcaagaaagtcgttttctttttgttatttccattttatttggttttgacgagttattggaaaaggggatgcctttatatagtttgttgaaattccagaattatcttaataagttgtattcaaaatgtagactcgtttgaaaattattgatgaaaatccccttttgaatttctatttatttgttttcgaaactgttcttgaatttgctctcagaaatgctgttattagcttcctttttttttgtctattggttttgttatgtgcctagtgctgaaaagtgtgttgtttactagagttctgtaaattgttaaccagacaacctgtaactgaaaatcctgggcattgtgaaaaccaaaattgaatttcatcggttgctgactaataatgtttgatctcattaatcttaaaacctaggcgtccggaattgctgcc

SEQ ID NO: 75599 - DNA, 297 bp, Carica papaya
  Intron number 1 from transcript evm.model.supercontig_6.28 4 (locus evm.TU.supercontig_6.284) derived from phytozome v7.0 (chr-ID supercontig_6; pos 2159935 to 2160231 reverse strand)
aagcttggacggaatacatcaaggtttgcccttttccgttgccttttgaattttccttaatgaaagatatatttgtttgtaaatactatttgtgggttattgtttttaagttgtacaatacactgaatcaatacatatcgttattaagaagagcatatttagttgaagaaccaggtagtataagtgggaattcttggtttgtggtctagttcctgtaaattgaggaacttgtttctgttctctgtggaccatcgactgacctactttacatgggacacgaaaatcaggtgcatcctg

SEQ ID NO: 75600 - DNA, 348 bp, Carica papaya
  Intron number 1 from transcript evm.model.supercontig_13.2 25 (locus evm.TU.supercontig_13.225) derived from phytozom e v7.0 (chr-ID supercontig_13; pos 1980877 to 1981224)
cttctgcaccttgccacctggaaaaacaacgacaggtaaagttatcaagtctgttattctataggtttgctttcttatgtttgtatctggtagtggaagattacaaataaagcattttggttttcatttttttaatctccaggcaatatctatgactagaatcatattttttggggggccttttgggttctaggtaattttttgatttgtttgatcataaatgcttgtgagaaaccattggcatcagatactggtttgaccttaaatgaaaagatgatcatgttcattatctttcttgttgatgtggttaaagaaaagctgaagggaaatttttatccttgcagataa

SEQ ID NO: 75601 - DNA, 988 bp, Carica papaya
  Intron number 3 from transcript evm.model.supercontig_151. 34 (locus evm.TU.supercontig_151.34) derived from phytozom e v7.0 (chr-ID supercontig_151; pos 308229 to 309216 rever se strand)
aggtcagtgtttgccagttcttcctatgtttttctctgtctccctgtgtcgccggttgtaactagagtatagttatactgattcacgactttgctctatgctcgactgttcagcttcatttgctttttatttgtttgccccttgtgaattttgaagcgagctctggaagcatttttaatataaagttatgtgatcttttacttaatttgacttgattgtaaatatgttttgcacaccatagtgccacttctctatgcgtgcattatcatgattgtaatttatctgatgtatgcaccaaactgaagcatctagggtaagtgttggcaagaactgcagtgcattttagtgttgcagaataattagagggtttttgggattgcttaaagttaaagcagtaaaatgctttaagctacttaaagtaaatagtttgttacttggaaaataagcagttacgtgtttggataaagtgccgattgttagaaataaacactttttttgtagagaagttaatggaaaaaaatatctattataaatatatttatgatttacattgttattcattgttaatttaagtggatatgaatagagtattaagtaattttggtagataaaaagataaaagcctaaaaggttaaaaatgaggtttttcttttacatttttaaagccacttataacaacttaataagcaccacttattaaacagaaagatttgaaataaagtgcttaaaagctgcttataagcatgaaataagtgatcctaaatgccctctaagtctatacaacgccgtgattaatctttggagcatcttaccaaaggctatgcatatcattatataatattgttttcattagttgatcatctttttttttcttaattttagaaatcctgacctgatgtttaatcatctattggtatcaatgtttcatttagtttataactgtggatttctaggttattgctaatagagctgctgagatccttggaca

SEQ ID NO: 75602 - DNA, 441 bp, Carica papaya
  Intron number 2 from transcript evm.model.supercontig_2658 .1 (locus evm.TU.supercontig_2658.1) derived from phytozom e v7.0 (chr-ID supercontig_2658; pos 4599 to 5039 reverse strand)
attccggtcatcaggtgactgtttctagttccctatgtttatctgtaaatttctgagtgtttcattaagatttgttagaacaaatgagtatgaaaagtttagctgatttacatagactgaacaagtaatgtattcataaatggagtttgacagatattgagtatgatattattttttttttttgccttaagaatttgatttccagtttttttttttttttttttttttttaagaattcgaaattaacttaaaaataatttttcttctttttcgaaattcgattttttcaaacacattgtaagaaaacaatccatccggattgaatttttaaaatttatacatatgtttgtttgttctgtagctgaggatgatcttttaaaatcctgttcattttcaattattgcagacatattctgagtcacgaggtcacaattttacact

SEQ ID NO: 75603 - DNA, 485 bp, Carica papaya; identical to SEQ ID NO: 73760
  Intron number 1 from transcript evm.model.supercontig_2307 .1 (locus evm.TU.supercontig_2307.1) derived from phytozom e v7.0 (chr-ID supercontig_2307; pos 442 to 926)

SEQ ID NO: 75604 - DNA, 702 bp, Carica papaya
  Intron number 1 from transcript evm.model.supercontig_0.15 4 (locus evm.TU.supercontig_0.154) derived from phytozome v7.0 (chr-ID supercontig_0; pos 4182822 to 4183523 reverse strand)
agagagtgaaggaggagaaattggctggaacacaggtgattctgagagtgatttggtggaatacttgaactacgaagggtttaagagaggatctctacgtcgtttttcttttatttttgtttcttttctggtgttgaaattgagagcaaaagtaaatggagattttaccgaagttgttgaggaaggatggagaaattggcttttatttttaatttatgattttgattttgtatttttggatttgaaatctgaaacttccctttgcataactgaaacttcatttccatcatgcttaatcagagaaggagaagatgagcaagaggtcaactaaagaagatgaaaaactttaattaaattaattttaaatgtaactattattctatctcaaaagaatttgattattattatttttaagttaaaaaagttgtaaaaagttgagaaaaaaaacaaaaaaaattggactatgagccttttttctctttccaaacataccttgagtctaccggtttttccatctaaaaattaacgacttaaagcttgaacactcttcagaaatttcgtggactttttcgaaatagaaaaaagttagggcgaaaatttagtattggtcatagttaggggggactaaattggatacttgcctaagatattatcattgttgttcttgttttaattcttgatgtcttctcaggtaataatttg

SEQ ID NO: 75605 - DNA, 726 bp, Carica papaya
  Intron number 3 from transcript evm.model.supercontig_58.1 29 (locus evm.TU.supercontig_58.129) derived from phytozom e v7.0 (chr-ID supercontig_58; pos 1275925 to 1276650)
gattgcactcggtgttgcatcttcaattggccttggtgagcaacatctattttcatgaaaacatctccactactaattgcttaatatgagttaatgatgtaatatattgaccatggtatttggtaagtatcataatgagttgctaagggtagcatatgataagcatttgaaatagtttccaaaagaaacatgtaattcgctacaacataagattgaagtacttgtgagcctggcttcttttctttttcaaaattattgatgtataacaaaattcagatgatcttcctacttaaaatgaggggtttaaacctagagatcacactttgagaatggattgcatcacatatgacaaacctactgacaaaatgatctggatatattctatcctctaaaaagaagtcacaatatttatggattcttatgaaatcatgatctaaccaagaccagaaactctataggaaacctcaaggaattcaaaaccataaacataaataacacctgaacactaaataaaaccttaatgctactaaaactgaaaatttgtttacatgaattaaaacttgccattctggttcgcttattatcggtgcattctgtcaccattacgcatatttctgattatatgccagtgactgaacttatcttaataacagcttgttctgatatatcttttgcttttttctttttccaggatctggtctgcacacttttgttctttatttgggc

SEQ ID NO: 75606 - DNA, 925 bp, Carica papaya
  Intron number 1 from transcript evm.model.supercontig_18.2 40 (locus evm.TU.supercontig_18.240) derived from phytozom e v7.0 (chr-ID supercontig_18; pos 2590780 to 2591704 reve rse strand)
gggtactggaaagaagcagcaattagcttcgcttggtaagatttcttgggcaatattcgttccctttttgcctcctgattggatgtgttaaaagattgagttgcaacaaaagataactattgtgatgagcaaggccccttggtgctggcaaatcatcatttttccagtttctgttggatagctaagatagctcataagaattttttgggtaatccagaatatgtctgtctgcagtatgctaatagcttgaggaaatttaacaatttaatatttgctatcagaattggactcttttttaatatttatattgttaaccagcaaacctaaaaagaatatttggtaattggatgtgcttttagtccagaaatatttgaaatgtatctaactggagctttaaattaatgagaaaattgatggttagattttggttttcaccagtgaagggtgagcatgtctgaaaagaaagaggacagagcatttgtatgtggcacttctttgacagcataaaacctttaatttattgctgatactaggagaaaaattttatgtttttggtataataattagaccagaactagttttatgatacatgacactgaagtagatatccaagcagatgatctaatccaattcctaatgagttcaaaattgtttttttctatcttttggtgtatttattctcttgttttataattattttaaaaaattctcttgttccataagctagtggtttgaggtttcacaaattttcttatctggattttctagaccctgtgataagcacagttacgaattaattaaaacctgtttgaggttttgtaacggattgaagttgttggccatttatcttttatctgtttgtttgcttccattctagtttctgctgggtgaatgatgttttgaattcaactgttttgctaggtga

SEQ ID NO: 75607 - DNA, 643 bp, Carica papaya
  Intron number 1 from transcript evm.model.supercontig_19.2 63 (locus evm.TU.supercontig_19.263) derived from phytozom e v7.0 (chr-ID supercontig_19; pos 2166793 to 2167435)
ttgccttgtcaactcagtgaagtggaaccacactagtgagtcactgccggttcgcctttttcttttaatggaattcatttatggagcctatcaagatgtcaagcctcttttttttttttaatttgagtacacattttcttttcgtctttgtataaatagtgttttttggtcgatgaacaaatcgaagacaaggagggaagtgagtgttttgcgtgttagatctcttgatattctctccagatagattttctaattactatactggttttgagtttattgtttaaattaaagttttttaaatgattgtgtgcgcttgcgttttcttagtaaccagagatatcgtgcattggaggtattaacttctctcgtctctgtagaattacgatttattccattgatcatgaaacggagtggaaggaaggtagagcatctagagttacgtgttgaatatttctgcttggttagtcaggttgagtcctaaaatttaaattatcaatttgaaattggggttgaatttttcttgctgttattctgcatttataatatggtggctagaaagaatgtgaactccttttgttttaagtttaatggaaatgcggatgttgcagatttagttgtagctagtgctggagaagacaagagg

SEQ ID NO: 75608 - DNA, 532 bp, Carica papaya
  Intron number 2 from transcript evm.model.supercontig_28.3 1 (locus evm.TU.supercontig_28.31) derived from phytozome v7.0 (chr-ID supercontig_28; pos 492673 to 493204)
ccaaaagggtttgacttacaaactcgctgtcaatagtaagtgtgaaaatgctttgaactttgtttttaattttttttgcttgattgtacgagcaaactcataataattatcaaaaccctgtgctacacccaaatggtactgttaaatttattctttgagttttttagaagtttgagtaaataatacttatcagatttattaaatacaagcaaataattacatttgatactggatatatagatgggaactcagaactagaattaccataaccgaatgcttactcgaagaaattgacattttgtatctttctgtttttgtttaattttaaaccgatttaattcgtatcgattttatcatcttgttgttctctttactaaattatttgaactacataaattcatgaatcgcattgcaaaagcagtagttttattccaaacattaaagcttttatttgaaggaatttcatttgacttgattgacttaatttggcaatgcagaatttgctgattggacctggcaagagttccagagg

SEQ ID NO: 75609 - DNA, 507 bp, Carica papaya
  Intron number 1 from transcript evm.model.supercontig_60.8 9 (locus evm.TU.supercontig_60.89) derived from phytozome v7.0 (chr-ID supercontig_60; pos 1423898 to 1424404)
agtgggattcctctgtccctttcttggcccaggtatagtaataacatcctttctctcatttttatctattttgtatttttatattttacgaatttcttaaaaaaaaaaaaaaaagaaaaaaaaaacatttccaaatatgatatgggggtactatttaaaaaaatgtttagaattaaacttttttcgtgaaattcattcgaaaatgtatacttagttcaattatgatggagaagataaatatttaagtcaaataaacagtaccaagatattttaagttgaattttcatccatttgaagccattgaactaaatatgtgtttacctttattctagaggcagtttgaaattgtataatgcaaaaaatttatacatgcattgtgttgcttaattaaaagggttgaaaataattgattgtcatatttttcccaaatattcataaaatttaatgtttctaacttttgcattaatattctttgctttttttatcttgcagggtacttacaattct

SEQ ID NO: 75610 - DNA, 938 bp, Carica papaya
  Intron number 1 from transcript evm.model.supercontig_3.11 7 (locus evm.TU.supercontig_3.117) derived from phytozome v7.0 (chr-ID supercontig_3; pos 909521 to 910458 reverse s trand)
atataatctccaaagcctttcaggttcgtcactaaaatctcgaggctgctgattttaattttgaattccgtttggtttctcttgtgatcaattttttgctgctttgaacttgatctggaatctccgcgtatatgatcatttaggttaaaaccgatttgggaataagaaaagcccctaatggattttgatgaaaacccattatttttctctacctactttatttaatataatatgattatcttgtcggttttttgaactgatctcatcactggactacgtgtatgtgcttgtttgtctgtgtataccgcctatatctggaattcaggttctgatatatctttgtatttttggatgcatggtaagcttggaactatgttttttcccctcaatttttggttactcgagggaaatttctcgggggaaattttctccaatcccgcgggtaatttcacttttctcttatttttctcattaaccaaaattttttctctctacccgcggggagcattttttctcccgccggataaattttttctccttcgctgttttttttggttcttttgtattaatttaatttcccttttaggtaaaaatttaaaagttctcaaaaatacacaaattaatcaaagcggaatattacatcattttctcttaagaaatttggtccccaaatttgtacttagcggtaaatagctgtggatactttgctcgcatatcctcttcgtgttcccatgtggcttcttcctttgagtgatgctgccagagttactgtgtgagacttgagtttatgatcttatccgataaattgacctaatcccagaaatttaatttgatatgttgttttaattttgattttataaaagggatttaggcaggcctcttccaaccttcttttatttttttctgttcttcttttcataacttttgttagggaagac

SEQ ID NO: 75611 - DNA, 479 bp, Carica papaya
  Intron number 1 from transcript evm.model.supercontig_51.7 9 (locus evm.TU.supercontig_51.79) derived from phytozome v7.0 (chr-ID supercontig_51; pos 747973 to 748451 reverse strand)
gctctctctctctctctctctctctctctcaagtctaacggacgttttcagaaatgtagccgttgcaaattccaacggctaaattccttcttatcttttttaatttcacgtccttttaagtacccctttaaattccattttcaaattaactacattgtaatctcccaacacctgagatttcattttaaaaatccacctgagatttcattgttgccagaaaaaaaaaaaaatccttcctttcttaatttgaattttcagttcttttacccagttgaagaaggtatgcaggacccatttcactaatttgatttttcagttcgattttctttccatttcgatcgtatttgtttctaacgttgaagaaattaaggtttataagttgatctgattttagattgaaatacccataaaacagagctgactactatatttcttttgttgtttatttcaggtgttggaagaagctttgtaaggtcaaa

SEQ ID NO: 75612 - DNA, 710 bp, Carica papaya
  Intron number 1 from transcript evm.model.supercontig_184. 5 (locus evm.TU.supercontig_184.5) derived from phytozome v7.0 (chr-ID supercontig_184; pos 53616 to 54325 reverse s trand)
ttgatcctccaaatactccccctacacctcatcaggtttttctttcctcttcctttcttttaatgcttgtatctctatggtgttttggtcagggttccttcccttttgatttttcttagtgtaaagttctgtgctttttagttggtgatctttctcttgcctgtttgtttcctttgcttgctcatcttgggtcttttcttttttggtttgtcttttactgctttctgatttttttttctcacattaattaattgatgagtgagtgacgtgttaatattatattgagttttgctttcgttccaaagcttccatctgtttgtttagctgcttgagcccgtattcttgtgggtttctgctgtttctaaatcctatctctatggttaattgattggtatttatgacaacgtacataaattttctttacctggaaaaaatgcagagaatcttcagcatgtaagtgatctagatttgggatatctttttatggtggcttatatccgtgttagtctacttgtaagataataagcgtcttggctgtttgttggcaagatttaaaaggaaatttgattagttcttctaaaatattttatctgaaaaacatatgattgaaatacaagggtgcttgcattttgaaatgccctttacatacaaataatggatctaacgttgaacttcattttaggtagaaagtagaagcagcttgaggaggc

SEQ ID NO: 75613 - DNA, 474 bp, Carica papaya
  Intron number 1 from transcript evm.model.supercontig_1077 .5 (locus evm.TU.supercontig_1077.5) derived from phytozom e v7.0 (chr-ID supercontig_1077; pos 16617 to 17090)
cacttgaagaaacgcaaatctatacatatgtatatgtatatgtatgtgtttataggccatcattcatatctatacatatagatatatatatcattccaaaaacccaattaagttttattgttaataattaattatgaaggatctaatcaattaggtaccattaaagagtggctcaaataataacaacttattgctcttgtactttataactttgagattctcacacaatgctttttgtgattagatgtaaattcctatcttcaaaagatttcagaatatttgcatgaacatttaaaaatattaaaaaattaatgagtttttaattcaaaataaaaggatttaggggtaacgagtatttagttaaaataaaaatttctagtaccaatttgttttttttaaagaatttcgtaccaaaaattttttgttctttatgaatataatcacctcagtttatccattctagggttagcaaga

SEQ ID NO: 75614 - DNA, 361 bp, Carica papaya
  Intron number 3 from transcript evm.model.supercontig_3.66 (locus evm.TU.supercontig_3.66) derived from phytozome v7 .0 (chr-ID supercontig_3; pos 494630 to 494990 reverse str and)
tgctagcagttggaaggtaggtttctaattttcttgggaattgaaaagagttttattcattttatttgtgggcaatgagatttgatatgagcgttaagcttctttccttgtcatatggctatgcttggatttttgtcaatgaagaaaacacgaacctgcctagtttagctgttgcggtatcgagcaatcatttctatggtttcaacagtataaacacctctataaggggctgctatgacatttgttttttataattttaagggatacctctactttggtttaactgaacttttgtctttacaacatttctcagatattacttgatatgatatttggcagcacggcctttctaattggaccc

SEQ ID NO: 75615 - DNA, 383 bp, Carica papaya
  Intron number 2 from transcript evm.model.supercontig_1.33 4 (locus evm.TU.supercontig_1.334) derived from phytozome v7.0 (chr-ID supercontig_1; pos 4461220 to 4461602 reverse strand)
tatttaagtcttgttgttctcttggtgtttgacaggtttgttttcatgtgaaaactgcgttttttactttgaaaagttgggggggagggaggggtcttaactggaatgagcttgcttgttctgtgtttcctacttgttgatttgatagaaaatgagttctatttatatcatcttgtccatgtgtttttgttctagtgattaatagctttcttttccattttaaatgcaatcaagtacatatatacagcttttcttacataagttaaaaacagttagctgaaactaataggaatggtcagacaattttaggatcggcaattacgtggttgtttttgtctttaaacattcaaaatttaatttgtctcccaggaatttaagttttc

SEQ ID NO: 75616 - DNA, 552 bp, Carica papaya
  Intron number 1 from transcript evm.model.supercontig_1.33 4 (locus evm.TU.supercontig_1.334) derived from phytozome v7.0 (chr-ID supercontig_1; pos 4461591 to 4462142 reverse strand)
actgcctcggagttctaggtaattcttcactttgtctttcttaccgttctctttgcttgttttttttttcttttttaaataacttgtgttttatttactgtttttgattaatcgctattagctaaaatctttagtcctaatcctcacttgtttagtgtccttttttttttttgttttttttgctttttgttgttttttttttctttagttagctcgggcttcaaacggaaagttcgaatattgtttatgttttctcagggtttacttcttgtggcatcgtattctcatttaaattttcaaacgatctgtaactatctgatatattgtttttccttttacagtgtgcttttcgtttattccttgttatggcgaactgacacatgtgtggtccttaagaatgggatactgagtgacagtattttctccatagattattgactgagtcggtgttatatgttgaccaagagctgaaagagtttttttagtttggttttggagaaatattggctttgaacagagcaggagttcgaggaagtattttatttaagtctt

SEQ ID NO: 75617 - DNA, 675 bp, Carica papaya
  Intron number 3 from transcript evm.model.supercontig_129. 33 (locus evm.TU.supercontig_129.33) derived from phytozom e v7.0 (chr-ID supercontig_129; pos 277265 to 277939)
ttgatcacgcctttgggcctgattgtacgaacaaggtatgggacaatcagttgtattcttaacttcgatgttctgatttcaaattatatcaatgtaattatatggattaatgttttcaagcattggtaaacatttcagtagatcaccaacttatgacgtaggttggttaacttactgtaattgtttaatcttgtggttgaaatatatcagtttctttttttaggaaaaaaagattagcatgccacttgttcaagctgggggaatttcagtggttaaactagaataatatcctgaaggtccatttgttgtctctgcataaaatgcttgtttatacttgttttttaaagattctaaagaaattgatttgaaactagaatcttcagttaccttatgtgtgattgcatgcggattataagcagacaagcttagtttttatcataactcaaagacttaaaccaaaaatttctttccttattgtgacttatcatttacattcattaaacaaaaagaacgtatttcattgtccttttatggtttttgtttatagcgatattgtttgttcatttcaagtcagtatcaaaaacaaattgttcaaaaaagtataatctcatatatagcattgtttatataaatgaatttttgtatctaacttagcttcatgaatgcaggttgtat

SEQ ID NO: 75618 - DNA, 666 bp, Carica papaya
  Intron number 1 from transcript evm.model.supercontig_26.1 87 (locus evm.TU.supercontig_26.187) derived from phytozom e v7.0 (chr-ID supercontig_26; pos 1371421 to 1372086 reve rse strand)
gacccatacaaggtacgtgctctctctattttatgtcccttcgttttcttcttcttcttcttcttcttcccttttcgctttattgctttgaattcggttgcccatggcccccgcatgttttgatgtctctgatttggtctgtgtttcctacttgatacgaccttaattcgctgtagctgtttgtcgttttgtgtttatatgtgcgaaaagtcgacgatctaatcatgctatagagggttttatttttttttgtattttgtttaattttttttccattttttagttttgacttggagaagtaacttcgatgcctaagccttttttttttttttgcttgttgattctctaaaacttttgttaaattatgataacgaatttatagttaacgatttttttctgtgttcagtctgtgtatttagttgatgattttttaaataaataaaattcgaagctcaattctattgtcgataaattcgagggaaaagaagatgaaaagtaataaaattgatttttttttttcttataaagattcaagaaaaattaagagggaaaagtttgaaatggtttcgtttttgtataattatttggatgaattatgtggaactgagccgataatctgtgtttgtgtatgtataattatgtagcaccgtccatcaagtgcttaca

SEQ ID NO: 75619 - DNA, 319 bp, Carica papaya
  Intron number 1 from transcript evm.model.supercontig_13.1 67 (locus evm.TU.supercontig_13.167) derived from phytozom e v7.0 (chr-ID supercontig_13; pos 1508237 to 1508555)
ctcaagctctttgtcggaaatatttggcagaaaatgtaagctttgtgtccattatttatgattgtattaagctgcaattctttttatctttttttgaaacatcttaataaatatttgattaagaaaattatgtcatttccgttaaatggacctcaatttttttaatatctaattcatggcggcatctattgtgttgctttggttttctaatttcactctctggagttcttgcactgaatcttttgttttgttgtaatggacaagtttcttcatgttttgcactgatgtgcttatctttacgcagtgaggttattaagga

SEQ ID NO: 75620 - DNA, 437 bp, Carica papaya
  Intron number 1 from transcript evm.model.supercontig_13.1 51 (locus evm.TU.supercontig_13.151) derived from phytozom e v7.0 (chr-ID supercontig_13; pos 1341530 to 1341966)
atttgggaagatcataggtaaaaacaaaaaaccagacacaaaaaagggtttactatctttgaatgcagatgaataaagtgttgtttgctttcttagaaaattttatgggcgtgtactgaaaattcatttggtatctccattgggtttgaaatttggaagatagaaaataagtagaaaaaattactgtgattcaacaccagtttatagtcttctttgttgaaattgcagtaagttctcagacatatttgaatggagatgaataaagtcttgtttggtttcttagaaaattttatgggcgtgtaatgaaaattcatttggtatttcctctgggtttgaaatttggaagatataaaataagtagaaaaaactactatgtaatttaacaccagcttattgtcttctttgttgaaattgcagtaacttctcagacatatttg

SEQ ID NO: 75621 - DNA, 814 bp, Carica papaya
  Intron number 2 from transcript evm.model.supercontig_46.1 70 (locus evm.TU.supercontig_46.170) derived from phytozom e v7.0 (chr-ID supercontig_46; pos 1665490 to 1666303)
gtgctttagttttagaaatgtaaaaattttgtattagaatgtaaaacacctgttagtagtgctaattaatataataacttagtacataatatagtgacttgatgcaaaatgaagtgagttaaccaacttacgaggaaattacataacgaagattcgaagaagacccatggagctcaagttaactattgttatacggaagcccgcttccataatcctttaactatgatattttgcttctgaatattggatggacgattggaagttggtagatttcagaaaaagtgatattcaaggtaaaggcagatatttagtcttaatgtcttaccgaggatgttcggaacttgaagctttctactaacaatccttttctgaatagcagtgggatgttacatagtcataccactattcttttagcacttatccataactttgtaaaaaacattgctaacctactagacctgtgctcccgtctgcagtggttacaagcagttttgatatattaatagtaattgtgggggaaaagaactataatgcgtatattattcaaacaaaatacataaatttgttcaatgttgcattttgggtggaaaatcgatgcaagtttataaagtatcgtactaaactgataatatcttagctttgcttttgttgcatatttttcctttttccatgttgcttaaatattttattcattttgctttttccttaattgcatttcgagttttggattttgccgtaaaattgtgtaaaatacatgtattctcctgttgtatttgtaggtgcccaaatcttgaggtactctcaattaagagct

SEQ ID NO: 75622 - DNA, 292 bp, Carica papaya
  Intron number 2 from transcript evm.model.supercontig_18.1 54 (locus evm.TU.supercontig_18.154) derived from phytozom e v7.0 (chr-ID supercontig_18; pos 1399089 to 1399380)
agcaggtttttaagcttgtttttgtacatttgtactgtcaacaatatggttgtactatgtccgtattcctatagtgtaattatctgttacaggaattacaggaattacagagttcttattttagcagcataaactttgacaaaaatcagaaacctcttatcttcttaatcaaaattaaaaactttaggaagtcagaaaggtaggttatagagtgtcttgcttctcaacatcagtttcttaccagcactgaactgtaatttgtcttatattttgtttggcttctataggttaa

SEQ ID NO: 75623 - DNA, 830 bp, Carica papaya
  Intron number 1 from transcript evm.model.supercontig_1667 .1 (locus evm.TU.supercontig_1667.1) derived from phytozom e v7.0 (chr-ID supercontig_1667; pos 6053 to 6882 reverse strand)
caacatcgaagcaagtgagtttattcacttccttcaattctagcttttactgggaattcttccttctttttcaaatatatatattccgatattcggggtttactatttccgtttggtatctgagaaagaaaaaggggaaaaaaaagagaggaaacctggagagttcttttgttttcatttggttcttcaaatttttagtttaatagattaaggctcaattaagtcgatgctttaaatccttggatgcgttcagtctatcccttcaaagtgagcaattatttttatgaaaccaattaatctaatttgaaaattttgcattataatatagttaatctcttatagaattcaaatctttttacctgatttatagttctttctggatttgttattggcgtttactttggatggattggattagtttctagtcgttcaactgtgtacagatctgcaaaatctggagttggaattaatcctattagtttgttgtttttccttaatatccttgcgtatcgtttgatataagcatgtcggtttataccctcaaatatgtatagttacaacttagccctggcaagagataatccaaagttggaaatactccatttctcttccctctctgttaggatagtccctagtgggtaggcatatctgactctagatctttattcaaattgggataaggtggagctaagaattttgttataaatacccggctacctattttactaaatcaactgattaagttttctcatttgagtttgatattccaaatttagaagaaatttcagagatctgatgttttattttaccaaacccaaaattttgcaggc

SEQ ID NO: 75624 - DNA, 897 bp, Carica papaya
  Intron number 1 from transcript evm.model.supercontig_50.1 24 (locus evm.TU.supercontig_50.124) derived from phytozom e v7.0 (chr-ID supercontig_50; pos 1129550 to 1130446 reve rse strand)
ttagtgaggtattcaaaagacctgcaatcctcctttctccactctttcatatcaatgaagcaaccgttgtcttttttcagatgaactcacaaatactcttagttcatacaaattttcttttttagaagacctttttttttatatttactttttaaaagaactagtatacatacaatttttgagttcaagagagtgaagatttgaaattatgtccattgcttgagctttaaggaaaagaaatcaaaatttttctatggaaacccagcccttgtgtatctttgataagatattctccaattgaatttcatgttctgggagtcatttctcaataattgtatatgagagagtagccaagctacacgccagtcttgcgatatctactttcacataaaattcaactactaagggttctataatcgtactgggaatggctaaaaattttttatgctagtcatcttagttcttcaattaaagctaaaatctaaaagaacaaacgtaaatgctgtgtaggcagtcctcatcacctgaaaaaattcagattgtttaatataacattatttgtaatccgcgggactagaacctgcactatcaaactcaccaactgtttaagtgggcagtatatgaccaccttaaccaatggccagggttcaaattctttacaattgaaacaatgggatcatgactctttcagaggtatgctggtgatttaaatttttcgtggtatgaaataagattttttgttcttaccatgctctttacttttggcatttggtatcagtttagatttggctacttgttacatgttgagttctcttcggcctacacacccacgcataatatgataatctcctttgtcttctagattcttgagtggcttcgaactcagaactggtggga

SEQ ID NO: 75625 - DNA, 592 bp, Carica papaya
  Intron number 1 from transcript evm.model.supercontig_12.1 01 (locus evm.TU.supercontig_12.101) derived from phytozom e v7.0 (chr-ID supercontig_12; pos 903488 to 904079)
ttcgcccctcaacatcgggttatctctattccctggtagaggcctgttctcagtttctccgttctttttatcctgagttctgtttctgctttacttacagtataactggtcaacatattttcctttctagttgcgtgaaaactataggtatggtggaaattcttgactgatgcttgaaatgttcgggcggtttagtttcatgggaattttggtagtaaaaattttgatatttagggggaactaataacataatatcgcaattaaatgacacagagttttatcctatctttaatcccgttaacaacaaatggagtgattgtttgcttatataatgattgaatgcaacatgagtatcatggtgattttagtagtaaagctttgattattcaggtaacatgaaagccattaattcctgcttcataatgagcggatgtagttgaagtttcatggagattttagtagttgagttttgatatttagagggaacataccatacggagtttgtcacagcaattaaatgctaatatctatatttttcttttcaaatcaatttttagggtgaacaagaacactgaaatattgtgtttgaagg

SEQ ID NO: 75626 - DNA, 567 bp, Carica papaya
  Intron number 2 from transcript evm.model.supercontig_112. 2 (locus evm.TU.supercontig_112.2) derived from phytozome v7.0 (chr-ID supercontig_112; pos 5071 to 5637)
aagaaagcaaggttagtttttgttggtcttcatgggatgcctaggaaatgatcattacatgttgggagtttcatccgtttacagtaatccaaactgtaggaattggggtgaagtaacatctgttttgactagatcagttgttagtagatttaacatgtgtataattatcgtagataacattttaggcgtgtcttttgaattcttgtgtgagtgaatcagggaacttcagacataagaatataggaattaacttgaaattatcagttaaagcatgaaatctgtctatatgcaatctgtaaagaagtgctgcataacagtacttgaagtaatgttttgttgatggaaagattagaatgtctaattgcatatcatctcacattgttagaattttccttcttaatcatcttttctgtcatgctaaattgcttttctatatgttaattttgacatggtacatttattcccttgcgtctggattgataattgtatatgctagacacttctggtgattgaatcaataccatttcggtttctgataaaatctcttaaaacattttacagaagata

SEQ ID NO: 75627 - DNA, 478 bp, Carica papaya
  Intron number 1 from transcript evm.model.supercontig_48.1 40 (locus evm.TU.supercontig_48.140) derived from phytozom e v7.0 (chr-ID supercontig_48; pos 825349 to 825826)
tttagatcgtctgatttctctctacggtacttgctttctctgtgactctatcatggagaaatgacttgttattggttttaaaaaattagtttgattatttttccaatttccttttgtacagttttaatgggtttgtgtctttgaaattgtatgaaatggacgttcatttgcaatggtctcctcctgctttctacagtttttaatttctgctactctgccctgtcttatggagattgaaatgggatctggttttgagatatgaaatgtacagccattgagatgggttcttcaagcttaaagctatttatatatttatatgtgtgtaatgtatgtatatatttctaaaactagagaagttcaaatcaatggctaatggccagatgttgatggtttgtgtgacaaaaggtctgatttgttaatgttgtcatcttttccggtttcttgttcttcctttctaaaacttttcgttaaggtgacg

SEQ ID NO: 75628 - DNA, 591 bp, Carica papaya
  Intron number 2 from transcript evm.model.supercontig_48.1 40 (locus evm.TU.supercontig_48.140) derived from phytozom e v7.0 (chr-ID supercontig_48; pos 826148 to 826738)
aatccagtttgggaaaacgtccttcaaaatctgcggtaagaaagatttccagcaatcattcgatgagtcaatgttaccttctgcattgtagaaatccaatattttggcatctgggtgtagttacacaaggggttttggtgtctgaatgtagtttaagatatgtgattgttctaatagttctgatatttttttgggcagcaaactgtcaatatcttagatcctgaattagagatggagaagggtttgagtaagaataagagaaattacataatgtgtagagaattgacaatgtcaataattttcattcagtttttctttgaaccaaacaattacaagcactagcttttatagctgataacaaactaattgaaggtaattcttagctaattatcactaatctcaaaacttcaactaattatttctaataaattctaaccattaattaaatttgggacttgatgaaaacatggttttgttaatcatgaggtctgaatgtataagtactcgtatatgcttgtgtatatcagtaagtggaattatgagttgaaagtaggtctgcatactgaagtattttgttttctgaaggactct

SEQ ID NO: 75629 - DNA, 522 bp, Carica papaya
  Intron number 1 from transcript evm.model.supercontig_21.2 1 (locus evm.TU.supercontig_21.21) derived from phytozome v7.0 (chr-ID supercontig_21; pos 267439 to 267960 reverse strand)
ctcgctgaacaggttagtttgattttattctgggtttatttttttttttccttttgggatttgggtttgttttggcaatgtcgtattgctgttcggttgatgggaaaaagggggaaatggaatttcaggggcaatgagatgggatttagcgtctaattagttgtgctagtcttggaggtccctgtttttgggatttgaggaaaatgtttgatggctgagaaagttgaagctaagaagatcatagaaagaaaatttgaaagtcttaatattttctcacagtattcaattcccttcgcccttagcttcaaatgccaaataagaatgggctgattcccaactgtatttctgggattaatcaggattatagttagattgctttaatttatccaaattcaatcctcgaagcttgataattccccttaattttggaaaactaaaggaagaaacttaatgaaattcaatgatttattttcttgttctgctgtagggactgatcagtgagagtgatagagatagtatttt

SEQ ID NO: 75630 - DNA, 152 bp, Carica papaya
  Intron number 1 from transcript evm.model.supercontig_6.17 0 (locus evm.TU.supercontig_6.170) derived from phytozome v7.0 (chr-ID supercontig_6; pos 1395069 to 1395220)
agaagaaggtaggcaaagtcctttgataccacctttcataacttgcattaatttcatgtaattgatcattttctgcggtcgatcatggagttaatttgaactttcttctttaaatttgttttttaattttactgtagttgacgctttctggt

SEQ ID NO: 75631 - DNA, 490 bp, Carica papaya
  Intron number 2 from transcript evm.model.supercontig_18.1 37 (locus evm.TU.supercontig_18.137) derived from phytozom e v7.0 (chr-ID supercontig_18; pos 1197243 to 1197732 reve rse strand)
aaatcttttgcgacgaggtccccaaagcggcggaggtcagtacctttgtttctgccatttcattactaggctttattcggagaatttctgggcagcttttttttctgaattcagctccagttggcggctaagtaattaaatgatcaaagttcgctgctgattgattagagattcccgaataatgctcatctgagagtacgcagaacttgtcttgccctatatatagggtacacgagggtctaccttgctttcgtgcacgattttgaatggttctttgttcttctgcaaatgatttaagaacggaagttatctaaattttaggtgtttttttccctggtttatatgcttatatttcatggagcatctgtttgaactttgttgataggattatcttatggtattacgttatgtggtggggttctttcattaattcatgtttgtgtttcttttttggtacagaactttttggcgttgtgtgctagcggttatt

SEQ ID NO: 75632 - DNA, 479 bp, Carica papaya
  Intron number 1 from transcript evm.model.supercontig_140. 54 (locus evm.TU.supercontig_140.54) derived from phytozom e v7.0 (chr-ID supercontig_140; pos 732779 to 733257 rever se strand)
acgcaggtgaacaacgcgttggtcccttccacaaggtttgagtctatcaatttctgtaggtattcattacgtgcagttttaaaaaagctagggttccggtttagttactgacgggataatgagggaagaaatttgatttttacttccgtaacgaaaccttaatacaattcagttgcactggataattaggtggaattgattcattattatgcttgtcttagcgctggattcaacaaatagacatgaaataattccaaagttgtttcttttgctagtagtcttctcttcgtttctcagcaacccagcggagcctctaatttatttattgcaaagctctctctctctctctctctctctctctctctctctgcgctacatatctatatttatatatatctcttccctctcttcctcttataattcccttgttttctgctgctcttctgcccagtagagtttttctgcagttgttggaccca

SEQ ID NO: 75633 - DNA, 612 bp, Carica papaya
  Intron number 2 from transcript evm.model.supercontig_55.7 5 (locus evm.TU.supercontig_55.75) derived from phytozome v7.0 (chr-ID supercontig_55; pos 470476 to 471087 reverse strand)
agctggtcgtattggggtacatttctacttacgtacgcctcagttaaactcagctgccataatttacctttttttatatttctcttgtttgatctctgtttgtgagcgccataattttgcattataaggggcccaattaatgtcccttgatcggctcgttggcttaaatatagaactggaatgttagtctttagatggacatactctgagtactaaaagaatataaaaactctcatgttgctatagttgagagattttttttgatggattatgggttctttatgttgtatggcaggatttttatgacaagaaatgtctccttgacatgcatgtttttttttttcttttgttcttgtgtgtgattgccattgaagaagtaagcatcatcatctgtgtctttgtgttttctctgtgctattctcatgtttatgcaaaatgcagatggcatgtctttatgtggcaaattacaaaactttatcttgcttgtcccttttgactgtgttagcgatacaatcttctgatttcgctaatcatagatgcatttttcctcatatacttaaattatgtcatctctaagcagggctgtggtgccccttattcagggtttcgaag

SEQ ID NO: 75634 - DNA, 264 bp, Carica papaya
  Intron number 1 from transcript evm.model.supercontig_31.1 06 (locus evm.TU.supercontig_31.106) derived from phytozom e v7.0 (chr-ID supercontig_31; pos 2235324 to 2235587)
ctgctgtcactgcacagaacactgttggggttcaggttgcactttgatattacttttcttcttaaaaaaaaatcctgaaattgaagcttgcttttgtttactctaagattttctcaaacagctccatggaggtatcttataaatcttacaaccaaatctatagttataattcgtctaaataatctctttttcgtttcttccaatgtaacaaccaactttgttctgtggtttctctgatctattgttctttttctcagggtatta

SEQ ID NO: 75635 - DNA, 474 bp, Carica papaya
  Intron number 3 from transcript evm.model.supercontig_3.12 7 (locus evm.TU.supercontig_3.127) derived from phytozome v7.0 (chr-ID supercontig_3; pos 982213 to 982686)
ggcttccatactcctaaaggagacaagatagccaagtatgtttcctagtttcttcctctattaacaggtttgcgggtttggttcaattctcatttatttgctattcaattaatagtataacatgtaagaaattcgcgtttaattgaataagaaatccgaatttaatgtaacacttaatcactgtttcatggctgcttatcttttttgggtaagtaatcggaaaagttcatgttgtgtgaatttgattttcatttcatctagaggactaaggaaactcttcttttcttctttcttgataatgtctttgttattgataatgtctttgttattgataatgatgattcatatatggactactagaaaggaaaaatccatgccttatcgaattagaatttcgactgtgaaacaattgaaataaactatgatgttcttattgcaggaagcaggttcgcggatttacaaaattcttttcga

SEQ ID NO: 75636 - DNA, 467 bp, Carica papaya
  Intron number 1 from transcript evm.model.supercontig_5.24 0 (locus evm.TU.supercontig_5.240) derived from phytozome v7.0 (chr-ID supercontig_5; pos 2109040 to 2109506 reverse strand)
tttgtccaaacaactttttggtcagtctttgatattttaattgcacattgggaaattatttttggatttttttctttatttctttggtttttggtttcttgttttttttctttatccataaataaaatggctcttattggacatgatttcttgagataatagggatctctatttgtagataatgtttgttagtgtctactgctatgtgttctggtgcattaatcccaaaattcattctctcagaaaaattctttccatcttcaattaaaactgctatgtgttctggtgcattaattcaaaaattcattctctcaggaaaaattctttccatctaaaaaaatttacctgttaggctttagtagcacgagttaagaatatcttttcatgaagttctatcttacattccatgtgctcatgagatttatccttgaaacttttaacaggtttaccccattcacacttttcat

SEQ ID NO: 75637 - DNA, 740 bp, Carica papaya
  Intron number 1 from transcript evm.model.supercontig_29.6 5 (locus evm.TU.supercontig_29.65) derived from phytozome v7.0 (chr-ID supercontig_29; pos 515133 to 515872)
caggcggtcagctcctttttctaatatttttttttatttataatttatcttcttcctcctcttgttaattgttatgtttttttttttttgttttgttttccccgacatcttggttctctctcatattttgttttttcttagttgtcggttttctctgtggatttctgaaatgtaagttaggcgtcaactctctgcctgtgtttactgttgctcagcttctgttcctcaactagtggctttcttcttttctttattttatccgccgaatttgctcccaaaatgctctcttgatgatgataaaaatcaggaggcttcaactattgtcgatcgtgattttctccttacagcatgttttgcttcttactttagctgaattctcttttgaattggctgcgactgcaaattatgtatccataagcgattttcttctcggtttcttaaatgcgtgaaaggacggtctttttgtaaatatagaccccctgtggtgatggagatttagggctataatgacggagagtaattaagcagccagtaaaacaagtttctagttctatgatcaaatcattacgataggtgttttataacttgcttcactttttattttaaaaacctgatttttgtcgtaatgtggccggttaaaagagataagacaaaattcattggaagttgtcctctgcgtttatgttacttgtggtttttctttagttcctggaagggttcgagtggctgtaagattgcgg

SEQ ID NO: 75638 - DNA, 509 bp, Carica papaya
  Intron number 1 from transcript evm.model.supercontig_27.2 04 (locus evm.TU.supercontig_27.204) derived from phytozom e v7.0 (chr-ID supercontig_27; pos 2008953 to 2009461 reve rse strand)
gtcgccacttgccttgatacccaaggttattttttttctttcttctattttttcaaacctgaatagatctctttcctgggttttccatcaaaatggatttcgttgatgggtttttgataaaaacatgatattatttcaccttccaactgacacagtagcgtatgtatttatatggtgccacttgccttgatagtgaacgttttttctttcttctttttcttcccactatttctcaaacatgaatcgatttcctatctgggttttccatcaaaaaggattttgcagatggatttttgataaaaacttgataccatttgatctttggactgatgcattggtgtgtattagttagtgtgttgtgtgtttgtgttttcctcagtgggttttccatcaaaatggatttggcagatgggtttttgataaaaacatgatcttgtttcatctatatatatttgcttgctgaagagatgaggattgtttatttgacacagagaacttaagtaaaaaat

SEQ ID NO: 75639 - DNA, 449 bp, Carica papaya
  Intron number 1 from transcript evm.model.supercontig_12.1 68 (locus evm.TU.supercontig_12.168) derived from phytozom e v7.0 (chr-ID supercontig_12; pos 1537657 to 1538105)
tcaccagttcgtttcttcctctgctcacgttcaggactgcttttagttttttcttttggaaaatgctttgtatttagctcaaagtaagaattacgttgtgatactgaagaatataaaatttttgcttgtcgattgttgaagtatcattggaaccaaaagttctctaactttgtttggattaagcgacaaaactaatttcaagattgcgagaactgtgattcagctttttatgttactttctttccaagaaagacctatggagaccatcagaattaccaatcagttcagtaattagtgatgaacgcaaattgatcgggtagatggcgaattcttaagatctcataatgtattgaatgtgcattgatctagcattatgactttgattcacttcactgttctataattgatttgcagcttatacttcagaagaaattgatcacaagacaaaa

SEQ ID NO: 75640 - DNA, 743 bp, Carica papaya
  Intron number 2 from transcript evm.model.supercontig_14.1 09 (locus evm.TU.supercontig_14.109) derived from phytozom e v7.0 (chr-ID supercontig_14; pos 1351541 to 1352283 reve rse strand)
cagagaatatcacatttgagaactcttcccctgaggtgaagtttgtgaattccgtcttcttcttattctttgtccatatccaagtcaactcggtacaaaactgggttctttttgctttgattacagtgttaaatcttggtttaaggtcatagatatgttcacgcaagcggctaaactatgtgaagttcgaatttggttagactgttaacatttgcatttgatggcatttatcttttctgtctgtttcttaaaaattgttgagtgagatttctgtaatttgcattattttgttctatgtggatgaaaatgagcttttaggatcttgctattaataaaagctaactcttttttttttttgtttctttgatgagtaattcagcttctaggcaatggcgtgcaatgaattctgtgtttgtagttctagatatgccttctgcttatccccttctgagtttttttgtgaatcttacccctttatcacgtaagccttatggatgttggagtcaggatttgtattagaaaaacttgccttttactgggcaattgaaataaatgtatataaggatttaccttgtagatttgcgtgtttcacaacttgtctggttccaggttctccataaactaaaagtggataacttcttttccttaaaaatgttttaccatgttatataaattaaacgcattctcttttcctttcttctatcacaggggtcaggtcaagctgtggcactacgagcaacagc

SEQ ID NO: 75641 - DNA, 656 bp, Carica papaya
  Intron number 3 from transcript evm.model.supercontig_1028 .4 (locus evm.TU.supercontig_1028.4) derived from phytozom e v7.0 (chr-ID supercontig_1028; pos 15135 to 15790)
gcaggtatttattaactcctcccttcgttttcaaaattgttcataataaccaaccatctcggtcataaagttgtagatttgagtcagattatatgtccgatgtttatcttaaaagattgttatgtgattgatatgagagatcgttgtataattggtattgttattattggtgtacacatacccgtatgatactgaaaaaaaatgtttacgacaaatttcagtttgaccccttgtgttttgaggtttttttatttaaaaccttgtgagtttttctttagctactcactatttcgtgattcagttttgtgtcaaattatttaaccagtacgttgtttaattctttttaacttttcaaaggttatgagacagtgaatttgaatcaagtttgaacagaaaatagtgaattgtaaaaaaataattacaaggttttaaattgaaaaatctctacccacaacaaggggtcaaagtgaaatttacccaaatgtttattattaattacaataattgaagatgaataatatatatatatatatatgggtagtttctaggtgattttgaatcagttttatttggcaaacaatgcttatatgtgtccgatatggtgccaaattcatatacaaggaagctggaagagcagaagctgattttggacggtt

SEQ ID NO: 75642 - DNA, 706 bp, Carica papaya
  Intron number 1 from transcript evm.model.supercontig_12.1 44 (locus evm.TU.supercontig_12.144) derived from phytozom e v7.0 (chr-ID supercontig_12; pos 1358741 to 1359446)
gagattacaggttcttttctgatataactttatttatggtggatatcttgcttatttgtttgtggtttacctttgttttagactgttttctatcactaaatgttagtgaatcttgcttgaactcattaatatcatttttactacaggaatcttttgttatttcgttttgttttttattgcttagtacatttcagtaaagtagctggttcaaatcgtattctaattagtagtagtctttaaggctgccaatgaagaataactggtaaacaactatcattatgcatttgagtttctgagtcaggtttctcaaaatgtggtctacttcagaatatattaggtcatacatcatcattcttaggtttacttgctacgcttttgtagtatgttttgaaattttcactataattatcagcacattgcgtagatatttcattctttccatcttcttcttacactagattgcagaaaaaacaattctatgttatacagaggtttagttttcgtgtccttcaatatgtgaacttacttttctactagaagtcatttaaggaaggatgttaggtgccggacctttagcctcttctttctctttaatttgtcatggattttcttcgctttcagatagccaggtgcctttgttattagtgactgtatttgaattcacttcgcagggcaaaaagggtgcttggattaaattgcctattgg

SEQ ID NO: 75643 - DNA, 848 bp, Carica papaya
  Intron number 1 from transcript evm.model.supercontig_21.1 74 (locus evm.TU.supercontig_21.174) derived from phytozom e v7.0 (chr-ID supercontig_21; pos 1698763 to 1699610)
ccctgcttgatcatattaaggtatgcttttggtttaattttttgaaaacttcagattaatctgttttaaatttctcagttatcctttgtctatgttgtttctttaatgactcccagtgcttatttatagtagtctggatttccatagacattgaatcgatattttctgcatttaactatagctgttgatatatattttttcttctgtttagttcttagaaagagattcaaattagttctttgatgaattgcctcattgaatttttgaaaggtcttggtcgagttttgaagataatctaggctggttgaacaaattcagagacaattcaatacgttgccgatttgaaattttaatttttgtaagtgtcccaattgtttaactgaccatggagaagcctcaatcaatatagatagccttatacacacacacatgcatatattaaggtaaaaagttccaagatataacattttatgaggaacccctgcaacagatgttgcgtgtcaaccttcttaaatcttgcaatcttaaaattttatttcagtttgcattttctgaataactaaacttgcttggtattgcattttatcgtatcatgaacttggttagttaggaatttctttttgttttgttttacttttatgttcaaactatcagctgattatttatcttggtaatgaaagagatgctgtgatattttccatgattggtttgtgaaatgagagtcttattggtcgtgtttgttctttatcttaaggtctctaaagatgattttggctgagtgtggatttctttcctatccttgatgcttgaaggtcttacacttagcatctgcaggctgcttttgtcct

SEQ ID NO: 75644 - DNA, 1007 bp, Carica papaya
  Intron number 1 from transcript evm.model.supercontig_3.36 2 (locus evm.TU.supercontig_3.362) derived from phytozome v7.0 (chr-ID supercontig_3; pos 2471145 to 2472151 reverse strand)
tgaatcccttttcttcttcatcacttgtcaagtgggtatgttatacatgcatgtatacatacataaatatacatatgtattatatactcctcttctccacagtgtcattcaagtttaggagaatctttttgcttagatgtttgtttcgctagtgggtttaaatgatgttgcatctgatattcatcttcttgaaactttgaaggcaactattacgagatttggtgccagttgaatggaggatttctggtcctaagttggtactataagttaatttagctgaattttgaatatttcagaggttcccaaaaatgggagcattgatatttcaataatttgtttcatcaaattgcatttcagaaggatgaggtaaatagttgagggtgtaataatttaattccatgtttttataactttgaatagttgttctctttatttgaggtctgtggttgctgttcatgtaatccgtatgaatatccttgtgccttgaattttccatttaaccctttttttctaacggtggtctagagctcagaatcaaccatccaactggagagagaaagatagagccttaatccaaaataaatttttatagctaactaagaagttagtctatgcacacagatagatagaattgattgtttttgttggtaactagaaggaaaaggagaaaactgggttatgttactttaacagaaaagcctaaatatggatggttgtttctgtatcttccttctcgataatattacttgtagaagtacaagctgagtatttgtttggatttgattcatctgctggacactctcagtttagattccttaagtttttcatgtgaggccttttgtgttcagccacggctataaggtttcacattatatagtccttttttttggatttattttcctgtatatggggaatcactttggctgcaactacgacggccccaaccatgcaagttcagttctctgtcattagatttgatggtctgatctttgtttctacttgctaag

SEQ ID NO: 75645 - DNA, 401 bp, Carica papaya
  Intron number 2 from transcript evm.model.supercontig_13.1 28 (locus evm.TU.supercontig_13.128) derived from phytozom e v7.0 (chr-ID supercontig_13; pos 1132365 to 1132765)
aaaaaaagccaatagtcaaattagttctcatcaaggtagactcttatgacgttttgtcttgaattggctgtcttatcctgtatgtgtgtattacatgtgataagtagttgagcatttttgttttcccctttttctagaattgaccctaaaattgcagtttcttccacttgttacttcaaattacaaatttctcacttttgataggataattgttaatgaatggttgtcattttttggatttggttttgaagttttcttctctcagtctagttaaatgtctgtcataaactttacctattgctgatgtttcttgtctaagttatccaattattgtgttttagttcctaattgcttttgaacatgtagaaggatcaaacagtggtgctgccgagagagacttg

SEQ ID NO: 75646 - DNA, 609 bp, Carica papaya
  Intron number 2 from transcript evm.model.supercontig_1838 .1 (locus evm.TU.supercontig_1838.1) derived from phytozom e v7.0 (chr-ID supercontig_1838; pos 9004 to 9612 reverse strand)
tgctttgcttgcaggaggtatttactttcctttatggctcttttacatccatttatgaattgcaggttttagcatcatggttctgttagaaatattcttgagtcttggttaagtaaagttttattttccgttgctaaattagaatgatctagccctttcaaatttttggttgttctatcagcaatgttattttttattaataatttttacaaagcaactgaaatatgtggcaacgccctcacttcttatgtgatatctacttcaaacaattttgctgttttaaagatcagctttcagaatgttaacggcagggtgcatttccaacttttgtcccacttaaagatttgatttttattagttttcttccccttcaagattggtattgatgttgtgccctaaaaaataagaaagcactaactagtgtttctattatctctttcacgctgattcatggagttgatctcaaattttttcttgagtctagatagaactcttctttgcagaattcgagtttgaattttggttgaaccgtgtatataatctatatctaaaatatatattgtctatttatcagagaaagaaactctaattaagcccgtgaccccaagt

SEQ ID NO: 75647 - DNA, 568 bp, Carica papaya
  Intron number 1 from transcript evm.model.supercontig_146. 29 (locus evm.TU.supercontig_146.29) derived from phytozom e v7.0 (chr-ID supercontig_146; pos 134594 to 135161 rever se strand)
ttttgctttcctcgggagttatattgtataacaaggtaatgcccattttgatgttcaactttattttttcttgttttcttttttcttatcttagttggggtccctttagggttgaagtaaagcgtggtactgtggaatgtagtgcttcagttcttgttggacttagaatttctcacgtattaatttggaatttcagaacatgttatcacatttcatttggtttgtgatctttgtgcaatgtgtaccgcacatttattatgtattctgagcatggaaagatgatatctttgtgaaagatgtgttttagtcatcagtggagaagacagctaaatactgtaaatggataacggatttagccaagagaaagaaagaaggtatagatgatactggaaaagattgagggataactaaaatatactattcctctgtaattatcatgtttttcatgcaggtgagtctaatgtggagctgtagttttcagctttggccatcaatcaggggattaatcaaaatgtgattatattttattgcagtgggttctatctccgaaatactttgattttccatt

SEQ ID NO: 75648 - DNA, 550 bp, Carica papaya
  Intron number 1 from transcript evm.model.supercontig_160. 27 (locus evm.TU.supercontig_160.27) derived from phytozom e v7.0 (chr-ID supercontig_160; pos 479355 to 479904)
ttggcttgattggtgctactgccaccacttttgctgtgagttattttttgtgtctttcacattcatgtagttttcttataacttattgattgttttttagtttttctaggtttttgaattgtgcaaaaagcttgatcattgtgcccactttgatacatgagctacacttattagttgttaggtcattgttcttctatgtttcaggtttagtggcatgcttcatattttataatttgcatatcatgtcttgtgtttgagattaataatttgattatgacatagatgtgcttctagtaatgcagttaatactgtaatataacagtctgtctctgtttatttcaaagaaaaagcagtctgactctctactaggacagtaaatataaaattttgtagcgagtcagataccagttgaaactggttaattccagccaacaatggcatacttgtcaatatatcataattgtttttggtaacatttttgctggagtcctgtttgatggtaataaatttggcaggttggtcagctgcggaggacttttgatttgttcta

SEQ ID NO: 75649 - DNA, 851 bp, Carica papaya
  Intron number 2 from transcript evm.model.supercontig_160. 27 (locus evm.TU.supercontig_160.27) derived from phytozom e v7.0 (chr-ID supercontig_160; pos 479907 to 480757)
cgcaggtagacatggattagtttttgataaccaaagaatggcattagtcttttgtgttctgctttattttgtttattaaacctctaaaatattgggaagagacctttttcctcctgatgtttacacttcccctgatgttttactttattaaagcgaggttttgctttcttctaaatcatcatgtcaatacttttttcaaaatctaaaggactactattatcattttgtttaccttttcaaaatctgaagggaaagcagttgattttagtaaaagaatgcccaagttcagtgcttctagttatacagaggtttacatgatctcatgattattggcaaacaaacatattgatataatgaaaataatcatataatacttcttcctctaaaaaaaatcatataatatttccactaaattgaagccgaatattttagctccgtggccggtggtaacatttgggatcctttagtgtatgacgcttgcttagggcattcgagaactctggttcattttgttattatatgaacctacctaataaatagagatgttgtgtggcatacttataaagagctaggtagataactttcattaagtgtgtgtttgttgatagttatacagcaagagtaatgcatgggtatggatgctacagttttggctttcttcttttaaatattagttgccttactggttttgtttagtgatgatttcttctctgtgtttagcaatttgcatgttgtaaactagaagctgatattatcatactttcactgctgaaaatgttttttgagaaaaaaactagcaagctgacattttatgtactttcaccactatagttatctagatcacagtcatc

SEQ ID NO: 75650 - DNA, 1002 bp, Carica papaya
  Intron number 1 from transcript evm.model.supercontig_19.3 0 (locus evm.TU.supercontig_19.30) derived from phytozome v7.0 (chr-ID supercontig_19; pos 285243 to 286244 reverse strand)
gtcccggtcagtgccttcttctgaaaaaccttgttactaactctacatgtttattcattaagaaaaagtctggaggtttcttaacacggcaaattcttcactcacattacatctagcacatggttgttgcaattggtttgggttaggtcaggtgatggaaagaaggatcttgttggctttccttataggagataagcgttagatctgcatggaacttatacttaggcattttcaacttcttagtaggcaaatgtttttagtttactaaaacattgtgttcaatgccgtgattcatttaccctgcattttgatttcaaactaattaggcacgggttcttctcattgatcagttgtgtgatctccttatagttttttgttgtttgtctgtgtttttcttcttgctttaatgttgattcaacaattgtgttttcacatcaaatttagactcatttccttcattggattcctgataatgcctaagattatggaaaatcacttaaattacgatatacaatgagaaattatctccaaatgttaagagtagagatggaaaagtaaggtggaagattaactcgcttcatgtctaggcaatgcatttgttggtaactaagttcaaagggcagaattacttatcttattttttcttacttcttttttggtaaactaatctcatgctgcttacagttcccaaaacaagataattttactattcttatctgcatggatttgggaggactaaggagaaaaagatgtcattgagtgagaactgtctttgctggcttgtgatcattgggttggagtagaatactaggacgtttaagcaacagttcaactgctacatatgatctggataggaatatctttttttgcttctcattgagtgaaggaccaatatttccttctggggatgactttagtcacgcctcatgttgtttgataacatatatataaccagttaatgtatctataaccagtttgaatcttttgttctttggcaggttt

SEQ ID NO: 75651 - DNA, 913 bp, Carica papaya
  Intron number 1 from transcript evm.model.supercontig_594. 2 (locus evm.TU.supercontig_594.2) derived from phytozome v7.0 (chr-ID supercontig_594; pos 11571 to 12483)
ggtgcttctgctgttcgtccctgttcaggtggcaggtacctatactaaagaatctttttgttaagtctattcaactatggaatttatagtttttgcttttctctatggcatcataattggatctaggggggattgaactcacacgctcctcaaggggagcatagtgtcactaatgaagcctttgggagattgaatcaattgcgttaaaaatttttgctttattatatttccaggttcttgtacataatctttttgtatttcacagaaaatataggatgattagatatccttacaaaaaggaaaaggaaaaagaaaaagaaaagaagttatagtcaagcaccctttcgacaaggaatggcatccaagcttgatgcaacaaagataaacagtaatccttaaaatatctatgcacctgacgaaaccaaaaaggacatcttatccctaataaccaaaaatggagaggtttgatttctgaagatcctagcatccctttccaaccagatcaccataaaatagtgaaaaccaccctcctccagaactccaagctttctttcctcctcctaaagcccctaaaggtagatacaatgaaaccctcaaacttatcaggaacaaccaaaatcaaaccaaaaatgtcaaaaagttgagaccattctggcttctttccgatacctgcttttatttttcctctcatttgggccatcattatcccattaccactgattcaaactttatttcctctcaaacttttagccatgatatcatcctttctcatgttggctgcctcataaaatcaaataagaattgataaatgtctaaattttattccctttagtatgcagataaatagatgctcatcatgtaacatttattgattcttgcagattgagaaattgtgcatttgtggatttcaaaa

SEQ ID NO: 75652 - DNA, 643 bp, Carica papaya
  Intron number 2 from transcript evm.model.supercontig_53.6 6 (locus evm.TU.supercontig_53.66) derived from phytozome v7.0 (chr-ID supercontig_53; pos 438431 to 439073)
cttgctgttgtaagtttttcttttcttcctttttttctactattgtcttgtagctatataattgatttacacacacacacacatatatatatacacatgtatttgcacatatatgattaatacgcatggctttcgtttcgtagaaaatgaaacaggtatttttgaacaaataacatcatgtaaccaaacctctatcaccaagtatttaggctctatttagctgtagaaactttgttttaagcctttccttgtcaaaattcatacatttttatatacaaaatatgtatatttgttaaaatgaaaactatatttgaaaaatgaaagtgaaaatatattatgaatttgagaagaataaaaaaatcattttaaaacaacccatgtttctaccatcattttctgtaaaaatttattgtcattttcagcaactattcgtatgtgatgtgtaaaagatgtatgaatcttaaaaatagaactcaaaacgtttgtctacaactgaatatggccgtaataacttgatctttaatgggtattgagtgtttgtttatgggtttaaataaaggtttatttttttcacttcattgttgatttgagtagtgtatattttgcagccagggatcctggtacctgaggccttgggtttggg

SEQ ID NO: 75653 - DNA, 646 bp, Carica papaya
  Intron number 1 from transcript evm.model.supercontig_3.42 3 (locus evm.TU.supercontig_3.423) derived from phytozome v7.0 (chr-ID supercontig_3; pos 3069607 to 3070252 reverse strand)
gcaggtacttttaaggttctcttgttggttctgtgatgggccagtttcatggttctctcctaatcagatgcatttatcctgttctgagaatcaaaagacaaagcagaaattttcatccaggaaaagttttcgagtttcttcctcaatttgttatcattggattctctctaatcaatcttttctcttagttttcaaaataggtgacaaatacaaataactttacaacacaccggttctcaacttgatttttgagaaaatgtggatctaatatatttgcttattgtcattgagttctccagcttgcatttgtgagttggacgttatgtgtttgttgacctcagtggtctacgtgctaccattattgtgcagttgtttaatggggtgttttgtgctatgatggtttcatgtcatagggaaaactaagtttatactattgtttgttcaagtaccttgatcgttatttgctattctagttggattatcctgtatttttgctgataatgtatctggatcattgtttgcctggaattcagtgttactgaagtttttattgttgaactatgcttgtagctgcaatccttgtgtttttgctgataatgtactcttgtctggttattagttaaaaactttctttcaaaacctgcag

SEQ ID NO: 75654 - DNA, 416 bp, Carica papaya
  Intron number 1 from transcript evm.model.supercontig_5.30 3 (locus evm.TU.supercontig_5.303) derived from phytozome v7.0 (chr-ID supercontig_5; pos 2747972 to 2748387)
gcgtggtatatctacgtagattcatatctgttttgctgttctttcatttactgtgttcaacaatttgaatttcttatctgaattttgttttggaattttatgtggttagtttccatttggtattgttattgcgggggcgtagtccagttggtagccgcatatctatgttttttatgattattttcgaaattaaatcttatatagttatcagtatgtgtttacatatatgtacatacgtatatgtatatgaatatgtatgtagatgtggtttttttattgcgaagtgtgtgttgactattgattagaggtataatttggtatgagactgtattttttggtgggttatttgtttgtttgggtgaaaatgatgtgattttttttaaaaaaaaattttattttgtttcaaatgaagcaga

SEQ ID NO: 75655 - DNA, 761 bp, Carica papaya
  Intron number 1 from transcript evm.model.supercontig_53.1 34 (locus evm.TU.supercontig_53.134) derived from phytozom e v7.0 (chr-ID supercontig_53; pos 1141538 to 1142298 reve rse strand)
gagggtaagatgaggaacctctttgttactggtatttgtttttatccttcgtgttgtctgttctttatttttctatctacttctggcttttcacttctttgtaaaaatagaagatttgataggaaaatttcaattcttaaaagtactgaaacggattttcaatatgcatgtatatatatattataactttagagctgtaataaattgttgtcgtcttcttcttctttctaagaactgtggaggttcaccttgtggctttaatattctttagatcctgtttcattgtccattgtggatcagtgaatttctttcgttgatttgcttttcccatatcaagataactggctaatgcattcatttattgattaggagatactagtgcccttgttttaatatctcattagtatggttgtgcggttttcttcttgtactctgttggagaccagagaggagttctgtgggaaaataacatcctttttatgaacttcacagaattctttctagctctttccattatgcttcttgttctcacatggtattgttcctaaaattgtatcaggtttttgaataatatgttttcgctgtttgtaaaaattgtatcaggcccttgatgaacttgagaattaaaatgcttcagtcaaatatattggcttgacatgcatgttggaagaatgcttaggcttctcatattctttttttatagaataaacttttatcttctttgacccttattcatgacttgtgttgcagctcatcgtttg

SEQ ID NO: 75656 - DNA, 942 bp, Carica papaya
  Intron number 1 from transcript evm.model.supercontig_18.9 0 (locus evm.TU.supercontig_18.90) derived from phytozome v7.0 (chr-ID supercontig_18; pos 657136 to 658077)
tggttggtgagactggtagtggtaaaaccactcaggttagttttcattactatttctccactatgtattctacctcattttaaatgcatatatatatatatgtttgtaaattagtgtctattggatgtttaagattcttccttttgtttttttttaatgtatattttctttttttggcatgagataggatgttataggaactaataagtaattgacagcttcggtattttcactagatagtcattttaaatgaaggaaccaaggaagttcagaatctttgaaacaattggagtagcccgggtgtttgttagattctcctttttttttgtcctcctttctgtcgggtgttttatggtgtaacttctggtccaaaaaataatatgagaggaagatacattgttcttaatacctttatcttcctgaatcaattattgcacgtgcaaatatgaaaaatcctttctttggcattttctcttaggtgggagacaaagctgtatgttactgagttttttgtcaacataaataactaaattttttctcaacataaataactaagtaatgccttaggatatcttttttgaaatatgttctgtgttactgggaatgttgaagcttgtggagtgtgtggtggcttgtgtttttgcccactgatgttctagcatgtaattttaggtttaggaaagtggggtgttaaaattttgtgttatatgcttgtaagatattctggatttgtctttataccaagaagatattaaatcttaatcatcataccttagttgcattgcatcaagctgaaaagacagtcaactcaagtgttggtttgtgattggataatttcatttatattttgtgctaaggaagtgtctgtggaaattagtgattaatgagtaactgttattctcaatagattccccagtttgttttggaagctgtcgatataga

SEQ ID NO: 75657 - DNA, 638 bp, Carica papaya
  Intron number 3 from transcript evm.model.supercontig_12.3 02 (locus evm.TU.supercontig_12.302) derived from phytozom e v7.0 (chr-ID supercontig_12; pos 2779131 to 2779768 reve rse strand)
atattgcaaccggctttccagctgacattaaggttgggaaatggaaattttttctccattctttaaggatttgtggttctgctaattaatttggtttcatagtttgaaagagcatggaggtgattctcttatactttcatttttcttcatggttgtgtttggcacttttgtgttaaatatctcttattatcatgtgggtcagtgcaccccaaaatgttgcttagtaacttggagatggaattgtaagagctgcaaaagttgtgagctctatatgtgtgattttcgaaattgcaagtagttgttaagcatcatttgccaatctggatgacaaaattttaccttgtccttagtattcaaacaacgcggaggaaaagaatttttttgggcaaggaaaagattgtttaagtccatttgactgtggctgatttgtttaactcagattggtttttctaaagctcatctaaccgccctgattgtcatgacctacatgatatactgctatccgcactagcacatgtaaaaataatatttctgttgttctacatgtttggggaactactaagagtttattgaaattctttgagccgttattttgtgcaacagattgcagtagctgcaattgccagaagaagaaagct

SEQ ID NO: 75658 - DNA, 974 bp, Carica papaya
  Intron number 2 from transcript evm.model.supercontig_205. 3 (locus evm.TU.supercontig_205.3) derived from phytozome v7.0 (chr-ID supercontig_205; pos 9415 to 10388 reverse st rand)
tatttgatagggtgtacagagtgtaacatttgagggtaagggaatgtcaaagaagaataagtcttccttattttccaatatactctcctctcgataataaagttgattaaagaatgactaggtcttaacaatagtaacatcagtggatatataaaatttttggatggaaaggtggtagcatttatatctgttctatgtaggtgagtacccatgaacacacacttgatagaacttggagcaagtttccccctttgagattgatgtatgcgaacataggcaacacatttaaagactcttgggataaggttgttttgtgactcttacattaggaaataaaatagctaagactccacgtggttgcgaaatgttaacaccctaaatactgacatatttataagatatgtgatagtcaatacaattttcctccagtagcgtttggatacatgatttttgaaacaaaaaagcacgtatagtagcaaccaagttgttatttttctattctatcactttttttttctaaataaaaagtataagtatattaagtaaaagacgtcaagggagtgccacccatgtacaacactagattactagggtaaatggtttccaaagtatctagtggtttccagtctagtggtttctcatgggtctttcaacaagttttcaagatccgaatacatctcctgagttgctttccaaatttcatgtgctgtattgtagaacagctagtgcacccaatgtgtggttctctgaagttgttcatctagggcattgcaatgtatttatcggctccaatgacctgtagttagcgttagtcttggctggagaagggatttcacgagtgagataacactctttcccttttccttggatgactaacaacacagatcgaaaccattcacggaaatttgattcattcaatctgtggtgggtgatttgcagtgagtgattcacttctattaaagaaagaatattat

SEQ ID NO: 75659 - DNA, 1005 bp, Carica papaya
  Intron number 1 from transcript evm.model.supercontig_1021 .1 (locus evm.TU.supercontig_1021.1) derived from phytozom e v7.0 (chr-ID supercontig_1021; pos 14936 to 15940)
atttacttgggtaatttctcctgaattccataattgtacttctatgtctcataatctggtttttctgttattacaattatatataatatatattagcattatgattgaaagctgcttgaaacttgttgcttccatgaagttgtaggtcaatgtatttggagatgtttgagtgaacttcaatctgcttggatattggttctttgggtcaaactgataactagcataaactcgatgctatgtaaggcttttgaagctaataagtcagtggacataaaaagtcatgtctgttatttgggtaatgagattacacagtaaggatgacaaatgagggcaaggtgaaagaatatgtatttcagatgattaaatgtttctaaataattttcacagtcatgatacacttaatcatacccaactattttgatggtgataaatgcacttaaatcatgcctgaatattttggtggtgaaaatacacttaatggctctgacttggtgatgcttagttatacattcagaggagtaatcgatgagtgatatttagagtgtatttaagaagactattgtttggattttcaaaaagcagaggatctatgatgggaatgggcaaaatttttttattctcccatttctattattttgcttttttggtcaatgaccttcctgactccctcatgacatggtgaagatctttgaccgtgagttcatgcagtctgcaatggtagctgtaatgaagttgttgcagaattttcctgcatttccctattgccttctggttatctgttgtgcttgtaattctcaattgtcatgcatacaaatttattgtttgaagtttctggttgttcttgattattgtgaagaaatgcatcatttggaacttcgcataatttactggtcatcctgtgagcaatatattttccttgattcctctgttgatttaagtagatgataatataaactttgtgggatctgtttgttgaatgcattcagttgctggaggaaacaacta

SEQ ID NO: 75660 - DNA, 474 bp, Carica papaya
  Intron number 2 from transcript evm.model.supercontig_14.8 2 (locus evm.TU.supercontig_14.82) derived from phytozome v7.0 (chr-ID supercontig_14; pos 970720 to 971193)
aagcgctctctggaggcacagcgtcaagaggtgaaagattacttctgataattaccatgcttgtcttaagattattttgcgcttcagcccctccaggaaaggaaagagctcattgtttcctgtccccccaaaaggaaaatagttatagaaactcttacttgcaaactggtgctcaagtgtttgtgatggttgtctttctggttgagattttgatgatggatggggcttttcaattaacattcatatatatatgcatgtaaactaaataataggatatggtattcttcttgctcagtttagatgtttatttgttattattgactcgttgggctgtttgtttagtttttaatatttgaccttaatttgtgcattatctttctgttgcatattttcccgttttctatttttgtttttgtatctgaccatataatcatcttattcactcttttatttttgtgcagtctctgaaactac

SEQ ID NO: 75661 - DNA, 661 bp, Carica papaya
  Intron number 3 from transcript evm.model.supercontig_14.8 2 (locus evm.TU.supercontig_14.82) derived from phytozome v7.0 (chr-ID supercontig_14; pos 971229 to 971889)
aagcgtcagctggtgagttttctgaggtttctcgtttttggttggactgtgactgttaaataaattatcaggttattcaataatcaaattaagagtaatgcaggtcaatgataaagacatgtacagtgtgcaatctgttgctgaagcaagattgatatcaggaagttatcataagtttctattcaatctatgacatcctcgtctttgtagacttgttattctgaaataaatcagaaatttccatcacaatataggacaaagaagaaaagggaactgagccagatgaatttgttaagtcagatattgaaactggatttggttgttgcttccattcttctattccttcttcccacatagacaatgtgaatacaggaactgtaacagcaagatgtttaaatgcgcaaatagattggtttctttgttttgtttttttttccgaatatgcttggaacttaacagtatgcaattgttggttccgtactcttcttactgcatactaactgctgatgcaaaagatttaaatcattatgtaaattatttatagcaataaattcaataagcctcttttatcagttcctcatgtccacttattactatcggatttcttcaaatatggtgtctgaagtagtttttttatatttgttttaggctagcaacgaag

SEQ ID NO: 75662 - DNA, 443 bp, Carica papaya
  Intron number 1 from transcript evm.model.supercontig_13.1 20 (locus evm.TU.supercontig_13.120) derived from phytozom e v7.0 (chr-ID supercontig_13; pos 1070899 to 1071341)
tgattagggcatatcctctccatctcgggttagaggtaatgtaattcttttcccccaaaatttatttactttccctgtttgtttttcttggtttctttagattctggcattctgcgggatagtttgtttgatttattctctgtctgcaatatgtaatgagtatattatatgagaatttgggttcttagacgatcagaaacctaagttagaagctttctgaagtttgaaactttctgaagtttgaaactttctgaagtttgaaactttcaacttctatatttcatggttaccttcaagatttgatctgtctgaactttatttcaactggatgagtttatgtagagactagtggctgatagaatgttgctttgtccaaaacatgctgctggattactggaagtaagaaattgatttttacgtgatttattcttgatcacagggtg

SEQ ID NO: 75663 - DNA, 928 bp, Carica papaya
  Intron number 2 from transcript evm.model.supercontig_6.42 6 (locus evm.TU.supercontig_6.426) derived from phytozome v7.0 (chr-ID supercontig_6; pos 3217410 to 3218337 reverse strand)
tacttcgcaagagcaggtaatttccaaaataatatatacaaatatctcatctgttattaacaggcctgtgcgtttctcattgtctttgatggatggtgagggaagaaatgcagttgtattaattttttatatgaccattttcttatggtaatgttccttgcagagctgcaggaggtggagagaagaagaagtgaaggaggtttggctagtttgttttgctctcacacttagaagtaatgtttttattttggtcatcacattttgtaagcagcatgttatcatatttagagaggaaactgtctgtgtgggaatttgttattttccatttcatagggaatcaaaagtactgctgatttcaatattttgttcctgcactatgtattttgatatgatctatttagatttattcagttgggatgaaaaattatgaggaaaaagattatctgaatgtttgacatataatggtaaattataaggagaaattatatgaatttgtttgatatgataatgatagaaaaatagtatgttgtaaaaaataaatacttgaaatttcataatttcaaatataattgaattgtgcaaaatatatggaattaagattgaataagccatgtataaatctgcttattacttttatagtgggtttggatgatggataattaatgtacggtatagtaattatgtagttttgttttgtttgaatcatttcaaacagatggtatgattatttgggtggtatttggtggtaaatttttcttcctttttttaaaaaattttcaagccactgattctgtggttttttatggttgaatatttttctttcttttttaccctcacaatattttattaattccagttttacccttaaaccccaattttgtttttcttcatagccccacctccattttcttcacatcagcttgcatct

SEQ ID NO: 75664 - DNA, 657 bp, Carica papaya
  Intron number 4 from transcript evm.model.supercontig_3.26 7 (locus evm.TU.supercontig_3.267) derived from phytozome v7.0 (chr-ID supercontig_3; pos 1897837 to 1898493 reverse strand)
gccttcgtacaaggtaggacaagttttgccggttgaccccgtggacctagctttgttgtactcttaattggttggttgatttttatatttgtgaccaagttctgataggattactggaaacatatttatcaggaatcttacattttacattgtttagcctaggagcaccccttatatgctgacagactttgttccttcctcttaggttttgtgatatgttggcacccgaagtgggtgtcttctattaaaaatgttgcttttgtctgcaggaggaatgtagtctatcttgtttctcctttgatcataactgctctattttcatgcaattattatagattgttcatgtcaattcttttgctctacagtgtgtgacgtttgtgacatggttattaaactaatgttaattccatgtcatggtgtttgatcatatgtattttgactgacttttatggtgctcttcaaaattaattcaaataattttatgtgctaattttctgtccttgataaaacatttatgttgtagagaaggatgcttgtgttaaggtgaaatttgttttgtttagacattcctctttatcctgctatgttccacttgttgtattttcttttcctatatcatgacaagattcttataaattttgtccctttctcagctct

SEQ ID NO: 75665 - DNA, 466 bp, Carica papaya
  Intron number 1 from transcript evm.model.supercontig_19.1 08 (locus evm.TU.supercontig_19.108) derived from phytozom e v7.0 (chr-ID supercontig_19; pos 724685 to 725150 revers e strand)
cccgtgatctctttcaattcgaaatcacgtcgcaggtcttgatctctccaagttatcaccattaatgttataatgcatccctgcttttgattttccttgggttaatttggtttctttacggcctttatggttgattttcccgttgcatgaacaaccagttatgggttagtttctgtaatttatggattttgttttgctaaataagttgcttttattagattttttttaggaatttattgggtaatttaaagctaattatgttattactgccatgatcgaagctcactttatatatagattaccccttccattttcaagcttatatagtgatttctttacttaaggtcacaagtaattggggtttatgaggtttctcgggaaaaatcagaacgttttgttaaattttcttcaaaaggaaataatcggaaagtcaattttctgcaggttcccgagggacttagcagac

SEQ ID NO: 75666 - DNA, 312 bp, Carica papaya
  Intron number 3 from transcript evm.model.supercontig_190. 24 (locus evm.TU.supercontig_190.24) derived from phytozom e v7.0 (chr-ID supercontig_190; pos 170870 to 171181 rever se strand)
gcagggtaattcattagttgttattccatttcctttttcttctggtttggatttgaatcacgattcatgcatttgttctcacaattttatgtccaatttgaagcttggatgtaatatgaggaaaaacaaatttgggtttgttcaattttgattggattataggaatgttggcaagagtaagcatcaaatggctaaataggtgttttctagaatatgttttgtttcctgttggaatttcagccgaggtagttgtttgagttcattactaataccggtcacttacctttaggtatttgctgatttcagattacc

SEQ ID NO: 75667 - DNA, 434 bp, Carica papaya
  Intron number 2 from transcript evm.model.supercontig_59.7 (locus evm.TU.supercontig_59.7) derived from phytozome v7 .0 (chr-ID supercontig_59; pos 80141 to 80574 reverse stra nd)
ctaaggtgcgctcatcttgtaaatattttgttgaatccataaatgtgttcttgatatgatttgctggttacgttcaaggtggcatctttacttgtttctatttcttttatgttgttttgcattttctgatagaactcaaactcgtaactttactcaggtttgttgacaagactgttttctatcgctatctctttgcatatttggaggttactttaactgcattatttatttgaaactcataattagatgaatgtagcaataatgagcttatgtttttatcccaaaaaaatgactagtcttaggtgtttgacaaggtttttcgagattgcaagactgttgtctatagctgtctatcttcttcatttgatagttaataacatgactgatataattttgaaggtttgggaccgtgaaaagattgtaataattcctga

SEQ ID NO: 75668 - DNA, 871 bp, Carica papaya
  Intron number 1 from transcript evm.model.supercontig_3.12 9 (locus evm.TU.supercontig_3.129) derived from phytozome v7.0 (chr-ID supercontig_3; pos 986216 to 987086)
aaaccaaggattgttggcttattatttctggcaaggtcagatttctcgtcgactcagatacattttgtagaatatcagttactgcaaatttagtttatttttttgtttgttcttttttgatcctattttaagctaatttcttgttttaattttatataactttggtactcataattataatatgaattttgtgtttaattctttgtcctcacaccttgcaaatgatactgaaatcataccaggaagaattcaaaggaggatagagtaaacattaggtcataataatacgtgtctgagaaaagattatggaaattacaccttgcaaatcaactagagattaattaacataataatacgtgtctgagaaaagattatggaaattacaccttgcaaatcaactagagattaattaacaaaggaatgaatactaaatcaaacaggaccttgatataaatcgggtattggaattttttttaaggaagaaactgagaataagagctgttcttttacttaatttttgcggattgtttgtccgatgagttgattgcattttcgttctactttgggatacatttctccgcagtcaatacaatgtttggtagtttaaaggtgtaactttttgaatctggacattacacgttatttgtcttgtaccttgtgcaccaagcaaagtacagtagatgtcttatttttgacctgtcttcctgttgtaatatgcatttatcggcattcggggagaatttattcgagtttaaaataacaatgtgtatttcttgttgaattttattaataccctaacctatttagtggaggtttttgtagcaagaatagagaatgtattgatggtgttctgaactttaatgtcaggtgt

SEQ ID NO: 75669 - DNA, 575 bp, Carica papaya
  Intron number 1 from transcript evm.model.supercontig_125. 32 (locus evm.TU.supercontig_125.32) derived from phytozom e v7.0 (chr-ID supercontig_125; pos 548935 to 549509)
atttgaatagctttgagattaacattgtttccaaggtatattacttctctcattttattctgctcttttataattcccggatatttttgtgggtcttgttttgttttctcaaaacttcgtttggttgctgagaaagagtgagtaactgagatgttatacccatttaccgtgaagggaaaagctcgtttcaagctggagccgaccctgaactttctgatactaatatcataattcagatactatcctcatcagcttaagcgtctgttgaactaaataaattattttaaaaatctgaattgaagaagcatagatagtggataattaaactttattttaaccagaaatgtggttagggaattgagaaaatgaaatatcattaccattaatttcttggttggtgcttctgtgtttttttatcagtaactgcttcaacaaatttttagcataagaaaggggtgtttctagcataacaaaggtgtattgaaatgcatagtagttcctttattcgttaccagacagtctctatagttgatttgtaatcattggtactaaattttttcacttatgatatcagg

SEQ ID NO: 75670 - DNA, 820 bp, Carica papaya
  Intron number 2 from transcript evm.model.supercontig_45.2 6 (locus evm.TU.supercontig_45.26) derived from phytozome v7.0 (chr-ID supercontig_45; pos 780110 to 780929 reverse strand)
tagagggtgccatccaggtaagatacagttatatctattttctcttttattgataattgtaatttgaacacttgcactgacaattgggttgagctatacactccacctgaagttaccccggcaattgccgggttggccgctcaagatatacttgactttcacttttcatatgttccatcctattattcaaatatcttagccatttctcaataattactcgaactgacagtccaatcagggcttggtcagggcatttttctaactgatctcatttctttgatagcatggttgtatcagtagacatatatcccagtctggcaagcattgaaggatagatccacctattgccttttgtgcccccaatgcttatagcaagtgctagaacataatcaaatttacagttgaagtgtcagagaatttaaaagaaagaagcatcggcataaatagaagtatttagttaaagcatagcgcatattatgtatatgataatctgtgggtctggtaagcaaggtcagaaggatcccgaaccagactgtggtggaaggttatgatttcttgaaatgattttctgaaatcactcctccctacttcagaattcctaaaaagatctaataccttgttctgaaacaagttgtagtttttcctaatagttgataacagcattagtccaattggaatccaagcggtttgtgttgttttatttgtttattttagctgtttttagatttttagatttgattgataaatatcttccataaggaatcaacgattaaagttttctgatagccatttttttctttcagtgcagacattgaaaaca

SEQ ID NO: 75671 - DNA, 917 bp, Carica papaya
  Intron number 1 from transcript evm.model.supercontig_34.1 43 (locus evm.TU.supercontig_34.143) derived from phytozom e v7.0 (chr-ID supercontig_34; pos 1295503 to 1296419 reve rse strand)
ttcccttcttgggactctgattacccacttccgtaatttccttttattatgtttttattattattgactatattgtttctgggtctgcttggatggtggaaaatgttgggaattttcctggaaagttttgattttggaatcagggagtgctttgatttctgctatggtttttagggtatttaaatcttcattttcctggattgattaaatgagcatcaattgatatgaacttgatttggcttctttgagactataagagcaatagttatttaagaattatgtaatctgattttctttttctatttcccttaatttcctctggtttaaatgaaattgtaacagcaataatcattcaaatgggtttgcagtcattgaaatttttgttgcctaaacctagttaagcttcatgtttccttagttgagaaccagagagagatagcaaaagagaggatgagaacagtataggatatttttcattttgagcttcaaaatttttaaacagaaggcatgcctgttactgtacaatatgcatttggataacatcctttttcgaatgggtatggctttgactattcctcaagcccgccaattagttaactatagagatattttagttaatggtcatataatatatatgtcaagttattgctgcaaaccccgagatactgttacagtgaaggatggccacaaatttagagccgtaattcaaagttttcttgattcatccacccatgaggaattgcgaaaccatttgactcttcatacattccaatataaaggattagtcaatcaaataatacattgaaaaaggattggtttcaaaataaatgaatttcttgttgtaaattgtattgctacttttcataaattctcttgaagcaactaaacttttctccttttgatgaaaatacaggttc

SEQ ID NO: 75672 - DNA, 598 bp, Carica papaya
  Intron number 1 from transcript evm.model.supercontig_54.4 2 (locus evm.TU.supercontig_54.42) derived from phytozome v7.0 (chr-ID supercontig_54; pos 878994 to 879591)
caatccttcaagtcgtttcagtaaagaaaaagcaggtatggtgtctgaaagagatggactgggcttgagggggaaaatggaaaagtgtcttatgagtcttatgagtccttttttcaagagggggatcagatggctagcaaacagagaatgaaacattaacagccaggagggattgcattaaagtctttccagtcttttgattcgctttggatatcttctactcttgacttttctattttttggttatctcaatgaatgtgttagaatcctagggtaataaataaatctattgttttagctagcataaaaccattaagtaagatgatggttttcagatcttaggttctaggaagaagtcagctaactcttgccttatatatttggactcaggcttaatcaagaatagaagcttttttctcttatagttctggagtacctgacttttaagagattaatgggttcttttcaactattccttgaccctattcaacataatgtcaaaatatttagggtaaaaaatagaaataacatgggtaaattaattttttgcatatatcaattagggttagggttagggttaataattctattggcatct

SEQ ID NO: 75673 - DNA, 993 bp, Carica papaya
  Intron number 1 from transcript evm.model.supercontig_25.1 76 (locus evm.TU.supercontig_25.176) derived from phytozom e v7.0 (chr-ID supercontig_25; pos 1764999 to 1765991 reve rse strand)
accgccgtccgatccacttctcccctctcccctgagtacgatctctctctctctctctcttaatccctcatactcgtctctccgtctctttttacttctcattaactagtctcgtggaaaaatgattctattgtggatgttctttcgtgttcctttctatcaaattttttctttatattcagctcatagtaaggattcagtttactttgcggggattcttataatgactctttaaataatttttctgttgattttattgtaattttgttggttctcaatgaaatatatttccttacatcgggtgaaactacctgctattatgtggtattaaaaggcaaatgaaaatgctagaaaattatgagtgatctccttcataaccgcttaatggaagatgatattcaacgaatctcaatttcattggtgaagcaaaattttttcttcgcttctgcgttcattcttcctgtgcttaaaagcttttgcctattcgcaagcaaatagaagaaatattagggaaattgagtttgctaatgcaccttgttttttttccctttttggacacgagattgaaacttttgtccgatgattaaaccaaaagagtaaaaggaataaaaatgctggaaaagaggctgttgattcgtttgtacaattacatctcgagttataatgtgaattgtacttaatggtactaataaaaaatcttggccctctgacttccaatttgcatttgtgtactgttttacgaaattatgttggtggtggcaatgtctttagacaaaatagacattcttaatcatctcaaaagcataaatctgaaataacatgattgtttaaagtgatggaatcatacattttagtggaacttcaaagaaactatgtgttgcctttttgttttgatatgtacgtaattattttatgcatgatagcattgcaaactggtaataaattagcctgttggcagggaggaaggtcctgcaggggtgcggtcaatttcaa

SEQ ID NO: 75674 - DNA, 506 bp, Carica papaya
  Intron number 1 from transcript evm.model.supercontig_114. 59 (locus evm.TU.supercontig_114.59) derived from phytozom e v7.0 (chr-ID supercontig_114; pos 786681 to 787186)
agcttcaatctcctccacactatcaaacacaagaggtacttacacgcattttacgatttttttctcttcaaattttgtaatttatccacgcgtaaataattccactgcattcgctgattagaattgacaaattctaggtcttggattcttactcttttcgattgttgaatggattgagcaaagcaaaaaactctttcgatttttcaaaattttctattgatattttgataatctttctcgttattcgctacttgtttagttcattgaagtcgatgcaactgcgtgtttttttgagtgttctggagcgtaagaaggtttatggtacacattgaaattgatttgttgttgtcgcaaagtttaagctgtgatatgaggtctaacgttttcagtttggtgtaaaaaaaaagtgagcaatggatagtagaagaattgaaattctctctgaattatgctgttatccttgttaagtaggcgctctttggagattgaatccaggtaattaaatt

SEQ ID NO: 75675 - DNA, 576 bp, Carica papaya
  Intron number 1 from transcript evm.model.supercontig_6.22 8 (locus evm.TU.supercontig_6.228) derived from phytozome v7.0 (chr-ID supercontig_6; pos 1847846 to 1848421 reverse strand)
cgcgagctccgattcaaagcctgaacaatctccaggtatacaattgaacacttgattcttctgctctatcgatgtgtgcttgttttagttctttggcccacagtttgtttgataactcaacaaacgggaatgaagacaaatacgtgcgtgttgtagatataatagctctttaggtgtggctttttcagttgactcctggcttatttatgatttatcttttggatttctaaaatacttggaagctaccatcagtatctcaaagtaatggaccttatcaagttcattgttgcatgtagtttgaggaagctaaatttgattttatcaactattgataagtcggtgcttcttacacttagtgtgcagaatttttcttagtaagatttgtatcacgattgaataaattatggagaatagcactgcaccgaattatatttctaactatatcctggtgcatctaatttcggttgcttagttgatgttgtaacttgtttgttttgttcgcttaatgagaatctattttgattcaaaaaaatttgtgaagcacccactggtacaactgctccagaggcaaaagtt

SEQ ID NO: 75676 - DNA, 882 bp, Carica papaya
  Intron number 4 from transcript evm.model.supercontig_19.6 8 (locus evm.TU.supercontig_19.68) derived from phytozome v7.0 (chr-ID supercontig_19; pos 483196 to 484077)
tccgtgagccaccacagcgtttcatcaggcgcagggtatgttccttcgtacatttgatcatagttcacctgcttatgatattgtggtgttttggcatgcggtttttcttgtttatggatgactgctatttacgttgatttttattgtggtttaataattgaattgcgtgggttggtcatgaatgattgtactgttatttgccttttttgacaatgtggtcttttaatattgtgatttctgcgtgtatggccaataaattactcgaacaagcatgacattttgttaagatggctggacattgtctagaatgagaaaaagtattgcttcaagataacttggggttattgatgaaagcttcttatattcaagaaaacttgtggttattggtgaaacagcttctggagttgatatattccgaggaatgtggttagagttgtggaaattctataaggaacatgttttcttacttaccgtgcatttgagagatgaaaagaaaacaagtactgtctgattcatatctttttctttcatgcatgcttttaatgtgcccttgattttttagtggaattatcatggtcatttggagtgctttttgaaatttgagatgttcttttcatgttaggctagagaattaatatactaagggtaacgtatgtatataaattaatttattgataaaagaattttgaatgacaagattttagcagttctttgtcctcatgatactgatatgacatcagctgtttgtgcttgattaagttgaacatgtaattatttatgttttctttttcactataggcttaactctgttaagattgttttcattttcttccattgaaacctttctaatttgccttcatgttatgcatgtatttgttcagg

SEQ ID NO: 75677 - DNA, 555 bp, Carica papaya
  Intron number 1 from transcript evm.model.supercontig_2869 .1 (locus evm.TU.supercontig_2869.1) derived from phytozom e v7.0 (chr-ID supercontig_2869; pos 1096 to 1650 reverse strand)
gcagaacgagtggctaccatagcccaggtcaggtttatcttgcattttcttcacaaagttttctttttggtaatctgctattgtataattatttattggctccaacagttttggatttcaagaaaattctatgcattaaattccatgtttgcattctgacgtggaattatttttgcaaaaaaagtttttccatgtaattgtagctaataagggaatgcatccagttttaatgagtaagctataggtaaccaaatagaaattggtttcatagtgttctctttagatgtgtctgtttgttctaaaatgctcaaataccgcacattgccacatgcttttatctcacaaatttcccatcttcaataacaggttaagcaaaacagttactaagtttttcttttccttatccttgacactttttgggatagcttggtttgatttgcatgtgatactgtgtgaagaatgaacagattgatcaatcgattgtgcacagacagggttgagagaatctgtacagatgtaggctgggccactgtttttctccttcctgctcgcaac

SEQ ID NO: 75678 - DNA, 451 bp, Carica papaya
  Intron number 2 from transcript evm.model.supercontig_30.4 7 (locus evm.TU.supercontig_30.47) derived from phytozome v7.0 (chr-ID supercontig_30; pos 706321 to 706771)
attcagtcttacttttgagcttttttttcctagaggtgagagacagttttctgtattaaaatttcagattattgttgctttcacatgataagtatgtacaaataaggttatcatgatatgtgtctatacagtcttcaattcttactagacactttatttgctaacgaatccttataatatcttttcttagggataagaccatgatttctttacagaaatttctttatcaactttccagtggaattgggttgctatgatgtatcaatagtgtatttattatgttccttttgcaacctttttttttggttttgtttggggggggggggttgcttgtcctcctttgcgtttttttcccctccctgctaatgatatttcatcttttatcaaatttttttgaagcaccttctctgatactagatttgactgccttttgtgtataacaatcaggtgt

SEQ ID NO: 75679 - DNA, 257 bp, Carica papaya
  Intron number 1 from transcript evm.model.supercontig_43.1 5 (locus evm.TU.supercontig_43.15) derived from phytozome v7.0 (chr-ID supercontig_43; pos 172158 to 172414 reverse strand)
catatagcagaggtctgattttcatttgatgatagtgcccataactcattacattgacgcatttgccctacccttctttttcttttgaccaaaaattagatagcatatcttgatatgtttatactttattttaatttaatttatttttgttgtatcatttaatcaaatcatgatctagttgtgctcattggatcaatgcacttcagaaagatgattatatcgttcttggcatttccagacactgtcatctgggcttg

SEQ ID NO: 75680 - DNA, 902 bp, Carica papaya
  Intron number 1 from transcript evm.model.supercontig_5.20 4 (locus evm.TU.supercontig_5.204) derived from phytozome v7.0 (chr-ID supercontig_5; pos 1741996 to 1742897 reverse strand)
tctcggttcatcatcgatcagatccttccaaacgggtaaaatgggttctttctcggattctatttcgctttttcttggatttctttttctaatttactgtttggttgctgagaaagcagaggacggctaagatttgttactgggcatttcaattataagacatttctcttaaacttagttaactaggtagtagatacttgttaggtcgaatattcggctcagttcaggttttaattgatttaagaataagaaatccttttaaacttaatcttgtatatatgattttacatttttattctagatttagtactatctcaacatgaataaataatctaagattttagtgatttaaccattggttttctttttagccttagctggatagaatttgttctgcaacttgattaatagcatcttgcggtaatgtcagcttattaggaacttgatgttgtaacgtttaaaagaaacaatgaagaaatgccttttttttttctacactcacggtcatggatgatgctgcttcacatgcagcaaatgcaaacagcatcaatcctccaattcattagttccgactgatgcctttacatgcttagcgtctcagtgtacctcttgaggatgcagctgatcattagtttgggaggcaagtcagcctccaaaattcaaatttatcttcgtcggccttatcaaacactttattgagtacttttcatcattatctcgtcttgccctggtcatgcattttttatgttgtgaaaatgcttttcggaaataaaattatgcacctattccagctgtttgagctgaaaactttgtggaatattagtgccgatttacgggttgcttctgatgtaaagtgttctattgcagatcctggttatcttttgtggaactggtgtcgttaa

SEQ ID NO: 75681 - DNA, 557 bp, Carica papaya
  Intron number 1 from transcript evm.model.supercontig_12.1 9 (locus evm.TU.supercontig_12.19) derived from phytozome v7.0 (chr-ID supercontig_12; pos 106394 to 106950 reverse strand)
gggttttcagagcagttttttttgagacttcgctggttagaatcatgatatacatacatatatttatctatatatattttcgtctttctttccattatttttgtctgaaaatgacaacatgcactaatgccgctcttgttctatttctctctgtttgctttgtaacagaggcgtcacgttcatcgtcgtactccaatgttcttgattctccatttccatttctgatcctttgaatttcaattttaatctttcaggaaactcttttttctttaaaaaaatcgtgggcagttttgtttgggatccttctttttttctggttctatcttctctatttttccgttgaccaattcaagaagcctctcggccgtaccttttttttttttgttctcgataatcgtatttcaactttcaacccattctgttgcgatcttcgtcaacttttcttttttctctttcactttctaattctctgtgtcaaatttctgacgttcggttctgattcctcactgatgttgttaacaggcgaagaagatcagaagaaaagttgggcaaaagga

SEQ ID NO: 75682 - DNA, 639 bp, Carica papaya
  Intron number 1 from transcript evm.model.supercontig_246. 6 (locus evm.TU.supercontig_246.6) derived from phytozome v7.0 (chr-ID supercontig_246; pos 55349 to 55987)
atcctctccccacgcggtggagctttcaggtactgaaatgtaattagttttttagcttgaagaaagttgtttttgcttgatttccgataattaaaggaactgacattttgttcggagatggattaccgtttggacattggaggattttcgtttgacttccgatttacttcgatattttcgttttcggaaaatgaatttgtttatttatttttttgtttccactatttttggttaagtcaaactgttctgtgagaacttgttacttgtttcaatcggttgttcgttattttagtagattttcttgatcctctcactgatttactttcctcctcgatgtccgtcattgctttttagaagttcatctgtctctctctctctctcttttttttttatttttttattttttttttcatgtttataaacttaaaatcagtctactaatggttttgtcttggttagtgatggaaggcgctcgagtcgtctgtctggttattttgtgcgtgaaattttggtgaataactgctaaatttaggcactgaactgtgcatttcttgtaagaagttaactgctaaatttaggccctgaactgtgcatttcttgtaagaagttatttgtatctataggattttaaactgttct

SEQ ID NO: 75683 - DNA, 623 bp, Carica papaya
  Intron number 2 from transcript evm.model.supercontig_12.1 08 (locus evm.TU.supercontig_12.108) derived from phytozom e v7.0 (chr-ID supercontig_12; pos 973855 to 974477)
cactgctgtgttacccaattcaccatcttcttcaggtgggttccgtcagttttcttcaaaaggactatatagagagggcatgagtgctcgaacatttttatcgtgggaatatggaactgtttgtacaaggcatattatcttgttttcagattgtagggtggctgtggtcttgggaacatttcgtatcagatcagatcaggccctaccacagtgatattttgattgagtcactctctgttatgctctttttggcagcatcaaagcattttggagattccgtctggaaaattttccattggttcgtacatctctggcttatttgttcctttgtctcctctaacagttctctttttaatgtgtaacaggtggtggtgattagtagctactagaatgctactaccaatcttataatgtcaatataataaacattttggccttcttttggccatatatatatgtattttttttttacttatttacaccaatactttagtgcttctgttttggttcggttcaaatatatttgtttttagcaaacaaacagaggggtttaaagtctctgatagattgtttttttttgtccaccaggagaaccgccggagaatcctttactcttacttggg

SEQ ID NO: 75684 - DNA, 202 bp, Carica papaya
  Intron number 1 from transcript evm.model.supercontig_11.1 78 (locus evm.TU.supercontig_11.178) derived from phytozom e v7.0 (chr-ID supercontig_11; pos 2599488 to 2599689 reve rse strand)
acaaagtgatcaattaggcttgatttgtttgtgttagaaaaaatgaagagataagctagctgaatataataatttgttcaaatatgagaagaagaagtaagatagactaattaagaaacttaagttttgatttatggttgatgcttaaagccttcaaatacatgagtatttataagtactactactaatactactactacaa

SEQ ID NO: 75685 - DNA, 456 bp, Carica papaya
  Intron number 1 from transcript evm.model.supercontig_192. 4 (locus evm.TU.supercontig_192.4) derived from phytozome v7.0 (chr-ID supercontig_192; pos 29352 to 29807 reverse s trand)
ggtacttgccaaatcattctgttaaactgttggtttatcccatgctattgctgtaatacgactgcttctttgttctttcttcgcttctggtgttgtctactttctcgactgctgctgttttcttatttacattataataataggccctttgttgctttcttggtgattttggaattcgattcaatcactttctcgcatttcgctttatagaatggcatttgccaaatcatatttttttatttacatacaaattcctcgcgcttagtgacgattccttactgttctgtgctgtcgtattcgccatcccaagttttttcttgagagatgtttctcttttgttttcttctctgaccagatttctttgctttcttgtttcaaaggattctcggcatgttagtttcttttatttggattttgctttttaatgtattcgtctatcttccaggatctttgttg

SEQ ID NO: 75686 - DNA, 735 bp, Carica papaya
  Intron number 2 from transcript evm.model.supercontig_230. 2 (locus evm.TU.supercontig_230.2) derived from phytozome v7.0 (chr-ID supercontig_230; pos 37353 to 38087 reverse s trand)
tatcttgaggatcggacagttcgtttgcagctttggtaagatatatggtcttccagttctttgtttttctctcttgtgctatgaagctttttccttgaggattttctgttttaatgtttgatataatgagcatattgtaggccattggttgaaagtgtgtttttcatatataactaaatgtatcccttttctttttcccaaacttcagtggtaaagcagaaacagggagcatattgttattgttttgctattcattaaatttgtatgcatgagatagtgctgtttatgatagttaaagacaatgaagagggaatgatttgacgatattgaaaagtctatactggttgttagaaggttggtgacaaccttatgcctatggcttgtgagctaaatttgagtttgttgcaaggttgtgcatgtttacatgtaacttacatagtggtggactttttaattttgtttttagagagtagattcttaactactcacataaaattttaatccaaaatttcaaattataaaactttgctatttagaactatccatattgctactattatgccggttagagagttcagtgcttatgtagtttctgatgaagagatgtctgttagtttagtattagaatacatgcttattgctctatcaaattatcttggttttcattatgtctaccttctttccttttgtgacttcccagggatactgctgggcaagagagatttagaagtctta

SEQ ID NO: 75687 - DNA, 525 bp, Carica papaya
  Intron number 2 from transcript evm.model.supercontig_12.2 10 (locus evm.TU.supercontig_12.210) derived from phytozom e v7.0 (chr-ID supercontig_12; pos 1875464 to 1875988 reve rse strand)
aattttcaggtgggtgatggcctctgttttactatgtttctattttctgtttgaatttttcttgctctgtttctttgaagaaatgtaatggttggattactctgtttttcttgttctgtttcttgaagaatgtaatgggttgatcgccgcaatgattttcaatatttcacttacttttttgaataatgcaatgggctgatcagaaaataagattcgattcgttttctctgctttttcttttgtaaaagatgtaatggttggattactctgtttctcttgctctgtttcttgaagaatgtaatgggttgatcacagaaacgattttcaaacttttatctccttattattcgaataatttaatgggttgatcagaaaataactttccattcgttttctctgtttttttttttttttgaaaaaatgtaatggtttgatttctcaaataatattcaaattttctttactctgtttttttttttcctttgtgcagtaactgctcctgctggatttcctgatcatccacac

SEQ ID NO: 75688 - DNA, 640 bp, Carica papaya
  Intron number 1 from transcript evm.model.supercontig_17.9 4 (locus evm.TU.supercontig_17.94) derived from phytozome v7.0 (chr-ID supercontig_17; pos 1181507 to 1182146 revers e strand)
gaggttacttccagtatcatttcatttcagtataacattatgcattgcatcattcctgcttgccatggtattaggtctgctttgtgtatttgatgtttttgactaacttcttttgcattatcttaattttaagatattaaagctgtaaatggagcttgtcagaactttttttttataaaaaattttgttcagtttttttgttcatttgttttaaggggttttgtcctcttttttgtattactttcttctcttttctgaatagaacttgtaaaacattttaatatcttcagctactggtacataattattctctagggttggcgtaatttttctaccgcatgtacattcccataatgatggtgttttccaaaatcaaactttgttgttcagcatcttggactagccatcccttagaaggtatcgttaaaagatcatcaattcctaatgaagtagatgtagcagtggctttctggaaacccagagtctttacttgatccaggatgtgtgatgtatatgccattccgaagtgatctattaatctgctgataagtcgtttaatggcagttccatctatcactagggttgtttatgaaaattttatcctttgttggccaggttttagtgcgtcttattggtgctg

SEQ ID NO: 75689 - DNA, 889 bp, Carica papaya
  Intron number 1 from transcript evm.model.supercontig_386. 2 (locus evm.TU.supercontig_386.2) derived from phytozome v7.0 (chr-ID supercontig_386; pos 3602 to 4490)
tgcgctgaggcctggtttaagcttaggggaaacaggtaattctctttttcactgaggatgaattgcctgtgtgctctcttcattaaattttccttgttattcagtttgtttacctgcttagtcatgcaattcaatccaggttctgatttgccagggttttctaagatactcttctttttttctttcgcgttggagaagaaaacttattcggaatttccaaactatcttagaaattatttcctttcttattgtaattgaaacgaataatttgtaaccacagactgtcttttcctttaactgtgatgtgctccagcttctgccttcatctttgtatagaaataaatcctaactggatagtgaaaacatttacaaagtgaagcaatgagatccccaatcaagcaatatagcttttgtttattgctgcaccctttttgccactattgattcctgaattcttaggggaagtaaattgtgatccctgtaaaaatcgctcttgttgataaaggtagtgaaagaaatcaacttgataacagaaccataactttctagcccagcattattatcaaatgatccggatataactgagacgcatgtttggaaatcaaggatctgatgtaacccgtaatcaaatgatctcgtaaactaaaaaaattcgtcatccttttctttttactgccatctttatcatttttttttctgggacaggtatatttgctcagaaaccaccctacagaccacaaacacataagtccatgcataaatagtcacttaatctatgctcatgatgttgccatcgaactcttactgtgaaatttgcaattcacctattcattttcttctatttattattgcagaatctgtgagatttgtggtcagattgcgaaaaata

SEQ ID NO: 75690 - DNA, 520 bp, Carica papaya
  Intron number 1 from transcript evm.model.supercontig_42.6 2 (locus evm.TU.supercontig_42.62) derived from phytozome v7.0 (chr-ID supercontig_42; pos 575390 to 575909 reverse strand)
tgtcctcctattctggccaattcggatttgttaaggtttattttgaatcccgaaaccgcttgaaaacgtaataaaatacattagaagtgtaagagattcttcaaatctggtttgcaaaatattagggtgtcattcgcaaagaactaatgagtcaccatcgtactgttggttgtgttttgatattaacctatctttaatttatggtgatgtttctggagcgcgatgctagaattttccaaaattatactttcttcctccttaactttggacagattggtttcttttgcctccttgtgggccaaggctcacaggtttctgggtgatgtcactttatctattttacagaggaattgggatgtggcactgttttgatttttttatttctttccttcttttatgctttctattggcttaggagggtttcttatcctctacttttgtaatttttcctcttctatctaataatagttcttttttcactaaaaaaatgctaatcggtgtatacttgcaggttgcaaca

SEQ ID NO: 75691 - DNA, 354 bp, Carica papaya
  Intron number 1 from transcript evm.model.supercontig_48.6 9 (locus evm.TU.supercontig_48.69) derived from phytozome v7.0 (chr-ID supercontig_48; pos 395518 to 395871)
ggactgttatacgtatgaattcaaagaactaggatacttgtcttctcaaaccaaaaaacatcgaacttagaaaagtgtaagatccttcattcatttttccccttgcatcaaatttactcttaagttattattttttttaaaaaaagactctgattgaactctttaacttcatttggaaaaaaaaaattgatgatatgagcatgttgtggtgattaatattcactttatttatttttttgttcccaatatttatctgattttcaaacagtttattaatagcttacagattgctcttcacatgatgaccgtctatatataatatcaggtctgtagttcctgcagtttaaggacatc

SEQ ID NO: 75692 - DNA, 323 bp, Carica papaya
  Intron number 2 from transcript evm.model.supercontig_48.6 9 (locus evm.TU.supercontig_48.69) derived from phytozome v7.0 (chr-ID supercontig_48; pos 396190 to 396512)
tcccaagtatgtgatatatctcaaaactcaaagttcatgacttgttctttgcgactacatttgtttttttttttttttcagtttgcaagatctaatttacagtctgtattaatttttctagtaaagttacccaatagacatccttggttcggagtccatcattgagatgtaataaataattagccatgtatataatatattgacgctatagcctattattagtttaagggcatgagatgaaacttatgttgtctagctttctttgagttctagagattttctaattcacaaaatatcctgaaattcttatcaggtgtgatttc

SEQ ID NO: 75693 - DNA, 633 bp, Carica papaya
  Intron number 4 from transcript evm.model.supercontig_498. 3 (locus evm.TU.supercontig_498.3) derived from phytozome v7.0 (chr-ID supercontig_498; pos 21899 to 22531 reverse s trand)
cgcgtatgttgcttcttcccctatgttattttcgtactggtatataaagtaaatttcccatatgcaagaaattgatcgtcttcctagtcggaatttctagcagaaaatatcccagagtattccttgcccagtaggaatttggttgaggtagcaaagccgagtgtgagttgctccagttatggtggatgtcatccttaactcatgcttattcaacttatatgcttatatgttattggtcagtccacttgaaacttgaaaatctcaaaagtgtttatcaaatcataccatgaaaagagtaaattttttaaagaatagagtcacattttctagtgtcttgagtttttcccaaagtgacttcagcaactggcaagttgtttttgtctgactggatgagccagattcatgtatccaataaatcactatgtttttttaagcccacatgaagcacatggttttctattcagtgggccttatgtgctctaagatagctggtttttccctttcctgatttaaaatataatcatgatggaaaccacaaaaagttagatatatatatgcaattagacgttcaaaagcatctattatttttctttcatttttaaatgagtaccacttcatctctattatcaacag

SEQ ID NO: 75694 - DNA, 913 bp, Carica papaya
  Intron number 1 from transcript evm.model.supercontig_113. 32 (locus evm.TU.supercontig_113.32) derived from phytozom e v7.0 (chr-ID supercontig_113; pos 468168 to 469080)
gtgcttgtggtgggaatctttgttatattttgttcatttctctgcttattgttgtcttactttggacggttttatttacatttgtgtctctgtatggctattttgattccttttcctccttgttcattgatttttcttttgatatcgaaagaaaaataagttccttttctgattttagtttcctcttttgatggacctggtaattgttttttagttgcatgttaatttccattttatcagtttgtcatggaaaattttttatctgattttacttaactgttttaatggagttggtaattgttttattgcttttaaattgcatgttaatttccatcttatcagtttgtcatagtaaatttttacttgcttttattgaaaaaaaaaaacaactttttgttctgagaaaagaattgatatctataaatttgatcagttggagctaataatctttgcaactgaggaatggtggatattttatgctctctcaagtgcattcaataatctttaatttgaatatgatggaatttgagttctccacctctgaaaaaataaagagaaaggatctcggaacccacccaatttcagtttaaaaccttttatcttattttctaatattatacatgtattttgaaagttaaggagcgttgctaatgaaactggagtatcaactagtaacttttaaagtatgactcgattgcctgattagtgtaaaagaattacagtggttgaaactgaggaaagatgatcaaactatatatgcatatgagcgcaatatgatttgttgaatgtatgagttttaatattgatgtaaataggggccaaattcaagcgtttgtctcctcgtccgctaacccagcaatattttccttatgctgcagaagaaagggtagttgtgcttgtcattggtggaggg

SEQ ID NO: 75695 - DNA, 640 bp, Carica papaya
  Intron number 1 from transcript evm.model.supercontig_161. 32 (locus evm.TU.supercontig_161.32) derived from phytozom e v7.0 (chr-ID supercontig_161; pos 458684 to 459323)
caaggccttgacggtgcctcacttgattgccattggtaattcttttctctcttcttcctgtcttttagaatggaaatttaatctgattttttttttttatttattgtttttagcagtttggttgagttttgtttagaggtggtttcttgtttcatggttttggattatttttatttaaaactttgtttctaattgattcttatttgcttgatgtatgttatttctctttgctgtttgcgtaagtttcctttttgataagaaatgttttccaaaacttttcaggttgattacactactaaccttaatggctatacttgttcattttcttcttttgatgtttgtagcattaaatttattgactttatcgtgtatagacataccctgatacctgaaaatgcttttgaactgtatatggtttcaatttgccaagactatgccttatttaatacgtagattttctatcaactttttttctctctgtctttctgtgttgtgagtccaatttccttacaagattgtcacaacatctaactagagctctttgttctagcgttttctttgcttgataagtagcgtagcattcactctttctacatgatatgtaggcgtgggctcaacaattggagctggagtttatatc

SEQ ID NO: 75696 - DNA, 1050 bp, Carica papaya
  Intron number 1 from transcript evm.model.supercontig_115. 3 (locus evm.TU.supercontig_115.3) derived from phytozome v7.0 (chr-ID supercontig_115; pos 214570 to 215619)
tcgccattattgcgattttccctcagagaccacaggttctctcactatgcatgtgatgcatatgtatataggttttctcattgttgaattgttattacgttgtttctccaacaattattgacgactatcttcagttagcgtgagaattttgtgtgcctctggcgtttatattgtccgataaaacttgaattggactggcaagtatattctcattgttatatcaaaaatcttcgtcatcaaccatgaatgctttgcaaaactgattgtggtcttgggacactgggatgggaaagtgacaggaatcctctgtttgcttccgatgaaatcgaacataaccatttttgctgaaaatgagtggagattctcatagactgatccttattactacacatcttaagctcatctgtcggtgatctttgatagagataggtgtaggaaaggcttattaagtgaatttagtttaatttatttctgcaattggtaaaatccgttttgcgttggtggttttttttttttttttttggttattgaatttcaagcatcatcagaaatttggtgagcaagtatggcgtgagtaattttcttttttatttttagcacatttagatgcttgtgagacaagttgcctataagtattctcgtcttccttctgctaatgattatgtgcattaattgcttagacaatgagtcatgcgaagatttattgcaagatcagtctagtgtttacccttactatcatagggtgttcttcccatggtaaatgaagataatagagattaggatcatattggtggagtgaagctcttgacatggtacggtcgtttgactatggctccacatctgtagtgataataaggttgaccatgtgagtctcaggggctttacatcctgccatctgagactctccaatcaaaattttaggacaataatcaggctttcaatcttgaaggttttctactactttccttcatgatttgcttccattttagtttatgacatgaaatttctgtgtcaggcctactgacacactacaggaagttagttgagcaa

SEQ ID NO: 75697 - DNA, 525 bp, Carica papaya
  Intron number 1 from transcript evm.model.supercontig_111. 41 (locus evm.TU.supercontig_111.41) derived from phytozom e v7.0 (chr-ID supercontig_111; pos 790907 to 791431)
gcaatttctcgcaggccgagctagttctctcccaggtttaccaaatcacagtttatttagtctagttattttagattgaagttaagagttagtaaaaaaatcattttaggctttgttagaagctttatttctggaattcatttgaaaatacttaactacaaggatgggaatttcttagaaaattagtttgtacattttgtaaggaattttgattgactaaatgtgcatgttttttaaactgaatttcttcgtttcttccgaacataacctacttttttgttataacatttgaaataccaatatattctgataagttgtttctttcgttataattctcaaccattaaagcatctatcttattttaagaattagtaaaataagttaagattaatttaagactaaactaatagtcattccttgatttattacttttttctgtttattgggagaagggttcttatgagttcactgcttgttaattgttattgctgcaggctattgatttagaaccacttgggggcatcc

SEQ ID NO: 75698 - DNA, 1009 bp, Carica papaya
  Intron number 1 from transcript evm.model.supercontig_2.20 3 (locus evm.TU.supercontig_2.203) derived from phytozome v7.0 (chr-ID supercontig_2; pos 2764004 to 2765012)
tcttgctccttcttgctcaacgtgctgagtaccaggtatttttccttttcttctttaatgtagattttgctgtctatccatcatctggttttacttacattagtttgtattttttgagaagagacattacttatagtttgtaacttgtatgaatggatgaaatgtggatgtgaagcacctttttgtcttagttagaacatgagcctaagttatgtttggagaatgtcttgagtcaaataaaattttgagaattttgttacatattatattctatgaatatgcatcctataaactgaccaatgtagcaaaagaggttagcatcttcataagcaaaaagatcagttagcttttgtacttaggaactatagtcattagttttagatactaccgctgaaaataaagctgatttcaactgattgatgaaatattagaagttaaagtaaaaggaaagtagaaactaggtttttctggatcttttggatgcctgttttgcatatgtgagttgcatatttctgaatgtttcagacatagatctaaagttcaaaacttaaggtgagcctctcacatttttagtgttcataattctcaagccttgtcaaaatttgttcctggtatggtcttatagaatataaatttcctggtatgaacgtttgtttctcatggctgatggtgtgttttctgatgattttacaattttttttagtttgtagtgtaaacacctaaaatataatgtaaaatatttttttctcctttgtcattcaatctttatgttggactcaattaattgatggtttagtgtggagcataactttaaatccaaagaaaccactgccaaggactatatcctgacacgtgacaagtgatcctgcaatttaattatttgggccggcacttgtttttcttaaaatgattaatgctgagtgttactttattgggggttaacttgaaactaaatgactaccttgaactggcagatatcaactggtcctgaagcacgccaagtaactgg

SEQ ID NO: 75699 - DNA, 1020 bp, Carica papaya
  Intron number 1 from transcript evm.model.supercontig_126. 32 (locus evm.TU.supercontig_126.32) derived from phytozom e v7.0 (chr-ID supercontig_126; pos 368209 to 369228)
tggtccaagaatccaaccgtgattctggaattgaggtaagtccaagaaaatttatatattatgataaggtatatttatcgtactctacaaacgcataagagaatgcattaaaaactcatgtatcctatctcacaatttgtgtcattgaataaatgttcatcaacccataaaaattttctcacaagtttaaaataatgaatatattcctaatataacatctaaggcactattctaagaaaaataaaaagaaagaactaaaagcgtgtaaatgtaggcatttaaaaaaaaactagacatggaaaataataaagcaacctaaatgctacctcactttgtaatgtcaatcttgaagcataacttatttatagcagaaagttttttaacctctccatatcagcatttcctagcaaatgattgttgtttcccctataaaaaattttgtaacttttatcttcaaaataaactgtgtaactattttgcagaatttgtctaatactcaacgaattctgctaaatttgtgcaataaattaaaacaaaaaactacaggctattttatgctcttcactcatcatttcgttgatgcacacaagaactgttgtattgatgttttagactataaaaaatgatgtgatgcatgttagtcatatataaagcaatggaaatgtcttttgtgaatagggcctctgtaacacacccgtcggcccaagcccagaaatgactagaacgtctgggacaaagtagcctgtatcgggtaggcccagtgatgggaacatgggtctcctaattagccaaaacccaacgacttcgatctatcaaaatcaagctcgcctcaaccgatcaggcacttgtttatccagatcaaaaattagggcacaacgaccttccaagacaacccagccaaaataggcaacctgacactcttccgtcaaattctcacacccagatgagggtctggcctctagattgatggtgctcaggcatccaggtgaacaaaatatcgcctcgtgaccataaggtaaa

SEQ ID NO: 75700 - DNA, 687 bp, Carica papaya
  Intron number 1 from transcript evm.model.supercontig_21.7 8 (locus evm.TU.supercontig_21.78) derived from phytozome v7.0 (chr-ID supercontig_21; pos 959817 to 960503 reverse strand)
gcttttgcctctcggcctgatcgacctccaactcagtgagtcatttatccagttgtcctcaattcgattgaaaaattttccaacccttttgtttgcctgacaagttttgcagataaactcgtcttctgttcgatttatttatttattgtcacttcgattgtttcttgctagaacggtgtttagggtgcagacatgcatgatttaagcatttgaaattttcagttatttgccatatttgaaggaacctaatccagtacagttacaaattgaaagcaacttaacgatatgatctttgccttttcaatcttcatctgtatgttgaattttgggagcggagatggctgaaattacaaggcaagaaattacaacggaaatcgtgcttattttttaatttgtttactgtaaatatgataaggtagtttcatattatatggttttctattctaagtgtttgatttgctacatcaagttcaggaaagagccaagcaccaaactaaaacttataactcggacgacttctgcttgatttaagcttttcgaactaaaaagaaattgagctttttcatgcaaatttagtgttggtgaatgcacttaatgttcattttaggcgctgaatgatgattccatcttatttcacaaaatgttaatgcaggagttcttcacaaaaatattcacccttagattggt

SEQ ID NO: 75701 - DNA, 1023 bp, Carica papaya
  Intron number 1 from transcript evm.model.supercontig_56.9 7 (locus evm.TU.supercontig_56.97) derived from phytozome v7.0 (chr-ID supercontig_56; pos 1229796 to 1230818 revers e strand)
tcccgtgatcagctcgccggagccggatcccagtatcgaatatcatatatctcgaacaaacttttttttcgattaatttggcttttagttttttttttttttttgaattcttacgttctacttatcgttgatcccctaacaatggttattaagaactaggaattgggtttggcgttctgttttgtccagaatttctgttactgaatttgtgagtgtgtttttcttttcttttcaatgcttgcttaattcatcagggcattcgttcaaaaacaattaatatggatatcaatacttcattatcgttcttattttgttattggaacaataggacttgtttagttgtacaaaattgtattgagtttcattttccaaattccattaagcatgtttggatgttgaaaacaaaatcagggtttgaaagttgattataaaattatgagatgagtttgaaaagaatagcatattgtttccaatctcatgccaatttttgctattgttttctacagtttgtttgtattttcaattattaagtatgcttttttgtttaaacaaatataaatttagaaaataaaacttaaatagctttctacaaccaaacatgacctaaatatttagatttgctatcggtaataagtatttcctgtcattcttttcacagttaacataatgtctttgttgtgtgcattgctgtttttaacttgtttagccatttccactttagtttttaacttgtttagccatttccactttagcttatcactgtctaattcctgcggttggatttgaaaaagttttttttctcatctaaaagttttcttttccttttcactttctgaatgagccaacaacacacttttcttccttgtaaaaaaattttcagcataggggtacattgccactccagaggatggtcatggttttttttccttctccctattatcttcctttacatgcaaatttccgcatatgttttaactattttataacttgttgcagagcaagccattttttatcaaggtgttt

SEQ ID NO: 75702 - DNA, 974 bp, Carica papaya
  Intron number 1 from transcript evm.model.supercontig_48.1 34 (locus evm.TU.supercontig_48.134) derived from phytozom e v7.0 (chr-ID supercontig_48; pos 798819 to 799792 revers e strand)
ctgcctcaactcacaccgcctctatcgagaagaaggtatggtcaagtttatttcatttcgtttttcctaattttgaacttatgcggagtttgaatcatgttctgactctatatatcttagtaggaatttttttcgtgttgattttggttgaattgagacagttaaatttggtttttatacttctttgtaacaattgaaattgcagtaaggattttgttgtaggcatgactgaactagttgaagcgattagaattcaatggatgccttgaatatcgaactattgtttctgttgaaatgaggtccaccccgattgtcgatgtattatatagatttttggatcacaagatccatgatgacattattgtttggttggagagattgtctgagagttcatgtggtgttaagagtatttggctctgtgaggtagctgcttattagcagctttaagacactggttaattttaataggcgtgtgacttcttttcgaaaaagaagtatgtaatttctggtaatatcaagagagtgtttgactgtcttactaactgcttatatgcatattacgtgtataggctgctaagtacctgaccttttatcaatatgcttgaaatgattattttttctcacatgctagttagtatattttttgaccaaaatattgtagcaatttgtttgtttgtacgaagcatattttttcaagtgtaaatgcttattttccatcgagaatcttggttcattagatgcattacttttaacaattccaaatatttctcgagtattttagcttttttcttttccttcttttgctggatatctacttactagttaggttgtttacattcttctcatactgaatgattggcaatcagttagaaacttcattatgccaaatttggaatattctgtgatttttatggctttggaggttatgcttacttgaatagtgttgattgctgtagttggaacatttgccagct

SEQ ID NO: 75703 - DNA, 341 bp, Carica papaya
  Intron number 1 from transcript evm.model.supercontig_198. 36 (locus evm.TU.supercontig_198.36) derived from phytozom e v7.0 (chr-ID supercontig_198; pos 173786 to 174126)
gcccaagtcattaaggtttgtttttcaaattttctaaatgttacttttgttgttgttattattattattattattattattgttattattatttgttttgatttcccttctcctttgtaatagaacattgttaacttaaaacgtttacattgaaaagcatggagctttggcactttagctactgtagtatttgttgcaactcaggaaatgaaacaaaatttgttatagtccatgtgttaactgtgttagatttatatcatttatggtgtctgttggtcttgatcatttggatataaggactactattgagaagaattttttatttatttatcagaatattg

SEQ ID NO: 75704 - DNA, 458 bp, Carica papaya
  Intron number 1 from transcript evm.model.supercontig_49.1 00 (locus evm.TU.supercontig_49.100) derived from phytozom e v7.0 (chr-ID supercontig_49; pos 724537 to 724994)
ccactactctccttcaggttcttcctctttcccattctctgttatttatttatacatgtataatgtgttcaagtttaaacaagcaggtaggcgtatcaattgaatttatgtatgcagatagaaagcatttcacaatctgaaggaaggagaagaggaatttgatgtagcagtgatttcacattgtgtgcatatatttgatggaatgcgttttccgttcttttttttttccgtttttaaaataactttattatcgttggttactcagatctcacttgaggaactggatttagaaaatccaaaaaaaaatgtctatttgtccgttggtaacttaaatttctgtctgatcattttaatgtgatgatttgttggctttgattttgctggagaatgcgttctacgttttaaaatgatttatatcattggatattgctcttgtttccaacaggagaaaggatcaa

SEQ ID NO: 75705 - DNA, 813 bp, Carica papaya
  Intron number 2 from transcript evm.model.supercontig_184. 29 (locus evm.TU.supercontig_184.29) derived from phytozom e v7.0 (chr-ID supercontig_184; pos 251954 to 252766 rever se strand)
caagaagtagagggtgtattttggtaagtgaactgttgggcaattaaggaaatgtgatggatcgaatttaaactctaatacaaattgatgtaggagaaaaagagcttgaaaaaaaaatttagagaaaattttatcgagaacaaaagttagagatttgggatctcaagaatcagaacaatgtttcaatattcgaataataatcataagtacttaataactaaggtaggattctttatttatagacactaagatacattaaaaatagaaaatttagaagacctagtaaatggaaaaataagttaaataaaaagaattaggaaaataggaagtctagagaataagaaaatgaatcttcctatttctctttattgtaaaacattataaaacttggagaaagaaattaaatctttctaattctttttaaattaacttcttaaaaatgtttatattcttttattggttctgtctcatatctcctatgaagggaatatgcacattttagaagctccctattctgcaccagtaagatttactcaaaattagatttataggaaagccatttgtcactaaggaaaggctttggcaactctaatgttggagaactttgaaattcttgtggatgtatcagtgcattttttactttgagtttctccctttcaccctgttcatgcatggatgtgcatgaatcttagtcctgattttaactgcttattttcattgtcttgaattttgggctttgaatttaaatatgcttggtgtctgtagatcttattttaactagtcaatgatatttttttggagcctgagcagatt

SEQ ID NO: 75706 - DNA, 728 bp, Carica papaya
  Intron number 3 from transcript evm.model.supercontig_42.3 (locus evm.TU.supercontig_42.3) derived from phytozome v7 .0 (chr-ID supercontig_42; pos 7175 to 7902 reverse strand )
acctcaaagttgctagaaagtattattatgtggtgactgggggagatcttaacatggtttgtatgaccaagattcactcttcccaagcatgaattttgatgagtttagactttcctttacgcctgcaatcttattgacctatctttatctagtgggacgtagacctggtctgatgtgagctagaggccttgtttttgctagaatgatggatttttggtcttctttgctggtcctgatttgatatagaagctttattaaacaaagaagtagggtaaaagatcactgcttaccttgttgtccattgtttccgaaataaatagtaattggtcaaaaagtaccaaatatagccacagtgaagatattcagtattccaattgggatatttatcaataagtaatatgagaactttcagtattagatgtgattgtcatattcagttatttccccataaaacttgcattggagatgttttctgctaaataatctggtacttaaaaaagaaaataaatcttgggaaaaggtgttttttgttcattgttaattcctcaaacagctcccttattttagtgcctagagaaaatatgcatatatgtgaattcacaactggacaatttaacttttatccacttgtttcacaattcttttttggctaatgaggctgattgaatgtgaattctttttttttttttttagtttttctgagccttttgaagaaattgtctacccaa

SEQ ID NO: 75707 - DNA, 796 bp, Carica papaya
  Intron number 1 from transcript evm.model.supercontig_17.4 1 (locus evm.TU.supercontig_17.41) derived from phytozome v7.0 (chr-ID supercontig_17; pos 489804 to 490599 reverse strand)
taaggttgtctagaagcagcagcagatcatccaaggtttgtgtctcttgtttgatgattgaaatgtaaaggcgcggtaagtattatgttatacagttcatatgatttcatgatgatgataatgttattgctttaatatattgttttagggatctttccgaggtaagtggacagtaaaagattttattattgataaaagaatttgttataaattatgctccattggtatttttgtgttttctacccatctttacctccgtggcggtgagatagtgtgatgtctttactaggctggtgtagctcattctttatttaacaattttagatcaggaagacattgttctcgagcccgttccgcaggaagacggcgaaggggacgcctaaatactccgtagttacatttatagttcttattttcgagtatctcttttagttagttagtttttttatattttgagcacgtttttggtttttgtgtaagggatgttaatcaaaatttttattacacttccacatttgacatttttaatacacatatttcattctaaattttcggggccgttacacttaaaaactagcattaaccaagatcaccaaagaactatggagggagctactttagtaatcaaatatgtaagtagatgttaagactatatgttgttggatggtgtgtatatatttatataaatatatatatataactagtgtaataacttaagttatgtactttctcattatataatatgtatcaaagtaattcattgtgaaatttttaggcatttcaacactcagagtag

SEQ ID NO: 75708 - DNA, 719 bp, Carica papaya
  Intron number 1 from transcript evm.model.supercontig_155. 31 (locus evm.TU.supercontig_155.31) derived from phytozom e v7.0 (chr-ID supercontig_155; pos 746932 to 747650)
caggtacttcaatatattatatatacatacgagattatttaattaaaatattaaaaattattcaaattatgacataagacttgtagtgaatgtttggtatagttgtagttttcaaagtaaattttaaaaataattatttactaaaaatattttagctacttttttttttgaaattttaagtatgaatttttattaaaaattttaaattattttttaaaaattacaaattgttatttttatatttaaaaatattaaaataaaattttaagtttatttgttgtcaattacaaaaataattttaaaacgtaaaaagtgaaatcaaaagatatttagaacgacgtcttcgagtcaaattgaaaacaaacgtttgagatttattcactatccatgtataaaaaaaataagaacctacaccaatatatatatatatatttctttcatataaaagtcaacttcttaaacatttctattgtatattgtatatacatgtgtgtgtgttctaataagaacttgtaccaatctagttttaagtaatattgtatctcttttattatataagagactgtgaagttgagtttcatgtatattctaatttattattatgattggtgtatatttattatttaattgataatatatatatatacatatatattcgtattctataaaaaaatgaaactgcagttcttgaaggagaaaaatttcgagcaaaaaattcc

SEQ ID NO: 75709 - DNA, 938 bp, Carica papaya
  Intron number 1 from transcript evm.model.supercontig_116. 5 (locus evm.TU.supercontig_116.5) derived from phytozome v7.0 (chr-ID supercontig_116; pos 18951 to 19888)
tcgtctgctaattttcctccgtcttccgagtataggtctgttttctttgaccaacgacttctcgatgttttttatgtttcgtttgttcgtttggaaaacgtactaaagtggaggagcaaatttaggttatttctccaggtttttctttccatcttcatttgcctttacttgattatagatgagttgaatttattgggtagggctgtttgcttttcccaatcaaatgttggtgagcttcaattacgaacgttggcaattttgaagggtggatgatctggcttaaacttggttatgatttgacttagaaaggtttccgttagctgactcgctacatggaacgtagcttacttgagtaattatgtcttgcaagttggtgcttattgttattggtggtgcatgtacctttatttttcaagtagcagatctgttaccaatttgcaccgaatatggtgggatcatggtagttccctattcagggaagataatcatgcggactggttttgtcaattttaacttacatgtcagtggttcaaagatttcatacataagaactgtaatgagggtttgggatacgtgatcatattagcttgaaactccagaaaggcgcattccttagaggcccaccccccccagaagatccgaatgaccttgtaattacacagttcatgtcaaacaggaggagcatctgcctgagggattatgcagcgtaaagctctgggtgcactttttaacagaggaagaagagtaaaatatcatgattctgcatttatgttgttagattatttgttttcctgaaagatgatgtcatcagtctcttattttctgttttcagtttcttgctttaatcgggtattatgatgtctgtatgtggatatatgtgaatcagttaattatggattttgtgttctatgcatctagttctgacaaggaggaaccag

SEQ ID NO: 75710 - DNA, 793 bp, Carica papaya
  Intron number 3 from transcript evm.model.supercontig_21.1 10 (locus evm.TU.supercontig_21.110) derived from phytozom e v7.0 (chr-ID supercontig_21; pos 1304450 to 1305242)
acatacgatattacatatacgagcttcttaaggtacacttacaatcatattgcaacaacctggttgttgccacctgttctttttggaatatagcatacctgcttaaatattcaagaagaatatgattttagggcatgatatgtaattgtaattggacatgaaacttttatttgaaaaggacattgaaattttgatagttgccttattggaatatgctcatgaatactgttgtcacccgattctcaggttaaattaactaaatgggaaatggaaacttaggtggcctcctcttttggcttctcttttatatatttttttatcactaacatggattccatcattcaccctctggctatgttcatgggtggatgccttgtgaatgattttattctccattaaaaaattaataaatgtttttttcagaaaaatatacctggtgaaggacacagtctttgaattattgagcagtatgtgctgatactatagacatgccacaatctttaaaaagaaattagtaattgtcttttcagaaaaatatagacaagccacaataaaagctagtcgcaataatgtgaattgaggtagcaacagatgaaggggctgagttcctcttggatcattgctttatgacttgttccctggaactacttatctgtgaatatctgtgttcaattcttgttattccttctctctgttatttatgcattagttcggtgaaagtaattgttgtgtgtttatttaacttatgtgtttttgtaatcaggccctagattattgccattcccaaggaata

SEQ ID NO: 75711 - DNA, 777 bp, Carica papaya
  Intron number 1 from transcript evm.model.supercontig_148. 29 (locus evm.TU.supercontig_148.29) derived from phytozom e v7.0 (chr-ID supercontig_148; pos 370592 to 371368)
cttgggctggtagaggaggtcagaccttggttccggttagtgcttatctattgtttcagtgtttgtatttgtatttacgtgcttagtcctttggtttaagggatcgcaatctgttaactagcggagcgaacgtaagcaacttaaaaaataattcattcatggaatttacgagaaactttcggtgcattgttataaccgtcgctaattgttttagttgagttgttttccttttcggtaatgtagaaaccaaagaaccacgggatattgctcacggttgaatgattgttttcttctatatagaaaagcaaagaagataaaaatgagacagactttacttggaacgtaaaattggtcaaatctgttgtgagaaggtgcaggaatattctcgaaattgaagtctcaagtttgaaattcttgatttcagctgaatcgtccaacatccttgctaattgcattggttgagctgtgtttttcttcataccagaaagtgaaagcagaaaacagcatataatttaaacttatttgagctataagcagtcatcaaaatctcaaatttctactgtattttttttggcttggtatccaggaagtgtgctgtttttttggaagtgcatcaggtttactgtagtctcaaaagcatgcaaattagtctatagtgataactgaaatattagttgcaaaattttacattggctaactgtattgaaagtggaccatatccatgagtttcatttggagtgagataacctgtggattttgaaattttcagggaattag

SEQ ID NO: 75712 - DNA, 615 bp, Carica papaya
  Intron number 2 from transcript evm.model.supercontig_131. 73 (locus evm.TU.supercontig_131.73) derived from phytozom e v7.0 (chr-ID supercontig_131; pos 527340 to 527954)
gcaattatacatctccttggccagaagaggaaaaggtatgttctgtttgcttctttatttttcttcttctgccatgggattaccaaattagggtaaggttttcttctgctggtatttatctttcttagcaggcaaagtagaaagagtaggaacttcatgtcatttgctcttgtacatctgcattttgctcatgttatatgtaatgaagcagctaactcggctaagcctatttcatcatgcatttcttgagttatattgaagcacaaattttacttaatgaaataagtaattatggcaactatccccaaataaaaaaaaaaagtctcaatctattgtttatacattagtatatcctcaaaagctgctagactgcaagcattaatcaagcacaggctaaatttgaacgctaaaactcttaactttcgtttattgtgaaagaattgcttgtggaaaattatcaaaaaagcttaatcagaccagaatatgaccaaatctgttatttgttcgctattattccagtctttaatttctttttctgttgtattctattggattaaggcaaactaataaatggatattggctttcatgcttggtttgattaaaatgtagtatag

SEQ ID NO: 75713 - DNA, 488 bp, Carica papaya
  Intron number 2 from transcript evm.model.supercontig_2.33 6 (locus evm.TU.supercontig_2.336) derived from phytozome v7.0 (chr-ID supercontig_2; pos 3941762 to 3942249)
gcaccatttatcaagacaagttcattattgcacaggtacaactatcttctattccaagcattatttgatgatgatgggagtttgtgttatacgagcgtagtataaactgaactgggttaaattcattaaactcattgaactgggttaaattcagtaaactcacctatagcgatctagtctttgatagatcatctgagttaccttagatgtttgcttataagttctagcaaaagaagaagatatttcctaggtactggttctatatttgtaactcaggccttgtttagagtaaattaaaattttttattagatttacttggaaattcattgaattagaattttcctctctttacatctaatgtaatatctttaattcctttattattttttttttctagttgtttctatcagtaatatatttttacttgaattatctttttttttttctatcatataaagttttgatttttatgatacagacaagtctg

SEQ ID NO: 75714 - DNA, 854 bp, Carica papaya
  Intron number 1 from transcript evm.model.supercontig_52.6 5 (locus evm.TU.supercontig_52.65) derived from phytozome v7.0 (chr-ID supercontig_52; pos 555532 to 556385 reverse strand)
cttcaagtatcaattgaatatgctgctaaaacatgaaaagcagtcaatcaattgaacaaatttgacatttagtaattgtagcatttgacccattcaacacttcttacagatctaggcatctgacatgcataagaaagtatatgtgtgtaaaagtaagatgcatatgtacaaaagttgtttcagagttgtacggcaaaagagtataaaatgtgcatgcacaacatacctcctaataagtttcttttttgatttaggaagctgcactgatccttgagttgttcaattaagtgtgaggtttagtcatccctggtagggaagaaccaaaaatttgcaaagtttctattaaatttctttctttactttgagaagttgcatttgtctttaggttgttcagagttcttagatgggatagactgtttagaattatgccaagcaccaaaaatccaaaaagtttacctagggaatattcattttgggacattctcagtttcctttgttttctccattcttttccttatcatctttgcatcacttttggatgaatgcaacatcagaattttggatgaatctcactattcttttctattttcaccacatctattgtgctaaattagtttctagtgtagactttttccccttaaagtttaataggacatgggttttatattttttccgctgaagctttactattattcattactaatgtctcttgacaagtacttgatgttaagtaacatcagtgctctatcttaacttagtttcatcttgtgcttctacaagtgccttttctccttcctcttgtttggtaatttgatgaaaatattttctgcttcttgtcataggtactccctgta

SEQ ID NO: 75715 - DNA, 989 bp, Carica papaya
  Intron number 1 from transcript evm.model.supercontig_169. 4 (locus evm.TU.supercontig_169.4) derived from phytozome v7.0 (chr-ID supercontig_169; pos 79830 to 80818 reverse s trand)
gctctttcaggtcactccttctctctctttcctgccatgtatcttatattatattcgtgtatttaacgaaaaatactgatctgaacaactgttatgttttgattaaaccttaagtgtctctgattagattccttttagtctcatcgccgagcataagttccactgttaaccttgattcgttgtcgatctcccctgcattctggattacgatggcacagtagttctcgtgttccgttgttattttgcttctgaatgcagagtattaaagggataatattactttaaatctttaaattattttagtttttatagattatttctaaaatcttttgctgcaataagttcttgaattaacgcataaattttctctgtccttttgtttccgaagaagcttgattgaaatgcatttaatttgagtttttagcaaatttcaatactataaagcagtaataataatagaaatataaatctgagagagtgtgttttcgaatctttcctcgggggccaaccaaaaaactgaatagatatctgaaaaaaaatagtagtctaattttgagctatttttagattgatttataatttttttaactaatttaagttgagagtagcaatataaatttatggttatgcaattaactacaaaaataaaattgattattatacaccaaatgtgtaaattacgtataaattaggaattaaaggatataaaatataattaaaccacgaaagagagtttttgtttaggaggagaataagaataatagttgaatacacgcgtaagataagacaataaaactaactggaaagcagagctataagttttatttaagctatgcatgtaactaataaatctcacttatggatgtcttgcagaaacaaatacttaaacttaactagggaatataatttctctgtctgataattttagtggagtgtagctgaagtggttgataattatgttgtggattagaatctgggaagctaataac

SEQ ID NO: 75716 - DNA, 569 bp, Carica papaya
  Intron number 3 from transcript evm.model.supercontig_6.29 2 (locus evm.TU.supercontig_6.292) derived from phytozome v7.0 (chr-ID supercontig_6; pos 2196965 to 2197533)
atttcttggttgattcagcttcaagattcttgcaggttaggcttcgttttcaacttagatgtcaactttgttgcttctgcgaagcaatatagcttccttatttcataagcatatgcattttaacaaacaaaatagattatccattcatactgttagcatttttgttttcacaggtaaattcatttttgataatgaacttttcttataacatacgtaaaattagataagaatttttgactaaattcttttaaaaaaatttatttattccaaacactacgttcacactgaatatagcataatgcagaaattatcattttcaagtgtagtgtttgtattcgtttttttgttaaaattctatccgaacgtcaatatatccaaagaagacttgaaccttcaaaacaaatgtagtaaaagagcctgacgactagagtgaaagagtgataatttctgagttaggtatcactcattaatgattgacaagaaaaacaaaatggcaggaacttcatggaacaggagcaaaaaaaattggagtagttagcctaccgccaattgggtgtgttccatcacag

SEQ ID NO: 75717 - DNA, 891 bp, Carica papaya
  Intron number 1 from transcript evm.model.supercontig_170. 50 (locus evm.TU.supercontig_170.50) derived from phytozom e v7.0 (chr-ID supercontig_170; pos 263412 to 264302 rever se strand)
gatagagctcgagaaattatcgaggtttggctggttagcttgatcttttagttgattagccgacaacaaatctgcttataattttttttttttttttctggttaagttgatcttttaattgaattcccagacaagaaatctgcttagagtttttttagtagctctttttattttcctgcagttattattcttgaacgtacatataacttctggaaatataggcaaaagttgtttttttattgcagcaaaatgctagtataacagggcaggaagaccaagaaagagctttggctgcatttggtttaataaccattcaattccagatcgtttgttctaattttgttattaatctttagtatacctaattataatataatttcattgtgtcaacgttaccactataaatcttttgatggtagaaatttaatttttaacttttaagccgggatttcctctttcaagaaattaaaaaaggaggtgacggtaattcaaatataacaaatatattctaatcatgcaagttaagactaatgtgagaattagaagaaccaatcgactagaaattgaatcagagctgaaccgaatgcagtgcttgtattatatgtgtttgtaacttaacaatgaagtatactttaggtgcatgggtctattatgatttcagttcttttgatttttgttattgcttggaccaagaatttcttctactactgctaatagcaattctacttgcttaaagttcttacatggattattgctttgttgttacatggatcattagttttttccttcatttacatgtgtttatctctgcattttgtctctgcattttttagccttatttttacggaatttctgatgtttcgtgcctaattttttttttctcattagtag

SEQ ID NO: 75718 - DNA, 293 bp, Carica papaya
  Intron number 1 from transcript evm.model.supercontig_100. 24 (locus evm.TU.supercontig_100.24) derived from phytozom e v7.0 (chr-ID supercontig_100; pos 947833 to 948125 rever se strand)
caagctctctgctccttctgtttcgaattgtggaggttactagcatttcacgcccttggattttctcctctaatatattttttaatttccctcttttttgttatttaaattatggaattttttattatttattaagaaaagaatgtgtagagttttgctcctttgatttcgactgattgatttttaagattaatctctgtgatctcatgatttagttttttgtatcattgcaaattgaccagcttttaatttgtgaatttgcagtgaccaacgctcccgctgctgcgcctggt

SEQ ID NO: 75719 - DNA, 903 bp, Carica papaya
  Intron number 1 from transcript evm.model.supercontig_26.9 5 (locus evm.TU.supercontig_26.95) derived from phytozome v7.0 (chr-ID supercontig_26; pos 729552 to 730454)
gagttagcactattaaagattaaaagtaagtgattcatttctacgaattaatggtgtaccatttgcaccacaatatactggaaatttagttagttcagcactcagtttttgtgtttccactcaattaaactttactggaaatcaacataggaagatttcaagcataaattaaatggagaactaatctctacaaagaaagtgagggagggaaatggatagaagaaggaattagaaaggcaacttccaatgatttattaaatattcagttatgtacaaaaatcctcatcccagtttactcttctcttcccatcttcattttttgtaaaacagttggttaaaattagccacttaattgtctaggaaacttggtgatgcaaacttctgacaacatgagaagcatctcccagatattccgtcttcacctaaaagaaacctttcttctacttgttgatcttggaaatttccatattgttgcaatctcaatgttgaagggacactattacgttctttgtcctttgttatcttccacactctcttaattgcagtattaattatcattatgtttttggtggacatgtctagcagttgatctggaccctaattttccagcactagtagttgacatagtgtctatgtctggaacctagtcttttgatttttttttttttgttttttaaataaaacctagtcttttgaaaataatatggttaagaacttctataatacacttttttgatgctaaaatctgtaagtaacgtcggttttcttcactgtaattcttcctttaattctttttctttgtcaataatttcctttatgtttgttaatgtaaaataatatatttgttcatcatgcaattttttgtcaggccctgatttcggttcacctccatcatttacgcgg

SEQ ID NO: 75720 - DNA, 574 bp, Carica papaya
  Intron number 1 from transcript evm.model.supercontig_59.1 32 (locus evm.TU.supercontig_59.132) derived from phytozom e v7.0 (chr-ID supercontig_59; pos 1233646 to 1234219 reve rse strand)
ccaggctcttacgttcaaagggtatgcatatccttactcacatatgcatatatatatatatatatatgtgtacattaaatcgatatatctattaattagatcatagataacacattataaaataataaagtacgaggaaaacacatgagaacatagttcgacagctacaaaataattaaacaaaacaaatcaatcttcttcttgtgatgaagcgaagaaaagattcagatagatttgatgtgagttgcattggaaaataagaacagaccagcaaaatagtttaaatcacgtaagaatttttgtataatactgaagagatttttctggatattaatcaacaaacggaaagtggctatttgtacacttacacataaactgcacctgctaaaaatcagttcataaattctaccactatgtccgctacttaactaagagatacatgtctaacaaataggaaaagcctaatcacaactaaccaaaccaagtaaaagatgcttgactgtaattttgaatcattcttcaacaaactataattatagggagatcaagcatcgattattggaggagcaataga

SEQ ID NO: 75721 - DNA, 699 bp, Carica papaya
  Intron number 1 from transcript evm.model.supercontig_10.2 22 (locus evm.TU.supercontig_10.222) derived from phytozom e v7.0 (chr-ID supercontig_10; pos 2789215 to 2789913)
tgtgaggtaagtagttacaataaaggatctttaaggtgcattcaagtagtagattctgtttctagcttcaacacattcaatcatctttctggagttccagtcttgaaagtcacaatgagaaaagtcaaatattgttttgtagttcaaatcttgtgataattcattaatcaacataagattagtacatagtttgtgaacatgcaacacatttttaggattaggataggattaagcttaatattctcattgcctacaacaatattgagaaaccatcagcagtaacaattttctaattctttgggcgggaacatatgtgtgaaaatattttaaattattgatcatatgacctgtgggttatgagtctataatctaaaattttttaaaggatttatctaagacatttaaatcatgtgaaaagaaaagcacaactaagtattttattgcacttatacgtatagacttctcaaggtcctctaatcgatcttgcagtcgttcaatcttagctttgaaagtagtgagacctgatgtgttttcttcctgttggttgactgtttgtgaatgttcggttgggtagttttttattctcactcattgttgaaagtactaggatttgccgtgcagttcctgacatttttatttggtgtatctaagctttttgcaaaaggtacgccaaagattgtctctgttatccacttccgg

SEQ ID NO: 75722 - DNA, 447 bp, Carica papaya
  Intron number 1 from transcript evm.model.supercontig_14.3 6 (locus evm.TU.supercontig_14.36) derived from phytozome v7.0 (chr-ID supercontig_14; pos 390668 to 391114)
gcttactctgactccatttggcaacgtttcttcaggttcttctatttcaacactcgcctttgtcctttctttctcaattttacgtttgaattaagtcaaacttttaacgtagctatctaatttattgtcccttttgattttcgtcacaagtttcttattactcgattatcttaagcggcatatgaagagttaggtaataaaaaaatccagatatgggcatcataaggtgattaattacttcgaagaacaccatgatacttgaccaacttcttatatttatatgcttagcctaactttttttttcaaatttttggaggaaaatgttacggagttaacaagatcactaatttttccttcacgtaatcgcggttttatgatgaatccttgttttaatggtggtcctgattttggaatttcatagggaacgttggccgcgagaaacacttg

SEQ ID NO: 75723 - DNA, 967 bp, Carica papaya
  Intron number 1 from transcript evm.model.supercontig_1264 .2 (locus evm.TU.supercontig_1264.2) derived from phytozom e v7.0 (chr-ID supercontig_1264; pos 16165 to 17131 revers e strand)
acccttcaagtttcgtcttcttcttcgctcatcaggtaacgaaactataagcttagttgttacaacccttgatcaactgctttattgccttcccgttttttttttgggctgaattgcgtgtttgatttgccatgtgcccatgttgatataataataatgcacacttctgttgattggagaaggagcaaagaacggcttgtcatgtatcttttaataacagaagattgatattttttgggttatacccaaggaagagttgcttgggttagattttctttaaaaaattgttcaaagaaactgaaaatgatgcaagtggatatagtagaaagcaacagagatagatgagaaaagaggtggatttgaaactgtgtggtcattcatatatatatatatatatatttgtgtacatgtttgccttttgattgaagtccctagatctaaagttcgggcctaattccaggatacatggaaattcaagttatggtgataactttaggacattcttacgctaagtttctacctacgctcaggaagaaatgattaactgatctgcacgtggtaggctttggagacttatgcttcttctcaatggaatggaactgtcactaccctttgatgtgttttttcctatgaggaaatctttcaactgtgttgtgacaggaaaagaatctttcaactattctatggattgcaaaactcaataagctggagactagcacgttgactgatttaatctatttaggattttaaacagattttgcaatttgatccaagatgaactcattccattttaattcaactaatccttttttcagttaacttggggttcgcattatcaatcactgacagaaatgtaacagcatgctgtattgctctagaatacattgatggactgcttgtttccttagaagtgcatatgccgctaaatatggaaattattaaagatgtttctgttttacacagattc

SEQ ID NO: 75724 - DNA, 560 bp, Carica papaya
  Intron number 1 from transcript evm.model.supercontig_234. 1 (locus evm.TU.supercontig_234.1) derived from phytozome v7.0 (chr-ID supercontig_234; pos 184 to 743)
cagcatctgcccagaaggctattgacatcttgaaggtacttttacatattattttttttacccttttttgatatcttcttttaatttcctgttcaagtccagtggtacagttggagaatgatgtactccaatctccattcttgatcccagagccacggtggggcaaccaccgaacccttcttttatgtttttgtcagtttgagtgttagaacttccattaccagtcaagattaagcatccaatccacagaattgtttaactgaggaactggtacacacaaacattcaaaaacctaagcataagcaacaatcacttgttacctgaaagatttttaccaccacagagaataacttttcctttctaaatattattttctgtatggtatattgacaaggacggatatgggtgaagaggattgtgctcttacatccttaaaacctgcggtatattcactttgacttcctagctatagaattaggtcacgcaatttgcttttctattgaatgttaggagtttattacaactgaattctgcattgcaggcccatccagacttgatac

SEQ ID NO: 75725 - DNA, 196 bp, Carica papaya
  Intron number 2 from transcript evm.model.supercontig_199. 10 (locus evm.TU.supercontig_199.10) derived from phytozom e v7.0 (chr-ID supercontig_199; pos 134013 to 134208 rever se strand)
ctggaacgaatcgcagaacaagaaaggcagacaaggttccttcattaactatctcaacgaattactcggtttttataattaatcaacctttgcttagtttccttacgatttcgttttggttttctcttcctcattgctggaattcctactcaaaaacacagtctatctcggtacgtgcttctcagatcatactaat

SEQ ID NO: 75726 - DNA, 676 bp, Carica papaya
  Intron number 2 from transcript evm.model.supercontig_131. 68 (locus evm.TU.supercontig_131.68) derived from phytozom e v7.0 (chr-ID supercontig_131; pos 493287 to 493962 rever se strand)
atccatcattagagatccttgttgggggaatacaggtggaatattcttatcaatgaagatctttatcagcatattaatatatatttcacaagagcatcacaccattccatttgtcggggactttgttatggcatcagtggatactgcagtctattttacttttagtgatgtgagagcaaacacataatctaggattgactggataaataattgcatgttccctaccatatcaaactgccctctggaatgatgttttaggtactgtggacacaaatactactgaggaactctttaaattgaaaaaatatttcttttagtttgatttcttgtctggaaaggtaaagcaactacttaaaagaatagattatcgcaatactgaaataatttcatatgtatccctttttctttcctttttttgagatcagtgtatccttttaagtttttcagtatagcatgctaatgagtaaaatgtcagacagctttcattttgtttctttgttttttttctggaatttgataatttctttgtggggtccgtgatcatcgaacttggtaagcataacgacctcattccttagtaataaggttacaaaagacaatgaggatgttggttgaagtacatgagtattctggtaagttgaattaatagaaatttctcagagtgtcactctagggg

SEQ ID NO: 75727 - DNA, 888 bp, Carica papaya
  Intron number 1 from transcript evm.model.supercontig_10.4 (locus evm.TU.supercontig_10.4) derived from phytozome v7 .0 (chr-ID supercontig_10; pos 90529 to 91416)
gacggaggtaggcttttataattttcttgttctgcatatgctatctttttatactcaatttgccttttgtattatgtgaaaattttgacaaaatttgttgcaaatgtcatatactgttatgccccaattattaacaaagaaaaacgagaaaacagaagaaggaggtggcaaaaaaaagcagctggaaagttgttggcagaaaagattatggttccaaaaatatatatgagcagttgatttctcccatgagccataaaccctcctaaagaaaggaatttacatggttggctcaaggtttcactctcaccagatacacaactaattccaaagcagaggatcatatcaaactggttttagtgccaggttcaacctgatatgttctcatgttctatatctgcttatcagcctgctgggagtgaatcttgtgttaaggagtagagatcttctcgtgtacttttgttaagggggaaggtatgaggaaagcagcctaactgccctgggaaggtgttatctttgcacgattgtggtgcatatggcatgctcgtaactctagaatctccaacaatagacacattccatactataagttgttggaatgggtcacctttttggcatctttatgggccaaaagcacacgatcattttcacgacactagcattttggatctagaccctaactggcaactcattggattgctatttttgcagaaatatatggaaataggaaataggctcccacgagcgagaattcaggggtttcctaattcgtttagaatctctcaatttgttgggccaataacttccctttttttttatttttcttttttataactatgtttttgtgtcctttcaggaaaggattcatcattactgcggtggtgacttctt

SEQ ID NO: 75728 - DNA, 781 bp, Carica papaya
  Intron number 5 from transcript evm.model.supercontig_55.4 8 (locus evm.TU.supercontig_55.48) derived from phytozome v7.0 (chr-ID supercontig_55; pos 285643 to 286423)
ttccatttgagcttgtgggagttctatatcatcaggtaacccggatgtatataattctcaaaaagataaaaaaaaaaaaaagaattatacagttcagttgttttatatcaaaatgttgatgtggaagttctttatttatagagctacacttctactcctaattttattttttcggacttaaaacttccacatgtttgtatttagaatctcaaataggtaagatgttctctaaaaaacagctttatatagaataatagaaaataaatcacatggtaattgaattattagaaaaggccacagaaattgaattatgataaagccaaaatataaatgaaattgtatatcgcacttattataagcatatgctgctctgaattgatctttgtgattttggtgattcactcttgttcttcatcctttagtgattgtctcatttctggcacttgcatggaaagcttgttacatgttactggaatgcactaattttcttcagggaacactgatggacttatggtaaaaagttctgttgagttggaacatatgtagagtagtcttgagctagactagttagttatgcacagataacatgaatttctaagaaaaaggtctttatgttactgcttgtctttatatttctgcttttttgttttttaggatagtctacattgatgcttcccttttgaccttgaagtcttggttttttgttattgaattcggaatttctaattgtaccttgatatacacagctacaatcttttcaagttgagggcatcaagcagga

SEQ ID NO: 75729 - DNA, 303 bp, Carica papaya
  Intron number 2 from transcript evm.model.supercontig_120. 59 (locus evm.TU.supercontig_120.59) derived from phytozom e v7.0 (chr-ID supercontig_120; pos 757923 to 758225 rever se strand)
atcgaagactctcaagatctgcgctaatcatctaggtctaactttttaaccttttctttccaagttttacttcgctcagtgctttgattaaggtcaaatactgcaagatagaatcggaagatgtgttgtatcaagtgggagaataacaaactacgacccctatttttttttttttttccttcgtagttaattttattcagtctctctgtttttatgtttggtgagggacaacttttttacatttgttaaattgaccttcgcaagattcgttatgttatatttgctgctgcagttcttcctaca

SEQ ID NO: 75730 - DNA, 976 bp, Carica papaya
  Intron number 1 from transcript evm.model.supercontig_166. 37 (locus evm.TU.supercontig_166.37) derived from phytozom e v7.0 (chr-ID supercontig_166; pos 304269 to 305244)
gtttttcttcgttacaaggctcgtccgattttgaggttaagcttttcttcttctatttccttctctaactcttttcgcttaagtttctagtttttgatcatttgagttcaagaatcacacgttactgttcactgtttgaaaaattgtgaacttggtatctgtgattttttaccggtcggtaaagagtggcttgcatagtagattttggatatgtgctttttcttgtttgaggttaattagaagagtcatgttggatgcattttggaggaatgatacaagttttcctttgtcatggataatgagattactgttcgttctatggctaagagttcatgtgtatgtaataagaaaatctatataatcaagtgttaattttgtcatccctttgagttgattgaattgctaatttctttgcaatattatctccagtttccattgaattataatcttttgccccgtttcagttcccttttttgatcaaattctgtgtttatatgaataaacttgtaacttcatttttgtgtttgagtcatctcctgttccaccttgaacttactcagcggtggatttccggttcttaatttcagaagttgaaaatggaaatttcattaccacaaaatttaaggaaactaatcaaaaatttaattataggaattaaataataaaaattgaactaaatggatatttagagcttctgatttattaatgtgaagaatagttgaatgtgtatttttattgaatattatagccctttaatatgcgagttttctatcagctaccctttttatttctactttcagctaggtattgatggttaagtgggtgttcttcattttctctttttattatggataggggactattatgcttcctttttcatctttagttatttttttacggcttgttttttcctacattaattatgaattgtttcgttgatgtgttacagagtattggattcatagggcttggaaac

SEQ ID NO: 75731 - DNA, 337 bp, Carica papaya
  Intron number 1 from transcript evm.model.supercontig_41.8 2 (locus evm.TU.supercontig_41.82) derived from phytozome v7.0 (chr-ID supercontig_41; pos 1893749 to 1894085)
atatgtaagtaattgagattataattcttgaatttggtttctgctgattctttttggagtagagggagagagcacaatagtgacctttgagatttatgtgagaaaacaaattatatatatgtttggtatagatctatcttaatttgaaatttctgattttctagaaattaatcaaacccagtttcttctcttgatgctttttttaatggctgaaattttgaagaaatttatctctaataaccatttggggtcatataattacaaatcattatatgaaatatttggtaaatttaagctatgtatatatatggtggtggaaatttcaggtattacaata

SEQ ID NO: 75732 - DNA, 646 bp, Carica papaya
  Intron number 2 from transcript evm.model.supercontig_52.1 19 (locus evm.TU.supercontig_52.119) derived from phytozom e v7.0 (chr-ID supercontig_52; pos 988247 to 988892 revers e strand)
gcggcctcgactatttggaggtatttcttctaccgcttaattgcctctgtttacattcttttcatttctcttggaagtttttattgttcatttccaaaacacaaatcaggaatctgtgcttttttactttgacaaatgatgctggtgttcatttgaacaaaaaagaaagaaagcaagtttaactccatatagtgtttatgaaaagaggattaatatcagtatgcatgtttgttatattgataacttacagttgaatatcttgtgattataacttacagtacttttgttgtgcgtatgatctggagctgaaaatacgttgtagcttctattttcaaaattctaatacatcaaaacaaaaactataaactagttgaaagacaaaataatgtttaagaaatagtgctaaaaatggagataagttttaaaggaataatacaatattttcattataattttctagaaatatgatttttctttataaacacaccttcttacttgcaaacatgctatcgctgccatacatgttttcagtagttactttgcgtgttttttattttaataattccggacatatattttgattgaataaaagtttatgtttgtgtacatgtttaaggcacgcgtaggaacatccattgtggaggtg

SEQ ID NO: 75733 - DNA, 734 bp, Carica papaya
  Intron number 1 from transcript evm.model.supercontig_119. 74 (locus evm.TU.supercontig_119.74) derived from phytozom e v7.0 (chr-ID supercontig_119; pos 486956 to 487689)
ccagcgaatacgtgagaatttgtttcaggattacatgaagaaacctcataagtttatgctattcacttgaatcttcttctttttattctcatttcatgttctctttcggtttgtaacatccaaatatgtaaagagttcaagttgaagtcttttggatgaaattggagctcttgttccagttaatttgtttcttcttttgtttcatttctctactgagtattattcaaatctatatcaatatcaagttcaacacggataatttagcaaaatgacatttttatcctttttgcaatgttattcaaaattctgtatttatggcgggaatcaaatataagcttaagatattgtttattggagatcattctgtagctaatggcgtacttgtgttctcgtctaatttatcattatgcccatagaggaaagaagaaaattcaataaatcgatattattgtagcacttaaatcatatatatatagtcctatcttctcgtataagatttgaacctcccatttgttaaattgatgaatctcaaatcataattaagagtaacactatcaattaacggtaactaatcttcgcttcagactttcagggctatgctaaacctttgcgtcttctgccagccacgaaagtagaagtctgcacaggaaagtcagaaaaagagagtttctcttgttttaatttgaatgaatctgagtctttatttaaggttaagttagagaccagtaacatct

SEQ ID NO: 75734 - DNA, 1027 bp, Carica papaya
  Intron number 2 from transcript evm.model.supercontig_33.3 8 (locus evm.TU.supercontig_33.38) derived from phytozome v7.0 (chr-ID supercontig_33; pos 240423 to 241449)
catacttaaaaacagaccaggagttcttggaagaggtaactgcattttgttacatcttcatttgctagtgttttttttcttcttagctgttgagtcctgcattcaccaaataaaaggttgcccgcaaagttacttggagttggtggaatgataggtgaagctcttcagattttagttcttcacctagtcctatcaaattttgttttcctctagcgtaggatctttctgtagctcactttgaccagcttaactcaagttgaaggccaactgctcgtcatggccgagtgtgtcttgcggggtatcatttattattcttgactcagttaagctgtagggtgcagcgataggaaatgagaattaaaaaagttaggaaatctgatctactggtctgggaatcaaggaatggtgtgcaagcaagcgtagatttgctccagattttgaactgaaaaaatttcagcttcacctacaactttcctttcaaattatatgtttgaaccgagcatatgtggtggtgtggaactgaatggttcttgtttaaagtttttcatacggaaatgtatctaaatttgatgctggctggttgcctttgccctcatagaccttgatttagcatgctacagaatcatacaagtaaaactggtggctattgaaagcaatgcaatttgcttttctggaagagtcagctccatttttatggctttttgtaattctttccgaaaaatttggtccccatttgttgtttcatgcgcaatgtgatagcataagctgggtagatgtccatgagtataatcaatattttcagcagatgatattatccttctatatgttggcatcaggtttaaatttacgcagtctttatccattctgctttcaatgttcagaaatcctattaacttggcatgcacttgcatctgtctgatcattattcttgttcttttttccttaattcgttttggttgaaatactgaattaccttgtggaagcaaatgcagggtctagtcagtggtgtctgttgtgtcacagcctt

SEQ ID NO: 75735 - DNA, 509 bp, Carica papaya
  Intron number 2 from transcript evm.model.supercontig_12.1 59 (locus evm.TU.supercontig_12.159) derived from phytozom e v7.0 (chr-ID supercontig_12; pos 1454205 to 1454713)
ttcagaaactattgcacaagccccgattttaactggttcgtttcatttaggatttctgaatctttttcttcttttagtttttttcaaatggaaatattgaaatgcagaaacgaaataaggttttagatgattgtaagtttaagcaactgagagtaatgtgatcatttgagattttattaatggtttgtgtgttgaaactaagattaggaaggaaactgaaattatggatggatttttaaatttttaaattcttaacgcaggtaaggttttcaggattctagagaaacagcaaatttattgtggcaaagaagaaaaaaggaaatatagtatattgatttgtttgaaattttgtgtgtgaaaattaagtagtacccgagctgttttgagatctgtttggaaataaatcaagaaggtgtaggtaagatagtttactgactgttatgtatcttctttcgattattttgctctctgcagcagttgcatatctgataagccaaaagggcaggaaa

SEQ ID NO: 75736 - DNA, 780 bp, Carica papaya
  Intron number 1 from transcript evm.model.supercontig_1.15 0 (locus evm.TU.supercontig_1.150) derived from phytozome v7.0 (chr-ID supercontig_1; pos 2194194 to 2194973 reverse strand)
gcattgttgcaggtatgatttagtggactcacttgaatatggacatgtctgccctctgtctcgagactttgtagagagtaggtagcatctgaattcaatagtcatatcttttgagcctagccacaagcaccattaaaatatgctccatttaatttccacagtgatgtttgttatgttttacaagattaaactttatgattttgaggcaaaatgaacaaaagctattttggaataaatgagttcgccaaaggtatgaagttcatttacaaatccacaatgtaaacctaaaaatttgcaaaacagatgcattttttttgggcgaaaatgatctattccaaaatgcagtatgataataataaatgctaatgaacatcgatcttctttatcaacctttaggttgcatttgcttcatctttcatttcaatttctacttctatcatctattgctcttcatatgcataattataagattatttattgtcttcgagtacgcccactttgaattctttataagtggatatttaattcctatattttaaggtgggggttgaatttctacccaaaagattcaaggtgggttgagggcaactaaaacaaacaaaattattttgtaaatacacaatattaattctgatatgaatatcaaaactgggaaaatttgttagcaattgaatgataaatgaacattattatttcattcatgtaatagttcgtgaaattttctgggcattgatcttcttgtaatccactttaagttaaatacatccttgttcaggttta

SEQ ID NO: 75737 - DNA, 758 bp, Carica papaya
  Intron number 1 from transcript evm.model.supercontig_19.4 6 (locus evm.TU.supercontig_19.46) derived from phytozome v7.0 (chr-ID supercontig_19; pos 378336 to 379093)
ggggctcctggtctcatttccgcggcacctccaaggtaacggctataatctctctctcttcagtcttccctttcattgtcagttttactcttctcctcgcccatgatttcttctgtttcgcttcctttttcttcgcttattgacaattgcactgcttctctgccttattaccttactctttcgattttagaaaaatttttaattcttagacatgatgtgatgctgaggtgatgatgagttgatagtcactcataggctaaaattttagcatttctttgcggatgtggtgctgtttcatgactaattatgtaactgatactctcttaccatactttcaactatttaggaacttagcaacctgttatttagctgcctataaccaatacgtattcttggatcttactcgtccatttcgaaactacgttcatatttgaatttttgtgcttcacagtaataaaatcaatctgataagcttctttcgctaaattcattccaagtcatgtccttttctaattaacatatgtgtcattattaggcaaactcacattgtcattatgattgaattctttgcttgcaattaggccattgctttcatcaactttagaaaactctttttttttttttcttttttctttctaatcaacctttctacagaaatgttatgacattatgttcgtatttactattctgcttttgttctatcattgttcttctacaaggaagatggtctgcctctaatttttggccttgttttcagg

SEQ ID NO: 75738 - DNA, 867 bp, Carica papaya
  Intron number 2 from transcript evm.model.supercontig_3.46 9 (locus evm.TU.supercontig_3.469) derived from phytozome v7.0 (chr-ID supercontig_3; pos 3414541 to 3415407 reverse strand)
gtgaatctacacaagcaactgtgaagtcaaggtattggttgttgcctaagcctttggtctttttaaaagaagaataaagtttacctcgtttcctgtatgcggtatttgatttattctctaaatgatttctagactagtttatgtgttaggtggaggtagaatgactttgaaataatttttttttttgtgttgcatatttgttgatttatactcataattctggtgcaaatgactgaaagcgctacattgatgaatcttttgatgttgcagataacacacagtttcttttgaacatggtaatctgcttcacgtgctgacataaatatttgtttgtgttagttttgctgcagccttctagtaaactttgtacatcgaattattcttgtccacgaaaaagttgtttatttgtaacatgaaacattgagtagatttaccaccaaggaattatgtgctttgttatgactgtccaaggcaaatgttggatgtctttgatatgcataactagacagccaagtatcttttttgtgacttgttaatcaaaagattgttaaaatgattctgttttgaattttcagcgccacactatgatatattgtggactcttatagatcggttttcttgcacctttctactctcactctagtttctgctcttttttcttgcactatcacatatctctttcttttgctaacatttcttctcacctgtcagacaagttccagctctgattctgcaatttacatctggtttctttttgctgtttattcttcatatagtaactttgttatatcgtgtatgatatgatctattagcacacaaaaaaagtttgacaatctcatgttgctaggcaagctggggaggacagtg

SEQ ID NO: 75739 - DNA, 631 bp, Carica papaya
  Intron number 1 from transcript evm.model.supercontig_44.3 0 (locus evm.TU.supercontig_44.30) derived from phytozome v7.0 (chr-ID supercontig_44; pos 292232 to 292862)
tcaactcccgtcacagcccccccgagatcattcaggtaactcacttcttattctgggtttttgcttctgaaattttttcaaagtaaaaagaaaatctggatggtgtaatttttggtttacagagagaatacgggtttgagtttaaattttctaatgtgtgagtttgatcggtcccacccaagatctcattcatgaattaatgaaagttctggtacctaccttccccctcccctgcactctcaagtcggtcaatcaccctaaatgatgttgtcatctatgtgactatatttctggttcctttgaatttttgttgggttcttatatttgtttggtatttgtcactagaatattttggtgtatataatttggtaattgtatttgaaattatttaaaaatagggatgatgacgattctgtcacgaaagtaataaagagaaacggatgtgaatgctcatatcacgaaaccatcgtgactagcataacagatcaataaaaacaccatacccaattcacaaccaactcaggtgaaaaagataatgacaaggaaacaccagaagaagaaaattttatcaactgcttttttgtgttggattacaggtgagaaggaagagtggtggagaagggggtctcgg

SEQ ID NO: 75740 - DNA, 508 bp, Carica papaya
  Intron number 1 from transcript evm.model.supercontig_119. 52 (locus evm.TU.supercontig_119.52) derived from phytozom e v7.0 (chr-ID supercontig_119; pos 358508 to 359015)
cctaggtgaattcatttctgtcgatgtaatttgcattgttcatttcctttttgatttggtggaagaaatgtgcggtttcgttctttctttatatgtgtgatatgtgcagaatttaaattcatttctgatcgatctctgtgttttttctctcttttcattttgtttctggattttgtacaagtaattatagatctgtgggttgctgttgattttattgttgtgttgtgaacgatccgcgatttccttgtacttactccggattcaagtagaatctagtcaggttttctcgagtttggcgaagttaatccgtcagccgttctgcagtcgaacgttctctatttgattccctgtaatttcgaaattatgaagtatcggtgttttaggtttctgttgcttgattttgaaatatttgttttgtagcgtagatcgtattaaggtgagtgactaatgaaatgatcttcttgtgtttacagtgacacttcgtttggtgtcgcacacgacgctttca

SEQ ID NO: 75741 - DNA, 677 bp, Carica papaya
  Intron number 1 from transcript evm.model.supercontig_59.3 6 (locus evm.TU.supercontig_59.36) derived from phytozome v7.0 (chr-ID supercontig_59; pos 388230 to 388906)
gattagtatatctgtttctttgtcagtgggataggatttggttaataagctagttttctccgtaagtcactttaaatgcagtatgtttggcatgcagattgtgaatgggatgcaactttcctgaaacatggcatgtggggctaagcttgtttgttgataatgaaggctgattattagatattcaggcattgttctagtatatttataccaaatcttgtgatatatggatccttttatttttctttgtactgtttcttaacaaagctcaaataaaaggagaaaagaaggaccttacatctgtgatacatttcatttcagtaatttactggggtaaaaccattttctgaaatgttagcttatccattttggtttatttgatctaagatgttccagaattgaacctacaaggtgttgagacttcgatactgcacctatgtaagcttgttcgaactgcctaaacaaaaaatgcttctgatttttaaagtcaagaactgtattcagattttttcatccgttgctaccggattttaacacttccttggacttaactgtaggttcttttacacattgtcttttgctcgaaaaaacaatgataacgaccttctgtttagtgtatatcacaatttaattgagcttttgcaggtgcgacctaggaaatcacaacttgtgaagcttgc

SEQ ID NO: 75742 - DNA, 539 bp, Carica papaya
  Intron number 2 from transcript evm.model.supercontig_29.1 7 (locus evm.TU.supercontig_29.17) derived from phytozome v7.0 (chr-ID supercontig_29; pos 155682 to 156220)
catcaaagaaaatactgaacaagtaagtattctcatctgatcattgtgatgaattgtgatgttctgttaattcttttgtcaaatattgataggcttgtatatatgacaatcaagatattaatggaagacaaggaagtctttgtttttgttggcatgctttagtagtttgctgaagattaagaattggacaggatatagggttgacgtgtaatctttgaattggctgttctgacatgcatgatttgatattgactggaaaattatattattgtatatgatggaggataagtgattgaagcatggtattttggtagttggggtattgatcattgttgctgatagggatgtcgagtttttcaggaaaagggatgtaaatgatgccattatatagtccacatgtctccagctgcactatgcagttcttttttttcaccaatattttggcttatttttcttatcctgcctgtggttcttattaatgttggtcctgtaacttgttattgctcattcaaacaggtatcccattgatcaccgcttaa

SEQ ID NO: 75743 - DNA, 543 bp, Carica papaya
  Intron number 1 from transcript evm.model.supercontig_226. 2 (locus evm.TU.supercontig_226.2) derived from phytozome v7.0 (chr-ID supercontig_226; pos 213222 to 213764)
gaaaaaccgttacacaggtacatggacctttttcgggctccatttaagttcttattttgaaaattttatttttgcatggtcgattgctgtggttaattttcaaattgtgttgggttttgatctacacgaatttgttggcaccatagttttggttgttctattgctttgctttgctcagttttctgtgccttaaaatttttgccagtccagatggttttccttaactcggttaaagagaatcatagggaaagctttggaatttgtttctgctatatagttttccctaacacccgctctagagaatctatatcttgtgcattttaagttgattcttatctggtagagtttttctttagcgcccattttgtggtatcaatattattccattaaatttgattttgtggtttattcacataaagtcaatctacttggtccgtcttgtcacttaaattttctagtatatacatgcttgggatggttgtttttttataacatatttgttaattaggttactctagctcatctcaaggacaagccagcacc

SEQ ID NO: 75744 - DNA, 389 bp, Carica papaya
  Intron number 2 from transcript evm.model.supercontig_17.1 89 (locus evm.TU.supercontig_17.189) derived from phytozom e v7.0 (chr-ID supercontig_17; pos 2260878 to 2261266)
acacacttgggttttctataatcgcttgtttcctggtaattaatgatcattttgcttgctttcctctctaaattttgctagtcagtcagaaaataattaatggcagtatttatgaactcagcttttttgccatctgtagtaactaatcaaggaagtaagttaactgagagtaattgtttagtaaatattcatgtaacaaaaaccattttgtgcaatatatgggttttaacttataattcctagattgaaaatctagagtctttgatgcaagttgatttggagatgtttctgatttaatactaagaaaaggatgtttctaatcaaattcatttactcccattcttttcattgaaggggtcgcttgtgatacagttaacagcagcaattcc

SEQ ID NO: 75745 - DNA, 745 bp, Carica papaya
  Intron number 1 from transcript evm.model.supercontig_5.30 7 (locus evm.TU.supercontig_5.307) derived from phytozome v7.0 (chr-ID supercontig_5; pos 2776983 to 2777727)
acaccaattaggtaatttccaggcagggcagtaaaatcttgttatgttgacactctatttgattggccggcaagttgtctctgtttctccttgttggactttgcttctcatatttaattgtatgcagctttttcttaaatgctttaatatcaacggagttcacaaaattcttgtaaaacggatattttctatctagtgtaattttggtactttctattattatgaactgttaaaattttcgtctgtggataaatgtactcaattaacacattctatctttctgaacttgaactttgacttattgattattactttctttttatgtaaattttgatccctaacagatttatatttgaataatatttattcctgtgttattgcaagcttttcatttttatagcgttatgaagctatataatgaccccttggtgccttgtgaagaagttctgtatccttctcaaaaaattattggacaacagtcatcctgggttttgctggatttcataatgcttttttagatgcatcttatgcttttctttctgcagacatttattatgaatttatttcatgctcttttactacacatttattacgactttagagattgctatttgtttgcatggtggaacagcttggtgattgtaaccgtgcctcataatatcttgacatgagatgagtcttgcatactaaataactctctgatgttgcagtcctgtgaatccaataacgaacgtcgcccctctga

SEQ ID NO: 75746 - DNA, 418 bp, Carica papaya
  Intron number 2 from transcript evm.model.supercontig_54.1 3 (locus evm.TU.supercontig_54.13) derived from phytozome v7.0 (chr-ID supercontig_54; pos 344635 to 345052)
ttagttacctccagccagaaaagcttcttgcgaaggtgccctagccaatacaactaatcacaattaatgactacctcttataactgtttatgtccatctctatatggctggattttctttttcttgttctttttttttgttgcaaattgggttttggccactgttggtgaggtacctgctagctagtgcttgtctcttcgagttgcaacattcgtaaaggtgcacgaagctactatctatggcgaggtttgttgggttttgtaactccaattcaacatcaatatgttcgctaaggaaaatctcaaagtctcttgttttagtaccaatatgttagggtcccaaacaagagggatggagtcactatgaaattttgtagagtttgttattagggcttgttggaggatcatagaggctaagt

SEQ ID NO: 75747 - DNA, 995 bp, Carica papaya
  Intron number 3 from transcript evm.model.supercontig_104. 32 (locus evm.TU.supercontig_104.32) derived from phytozom e v7.0 (chr-ID supercontig_104; pos 236046 to 237040 rever se strand)
aaaaagacgtcagtattctacttctatttcatttgtgcctctgttttgtttaattttttaaaaattgagttgtattacaatatgtactcatacatatcttctttaattctgaggaggatatactgttcgtcttggttggtcaatcaagtttcgaagacaaaatttgctagaaatgatgtactgttaattttccatgaacaactagctagctgcaatcgggcagttaattttcctgtacatgtttttcgtaaagagaaactactaacaaaactttgttatgctcttgacttatccgttttagcttcgtcattaacgattagcagatcttctttttgtttcttaatgtttaggggatggttttctattttttctttatttgtctagttgtcttcctaagagatactgttgttctattgttgaaaaattttgctctggttatcccaaaatgagatgtagctgtggcattgtctgagtggtagccactcaaactcttttttcccggagatctcagattcaaatgtttccctacttgcaattaatccagaaagaaaactaaagcttccaagatatcattcaattgtgctgtcaggttttccattccggcatattgtctactttctggagaagttgtgcctctagaaccttcattatttggttgctccattttctcctgttagtttagttttaaatggtgatttcttagaaggtgcattcaagaggttggttttacatgttacaaattggagaaacaacatatatgccaacaaattaattttggggttaatgcttggttgaattggacccctctcatactctgttctcttccaacttctacaactagatgttttcacatgctacgatcttctcatcaatgtattcatgatctgttagcttgatgccttactaattctgttaatgtaacgctatcctttctactgaatgccaatatactaaatgcttttcttgtggaaaattataatgtgaataggttggcc

SEQ ID NO: 75748 - DNA, 254 bp, Carica papaya
  Intron number 1 from transcript evm.model.supercontig_3.31 9 (locus evm.TU.supercontig_3.319) derived from phytozome v7.0 (chr-ID supercontig_3; pos 2211613 to 2211866 reverse strand)
gtgctttgtgactggtggtttcttaatcttttatttttaggtacttttgccgtgccacagaaatcttccatgattgaatattcttttatatttctactttaaatcttgttttgatctttatctatcttttattcaacaatctaggtggaagttaagttcttattcttgtagttcccatttttaagttctttttgaacacatttctttttccctttctagacttgtgagttcatcaaacttcatcttgtgtatag

SEQ ID NO: 75749 - DNA, 1032 bp, Carica papaya
  Intron number 1 from transcript evm.model.supercontig_14.1 33 (locus evm.TU.supercontig_14.133) derived from phytozom e v7.0 (chr-ID supercontig_14; pos 1608307 to 1609338 reve rse strand)
ctctccgtgctgacgcatttgagaaattggagaaggtggttttttatgcctatttttctcatgtttcatgaatcattatccatgtgtttttatgtcagttgatgtaatatatgtttcctaaacctttacatgcaagagagagagacagagagagaactgttgggttagtaccattgttaaaacatgatattgtaaagcctggaggtatttgcgattgaattagatgaatgaagaaggtgttgaaccgtatttaaaaacctctcgaggactctaatttaatgcttgttattttgatcagctgaagcaatgaaggcggattgaggcttgaaatgtaataggtgaacgattatttgattgatcaaattcaatttcctctcccaagagattgaaagtttatatcaagtgggttttcaagcacgaaacttttctttttttttttcgataattgaagaaggttacccgaaatttatcctatcatattacctaatgaactttgagggtagaaaatatacaatctacaccttagccataagcaaacttcaaagacagagctttgaattgatcgtaggcgtcatgctgtgtgagaagtcggttcacgttagaaatctctcgaacgtgagatttagggcttaaaataatgagagaaactattcacattgagatgcctgaggacctaaacattatcagcctcgaaacgtaagataggcaagccctactaataggatatattgttaggactagcagataccaaaataaaaaatacggtatttagtgctgggagacaaacaaactgtgagattatgtaagaggttttggtttgaactcaaacataaattcaaccttaagtttcttgataggattttaatgtttgtggattggttgttttcttttctaacttttgctttgtgctacaatatattgttctgtgataaaaacttggtcacctccttattccagactctgacaaaaagttatttaatttcctgcttctgtacagattgggcaaggtacatacagcagcgtgttccgggc

SEQ ID NO: 75750 - DNA, 514 bp, Carica papaya
  Intron number 1 from transcript evm.model.supercontig_6.24 6 (locus evm.TU.supercontig_6.246) derived from phytozome v7.0 (chr-ID supercontig_6; pos 1933964 to 1934477 reverse strand)
ctccgtgcaagctcaaagcggttgtttctcatctaacttcatacatatatgtatacatatatatatatatatatatatccatatataatcctttctggtactttttctgtgtgtgctttcttcgctcgttatctcccactaatatttgaaccagaaactttaaaattatgaggttttattttaagaaaaatctgaatttatagtgctcggaagactgttttccagtcatttttctccttcattgtcatttgattagtaaaatacgacaaatgttactttcagttaattgtcagcattaactttttagctatatatatatacacgtgtgtgttaaaaattattttaatttataaataaaattcatacatttaatataaatattaataataacataatatttttacaataataaacataaataaatattcaaactcataatatataaaaatagtatttttattgcatatgggtgattaattttacttgatggttaattagattggaggtggagcga

SEQ ID NO: 75751 - DNA, 592 bp, Carica papaya
  Intron number 1 from transcript evm.model.supercontig_177. 18 (locus evm.TU.supercontig_177.18) derived from phytozom e v7.0 (chr-ID supercontig_177; pos 397294 to 397885)
gcaatagaactgcgaggaaacaaggtatcatttctcacaattttattgcttgattctatgcttaattacaatttaattgattagattaacgatcagaacaagcaaatctttatttgattctccaatttctgatagcttcctttgacacgacacaaacagcaggtttttcctctctttttttttttttttttttgcgggggcaagttcattgttgtgaaatagactgattaaagctgattgagcctaaattagtttggttttgtaaataacttgttcaggggggatttgcatttaatactttagtaaaattagattatgttttttgggtgaaatgttcttttttggaggaaaatattttatgaaatttgcggttaataaatcacgactttaataatgattgctttggctaaaacccaattaagagagtttttcgccaaaaaactgaagttcaagaagtccatacaagagttaggatttaatttatttttttggtctctcttttatgattttttaataataccattggcatggtaatgctcttcacaattttttctcaggcataaagaaggcagatcaagatattcattgtgga

SEQ ID NO: 75752 - DNA, 1027 bp, Carica papaya
  Intron number 1 from transcript evm.model.supercontig_601. 1 (locus evm.TU.supercontig_601.1) derived from phytozome v7.0 (chr-ID supercontig_601; pos 3711 to 4737)
agttgtcaaactgaattctggtgttgattatcgaggttattctctctatttctctcctctcgtttcgttcttcatatcttacagctctgttggtcatctccatttttcttgtttctttttagatgtcacttttcttggagttcagacttatcctatatgcataggatgattagcagttcaaaatactgctgtttcttttgtgtgtggatttcccagcatctgttgtttaattttttttttcttttgaaatagcgtctgttgtttaaatgtacctgtcatttgtaggttcatgagcttatattgaatggatgccataaatcccagtcatctgatgtgattacaattgctgtgcctggcttttagcttcacatcattttgaaagctttattggcttttagatttttaggagttttaaggaatgatagtactttgttcaatttgattgatttctctaagctaaaatgatttttcttgttattggtttgtgcataagtgagatagacagagaagtcaccgtaattgtttccagatatcaaaattaatgcagtgtggatgcttgtagatagcatcatatcctaatcattattgttcttaagttcatgctcactggttgctgttgttgttggcatgttcttttttttggccaactctgcaagagttaatctgtatcaaatttttatcttatcatggttttaggtttcttgtttaggagtctgaattgtcatctcagttatatgagttctggactgccatgtcaaatgcagtaaatttaaaagatatttattcccctggagagtttcttcttatctcctgaataaagaagacaattttaagagaaaatgactttctagggattctttgttaagacagtattagtctctggggaatttcaagctccttatttcttggttaatatttaatgaaaagagaatatcaaactctaatatgggttttcatcgtaagtagcgattttggggaaaaagttacctttttatcacttatcattcagcaatgcaggtatcctggc

SEQ ID NO: 75753 - DNA, 456 bp, Carica papaya
  Intron number 1 from transcript evm.model.supercontig_6.70 (locus evm.TU.supercontig_6.70) derived from phytozome v7 .0 (chr-ID supercontig_6; pos 555178 to 555633 reverse str and)
ggctggtgttgtcatcactgctcttgattggtaattttctttttataaagaaaatgcgattgtcttttgatttttttattgagtttgatctggttttgttttcttttactttttgttttgttcttttgttttttagttggattttttgatagtaaagttcatgtagtggagttcctatttgggaaagtgcatcaactattttctgaagtctgtttggttcccaggaaaattgtgggaatgaagttcatgtagctctattcaacaaccttgaatgggattttacttttacaatttctgggattaattttttttttctcttaatgggcttaatacgatttatttccagaattctcttagcaaattggacataggtaagtaatctttgctccctcctgtttgactcagcattttcttccatttctcgttgcagttttctctttctttttctcgagaact

SEQ ID NO: 75754 - DNA, 291 bp, Carica papaya
  Intron number 4 from transcript evm.model.supercontig_136. 65 (locus evm.TU.supercontig_136.65) derived from phytozom e v7.0 (chr-ID supercontig_136; pos 712822 to 713112 rever se strand)
accctggtgagacaaaagatatcagtagcttgaaggtgtggtctatcttctcattcatattttgatgtggtttgtaataagggcactgaatcaattcctgggtaattgaggaattgcacaaaggatgtcagaattcttaatcttgcatcaacggcctccctcacatgtgcttcatttttccacgtctcttaattgcattttatgtgtttgtatccgtatcatggtagaactgaaagccgagaactggctttttcatgtttttgttttagatagggagccatcctaatattt

SEQ ID NO: 75755 - DNA, 379 bp, Carica papaya
  Intron number 2 from transcript evm.model.supercontig_314. 4 (locus evm.TU.supercontig_314.4) derived from phytozome v7.0 (chr-ID supercontig_314; pos 39521 to 39899)
gactggggagctttggcttcttggttcactggctggtatgttttctcttttctcttgcattgctagacatgagctgaaccgcactttcttctttttcttgactggttcgttctgagtttcctctgaaaatggttctgattgcttataagttatgttatatacggaagtggaaaatctttctcctgctcacttaaacccgagcataataatatagaacaactggatacgtagtagggcttcctgaaattcgaactgaaggcctcaaacttgcaatggtcttaatcaaatgcatcctgccatttccacttgcacccttgtagcaactaattttgtattatatcaagtcctctgagaattcaggacaccaaattttcacatt

SEQ ID NO: 75756 - DNA, 469 bp, Carica papaya
  Intron number 2 from transcript evm.model.supercontig_177. 24 (locus evm.TU.supercontig_177.24) derived from phytozom e v7.0 (chr-ID supercontig_177; pos 640648 to 641116)
gcttctatcatctacatatccgttagttcctctccttttctctctctctctctgctgctaaactaagtttacttaggctagactgtatcagtaacaagtaaagcctaatgttttaagaatcaaattatactgcatgtgaaacttgtatatatttcaacttgaaatcatttcatttgagtaatatttggtgttgatttgtgccaagtaattgaagttggataactacatatttgattaaacctgcatatctccagtttgattgtgctgtcattgtcttgcattatatggaaactgaactcatgcttcaagttgaagaaacctgtgtaggatcatggctgtttgtttaatctacttagatgattaaaagagatttactgtgtctaggttgggactcgggatattctacatttgaatcctgatatatgttttgattgaagcacagggactagcaatcttgacactatcagcc

SEQ ID NO: 75757 - DNA, 489 bp, Carica papaya
  Intron number 1 from transcript evm.model.supercontig_277. 3 (locus evm.TU.supercontig_277.3) derived from phytozome v7.0 (chr-ID supercontig_277; pos 8408 to 8896)
cagctggggtctggcttctctgctcaatttggtaatgtttgaatcttttttacttggtttttgagatgcaatctatgtttttcaaaatatggtacggagaaattttcaagagtttccagatggattttttttttttaatggtgtgctgtgtgggattgtatcaagctatggccatttttgattcgttttccaggtctgaaactatttttgcagcttgttttataggcaaattcttagtttcattttctttttgatgagaatctcagatagtaaatggtattcatgatttcttaatgctgtatttcttcccctgttctttctttgagtgcttcttttgatttggcatgtttggaattcctgaataagaaatatatttagttttctccagaaaacagtttgaatgtttattcatctttgattttttaacttgataagaaatgcttattaaattggttgcttcgttctttcttgcaggaccttaacaacaat

SEQ ID NO: 75758 - DNA, 746 bp, Carica papaya
  Intron number 1 from transcript evm.model.supercontig_10.1 34 (locus evm.TU.supercontig_10.134) derived from phytozom e v7.0 (chr-ID supercontig_10; pos 1926906 to 1927651)
ctgggttcgggtgtagtttcagaatacttcgtaaggttatttttcatttttgttatctatttaatgaaaacctacattatatatgatttgagtttattctatgcctagttaattattggatcttaatttacatatttgataaataattaaaccaactctatttatacttttaattctagaatgatagatttgcttctttgcccaattgtcaagaaataatcataaaaataggtcattcgaattcaacatggaattaacttgaaataggatgccttcttatttcattcatatggtattcttattcttatttgtagaattaaattttgtgttaaactcagtcataggttatgatttaattaaacccttgcatgcatttcttgttctctttcttccagtagttccttgaatatacatatcttttgggcttagcataacactgctttgccttagtacgatgcttaacataaaattcttcacaattcttcagtgctaatctttctttttcctttcctcaaggcatgggggattggatttgctttcatcttttattcctggattcttctataacaacttccatctgagattttagatgtttttgagttatgatcctggacttttttgtataacattgtttgtcagaacaaaaaatttcagatgatgtgttaattggcattatgctttcttcttttttattttcattgtttgatattgtttctttgtagatcaaaagcaactcctagaacctt

SEQ ID NO: 75759 - DNA, 982 bp, Carica papaya
  Intron number 1 from transcript evm.model.supercontig_14.2 07 (locus evm.TU.supercontig_14.207) derived from phytozom e v7.0 (chr-ID supercontig_14; pos 2261033 to 2262014 reve rse strand)
catcacgattctcggcaaagaatagtcaacaagatgtaagtgttgtctcctcaggtgtattttattaaagtttgttccataaaattcgtccctttggtgataatatttcagtattttgttctgggaaatgattatatttcagtacttgggtaatgatattttacattattgaatgataatcgataactagaactccaaaagtattacagatgatttgtatcaacaatgtttttaaataaaaatgtcagattggtggcagagtggtcttatttgttactaccttctttgcatcacttttgacctggaccagaaagtacggaggttaatgaatctgaattttctagccttgatccaataatagatatgttgaaatggtgttacctctttctttctatccctaaagattaaagaaggtgattccatttctatttgtcccaggagaccgtgaaaatagctaagaaaaactgttttaacgttaaattagggtttagggttaatttagtaattaaattttttttttactgattttcagtattagctaagagtcttttaactctactgtcagagcaagggagatctgtttcagatttgattttgatttggattgatttgttttatcttctaattcggataatttgagaattatctattagtttcctaatcataacgatacaaatattccagataaaatttctctctaatttacacgcaaaccagagttagattcctgtaaacctggaaatttcatccctaaagtctgttccccaaataccccttcacttcctgcatcaacaagctattcccaattttgttcccttctcattcttgatagagaagatagagaacgcaaaatggaaacagtttgaatttggattcagttttatctatgcatgctattcactatataattgcacttgcaatttgaagtttattttttagctatttctgaatattttagtaacatgatgttcatgtatataga

SEQ ID NO: 75760 - DNA, 700 bp, Carica papaya
  Intron number 1 from transcript evm.model.supercontig_58.1 22 (locus evm.TU.supercontig_58.122) derived from phytozom e v7.0 (chr-ID supercontig_58; pos 1168215 to 1168914)
gtgttttgctctaaataggtacctctacaaacatttacttcttttatatttttagatatacgagtccacaacccaaaattttttgatattttttaatcattttaaataggtttcatgttttttttttttgttcgcaaaattttcttctcgtctctagtttcttattttaccttcctttattctcttgcctcatactaagatattaaagcttatgacaagttcccaaaatcaagggcaagctacaatagaagtgaaaagaaaaaaacatttccaatggatggtattataaaaaaaggacaaagtttcttgataattaaaaagtaaaaagataatgtttttctacaagcaaaaaaagtttgttgttgtcttggtcatgaaaagtgcagacaagatataaatattgaactttttgaattttttaaacccataatatcaggatcctcaacattctttcctcactcatatacatatatatatatatatatatattactggaaaatatataattaagattcatcattttgtttccttgtgtcacagtatattgcaaatatcaggatcctcaacattctttcctcactcatatatgtatatatataaatatatatatatgttactgggaaatatataattaagattcattattttgtttccttgtgtcacagtatattgcacacaggagccacacagttccaggaca

SEQ ID NO: 75761 - DNA, 560 bp, Carica papaya
  Intron number 2 from transcript evm.model.supercontig_21.2 45 (locus evm.TU.supercontig_21.245) derived from phytozom e v7.0 (chr-ID supercontig_21; pos 2499016 to 2499575 reve rse strand)
ggagcagtatacttggattctaccttgtttgggttgaaatactggaattctacttgctgaaagccatctttgcttcaagtcaattgaattgtttcttttgttaagttagcaatcttggttctcttagttaatattctctttcattgtggtctgttattgaagagataaatatctgagatatttactccaatgtgaatatataataatactatgattaatatctatatttaatttacgattaggaattatacatctaatttgacttatgttctattgactttattgtactataaatagcgcggttttgttcactgataaattgtccataaattgtcaattgtattattgtttcccaatctttcacttctttacattactgcccctgtttttctttgagttctgatctcatctagtaccaatttctttgttaattcttttgtttagttttgtggcaaagtttcttaaggatttacactttattttgataggtttttgtttccatgtttcactgcttccagaaattcaataattgctttcattctttttcagctataccaaaa

SEQ ID NO: 75762 - DNA, 784 bp, Carica papaya
  Intron number 1 from transcript evm.model.supercontig_60.3 4 (locus evm.TU.supercontig_60.34) derived from phytozome v7.0 (chr-ID supercontig_60; pos 443063 to 443846 reverse strand)
cgtttggtggtaaaataaatgatacatacgctctcctttctttgtctttctatatgttgcctgctgcttctctgcatataattctttacatatttttagctgtctgcccggattctccgagttcagtttctagatgattgtcgtaatctgtgatttaaatcctgtacccatcagttagttcaataataaacccactcgtgggtttcttaatacttagtcttcatagtaagcctgtaggagggacacagtagtggatataaagctgggtagttcatgtgtaagtctgagaggcattcaacatattatgacaaaagaaaatataggataaattaattggctgtgaatgttcttctctatatcctcaggtctccctcttattaaatgaggttgaatcacggaagaagatgctgtgacttccaattctttctttagaagttaatcaacaaatgtagttttcttacctttgtataatgattgtgaactttagatttgaccaagtttcagacatattactgcatgaggtgattttgtgacatgaacttatttatgccatataattttcttgattacttgatctctgacttatttgtcaggtggcaaggatgcaaaattcatgttatatttatcatccatacagcacgcagtctacctccaaatcttatgtccattatgttcatgctttgactgctaatgaaattcaaactcattgtaatgaattggtttttccttttcctttctcataaatgctttattgactttttgcatcaggagcaatacgatactc

SEQ ID NO: 75763 - DNA, 816 bp, Carica papaya
  Intron number 2 from transcript evm.model.supercontig_13.6 6 (locus evm.TU.supercontig_13.66) derived from phytozome v7.0 (chr-ID supercontig_13; pos 756932 to 757747 reverse strand)
acgagtacatctactttcgtggaagtgacatcaaagtatgtatagatataaaagatgcatttatcaaaagaagttacctaggttttttgggtttttcttatttctgtatcactttggagcacgtaaatgaaaatctcgacattgcaggccatttagaacaaatttagaataaatccattgtccttctcccactctttgctagtgcttgtttgagatgtatcaaaatctcatgaaatgtgtcttttgctttgatactgctggctttcctctgctccaatacaaatcatactccttcctccttgtctttgtaaacttggattttcttgtttttcgacttgcaagatatctcctggatgtagtatatgtaagttaatcttgggcctgactacatgaaaattagattgatgctgagattgatccatgtggagttaaaggcatcttaggtttgccagccttgtacagtgaagtaaaagttataattgctgttactctttttctaaaggctacatgaagattcaaggattttgtttgattttgaacaaactctaaagtatccttttgccattgttatgacaaaatctatgaagttttggatctggtttactattttaaacataaaagttgtcagctgttaagttgtagaatcaactttccacgagaaaattaaaatgcagtaattagtcttgcagatcttttaaagatgattctatttatcaatatttttttatctcattctaaagttattactaaatagaagtaacctttgtgtatgttatctcaggatttgcaggtcttatcttcaccacctgtttgtag

SEQ ID NO: 75764 - DNA, 835 bp, Carica papaya
  Intron number 1 from transcript evm.model.supercontig_13.6 6 (locus evm.TU.supercontig_13.66) derived from phytozome v7.0 (chr-ID supercontig_13; pos 757779 to 758613 reverse strand)
tgaccctcacgagtcctccattggcctcaaaagtgtagttttccccttccttcatctgactttctctgtttcctcctgtttggtttcgtgtttctgttgctgcaagttggtttcataatggtgatgattcttttggcagcgtttctgttatgttcttacagtgttgttaggccttttgcgatggtttgatttaagttcttaaatcagggatgacagatgataaagtgcatgaaatttttccctgatagagaaaacaaggtgtctatataggttatgtataatgttgggaaagatggccaatttcctgtgtaaattttgaaattgtattatatgtgtgtctctacgtggtttccttacattctagaaaaaatttaccatgttattgtatcttctgagctgcactctggtcaattatttgaagttgctctagtaattttgtcctttaggattttgaatattgatgcgtgaggttctgttttcccctttccttcatattaccactgtgcttgaggaggtgaaatcagatgataaatgaaaattcggtgatattgagactgttagctaaactatgatcaattactgcaataaggtgaaatagtttgtaaaagggaaattttatatcattcgattgggtacatatttgtatctacaagcatgtatatgtcaaactgttcttccataccatcttcatctggcatgcttatttgtggcagtttacagatagtgttatgttgcatgatatcctactctttttgtacatatagatattagtcatgatgtgttgattacttattttgcagtaagatcttttggaactgaaggtcggaaaaaggac

SEQ ID NO: 75765 - DNA, 836 bp, Carica papaya
  Intron number 3 from transcript evm.model.supercontig_13.2 83 (locus evm.TU.supercontig_13.283) derived from phytozom e v7.0 (chr-ID supercontig_13; pos 2603167 to 2604002)
ctgaacaggcccagagtcttctcaacagtttcttcgtatgtcgaccttttcttcttcaacactgtaacttcattcatttcttccgtactgcttttcttaggctgtgtttggaggaaatgaaattcatttctcgagttcactcgaatttccgaatgaatttcgtaaatcaagtatggttgttccaaacatggctttaatcagagtcttttatttgcttttttctttaaaaaaaaaaaagtaatttgtgttattaaatatctttcttgtctctttgtagttgatctgtctcctgcgtgcgagctggcaaatatttaatatttatatttttatatatatatcatacagtaatataagaaaataaatgtttatattgaaaaaagaaaaaagaatcttatattgggctcaggccatttttgtaatagtgtgttaaattgtcgtgagaatagcagttactgattgctgattagtttcgaacataaaaaatatagcacggaaacgtaagaaacaagaaaccaattcaaataacaatctagaaaagtaaatgattgtacatgtataagatctaataacttgaatggctcaaacatgtataagatctaataacttgaatggctcaaacatgtataagatctaataacttgaatggctcaaaccttgaaactaatcagcaatcagttgaatgactgagatttgattataaattgggttcccagaagtgaaatttctgaagctttcattttatctccagttgaagatgcccttgaagtgatttctgatttcttattctcactgcatttacaggcaactcgcacccggcaaggacctaaagtcgaaaa

SEQ ID NO: 75766 - DNA, 636 bp, Carica papaya
  Intron number 1 from transcript evm.model.supercontig_18.5 1 (locus evm.TU.supercontig_18.51) derived from phytozome v7.0 (chr-ID supercontig_18; pos 373315 to 373950 reverse strand)
cagaggacaaagggaaagctgactcagataatttggtatacatgctaattgtgatattttttttaagctttcttagttgtcattggtcttttgaaggaaataggctttcattttgcataacattatgacattgtacatttggtaccatctctgattgactttgttagttgccttcttgagcaaaggcaacttgttttcaccaatttatatcaatgcttatattctaaatcacagaaaatacagagtataagagccactacttcagagtgaaatgaaaaattagcaattacaaggacctgctattttagatttgtttgctttgtttgcttgagtcagaagtgcagacaagcaaacagagaaaaagtggtccattgacagtaggaagagcttaaggaagaaataagttgctctggatcaaaatagagaggaagagtgaacctgaatttactaactttgacttgtatctttctataaattgtcaataataatgttatggacttaccattaacttagcctttactgttctttcaatggtatactgcattttggagcctggtaaggttaatgtgcattctattatccttttactctactatggtaggagcaagaaataccaacaagaggaaggttacttcg

SEQ ID NO: 75767 - DNA, 899 bp, Carica papaya
  Intron number 3 from transcript evm.model.supercontig_6.73 (locus evm.TU.supercontig_6.73) derived from phytozome v7 .0 (chr-ID supercontig_6; pos 563698 to 564596)
tgtacaggagtctaaaacttgtttgtgaacaagaggtaagcataattagtgaatacataattttgatttaaatctaaccgacgtaagatttgaaattatagatcataattaaattatttatttatatggtcccgatctttagttttttagtttagatgactaatacaagttatgttctaatttgattgacggcatgacatatatctgaaaatttacttgtcttcacgtataattgtttgtttatgtgtatgtatagatatttacttttgtttaatgaataaattattttaaaaaatgtacgattttttttatcgagtggtatttgaatcctgaataagaataaaatgcatgcatgcacgtcgtaatcgtggtatatccttttttctttttctaaatcagaaaattttatatgttagagttatttttaggcctagaatatctaccatattatagttcaattacgtgtaaaaatgtgctggtctttgcgaataattgattgtttatgtgtatgtatagatatttactttgtttaataaatcaattgtttcaaaaatttataatttttgaatcgagtagtatttgaatcctgaacaagaataaaatgcgtgcatgcatgcacgtcgtaatcatggtatatccgttttttttttcttaattagtaaattatatacgttagaattatttttggggcgtacaatatttattctatttatacgttagtctatcatgaattttaattaaagaattttcccaacaaactattcaattatactttttggattgttcatattattacttactaattttgataatatatgttgtttgggaatttctaacaagtgaaagctattgaatattatgcagaaagttttggaattaaagaaagaattagaaaagga

SEQ ID NO: 75768 - DNA, 831 bp, Carica papaya
  Intron number 1 from transcript evm.model.supercontig_3.12 2 (locus evm.TU.supercontig_3.122) derived from phytozome v7.0 (chr-ID supercontig_3; pos 952686 to 953516 reverse s trand)
ggtatattactctacagtctaatctctttatctggatccgtccgtctttttgttcttctccacgttttcacatcttagatctcaatctaattctttgtccgcacatggcgtgtgtaatttaattgatctgatacgatgtttgctgtgctttttccgagctacggttaaaaaattggtcagccgtgttcttgatttgcgtttttatgattttgttttcccactgaattaatcattgtttcactgccatattttgaatctgtaccaattgggttttctgctcataatttcgtgtatgatagtccatgtcttcgggatttcgatcttcttcctgctgatttatgaaataggcactcattatcggttgtattaactagtaattatgtatggaatgtggatctattaagctctttctgatgtcaagaaaagtttggaaagaaaatgaaatgattgcgggtattaatttttccaccctgttggaaaaccgtagacttcaaagttgtataatcaattatgaagtaagttagatcttgcagaggaagagggaaaaaaagtaacaggagctcttgtgggtcattttgctcgatgggtgatttcatgaccgtatttatatttaatctataagtaaattattcattaacaattcaagatctaaagtctatgccatcgactaaaatttcataattggagtctggttaaagttgcagggttagttttggtaattcttgaaagaagatcaacatttgaattgaagttactgatcatagtcttaattatttgtctgacatatttttgtttatttgccaatagcgggtgactggctgcagggtcctt

SEQ ID NO: 75769 - DNA, 606 bp, Carica papaya
  Intron number 1 from transcript evm.model.supercontig_1086 .1 (locus evm.TU.supercontig_1086.1) derived from phytozom e v7.0 (chr-ID supercontig_1086; pos 4935 to 5540)
gttttggatctcaagtctactggaaatcgatacacgtgagttcctttttgcgtctcttaagtattgctgttttgtaacaatgatttcgcgttaatctgattcgatgaagagttggatctcatttccttctgagtgttttttcgcgtctgttaaatgcattgaaattggatttttcaactttataatgggtttacataaatttatactgaacttttctaagtatctcctctttgactcttgagtttcgctggggagctgtaagaattttgctgaaagggaagaccattttgttttatggttctgtcttgcgtttctttttctttctttttttatctcctgaaaacactagggtttccatgatcctcgccaacagaagaattgagtgccgtctgctattagttttgccgatggattttccttagttccagttatctcattttacttgatttgtgtctgtgcgtggcctctgcttattagttttacctactaaaactaaatttagttctctctctctctctctctctctggaagcgcatgctttcgctaaaaggatgctaatgcgatttttcctttccttgttggtttgttgcaggttcaacgccagtg

SEQ ID NO: 75770 - DNA, 494 bp, Carica papaya
  Intron number 2 from transcript evm.model.supercontig_12.3 5 (locus evm.TU.supercontig_12.35) derived from phytozome v7.0 (chr-ID supercontig_12; pos 238040 to 238533)
ttgcatttaaggtaattatgaatttttgcttgagttattgatatgccccatgacaatgcacaatttttaagcagtaatatttgatgcagaacgatttaagttcgaattgcctaatgtgttagaaattataattcttgagcaatttaagcttaagccattctgcagcaatgtttattttagatgtcaacttatttgttttagtaaagaagattcctgttatggagcgtgaatttgttttggcacttattaaaaaggtggtcttgtttgtgattttgatgttttccacgtatcaaaatattttactttgatagatagcgtggatgtatttgacacttaaaaaaaggtggttctgtttgtgattttaatattttccacgtatcaaaagattttactttgacaaattacagagttgaagttaatttcattctttcatctcactgtttactttggtttctctggttcagtttcaaactacagcaccaaaaagttgttac

SEQ ID NO: 75771 - DNA, 508 bp, Carica papaya
  Intron number 1 from transcript evm.model.supercontig_35.1 9 (locus evm.TU.supercontig_35.19) derived from phytozome v7.0 (chr-ID supercontig_35; pos 520962 to 521469)
aatcctgcacttctttcacagtgggtaagaatataacaatagtgcttatctctaatgtagttaaattttagagccaatcattgtcattgaatcatcttgatctcatgcatcaaaatttgggtttctcaattttggttgagtgtctagaatgtgactgattttttctttttcctttagaatgatccgaatcagttgtgatcaatttaagtaattcttgtcattgaactgatacacaatttgaattggttggaatttttttatagttcgtacaaaattttttatatgagaatttgtgtcagtaatttgatatgtaacatctaacgtaatttaaaattttagaacaattaaagtcaatttaaatgataaaaaaatagagattaccaaacagcaaagttccaaacacaagtctggacagaggtgccgctcgaggcaactgggatggactggtgcagttggtacagttggttgtgtaggatacgtggttggctgtgtggagggtgctggtcgc

SEQ ID NO: 75772 - DNA, 901 bp, Carica papaya
  Intron number 2 from transcript evm.model.supercontig_3.80 (locus evm.TU.supercontig_3.80) derived from phytozome v7 .0 (chr-ID supercontig_3; pos 618992 to 619892 reverse str and)
ccttgatcaaacaccctcggttctctagtatactggtaataaaccttatgtcattacatacactgtacatatacatgcttatatatgtacctatagttatttttattaatattagatttaaaaaaaaatatataaagtggtttaatattactccaatttatctatttaatgaaaatttaataaattaataaactagtctttaccacttattataatttagtttatagaattttttggttataatttaatttttaatgttttttatttgttataaacaattaattttctttaatttcataatagaaaattaaaatgactgtatcatacttaaatatttttaaaaataatttaaaaaataaatttaaccaattaattaatgatattaatttaattaattaattatcatcattttttgagttatttaattaattactaatgctatatgggtaattatatttgttataatgtactcgtgaaacttaattttgtgtgtgtaaattctatttaaataattaaactataattaaaaaaaaaactaaaattataaatgtcgattgatggttcaagacgtgatatatatatatatatataagatatatgaatccttgtgcctatgcatgcgtgattctgtcaccaatccacagggaaactttattgcatggatgaaaaagaagtttctgcagatcaaaagccactgtgaatctcgatgtgcttggcatttccgaatttcttgatactctatacaatttatccaccattaatttctctccatactctcatgtttcccatcaacccggaagttatcttcatcaccatctccatcattttctttcaataaataattctttctgaagcacgttcttgtttaggtgggagagaaaaataacaaaagaagactaag

SEQ ID NO: 75773 - DNA, 543 bp, Carica papaya
  Intron number 1 from transcript evm.model.supercontig_52.9 1 (locus evm.TU.supercontig_52.91) derived from phytozome v7.0 (chr-ID supercontig_52; pos 785011 to 785553)
gaaaggttagggttctggttttgatcggaaattttccgtttgtcggtctatcagatctaggatctaattgcttggatcgacgcattttggagattagagtttagggttatcaatcaacaaaatgtgcatcctctgaaaacatcgactgaatgttgaacacgattccgatatgaaaagtgaaatatgatttaatccatcaagatagaataagagattcacgtaggatggtttgatctgcaaacattaatccagtatataatctggctcagtttaactacgattggaagaaacatctatcatcttatttttcctgcaatctggataatatgcgctgtgattaggactcaacttattgtaaaaggatttcaggttgagattttggaaattttcacctatttaatcaaaatgcctgccttttgtttggttgaaggtttaagcatcatatcggtaaacgggtactagattacttttatctgttgagcaacagtggaatattcatcttatatcttgaaatttcactctggttgttttgcagtgatttgg

SEQ ID NO: 75774 - DNA, 642 bp, Carica papaya
  Intron number 3 from transcript evm.model.supercontig_42.6 1 (locus evm.TU.supercontig_42.61) derived from phytozome v7.0 (chr-ID supercontig_42; pos 568953 to 569594)
agcgttgagtgcattcctgacccactgcttccagagtatgaaaacataacctttaccattatttcatgattatttttttaactaaatttcagtttaattcttttatggtttgagtttttttttaatttgaggtttttttattgacaattcagtgggtcctagtttaaatattaatccaatttactgtcttataatcataaaaaaagtaaaaaaaaaaaaaaaaaaaaacttaacaatacattcatcgataaattgattaactaatttaattaatatttaaataacaaaatattggattattaaatgaaaaattagaaatttcttaaattgaaaatttcaaaccaatgtgtgatgttgaattttttttatttatgttgagcaagaaaagaaaaaacaaaaacaaaaaaggtaggagagcctacccacattctaacaacactctattttgtcaagatatcaatataaaattatatgatgaaaccatatatattcatgtatatatacacacacacacgcccacatatttttacttggtcgtcgagttgaaatccaaatatgtgaatattataaaattaacttctaaatgatgagaaggaaatagatacattgtattttaatgttgcaggagtaaaggtccagtag

SEQ ID NO: 75775 - DNA, 592 bp, Carica papaya
  Intron number 1 from transcript evm.model.supercontig_34.1 16 (locus evm.TU.supercontig_34.116) derived from phytozom e v7.0 (chr-ID supercontig_34; pos 979434 to 980025 revers e strand)
atccctttgaagaagaggaggttaatccttttgcggtaagctctgcaattatgtttatcttaagtatgatgatgcttaagcatgttgtgtgcatcatttccatctgttggaaaggttgaattaaatttgtttctgcgtggatttgtttttgtttgttgagtttaatgtatgttgaactagattgatagatctatttgttttgattgattaatgcggtagattgaaactttttgatttattataatgctttcttatccttcgattttacattgtcactgctggagatttgctaatttggggggttaccttgttcttgttgattgatgctgtgtttggttgctgaacatttagatactgaagtttttattttcttttttgctgccattttccgagacagatttttttttttttttttttggttgcaaatctatcgtctggggatatccataatcgtggagtgtttatgatgatccgtaattcccgatttatgggatttatgatgtaactccacgtaaagaaatgagtcctggtgtagcttttaagtattttatgtcttcgtgtgacctgaatgtttttaattaatatcaggacc

SEQ ID NO: 75776 - DNA, 462 bp, Carica papaya
  Intron number 1 from transcript evm.model.supercontig_23.2 5 (locus evm.TU.supercontig_23.25) derived from phytozome v7.0 (chr-ID supercontig_23; pos 177138 to 177599 reverse strand)
tcttttggttccttggaagattctcttcctatcaagtgagttctggattctttttttctcaccaatttaggttttattatttctctccaatttcatggtttgtgaaaaaaaaaataaataaaaaaactgttaatcgattattgcactgtactgatccgaacccagcttcttatccatatctgattttaggagattttacaagaaattaattaatgtctctctgatgcttcaaagttaccaaacattgtaacaaatcaaagtttttaggcaagttatttgcatgtaaaaaaagccggttgcttaagagtagatctctctctgtctataccctttttatgaactggctctgttcttcttctttcgaatttctctgtaaagttaggcccttattatttgaggttttgttttggtgattgggaatttgcaggaggggattgtcaaatcactacaccggaaggtcaa

SEQ ID NO: 75777 - DNA, 939 bp, Carica papaya
  Intron number 1 from transcript evm.model.supercontig_135. 7 (locus evm.TU.supercontig_135.7) derived from phytozome v7.0 (chr-ID supercontig_135; pos 184663 to 185601 reverse strand)
ggatccgattatactggtgagaaacaattttttctaatttgtttccttcctttctaatgttgtttttgttttcagaaggtaatatatactgtgaactagtgatggaatccatgtgaatcataaatttttctgaaattctttatttcagaactgggatagagaggccaaatgtctgtcttatttcattgaggttaaattctacaattatttaagtcatagactttgagttgttgatacttgtattagtaatcagctacttggtcttggtaatcttagataccaccaaagggaaagtgatcctatcatctaaggtacaaaatctgtagcagattgaaagcaagcaagttccaactgattttaattgcagaacaatagttaaaaaggaattcttgcagttgatttgacaagctactgattcttcagatgaacttattcataaagattaagaaagcagcagctttttagtggctgcatggcaacctcttcttctcgaaccctgattttaacaatcccttaaaaagtttcaactgcatgtgtgcactggtttcttgctccgttttcttgaattcacaatctgtgaattaaatataggataaatagttatttttattgcaatgagactggacattagcggctgtctaacttctcaaagtactttcaagacaaaatggtatctagttaataatacaagtaaaatgctagagattcttaaggaagaggattagatgactctgatagagtctgcaatacttgggatagttttttataagaagcatttgctttagtgaatgaatctgtttctacagttgaccactgcctatatgtgcatatgaatttgaatctgtttacagttaaatttgttttctaatttatattgatttgacagtgtttgattttcctgctatttccttgagtgtaacactataattgcatacagat

SEQ ID NO: 75778 - DNA, 650 bp, Carica papaya
  Intron number 1 from transcript evm.model.supercontig_20.1 (locus evm.TU.supercontig_20.1) derived from phytozome v7 .0 (chr-ID supercontig_20; pos 1494 to 2143)
ttcgatctcgattacactctctggcctttttactggtatatttctcgcttaatccacagaaacaccataatcttctgtttaccttatgtatacgtttatttgcttatgcatgtatatctaactgggtgcattcatcgcgatttattgatcgattgaattttattcctaattatcaaactttaccattctaaaatttttaggctgatttatgtcctgtctagccctaaaatcgcttatcaaagtggtaggtagaatatcataaccttcttacactaaaggtaccgctgactactgagtactttcaccattgccggtaaggaatcgatgttgctataaaccgttcaagtgacaaattgttaagagcagaggataatatggagcttgatgtagcttgttttgtacaatacaattgttttatgggttgttttatcagaaaacattgtcattgttctataatgctcatcactcgctttcgctttttctagttgctgtttaatgatgattttctcataatttcatttttcatattttaagagcggtaagtaatttatttatgagaatggtaatgcaattatttcctgcagttacataaatttgaatatggtgtgccaatttacatgttcttttactttttcctttgactccagtga

SEQ ID NO: 75779 - DNA, 1057 bp, Carica papaya
  Intron number 1 from transcript evm.model.supercontig_46.1 6 (locus evm.TU.supercontig_46.16) derived from phytozome v7.0 (chr-ID supercontig_46; pos 165347 to 166403 reverse strand)
acaaggagttattaattcatctaatcaggaaaaaggtaagcacttaaatagtttgctttatcattaaactgaccgacatatggattatttgattttcgcgcgttcgttgttttatctcttgtgttttcttgtatttgaatgaaatgcaaatgatttcttttatacatgaatgagaaatgcgcagaatttttcactcgatttatcaattcacaagttcccaatattgctgtatcaattttgctcgtggacattttgctactgccattaatgtcatccgtttgaggtacatatgtcgtttatagcatatgacaataacaggcgcatccaagtcaggaacaaaagaatcgaccaaactgttcaagagatgcttgcggaaatggtgaattctttgcaattttttttgtttgataagcatcaaatggagactattaataacaactaacaactcacttagcttatattgtttttgccattagatttccttatctaaaataacatgtcatgttcaaatacttgcaatttaattgaaaacaatcatttctaatttaattttcaatggccagttcttgcgtcaaacagattgggattgtgtcataaacagattttttctttcggtaactttgcatcaaataaaatgcctgcctactaacaactaatatgtcagaatagctttttctctaaattaattttcattatcactattagatggtgttattttatcagtgcgaatcaggggtatcatagtgctcaatgccatctctagtactcaccaccttgtatccaggttctagagagtgactttgttgcagaattgagtgatgacagtcgatcatagtatatagttaccttatgcgattaattactgttgtcatttctgcaacaactagaagcaaatcaattccatctattcacttatcatatcgtattaattccaaacacatcgttacaaattcttttgatggttatgatttacctgtaacgacatgatccacccttataaaagtgaaatgttttgtttccaggatatctgcaggatctagtgtacaagttaagcaaa

SEQ ID NO: 75780 - DNA, 962 bp, Carica papaya
  Intron number 2 from transcript evm.model.supercontig_249. 17 (locus evm.TU.supercontig_249.17) derived from phytozom e v7.0 (chr-ID supercontig_249; pos 324754 to 325715 rever se strand)
acgcatctgaagacgatattgactgtgcattggaggtgattctttttcatatcccaagtgccctatgtttctgcattttgacttctgtcttgctgatcaagttttggagtttggtttgtgaactgtgttaagaatttcataattttgccaaagttatgtgttgttgttaatggaggcttttattattttgaaaatacatcccaatttgtctccggatttcttttgctgatgctcaaagtaaaaattttttttatggtgaagtaagccttttattatttcattttaaacacaagtatatccgtcataactatcactttttccacttaggtagcccagggtctggagaaaggaacaaatgatttctatgaaatattgcttacgaaaagtttgtttactgctggattaaatacatagagtaaatttacattgtttctgagtttaattaagaatggcatttgttttatttaaaaaaaatttaagaatggtatttgttgggagaggaatatgcttcagtagccatctagcccaaagtgcattaaagttttattttcctgagggttctttgactaatagattatgaagttatattttttatttgctgttaagggataacacaggaattgaaaggtaaatttggttatggcagcttacttcacaaaatttgttactgcagctccaacaataactctttattcccaattcttcctaggctgctggatgtgaaagaattccagcttatgagatctttggtgtttatgttcttaagagtttgtagaagcatgccatttgatgatttgaacttaataatttatatctttacagttcatgattgcgttatctaatgccatgtgtatatgatggagtatctaggtataggttatggagtctactttgagaaattcatgtggcatgtatttttacattagagtatggatgatatatactgcagggtttagagaagt

SEQ ID NO: 75781 - DNA, 588 bp, Carica papaya
  Intron number 3 from transcript evm.model.supercontig_55.1 07 (locus evm.TU.supercontig_55.107) derived from phytozom e v7.0 (chr-ID supercontig_55; pos 640858 to 641445)
ttttggagaaaatcaagaatttttgtggaaaggtatttttacctcatactaactaatccatgtgtgaacttttccaatatatgtagttggttctgaatgtagtcttatagcttttccaatataagatttccttgttcattttcaatactattttatgtgtatgtttggtatggcatattcttattgttacctttgctaaagcttattactgaacaggaaataaacagaacacaattaaagccactcataaaaacagttagctatttgtcactttatgacatttgtgattaatgctctactgtgtacaaagattactggtgctattgattctctgagctttctttcctgataaaatggagtaccttacatgaagaattgttttaggaaaatttatcacaattatgtttgatttagaaattattttgtgcatgtgaaggatccccttcctcataagtatagacagataatttggaccatgagatcactgtcctgtttgaacctgagtttatggagatcatttagttggaagtcttagattgaatatggattgtgtgcagtgtcctcagcgtattgcgaggaggggaaact

SEQ ID NO: 75782 - DNA, 670 bp, Carica papaya
  Intron number 1 from transcript evm.model.supercontig_48.1 68 (locus evm.TU.supercontig_48.168) derived from phytozom e v7.0 (chr-ID supercontig_48; pos 979930 to 980599 revers e strand)
tgggtgagcagcaattccctctttgccactcacaggtaaaaaaaaaattaaactaggtgttggttgtttttctctgctctgtgcatttcgtagaatatgtgagaaatggatagcaagttttttaatcagtgctgactttatgcaattatcaaatggattcaaagaaaatgaaaaaggaaagctgaagcttcaaattttcactggttttttgacgcagtagtgaatttggtatattgcatctatgttttgctggcagttaaactattgggtcgtagggaaattgacggaaactgaaaagagaagtttaaagtttgtgctttttactgccttttgggcttttagaaaattgatatactgcttctgaacgccctgaaaagcttcttagctgtgaaactagtattaagttcgaagtttctgtttttcaccacatttggaacagctagtgaaatggggacatttatgctgcttggctagactatgctacttgctggtgcatggtagcacagtctacacaaatgcatgcattaaagggtgtgattcaagtataagtttgaaaacaaactcttctacggatgctctcttatgagaagtcattgtgagtactaaccattttccctcattctttttcctactaggtctggtagcttttattcaaggtgttcaataacaa

SEQ ID NO: 75783 - DNA, 521 bp, Carica papaya
  Intron number 2 from transcript evm.model.supercontig_186. 1 (locus evm.TU.supercontig_186.1) derived from phytozome v7.0 (chr-ID supercontig_186; pos 10388 to 10908)
tgggtggtcaagataaggtacacatttctttgagaaagctctttttcactctattggtaaattttgaaccttaaatatcctaaatcagttatacacccagtatttttgaagatttatggacataaatacaaagtaataaggacatgttttagttgggaaaatatacagtgctgaaattaatcggaagtcccatgacaaactcttcagttataaggacaagttggaattgcaaaaataagtatggtgctgaaataaattagaagttccaggataagtcttttaattattatgtgatactgacatcaatgttctatcaatgataaattgacatttttttcacattctagttaatgcatttgttcatttttaattacgtttgatggctgttatgatgccatgaatacataagccatatctttcacattttttattcttatttttatttgggctcattcgagtaaccaatgtttggtttttgtaaatcagatccgcccattgtggaggcactattttcagaacac

SEQ ID NO: 75784 - DNA, 887 bp, Carica papaya
  Intron number 2 from transcript evm.model.supercontig_19.2 50 (locus evm.TU.supercontig_19.250) derived from phytozom e v7.0 (chr-ID supercontig_19; pos 1908201 to 1909087)
tggtcaatacttgcaacctcaggttagtgacaaagcactcttatattgattacttttaagattaataagcattttgcttaccaattaaattaatgtgagatttgggtgggatcggttgccggttgctctccttagttgctgccttttgttttaagttactttggagtgcttacctttataagaacagtagtcactagtcatgcgtgattttgtagttctaaacaagggaaaatagaatctttgtgatgaaaatcttgttaaaatcattttcttgtttatgaccacgtagctctagatttagttttgctagatgctggtctaatgtacttcaaccttttctgctcaaggcacttgagtttgtaattaatgaaatttgaaaaagaaaagaaagtatagtttagttggaggcatgtggaaggatttggctctagttgcgtggcatataggcttgaaaattctcaactgttatggtatgcgcagtatacttcagcagtcaattcctttttttttcagtttgctttatgttggactacggcttgtaatccagtggttggcacaagctttctcctccttgaaagtttgggtttaagcctttcaatagttagatctgtataagagaaaaaaatgattgactctctgtctaaagaggtgctgcattttagtcttaaaaaaaggaaaacgaaagcagttttctctgattgatagtcttgtgcttcttgtcaatattgaaatagaaatatgaaaaactgaatattctgcaactagataattccagggaataaggcataaatcatgtggttgtcaacatggcttcgaatttaattggtggttttcaggcttatgtttcttcctttttatttagttagttctcaaatttctttgacaga

SEQ ID NO: 75785 - DNA, 843 bp, Carica papaya
  Intron number 1 from transcript evm.model.supercontig_52.3 6 (locus evm.TU.supercontig_52.36) derived from phytozome v7.0 (chr-ID supercontig_52; pos 275026 to 275868 reverse strand)
ttagcaaacttgacgagtggaagtgtatcattccggtttgttatcttcttccttatttttaaattctcattataattaagagattgtggctctgttcataatacttcttgctattatgttgattaatgatgatatatcctactattcttgagcgagatgattttttatattctactattccattagctattatgacttattggttttggcttatggatgatatatcctactattgtgttggttatgattttattgatctcccaagttctgatctttttggggaagggagtgaggaggtaggagggaggaaagaagggattatgcaataagtttttcctctttagtcttttgagctccaggttctaattatcaaaagattgggaagagaaagaatgaaggaaacatgctatgtgtctttcagataatctcatgaaacctgataataagtaatattggctttattgtgatggcttcttctgctttttacgaggcactcgtagagacaagtctgtatgcagtatactggtggctggtgcatggttgacttgccctggactgagctatttcaggtccatgacaaactgatgatatctctgcctctacagacttcagtgaggagaataaggctaacatgctatatgtcttttagataaccccatgaaacctgataagtttgtaaaaattgactttattatgacggcctcttctgctttttaaatttgatttatttttctgtgtgaatgtggatgtaggctgtagttgcattatccagcatgcttatgtggtttattggtatgctctggcttatttagttttcttatccatttaggcatctgaatctga

SEQ ID NO: 75786 - DNA, 674 bp, Carica papaya
  Intron number 1 from transcript evm.model.supercontig_48.3 3 (locus evm.TU.supercontig_48.33) derived from phytozome v7.0 (chr-ID supercontig_48; pos 211592 to 212265)
tgtttccgtacgtctctctcaccctttacttctctctaaccgtttgtttggttgcagagaaaaaacttaggaaaaggagaagaaaaacggcaattggatatccaaaatgatcatttttgggtatttctagtttagatcggaaatcgggtttgcgcatctcgcaacgtgtctttttggaaattcctagcggactttcgaaacgtttcgtttgtccctctcccatttaacatgtagtttggtagccaataaaataataaaaaaaatatcgtttatgttctcttattggagtcctggggcatacaaaaaagacactgtgaagtggggagccttgatctctcacccgttattgaaaaggagaaaagtttagaaaggctcgtggttgtggttatagtttgaagtttctatgggactggcaaactattccaacatctggagcagatttcttcatggttgaagatgaattagttttgtatattgatagaaatttgaagacttcaaattcttactcctaaaattaacaaaatatgcatttaatgctttatttatattgattgatgtcgttcattatcattattgagcagtcaaattttctaaatatcatcttagtgttatattgtagaagttccattgtgtttgcagataagttctgttacaattgcattgtacattggact

SEQ ID NO: 75787 - DNA, 998 bp, Carica papaya
  Intron number 1 from transcript evm.model.supercontig_44.5 9 (locus evm.TU.supercontig_44.59) derived from phytozome v7.0 (chr-ID supercontig_44; pos 657023 to 658020)
ggaaccagttcgcgtgctcgtcactggagctgcaggtactgtaaccttgaactaatagcagaactaactgttacatttatgtttgtgtcagatctgtgacacagtgtttaactttacatagtttacctcactcaagtgctagatctacctgttttttgtataaatatcaccttttacatctcgatgcaattatgtggtttgagttcgtgttttactgcgctaaaaataatttgcagcagtataaccttacgatccactgaagaatatgaaccgatccagatccttcatgtttgatctgattatcaccgttactggaatttagactgctcgattgttgatcgagttaaggtctgacctggagattgctattattacttatggtttatggtttatttggctgtctaagcttttttatcccctgcagtgtgatttggtggcggttttactcttgctcttgttccctgtatatgaattaaaaatgtttgttaacgctgctgatgacagtaataacgatttggaaacgactaagcttcacgtggcggaatcttatttatatgtctaggaaacaggaaaaataagcactttacgcgatgatgaatgaaattttatttagttggcacctgaatggactatctgtctatattgttagttcaccaagtagccttgccatataacaattgatgcatacgatatagatttgccatgtctttcgagttatctctttgaagtgataagagcaagctttagttattttcccgtggaagaagctgggattttgtcagtttcgattttatattattatgatcggaaaggacctgaatcttaatattatatgacatactaacatcttaccaatgtggctctttctcatgtatatacatatatctttcagctaagttttatttattaaagtttgcatctcaaatattgttcagcatctcatttttctgaagacataaaatgaagaaataatgttagttttgcagggcaaatcggat

SEQ ID NO: 75788 - DNA, 349 bp, Carica papaya
  Intron number 1 from transcript evm.model.supercontig_27.5 8 (locus evm.TU.supercontig_27.58) derived from phytozome v7.0 (chr-ID supercontig_27; pos 562193 to 562541)
ttttcatctgtgaagccattctcaggtccttcccctcctctctctctggagcttgacatctttgttttattttatttcttttttattttaagaggagaaacacataagggcagtcattttaacccctttcttgttcagcttagttgaagtgataaaccttgtaaatttattgaagaatgctgttaatttgattttttttttctgaaggaaagattgtgatcagtattttcacccataagacacttaaagaaaaagaaataaaccacaggagacaaaaacttttactgtttcttattaattttctttaataattgggtgctcaggtctctgcaacctctagccaagaaat

SEQ ID NO: 75789 - DNA, 783 bp, Carica papaya
  Intron number 1 from transcript evm.model.supercontig_1556 .2 (locus evm.TU.supercontig_1556.2) derived from phytozom e v7.0 (chr-ID supercontig_1556; pos 5613 to 6395 reverse strand)
cctcgtcgaagctccacaggtgagtgctctgttcggccatttttttggcttccgtgattatgatcgtctgcggtcgttgatctgaatctgcctgatttgaagtttaagtttatatctatcttaggatttacattttgtttatcctaactaggattttagggttccgtagaatttaatgatcgtttttgtaaaaattgaatgtaataaattttttagatgtatataagatattttttgttgtctggttaaattttggtcattttgctggatgagcttttgcttaaatttggcgtcgagtttggtttgatacattagtgaggatttctataaggctgaaaggaagatgatcatggttagggttggtaattttctttatgcaacggaagagatttggattattcatatatgaattttattataaattaatactattttgtttcaacggagaaaaaaagttgtttctataatattcttgctcttcttttctgctgtactaattttttagctgtcttaggtattattgattttttgatcggagtaatcttgaaatattttggagatatatttgtgtgatggtgattatataagaaacaagtataattatttgattttgacatttcattgctttctagtttattctttgtatttcttactttcttcctgcctctcttcatatgctcttattaaaacagttgatgatgctagttgtgacactgtcagtctaaagtgccactctttaattttgcaggaaggtcggcttctcgccctgctgcccgtccactt

SEQ ID NO: 75790 - DNA, 371 bp, Carica papaya
  Intron number 1 from transcript evm.model.supercontig_25.1 86 (locus evm.TU.supercontig_25.186) derived from phytozom e v7.0 (chr-ID supercontig_25; pos 1975879 to 1976249)
ggagatccttgcccatttacaccaaagaggtatcataattttctctatgtgcttcttctgtttcagatgtttttgtgatatttcatgaggacccccttaaaacaaccaactaatgggtcataaacgcatcttagcaatattgaagctctacatttgtatcagaaattggaagggttgttccctaaatatttaaatatgtgcatgttagatgattttcaaagctataattactttcgttggtgaaatcaaagttagtattgatataagttagatatgtttattggtcttttcccccaacattggaaaaaagaatttgtagtttacttaccatcaatggctgttaattgcctgctttttctttatcattagga

SEQ ID NO: 75791 - DNA, 626 bp, Carica papaya
  Intron number 1 from transcript evm.model.supercontig_32.1 22 (locus evm.TU.supercontig_32.122) derived from phytozom e v7.0 (chr-ID supercontig_32; pos 1503860 to 1504485 reve rse strand)
ctccggtacgccgacgccggtctctccaccttcgatatggccgatcactgtaatatctgaaatcctatttgtcaaaacccttgattgttgttttttgttttttgtttttttttcctgttttgttttctttgttacacgtggactcctttaagtgaactgactggttatcaagctgatgaggctactttacgcattggtttcaccacgtgtttgcatgagatacccacaaagaaaggagttttatttgcaccaaggggtctctgctttcatatatttatgggttgtgtctaatattgtaacttataactgttgctgccttgtcaaataattgattttaggaaggggaaaaatgaaaattatagaattgggggattattggtagactattccaggggcatgggcgcaaaaactttataggatgagggattaataattgagaaattttgaaatccgagtttacaggcaaaaaagcaataaggtagtaagaattgagaaacccagaagagtttatgaacttaatggtggagaggttaaacgggaaggagataggataaaattactttcattaattttgtcattttgacgtggcagagttgttaaactcgtccttgaacacattcaccttt

SEQ ID NO: 75792 - DNA, 924 bp, Carica papaya
  Intron number 1 from transcript evm.model.supercontig_104. 57 (locus evm.TU.supercontig_104.57) derived from phytozom e v7.0 (chr-ID supercontig_104; pos 373760 to 374683 rever se strand)
atcctcgcaggaacttcgtcgtgaaggctcaaaccgtgagtgattcctttacttcctctgcttttcttgtagcattccttagttaatgccgaaaattatttatttctattgattgagattatttttgcaatgtgattcttttttcaagttaattactgttaatttagtgttccggtttcagattttgcccgaatcctccatatgtgtttgcttagtttttatagttccgtatgcttcagaatgaatctttttctattttttcacttgaatactttataaattcggcaaatgcaagatgcaatttgagcttcgttcttgtggtgaagacagaaatggttgatttgactgaaaataatatcattttaaaatgtggccttgtctatatgtagaagagtttagtactgtaagattatagagtgataatctcgaaggaacttttactgctcttgttattaaactcttaaatatatatggttaaaacctgcatatattgtttaaatttatgaagtttttagttccaaaaccaacctatctattctactttctatcttattctaagtaccttagatggcccattggcttttagaaaaacctttcagcagctttcatccaagcctattggtctaatatcttggatcttgtggctggagaatattttattagaaagtggtggttatttatcactcacaggaaggacgtttaagaaaaggaaaatccatgtttaaatgactattgaggtttactggttacaaaaataggctggtgcatgttgtcaaataatccttctctgtctgaagcaaaaatccagccacatactgtcaattacattttgtgttttccttctgtatttacctcatgttgtatgtttttctcattgttctttctacagagtgaacttccactggttggaaatctcgccccaga

SEQ ID NO: 75793 - DNA, 411 bp, Carica papaya
  Intron number 1 from transcript evm.model.supercontig_118. 28 (locus evm.TU.supercontig_118.28) derived from phytozom e v7.0 (chr-ID supercontig_118; pos 413882 to 414292 rever se strand)
aagtacatcgagcgcggccacaaggtaacacccgatttaatgatatacatatatatatatatatatatatatatatacatatttgattttcatgcatgcatgcatctatctgtatatgcttataaaaagcgcccatgtttttgcattgtttgtgtgtttgatttttcttttttgtgtttgcataattgttgttgtgatagtgaaataaaggatttctcgcatgcaaggaaaaagagagaccaattcggtcgtttgattactttttgtaggttcttagaaatgttaagttttgggtttgtgctagttttttacgattagaagaaaaattgaactttttcttttcttgctgagaaaagctttctgtacaagattttgaaatttggtgtcaatttgttttttggttgcagattg

SEQ ID NO: 75794 - DNA, 249 bp, Carica papaya
  Intron number 4 from transcript evm.model.supercontig_5.35 8 (locus evm.TU.supercontig_5.358) derived from phytozome v7.0 (chr-ID supercontig_5; pos 3326275 to 3326523 reverse strand)
ttgcaaggtttcttaatatttttctttcaattggaatcctcaatccttggttacattataactctttttcaagattagttctgtttaatcaaatgtctgatgagtctcatttttactgtccctgcatttctctggtttcgaggtaaattttctttcctaatttgattgacattcaaacaattagcaccagatttgtttttgttttcttttccaggttcttgagtccactatctgcagttcctttggttg

SEQ ID NO: 75795 - DNA, 573 bp, Carica papaya
  Intron number 3 from transcript evm.model.supercontig_23.1 32 (locus evm.TU.supercontig_23.132) derived from phytozom e v7.0 (chr-ID supercontig_23; pos 2058567 to 2059139)
taaatttttcaggggagtttggatttaacttcgaggtgattttaaggtttgaattattcaactaacccgaacttgaatatccaaatttcttgctcggttgggaaccatgaaaatttgtgttcagtgtttggttttttcattcacaaataaaataactgagcataaacaagacatgataaattcataaattcacaaactgaggcacataccacaaatttttgtcttcctgaccttctaaatcacaaattatcatctttaagtttatatttttctaagagaaattaaccaccagtaaaatgtcttggttcttttaataatgtaatggtatttgtttattgctaatgtctccatcacttgtgaattgtggctgcctgttggtgggatttgatcttgaatattcaggagatgtgaaacagaatattctctctcttttgggcatagttaatcatggttatgtatattatgaactaaaatgtgagaattcactttataataatatgcctttatagaacaatatacttgtaagagtaacccatagatccaaatttgcacaggtaaatccctcctaaaact

SEQ ID NO: 75796 - DNA, 873 bp, Carica papaya
  Intron number 2 from transcript evm.model.supercontig_2511 .2 (locus evm.TU.supercontig_2511.2) derived from phytozom e v7.0 (chr-ID supercontig_2511; pos 5804 to 6676 reverse strand)
aaggtcgtcgacatcttcattcccagagatcgaaggttgattccctctttcactcatcgtctctgttcttcttttggttgctaacaatttggaaaataagagaagctggacttttttgataataccgaattggttttgaaggttttatagttttagagtcgggcatatttttaagtcctactaattgaatgcttaccaactaagaatactatagtcagagaagtgatttgaattttcttgtctttactgttgtggattaattagtttaccagttcctatcgatctagggtttttctgttccttttatattgctatctactctgggataaattggtattgcgaggagtaccgcgtctcttaaggtttagagtttctaatccaaacatgtgtagaccccttacagaagtcatacgagtttgatacgaagttcatgtaccataccctgtaaattgtaattggagctatgataatccaccgctctaaagccctggatattcacgtcctgttgttatcttgaaagattaatgtcaatctagctcatcacctggtttgagggaggctgaataactttgacgctattgatattgcccttagagagaaatatttcaaaagcagctactaaaattaaggtcgaatcattcaacatgggattctagttccacttgcaattagcaacttaacaactcgtctgcaagaggtgctgaaggggcaacatgactcctggccttcactcctattagaaggagctattataaaaggttttgactggttcatagtaggtccaggttctgtattaagttgtaaggtgctattttgtttttatttgttcctgttgtagaactggtgattctcgaggctttgcatttgttcgct

SEQ ID NO: 75797 - DNA, 481 bp, Carica papaya
  Intron number 1 from transcript evm.model.supercontig_454. 1 (locus evm.TU.supercontig_454.1) derived from phytozome v7.0 (chr-ID supercontig_454; pos 6206 to 6686)
attcttcatcaggtacatggatctttgttttagaagtccgatgttaagtggcttcttcttgtttctttatcttctagtacaaatctccatcatgattttcaagatgaataaaatctatttctttgatttccatgtttaatgtcatgtattgagaagcagcttatgcttgtacaatcatgagttcattggtactaaaacaatctagagaattaaattaactaaagtgccaatttttggaacttctaactttttgataattgagtttatttatttattttgttggtgggatggtcggggctttggttagtacattttgcagtttctataaggaacagaataaagcctgatttcttcttcaagatggaaacaggaaaggaaaactaagatatttgtctagttcgttctctgttttttactcatacatcctactgtgtgttgccatgttctctgcagatagaagctcttaaggcaattggagtag

SEQ ID NO: 75798 - DNA, 136 bp, Carica papaya
  Intron number 3 from transcript evm.model.supercontig_454. 1 (locus evm.TU.supercontig_454.1) derived from phytozome v7.0 (chr-ID supercontig_454; pos 7045 to 7180)
gttacaaaggtaacatttgaacttaaaatttttttatctctgttttctttttcctttcatttatcttcttcagaggagttatgaaacaaagtggaaatcaaaatgattagagtcatgtggccttatccttaggtag

SEQ ID NO: 75799 - DNA, 332 bp, Carica papaya
  Intron number 4 from transcript evm.model.supercontig_14.1 72 (locus evm.TU.supercontig_14.172) derived from phytozom e v7.0 (chr-ID supercontig_14; pos 1990754 to 1991085 reve rse strand)
agccgctatatcttcacatatctggaggggctcatgtatgcacagtatatagtttcttatggagctttaaggctgctatagctaggatgttttgagtaattcactgccaattgatttgtgtatagttgctttagttttgtctgataacatagcttctaacttcgtggtttttattcttcttggcttcacatttgattacttaccattaataatggtaaaagccttgcaaaaatttctttcatcttccaaaagaagttttggctttctttttcaaaatcttgtggattgtctttgcagttgaaagaaacagcagaacggattttagctgttga

SEQ ID NO: 75800 - DNA, 803 bp, Carica papaya
  Intron number 1 from transcript evm.model.supercontig_116. 54 (locus evm.TU.supercontig_116.54) derived from phytozom e v7.0 (chr-ID supercontig_116; pos 512910 to 513712)
ttaatagacctccttcactccctccttacccacaggtacatctgtttttcttcatgcttcatttacggaccagctctgcttgatctgtaccctgtttgggtgttcgagaaaagaaattgttttggaatttttttagtaattttgttggaacccagatgaccaattatatgttatctataacaattctgagtttcacccattttgttttggtgggtttggtgtttgttcggtgagaaagaaaatggagaaattggatgtgggaaactggaagttggaagatccttggagaaaatttggaaaaattgttttctttagttttagttgtttgcatatatccgagtctggtttttataacaaaggattgatgaagtgggttctgaagaattcattcaaaagagagattcttctttgaaattatcaaaatttcatggtaatccagcttgagtttttagttcataaaattacccactgagcttttttagctttggcgtgatgtagaatcagctttttggctaacaaggattagacgttttctatccaatgttcccttctttttcctctgctttttctttttttcctaaaagaaattggaaaattttcatctaaatcttcgctgaattctcttccttcaaaattcattcattcattcagattaaatttctcaactttggcaagataacagagatgggtttcttctagatttgaatctgatcttgacctttgcatttcattttttagaaaaattctataaataagatgggttttctctatctaataaatggaatttatggagataaaaacag

SEQ ID NO: 75801 - DNA, 816 bp, Carica papaya
  Intron number 1 from transcript evm.model.supercontig_26.2 89 (locus evm.TU.supercontig_26.289) derived from phytozom e v7.0 (chr-ID supercontig_26; pos 1884731 to 1885546 reve rse strand)
aagttgatcaggctaccctcttcgatctcattttggtttgttcttttttttccctattgcttttctttttttcttttaatcttctatcgagtctgttggctcttggtttatattcattgattgactactctcttgattcatttgttgatttggatctcgtttagtctttgtggtttctgcttaatttcgcttcccccaaaccttcccttcttcctttattgagggtataaaaatatgttggggtaattgtatgttaaattgcacgagaagcttcttagagtgataattctagttcctttttaatgataagcgatagacaatatttggtgaggaattgaaattgttgtcaatattttagttgaatgtaagggaaactagtttttccatgaagctaatgatttggaacaaattatgattttcatttagtggcgtcaaggtatttcggaaggattggttattgcttttgggctcgcggtacttgttatttgtcttatggctacctcattgaacgattcttcataattagagttgtcttgcggtttgctttaacatttatctttttgggattatcaacgcttttggaatgatgaggtttgtgtgtacgggctggacttactttctccaatcctgcttttttgatttgcaatgcaattttccgtgcgtaaacttggctttaacacttttttcccattgcatagactcctggttctgcattgtgctcggcctaactctcttctgctacagaatgagtaagtctgttgtttgcctgtatggtttgtaggctgctaactatctgaacataaagagcttgctgga

SEQ ID NO: 75802 - DNA, 682 bp, Carica papaya
  Intron number 1 from transcript evm.model.supercontig_36.5 5 (locus evm.TU.supercontig_36.55) derived from phytozome v7.0 (chr-ID supercontig_36; pos 456139 to 456820 reverse strand)
taaggccggggacattcttgctgttccgttgtcaggtatcctgtggatttgattttgattttgattttgaatgccaggtgttttatggcggtattgactgataaggaaaataaataaattgctctctgttgttcataaaactatgtactttgttgagattagaaaaatggtgctgttaatttgtttcctcctatatttgggtatgtcttcttttttttcaattagcaggttttttttaactactcttgcaaataaagatgttgaatttgagtatctacaattgctaagtctaaatttgttaaggctaatgcctatacagaaacttaggcgatttttgttaggctaaaaatgttttctagcttttctatatgcattttggaataaggatagagaaaatgacaaatgatagaatttgaatattttaaaatgttggttttaggagtttcgacgacctcttttctttatgtttgagaattccacaaacacgcatctcttatataattaaacacgtatgaacttcaaaaatggaaaccaaaagatgctttaatctatatcgaagcttggtttctttggttctagagtttttcctgtcaaaatgtttggttctaactttgggacattgtttgaaggttaagaattttgtttttctgtatttcagcttgtgcttctagctttccaagat

SEQ ID NO: 75803 - DNA, 960 bp, Carica papaya
  Intron number 2 from transcript evm.model.supercontig_333. 7 (locus evm.TU.supercontig_333.7) derived from phytozome v7.0 (chr-ID supercontig_333; pos 43113 to 44072 reverse s trand)
aagaaattgtccatccatacgaacccagtcaagtgcgtccacaatctgcatatatatgtgcatagatatatatatatatatatatatatatatagatatcaaattttttctaggttttttagattacagcttgatgtgtgtaggggcaccagcagcaacctaagaaacgacagaaatgtccagtagcaggaagagccacaatttcttttacccttccagaggatcttctggtcttagctgataacatccaactggttagtaaatatttctgtcgcttaaatctctcgtatcatcttgtatgtcaaatgggttttgtagaaaattggtaaatggttaattttcttgatggtagtatacttctgaccaactcattccacccaaaacgagtcatcggtacacaattaggcaaagaaccgaagggtggactatagagagacggcgacgtgcaactatgagatatgattcagtaagtcccattaattttttgaactgaacaagctggttttttcggagcatgcatctagaaattgagaactctacacatggtttcccaagaacattgacaacatttacttgatgtgttactgcagtatttcattcatagggaatcacagggattattccgatcagcggtggaagtcacggactttatactatatgagctctacccagagaagccgactcccaagccaaggaagaaaaaggcagaagaagggagtggttctccagtgaggaagaaggtaggcaggccgagaaaaaataaggtggatggggaacaaggaagtactccggtaagaaggaaggttggcaggccaaggaaggtggcggatggggaaaaactgactccttctgtgtgttgtttttcagtgtatacagtggaaatatcgcagtcgcaattaattttctaatactaaaatattttttctagatttctcttattcttttttgctgcgcaggtgg

SEQ ID NO: 75804 - DNA, 854 bp, Carica papaya
  Intron number 1 from transcript evm.model.supercontig_157. 63 (locus evm.TU.supercontig_157.63) derived from phytozom e v7.0 (chr-ID supercontig_157; pos 417910 to 418763 rever se strand)
ttgttgtcgatccgcttcctgaaggtctagatcgggtaaacatcctcttcctttacctattaagttttttgttccagttctcacatgcgtgtttctcaatttaaagctaggtggtgtttttataagactttaacctcgtaaaaatggctattgcgttattagttgttgatgagttttctattcatgttaatctgttgttgctttcagtcttgagtttatttgtacgttcatatattgtattagacttttttggtaacgatttcggccatactctgtagagcttgtgttgaaaagtctattaaggatccaaaaaaagcatcattaaggaactgttgtgtttgtatagaatatgatagatgacttgtacaaagcggtttgtttacttgttactagtttgaataggaaggacacaagcaaagagcttggggaagcaaatgataccattttcagtagggggaattttccatgctgaatttgaagttaataagctatagttttgacttttgaaggatttgggaaaaaaatgagaaacatcgtttcattacatttatttgatttctgaaatgtgttatccacttacaaggagtacggtgaaactgatctgcacgcttgggccaccttaaatacttttgtaaactagttctctgctcacttaagctgaatcacaacccgctaacaactatttatccatattcttatattgaatctttgtaattgataacagacaggtgttgctgtataaaatcacttcagtttttgctcatttatactgaagtttattgttttccagaaccttgacatttatcattcagattttttttgtgttatcagggctatattgtgttaaacagacc

SEQ ID NO: 75805 - DNA, 1050 bp, Carica papaya
  Intron number 2 from transcript evm.model.supercontig_1720 .1 (locus evm.TU.supercontig_1720.1) derived from phytozom e v7.0 (chr-ID supercontig_1720; pos 5408 to 6457 reverse strand)
cttacagtctcttcatccatccccagagcttcgaggtatctcattagattgaggccacagtaccaattggttatacttctttaagacaacttgaatattctgtagttcgaataatgagtatctcctttcaccatatcgtggttgggattcgtgtgcaccaaaatattggaggtctgacaactatcttgatgaaataagaaaagcatttagaaactagaaactcactcagtcattctttaggctccggcacacttctctttgaagaagctcactcaccattctctcagttgttccaaacacagctttaatatgaataataaaaatattaagtgtgcatatggagtggctgtaatttatgctgtgagttttaaaagtactcttaaaatagctgttaaaagttatttggtgtttgttaaaaatagccttactataatatttgactaattcttctaatcatgtggaactgatgtattcaggccttaatgatgggggaatcaaaaagctttgtagttctccttgtgcaaggtcgaataaattgatatgtcctgattgttcacaattcccatttccgactagtaagactggctctaacatatcacattgttggcagcaagctgaatgtcttaaacagtcggcatatttttttcggctgtttctgaaagactcctatccaatatgttatcagccgagcaatttgttagactttcatttactgtgtttcaatcttaatcactctgtttattgtaaagcatttcttatgggcttcaatctaaagctttttgagagggaattccttagtttttctagctttcaattcagtttgataattatcattatatactacttgtgaatgatgctttcttgggctgcactttgagctttagtattagtgccttaggttttgaacttgtgtgctgtcagatttccgtcgggttacatgccatctcttcttggtgcacaaactcttatctgtaaaatcttgtacagcgtaataataatgatctttatattttaggagctcccaaattttgtgcaaggcagcgacaaaca

SEQ ID NO: 75806 - DNA, 917 bp, Carica papaya
  Intron number 1 from transcript evm.model.supercontig_546. 1 (locus evm.TU.supercontig_546.1) derived from phytozome v7.0 (chr-ID supercontig_546; pos 4878 to 5794 reverse str and)
gcagttccgacctctccgcagagctctccgttccggtgagtaatttttatctccgttcctttctcccctgatttgcaggcgttggattttgctgatgatgacttcacgcgatgttcgttattgattaaattaattaattaaaatcattaatggtgtttcgtagtgatttaagttggggtgattagtagctgatctgcggggggttaattaatcttagggggttgttttagtaattatgagatttggattttaatgtcggcgactgggtggaatccagtgcaccaaaaataaaaatgaattattaaaggatacataataattgtgatttcatttatggaagtcacgtgatgggccatgtgattagttgattgaaattggttgtcactttaaaaaaaaattaaaaaattaaaaaagaaaaagagaaattcttttggaatgttcttaatcgtaatgtacccccaagtgatttccacattggtttcttgaatttttcatcttttgatgaattcctctttaatgcattgaatgttttgtataacctaataaaagtagattccttcagttgtaattcagctttaatgtttgatgaaatgaaatgggttttgtatcaaaagaagaaacaaagaaattagtcccaagtgggtattgatgtgttgttagtcctgagtctaatgtgaattgtgggcgaccttatctgtatttgtatgattgagtcgggggaattggcgagcttgaagttaattttgagtgtctaatgtgaattgtgcagaatcttattgggatttgtatgattgaattaggagaattggcgagcttgacattagttttgaatatgttttgagtggatttggaaagctgtcgactgatttggtttggtttttgctgtgattgcagtacgaggatattcttcagttgga

SEQ ID NO: 75807 - DNA, 724 bp, Carica papaya
  Intron number 1 from transcript evm.model.supercontig_56.9 4 (locus evm.TU.supercontig_56.94) derived from phytozome v7.0 (chr-ID supercontig_56; pos 1191139 to 1191862 revers e strand)
cccaaacgtgttttggagagattgtctgtaagtgcactttaaatggcatatagcaatacaatctccataaaagaaaaacaatgaaacttttgttactctttttttttttttttttttttgaacctttacgttttatctggttgccgagaaaactgaaaataataaaatttttgaattcatcgttgatcaacttttttgccttcgttaattttgctgtttatttttcttttgaccctttacattgctgacatcattctttacaatgatttgctatattcttttaattttctaaacaaaaattaaataaaatagcttgtttttatacaatcaccatcttcttcttcttcttctttttcatcatcatcttcttccatctagatttctattgttctaaggaatttgaacggtcaagaactgttagtgatatttcttttgactgaaattagtcgctttggaagttttttcgctgtgtctttgaccaacacaattatcgtatatggtgcctctttttttgtgggtatacttttctaataattactcggctgttgcgtgtccttgcatgccatttgtctgtagattcaaacatgaacagtcattgcacagcgtaattccttgactttcatcacttgtaggattcttttatgaaatagctattttgagggtacaaattattctacttacactagtttatgaattttgcgcactgattacagactccagaaat

SEQ ID NO: 75808 - DNA, 581 bp, Carica papaya
  Intron number 1 from transcript evm.model.supercontig_25.1 46 (locus evm.TU.supercontig_25.146) derived from phytozom e v7.0 (chr-ID supercontig_25; pos 1525547 to 1526127)
cagccttggcatcactgggaaaattgagcccaaaggtataattccttccttttctctctgttttttcttttttgatttctgggtttgagtttttcttttctcaggttctgatgtagattgtgaaaataccatcttggttactgtttgtttcccgagaaaattgaggggactgaaccgggtctattccgattttctttctgggtttctaactgagtgaatgtttaggtgatgggcagcgaggttttctattttttttttttttttttttccttttttttttttttcgtttaatcattattcaaggccagagatctactcattgcatgcaattgagtaaatagattcataaccctaacttatttaaattttttcttgtcaaagaaaataaattctctataaattcatgggtgttggaaaggagtggttgatattattttagaggcaaaaaagaaaaataatttaggttgctggtttatcctgttcacagaaactggtgaatctttagataaaatgtcttataccttgttcgttttggtaattttttaggtcaagaaatttctaacaagcttccgggaacgacg

SEQ ID NO: 75809 - DNA, 659 bp, Carica papaya
  Intron number 1 from transcript evm.model.supercontig_132. 47 (locus evm.TU.supercontig_132.47) derived from phytozom e v7.0 (chr-ID supercontig_132; pos 526513 to 527171)
cttaagcttgcaagaggctttaattcctgaggtgccaatttctttctatgttttgccatcaataattgttctggaatatattgatgatatttagttgcatgctcttcacctatgagtgatcgtgggacatgtctatcaatagatttgtttacaatctaacttttattttgcagtacagtaatgatgatgatattatgtgtatatgtacacaaatttacttttatacagttctgattgccccgaataccatagctttattctttttcctatttgttctgccagttggtggcaggtaacccttgtatatttgtatatgtcatttagaactatctaaaaatggtgaaccaaaatgaggatttcttttataaataaaacaaaagtttaacattgttatagtgcttgtagatgagaaactgttaaattgtgacttggataatcaccatatttattggagtgactgactgtaaacatttaaactctgctgtgaatgcataaatgaaagtagttaggagggctgtaaatgaaatttgtttacttgtgtgtttgaccgaagcaactcatactctgaatattctttctaaatttgctaaaagaatctttgataaagttttgcaagcaacttatttcctcatcctgcatgtcagggaaaggctatcaga

SEQ ID NO: 75810 - DNA, 674 bp, Carica papaya
  Intron number 4 from transcript evm.model.supercontig_2868 .1 (locus evm.TU.supercontig_2868.1) derived from phytozom e v7.0 (chr-ID supercontig_2868; pos 3178 to 3851 reverse strand)
ctaccacatataggtaattctgaaatgtcaaagtttcatagttccattgttttttattttctgtaggagcagtatctctaatattatgtgaaatttagtatttcagtcttctacttttacttttgaaaaaaaaattccttgtgttcttgtaaatttaaattttgtaaaattggtgattataatacaaaatgttcattaccttttttaagacattcttaaaaagaagttctgagtgtcgcaacatagttttaaataacttattccccaaagtatgtttgatgttatccttctttctttctgccttgttttctgttgaaatgttcttaacatgttattcaatttaatttgagttttaggttctttcacttatattacagttgtattaaggacatataagataaaagtgataaacaactgagtagttcacaaaatagtgaaatctaccatctgtcattgagcattttcagtatctagtttatttaaacgtgatgccaaagtagtttttgcttgagcaatctgaagtaaattcaatcttggtggacatgttaaaagtgtagcatcctttgagttcctttaaatgtctaggcatagatagaaatatgcaaatccttatcattattatctaaaattttacacaattccattgattcacaggcttgaaaatacattgaatt

SEQ ID NO: 75811 - DNA, 727 bp, Carica papaya
  Intron number 3 from transcript evm.model.supercontig_18.1 70 (locus evm.TU.supercontig_18.170) derived from phytozom e v7.0 (chr-ID supercontig_18; pos 1561247 to 1561973)
ggtacgcctgaaattttcattaaatatttcttttttccggataataaaacaaagaaaagagaattacatattatgagctattacctttgccaaacaacatcacaattgtccaataaaggtacttattgagggcatcaagagattaatctaatttcatgtagcattcatagatacgatccactcgttgagtaaggcggtctactcacgtgttagcttttctaagaatgttgaagatgtagatctgccaatcgccatgaaagatatctttaatctgtaaattaatcattgtagtggatttgatcaagcctttcaaccaacttgatgtgttaggtaagacttggtagatagcagactggagctcatcctcatcgtctttagaggttgggaattaattggctttgagaagagagatcttctccattacaggggtcctttgtttccataatcttgtcctccatttagagccatacaacaatgtgtcttcccaagaaagtgcatggcttttcctcagttcacggcctggaaattcttagaatctattaggtggattgtgcaaagcacgagagctagttcctctaggatctgatatgtttaatgccaccggttagttgatgttcaagtttatagtaaaggaagcagagagcattgtttgttaaaatttttgtattctaaattcattatacacaaatggataatatctgtgtgtgtgtgctggttgaaacagaaa

SEQ ID NO: 75812 - DNA, 764 bp, Carica papaya
  Intron number 2 from transcript evm.model.supercontig_13.2 19 (locus evm.TU.supercontig_13.219) derived from phytozom e v7.0 (chr-ID supercontig_13; pos 1939974 to 1940737)
aagggaggaattagatatcatcctgaggtgatcggatttttcagcttcatttttttttcactgtgatgccttttcatctgtttgtgattctgttggtggtttctgatttggtttttttgggatttgaatttttagatctttggtacttttcttgtttgttatattcacataattcatttgttaagtgcttttggatttggaaccgttatgctcgaagggacagcttggagttcaaaaatcagtgaaattctttcagatttgctagatgattgatgggttagctagttttttttttttttataaaaaaaattctattttaagattttccaaccatcaaagtagtgcttgctcaagataagccgtaaatatatatatatatatatatatatatatacacatatggaagtcaaattctgtcttttcacgaatatagatcgacgaaggactacaaattggggaactttaaaattttcttgcggagatatcttgtttgtagtcaacaccgacattcatttttactaaggaaaagcctacctttttaccgtaattattaatgaagatgaacttgttttcatttttctgaatattaaatggaaaatccacgtcataaatccttctttgttcgatgaaccataatcctgcccctatcattcataatttcctatttgctgtcagatttctgtcagtggataaacaactagcttttacatggtctgggttttatattgatatgttctgtaatgttttttaaaaggttgatccag

SEQ ID NO: 75813 - DNA, 1024 bp, Carica papaya
  Intron number 2 from transcript evm.model.supercontig_183. 8 (locus evm.TU.supercontig_183.8) derived from phytozome v7.0 (chr-ID supercontig_183; pos 138090 to 139113 reverse strand)
ccaccggtaaacgaacctaggttgcttcatcttctttttcttttcggaaaaattgtcgggttgaattcctctttgttgagtttgtggtgaagaaattttgattgttggaaccagctaatcataatttcagttgtgccctcgctctgtttaaaaatatttcattttggtctagaagtttctatcagcaatttagtaatgctatttacttggcatgcccaaaaatagttggtcgttcggtggttgcagtctactctatgtcgattaactgaagttggcaggtcgtcggaggacgtagtttatttactatgacatttttgttcttttctgtttttttattcttatgcagtgcaatcaggtagcccatgccttaattaggaagaatttttcattaatggggctaccattatgtctcaagctatgcctgattttatggcctctttacttggccaggataatatttttcatgattgatgaatgaaaattatccaatttccccaagtacaaatactgaatgacgcattatgtacttctttctgtattaaatttgtatttaaaccatagataataaaattactagtttaaagggggaataagtaattcgattccacatatcctcagtaaagggttcatgaatttaacttttaacatataaataagtacatgtttctatgttataggcatatcctaatctgacatggatacagtattaagatgaagggatttaaagtaactagatattattttggacgaactcatgaaggacctcacctaccttatgtgaatgggagagtgtgacgctcacagaaggctgtgggaggcatggtttttctatggaaactaatatttactgacatctaattctttatattgtaggcgaaagaaagcatttatctcaaacaacttgatagagaagtttccttttttaagaaaagaaacttttgggaagatgtagtcttatttgttagacttttacatttttccttttgcagctgaagcaaaaagacaactactggcagctggtttt

SEQ ID NO: 75814 - DNA, 969 bp, Carica papaya
  Intron number 2 from transcript evm.model.supercontig_400. 1 (locus evm.TU.supercontig_400.1) derived from phytozome v7.0 (chr-ID supercontig_400; pos 28092 to 29060)
tctgcctttttgaatccaaccaagtgcttctacgatctctttctctctttgtgtgtatatatatatcaaataattttacatactgggttttttagatcataacataaagtaatttgtaggggaatcagcacaaacgtagaagacaaagtaaatgcccagtagctggaacaacttcagtttcctttagtcttcctgaagatcttctcgtccttgccgataatattgatgttgttagtgaaattttcatcacttaactctctgagattgtcttttaattcaaatgagttttgttaaaaagttgttaatggttaattttcttactaatagtacactccagagaatctccttccacccaatataaatcacaaatattcgatccagcaaagaactcaaggctggacgattgagaaacggagacgggagactaaatcatgtgatacagtaagtcttttttagtttttccatcttaacaaattggttttttagagtactatactcatcttgagatataaaaggaagcttgataatatttacattcatgtgggattgcagtactacgttcataaggaatctaagggatcctttcgatcagttatcgaggtaactgattttatactctacgaaatctatccgaataaacccactcccaaaccaaggaagaagaagacggaagaagagaatagttctttattgccaccaggagaaaggaagaagctgggaaggccaaggaagaataaggaggatggggaacaagcgagtacctcagtgaagaggaaggttggtaggccgaggaaggtggtggatggagaacaaagcacttcttctcctgtatgttggttttgaatgtctatatgtatacatcttgaaaatgttcaattaatgagtaacattatagtattaaaatattttaccttaagtcttttttttttttgtatataggtgcctttggtgagaaatcctagtaataat

SEQ ID NO: 75815 - DNA, 760 bp, Carica papaya
  Intron number 1 from transcript evm.model.supercontig_2.94 (locus evm.TU.supercontig_2.94) derived from phytozome v7 .0 (chr-ID supercontig_2; pos 1600856 to 1601615)
gccaaacttccgagacagccagacaattcttgcaggttcttttctttttctttcatatctttgtgtatgtctctctatggttaattggatttcggtttttccaaggctacaggttttggaatgatagattgaatctttttttatggattggcactttttgctgtttgcttttggtgcttggaaagaatttaggtgattagcagtttttgtggatttaaggggtgctacgtgatttcttttactgatagttagatatcggaagagcaagtgactggtgacgagggttatgatccggatagtagaggattttgattatgaatggtatttcggatcttaaacgggtctgttttcctttaagaatttacctaataaaccggacatttatctttatagcactagacaatctagtttgccaccaagtatgcacaatgtgtgggcatgaatgttttggttgaaggttctaatttagctcagtggtttactatcttgtattagatgttgccacaccatttttagagcttggctgtgtaacccatatgttgttcttttgttcaaatattggtgacattattgttcaaactttcttaaaactgaaccttttaagtctaattttctgctctattttttttatcttcagtttttcattccattggattctagctataccttataaccttaaattatctattggtgtatgcaacttgatggtggaatttgtggaacaggcgacaagttggaaacttgaggaagctattcagct

SEQ ID NO: 75816 - DNA, 640 bp, Carica papaya
  Intron number 1 from transcript evm.model.supercontig_197. 19 (locus evm.TU.supercontig_197.19) derived from phytozom e v7.0 (chr-ID supercontig_197; pos 373465 to 374104)
ataaatcgagcaagtaagattccttagtttttctttcttgaactattgatgctttagtttcttcttgaatgcttagttaactgctagaagattttccatgaatgctaatctttgactggacatgttaggatggctgggagttttggcttgtgagcactttgtggatattgtaatatgggaatagcttttttttaaaagaattctcttttcttttcgagtagcctgatatctatctctaactagtttgtcaaaattttttgagctatttatattattctaagctcatcgtccggggttttggatctcttgtgcccagaacatcattttctcttctagtggccattatatcagtccaaaagataggatttggtttagctcttatacataacagttttagatataacttaatataatcagcattaatctttaaagtcttagcctgtgttgcaaataatcaaagtactctatgtttgatcttttcatacaaaacttctgctgcaccaggaggagcctatttccagaggctgaattttggatcactattttcttatctgcattgccatatgatattgctcatgaagttaacttttattcctaaacttaaactggtggggtttttttgtttccagctggtgttcca

SEQ ID NO: 75817 - DNA, 705 bp, Carica papaya
  Intron number 2 from transcript evm.model.supercontig_52.8 3 (locus evm.TU.supercontig_52.83) derived from phytozome v7.0 (chr-ID supercontig_52; pos 733454 to 734158 reverse strand)
ttgtaggtaggaaatttctttaccttgtttgcctgtcaattttgcaattctttcgtctaacgtcatatagttatttgttttttcgaaattgtcttttgagtcatctgttggatgtatactactaatatggatggtaaggaatggagtgagaaatgaattgacaacttaactggtcactatggatgtctggaaatctcgcagacgaatgtagatgatatcttgtcaagggacggtattctgtttttctcatttggtagaattacagccggattaacctgcaggttataaggccggtatgcgggacaggtactggtttaactcaggctctcttcccagtggtggagtcttattcactaggctctcttaccagatgtggggtattatcagtataacatgaagtttagaagcataatgattgttggatttgtttgttataattttttaacctgtatgttactaattaataggattgcactgcatttcactaatttcctttttgctagttctagcgatttgatgtcagttatgctctttttccacgtattgttgatttttactttggtatatattataagaattgctttaaattttaatcaaatttgatctttggtgtaatgttttgctgtttttccttaagaccaccaataattggattcttgattatatttaggaaaaattagttcgtggattgacttggattcagag

SEQ ID NO: 75818 - DNA, 759 bp, Carica papaya
  Intron number 2 from transcript evm.model.supercontig_33.6 7 (locus evm.TU.supercontig_33.67) derived from phytozome v7.0 (chr-ID supercontig_33; pos 632433 to 633191)
attggtacaggtacgttgtatttttctaaataatttttatttttaaattgattctaaaattttgactattaattatttaaagaattatagttcaatataaatatatttttaaaaatattaattttaatattttaactttatagttaagatgcctaattattttattataattttagatattattatatttaaaataacaaaatataagagtggaataccatcaaacgaaattatattttagtaccagcctaatttggttgtgtttccttctggattaataaatatcttaaaaaatataatgtagtaattatgatgatactgcatgttgaagagagttatacatatttattatgttgtaaaatgtattttatttatttctatattttaaaatatataatttaactgctaaacacttctatattttttttttcctttttattcaactaatcgtttttttcttttaatattctgaagcatctaatatttttgctatatttaattaactatgtcgaataactattaagctagtgatattaaatttgatattatatcacctaacatataagtatcatgtggttatgtcatttaataatataattatattaattatttaaaaaataaataaaattaaaccaataaaaaaaagtaaaattaccatttgattaaaaaagaatgatgaaataaaattaaatattaagttatttaattaccatttgataataatttttgataattttaatggattgaatttgaaggtac

SEQ ID NO: 75819 - DNA, 536 bp, Carica papaya
  Intron number 2 from transcript evm.model.supercontig_120. 3 (locus evm.TU.supercontig_120.3) derived from phytozome v7.0 (chr-ID supercontig_120; pos 122606 to 123141 reverse strand)
ccatcaagatccaaagtgctttccgggcacatctggttggtttcttaaaatcctcgtctttctgtacccttttcatgtttgcttattttcaattcagctcaaataatcaagcactcaatatgcatacactcatacacccaattcaaaactttatgctggtcaagaatgaaaacatagtttcggtttaggactagtctgatatagcatacaaggagaatgtccttgagaaatttgaagttaggactcaaaatttaccatgcatttctaaatgaaaagcagaagagcttaatcttttgcatgcaaagtatgaactctgatttagtttagtctgtcagttttgctggaatcaatgcaaattgttttacataaagctaattctataaaagagggattgtggtaaacatggttgccactcttcttgatctgaaactgccactcttcttgatctgaaactgtctttttcattttggcctgattcaaatataacatggagtgaaacaggcaagaaaagcactacgagcattgaagggattggt

SEQ ID NO: 75820 - DNA, 728 bp, Carica papaya
  Intron number 1 from transcript evm.model.supercontig_16.8 1 (locus evm.TU.supercontig_16.81) derived from phytozome v7.0 (chr-ID supercontig_16; pos 1293448 to 1294175)
ttctcttctccctttctcagctttttcttttcaaggtttgtcgccattgatgatgcctacattttatttgattgcttcctgtgttttgtttgctttggtagtttgggagtgtatttgatattgttcttttaatgcttgtcgttttcactttatgatagatttaggttctgctattgtcctgattatgcgcactgtattctgtttggttgctgagaaaaatgttagtcatgagaatgcagaggggggagaggatggagacgatagttgtacgaaaaaatttaatatgtattctataccatatttggaaaagcaaatggaaatgtgtctagcttgataaacacaaaatcgtgtctgttaaaaatttcttttctatttggaaaatatctaaccttttatattgttctgcaaatttgctttacctgcaatttttttaaatcaatttttagatgatcaaggttatgaaaaacgaaggatcctttctttttaacaaattgtctttcagttttgtcgctttccttttcattttatggtactcttactcctttattacatatttgatctttcagtttttgcttacccatttgccttcctttcccataatatcttgtccagcgtgatgtttttggcttgttatgttttctgatccaactgtcatctttgggattttggtatatctttcaactacaataatttgttattcgtgcttgcatttggcagcaaaagttccg

SEQ ID NO: 75821 - DNA, 461 bp, Carica papaya
  Intron number 2 from transcript evm.model.supercontig_16.8 1 (locus evm.TU.supercontig_16.81) derived from phytozome v7.0 (chr-ID supercontig_16; pos 1294237 to 1294697)
tagagccggattctctgattccttctcgtgtggtatacgatcatttttcttgtcatattcccagcattttgctaagttttattatatttttttttaagtttttaatattattaattattttatatataaaatttaattataatttacgtatttgatatttaatgaaacagttctattcacatttttaaaaatttaagaatagatttatattcttatttgtcgataaaagaattatagaaaacactttatttgaaatttacgtataattagtttataattaaaatgatatttttattcgaaattttagttcaattgtattatattccctaaaaaatagaatttgaaccgaacctgaagttggggtctatgcactagaatcaaacgtttgttactatttgtactgaagtccctattctgttgtattagatctaacatccatagttgtcgaggggagtccagaa

SEQ ID NO: 75822 - DNA, 845 bp, Carica papaya
  Intron number 2 from transcript evm.model.supercontig_103. 63 (locus evm.TU.supercontig_103.63) derived from phytozom e v7.0 (chr-ID supercontig_103; pos 513275 to 514119 rever se strand)
ttgtggtggagaagaccatagccaagttcaagaaggtagtttatttttcctttcaaaatacatgttaattatttcacaagtattggcatttttagtgctttctggaatcaatctgatatctgggttgttctgttaaaaagatgtgaaaaacttggagaaaagaattatttccatgaaagtgttaatgaaataggttttgttttttctcttaggtcttttaacaagttatgttctgattgggtcggtgaggaatgagttttgagcttaggaggggacatctaaaaagaaaaaaattgtgaagtttattcctttgactattttttgggtgatctaaaaagagatgaatagtagggtttttgaagggataaagggagatatgtataaaattagggatagatggttacattattttgcctctttgattttagagcacggtatttataagtgggaagatttttgggaatgtcataaatatactaataaatttgtaaatatcttgtaaatgagtggtaccctattggtgccatattaatgtattttatatttttttttcattaaaaaaaaaagttatgctttagctctcctttttgatgctatcagttcccaaattcatctattttttattataagtcacgagtgtaacaaatggcagctttgtatagtattaccacttaagttatagataagtatagctcattcaagagagcatatgatcatgtgaattgtaaacattaacactcggacttttcctactttgtaatatgactgctctatatcatgaattttgtctgcataatggtaatctaagatcctgtataatcttaatgcagaacctgctcaaactg

SEQ ID NO: 75823 - DNA, 418 bp, Carica papaya
  Intron number 1 from transcript evm.model.supercontig_103. 63 (locus evm.TU.supercontig_103.63) derived from phytozom e v7.0 (chr-ID supercontig_103; pos 514125 to 514542 rever se strand)
attgcattttcgtccaatatttccagggaaagaaagtaatttgtgtctcctctccctctctaagttattattgatgttttaagtaatttagttggtttttattctcttttactttttggcaacttttctttcattcagtaagttttgtttgtgaatctagcacagaacaccggcattgagaatttctgttttttcgggcttcaatactgacaagtcaaaatgttgatgaatgatcttcttgagtttgaaagataccaggatggagaggagaaggaaaaaactaattccaaatctaaattacaaaaaaataatgcaaatcagctgtttagtttctgatttgagctggtaaaaattttaacaaagcttgtaaaatgctacggcagggggatcagcggcatctacattcttcaaagcttgt

SEQ ID NO: 75824 - DNA, 896 bp, Carica papaya
  Intron number 2 from transcript evm.model.supercontig_13.2 4 (locus evm.TU.supercontig_13.24) derived from phytozome v7.0 (chr-ID supercontig_13; pos 256528 to 257423)
ctcccaaggctgtatttccttcggtgagtcatcctctgtgtgtgtgaatttgttctgaactttcttggacaacgtgagttagatgttttatttttatgtggttttagtcgaaatgtcaagttcttgtactattttcaacactgtattccttgttgctttgggttgttctttaacttgaactgttttgatccatttcctcatgttttccttcgcaaatgcaccagctgaatgcatgaatttatattccttcatagaagcaaggaaatcaagaaaaaggtagaaaatttaatataaaacaaaatttcgttgaagcagaagttaattatcaagtgttaaggttaacagcccccccttgattacattagttcactatgatcggaggaattggggaagtattatggtctaaaggagggagttacgggtgtggaaagaatgtggtgagaagaaattttgattacccagaggagcctttgataaacactaattctttaaataaaaaataaaaacttccggtcccaaaatttgatgcatgcatacgaggagtcattttatgagcttgattaagttacacattgtaagattgaaggatttatgacaaatgttctttggatggtttgtgcttaattatggaagtggtctatggaactgtaactgtagcaagccttttctcgatgagagtaaaacgaatattaagttgggaattgtaaggactcagagaaaaccactttctgagtcttatatcctatttgacttcgtttgctgttttttgtgcatttgttattcttgtgtaactatagctctgctgttggttacctctttatgctagctttcagagtaatattcttatatacgattttatgtttacgtttcgaaaggttgttggatcaattgatcaa

SEQ ID NO: 75825 - DNA, 299 bp, Carica papaya
  Intron number 1 from transcript evm.model.supercontig_44.2 (locus evm.TU.supercontig_44.2) derived from phytozome v7 .0 (chr-ID supercontig_44; pos 8289 to 8587 reverse strand )
ttcatcagcttcctcctcttcttcctcttcatcaggtacagtattagaaaatacgaggaccgggtttgtttagtttcttcttttgcttttggattctgggtttgtccatatagatctttttctctgaatttctctgtaatatcaaagggatctagtggataaggtaaactagtagtggattccaggttgaagaagcaattaatgtttgattgagaatggtgaatcagggttatagtgtttaacaaaatgaattgattgatgtagggacagggcagaatacggggaagacagtggctata

SEQ ID NO: 75826 - DNA, 945 bp, Carica papaya
  Intron number 1 from transcript evm.model.supercontig_17.1 59 (locus evm.TU.supercontig_17.159) derived from phytozom e v7.0 (chr-ID supercontig_17; pos 1965486 to 1966430)
ctgcaccagccattttggttacaagagctctacgcgtaagttttttatgttttaaatttgcttagttttactttatttcagttttcattagaaaaaagattttattaattaaaaaaaaatgagacgtaaaatacagaacaggaaagatttcaccttagaagagcttcctaattcatcttcaaatcagatatagataaatccttgaaaatcgcacttcagtccacaagaggccaagaacataactcaatcccaataagatgacaatactgaaatcttaatgttattatgattttgaaaggatttgagatttttctgcttcatattggaggaaatgggatcttaatgaggtgcagagataagttagagaatttttagtaatttgttaagatgtttcccccatgatgtgagacttcacttgtattcataaaatttatttgtagtgggattttaagtgtacttgtaatgtatctttaggaaacattgtgatttgagtttttatgaatttgcgttggaaacattgttcaaggtggaaacattatgtggaagatgactaatcataattgcgaaagactttcattcatgacctatttatcaaattctcatgtctgaaaagcccaaacatgagtgcttggctttacttggagcagtgcatgtacctgaaatagataattatctaagcttgctatgcgtctgcctgagtttggtatgattgttttgctatgttttgtaaatgataaaagagaactagatgaaattatcatgcccatttcaagacctaaatctggttgccaattgcaatgtgttttattttcgtcactttaagaattgaaaatttccagaccgaaacaaatataccataaagcgattcttgttgttcgataatggaatacacaaagggttgaaaagacgatttaatggtgcttgactaatgaaattgcagcttac

SEQ ID NO: 75827 - DNA, 540 bp, Carica papaya
  Intron number 2 from transcript evm.model.supercontig_48.1 69 (locus evm.TU.supercontig_48.169) derived from phytozom e v7.0 (chr-ID supercontig_48; pos 982416 to 982955 revers e strand)
cagataatatcgtcgtacaaggtatcaccttcaaggtaattaatccatattcgatgtttgttattattaatctttcattattcatctcgaacgttcaaattggtgcttataattagcagaaacttacagcttggtgctacaaatcatgcagaagatctcgaacattcaaattggtgtttataattagcagaaactttagagcttggtgctacaaatcatgcagaaggatcaaagttgaaatatggttttgcatttaaggttattttggtattcctccaaaatagctaattagttaattaagttaaatttggaaataagtactcaaactagtaaatatataaaacgaaaatcctcaattaaataggaaaattaatcagctattcactgattctggacgagcttggccttctatatatatatatatatatatatatcttgtaaaaatattactcagtggataagtctatacatattttgatatgatcttttcgtttcttctcttttcggaatttgcagaactcgttcaaccgtaaagcatta

SEQ ID NO: 75828 - DNA, 754 bp, Carica papaya
  Intron number 1 from transcript evm.model.supercontig_101. 14 (locus evm.TU.supercontig_101.14) derived from phytozom e v7.0 (chr-ID supercontig_101; pos 398209 to 398962)
tctctgagattctctctgtaccaaatatcgtcgaggtttgttctaagtccattcttctttttcttttttctgttcaactctatgttttgtgtattgcgcgcgaaaagatactgccgttttattctgttacatttaataaatgaacatgaattggaaatgtgattttcggtcgtgtttagggaagtgctagttcggctgcaagttagtctcgtgaaatgaactttgagccttatttctgttgtctcaattagtgtttgtctttcgatttttgaagagtttgttctgtattaactaactttacttcatgtttgattactgataaaatcaaattgaagaacattaaggcttgataatttgtacttttaactactaattgatgctctgtccagtcaatcgtaagcgttggatatgttgtgaattgcataggtaacttggggttccttttgtttttttctactttataatgttggttttatgggatttagctaacggatgtttttctttctggcctgtctgggatcctgtgcttatcagtggtggagcatcattgacactgtttgagtatttttctttttaacctgtacttcatatttgtcacttctggttgtgttataagttgaacttctgaggttttttggtgatttgaactttcatggctggttaattgatactttttttgcaattttccattgggtttatcgaatcgctgataaactcttgcagcttgaagggactgaaaattccattttcttag

SEQ ID NO: 75829 - DNA, 556 bp, Carica papaya
  Intron number 2 from transcript evm.model.supercontig_151. 21 (locus evm.TU.supercontig_151.21) derived from phytozom e v7.0 (chr-ID supercontig_151; pos 184020 to 184575 rever se strand)
gtcctttcagcgaagtccttaaatccgcagtgaacttttcgtctgtatctccattttatgtctttttttcctacaagcagtaatttctttggttctctttttgattatagatagtaatcttccaaatgaaatttaaattttaacttccccttccagggaacggatctgttaacctgttaatctttcaagtgaaaatcactgatccgttgaagaattttccgtttcatgtaaatcatgttttagtggctaatatcctgcttaaagagtttgtagttgtgtttggttatgtctgttttcctgttgatttcatcataattttcataacaaataaaggccaattatacggactattcttggtaccgcatcaaggcagaatcatcatctcctggctagagttaattttgcttatactgcatcttttttttgtttttttttttttttttttgtgttttctttatttcaaaaggttatcttaataagcgaaacctttcgagttctgcttattttgtaattgctgacaggaagccatagtcttgcctccatttgtggctatagc

SEQ ID NO: 75830 - DNA, 655 bp, Carica papaya
  Intron number 1 from transcript evm.model.supercontig_23.1 (locus evm.TU.supercontig_23.1) derived from phytozome v7 .0 (chr-ID supercontig_23; pos 5116 to 5770)
aaaaagaagaccaagaatagatcctactgtagcttgttatgggtaacataatgtagtttgaaataaaactcatatatgtgaacataatgtagtggatagcttaaagtgataaacagatacagtccaaaggtccttaatctttatcatgaggataaagagaaaacatgttctggatgttaacattagaaaacttgattgctggttttagaccgtgtatattttgtttgaatataatgttttccttaatgaagaatatcctgaagatcatactgatagtttgtctaattccctttttcaatcttcttcttctctctcttgttcatgttaacaccttcttggtgcacttgtttataatacttctttttctcatcaaaaaaatgatcatatcagatttcatttctctgaatactgaatgcctgctgcctggttaagtggatccacgacattattttggggcataaggtagtttaagtgaaattaattaatttttgaatggcaaatctttagcttatgcgagtcgcttgtagttaagactgatctgttttaagtttttgcattgtgtatgtaagtttgattaagaggctcctatgtgaatctggtgcatcttgaattaatttttggtttttgctttgctttctttttggcagacgtgaaa

SEQ ID NO: 75831 - DNA, 873 bp, Carica papaya
  Intron number 1 from transcript evm.model.supercontig_29.1 72 (locus evm.TU.supercontig_29.172) derived from phytozom e v7.0 (chr-ID supercontig_29; pos 1911532 to 1912404 reve rse strand)
tcaaatcaggtatgtcgtcaacctgtttggttgggattcttggatattaggcctatgtttgtattttggattttccatgagattgatattagactaaaaattctcctatacgtttatctacactgaaaatgaaacagttcattataacacataaaacacatacatagatatatatgatctatcatcatagagaagaaacatatgtacatgtataatttattcacatgcttgttaaaaaaatatttttacatggtttttatatttatttgattatttattttcataggttgattttggaaaaaaaccgtaaaagtaagtatcgaataaaacgttttaaagttaatgcatttactcaaagtaagagattcattagttgttttatgcttttctaccaacttttggttttctatatcaatgattagtgtgatattcttactggattagtgtgatatcaatgatcaatgattagtgtgatattcttaaggataaattatattttacttattgtaatttagttttgttgtaatgggaataatttatttttgtgataattgaatatttggtagttaagttttttgtttcttgaaatattattttattaaaatttttaattttgaaatgtatatttatgtagaaataggatacatataaacgttatctaaaaataatattttgaggtaaaataataaaaaataaatgttaaattattgtaatagaattacaaattttaaattataatagaactaattattgaaataagtttatattttattctttactttatttaatgcgagcatgaagtgaacttctaattaatatctcgattatatgaaaaataaattaaatagtaactccctctctctttctctcagc

SEQ ID NO: 75832 - DNA, 1007 bp, Carica papaya
  Intron number 3 from transcript evm.model.supercontig_59.1 14 (locus evm.TU.supercontig_59.114) derived from phytozom e v7.0 (chr-ID supercontig_59; pos 1007877 to 1008883)
gaaaaggtgctgtggaggttattttaaaggtatttgacttcatttccatttttgatgctcttatggagtttatttgtggtactaaaatgattaactttgagtgctggtatttcttctttgtgttagatattgtggaggatttacaagcttgcaccaagtagttcctgctactaaaagtttcttgaaaacataacctgtttctgaaaactatcctcacttatccgaatcattacttgctcagagagtatagaagtatggtagtattgatgaacatctttttggtaggaataatgcccatagtcatttattgatcccaactattcaagaatttctgggtgcttgctgaaccactaggttctaaattgtaggtttaatgtgtttgcttttaacttcttaattaattctagaatcctcttaacgatatagtacagtaaacgttttttcctgcatttcaattttcttgataaagtattcggtttgtaatatttatgagaaataataaagttaagattgcactcgggagccttgtgtaggagatgaaagaggggacccagatatggtggattctctgcagaatttagtgagaaaaagggctggagtttttgatgctcagcagttgggaatgctcagttaaatactttgctggggtcaagtatataaaaaaaagagagatctaacaaaaggagaaatgatttgtcaattctgtcaaatttaataaaatgtgtgcatatcaatatcattccagtagagtttcaactggagtaagtttatacaatatttgcacatcagttgttatatcatttccataaaccaccatcatagtcctcggaaatgagatttttctctctttccttttttctggatcatcttgtgtgattaattctctgttccagtttaccactttcttacttgaagcatggctagttttatactgctgccacatgctgattcagttagatgtcattgatgtaggtctccgctgacaggaaatctgatattggaaaaga

SEQ ID NO: 75833 - DNA, 689 bp, Carica papaya
  Intron number 2 from transcript evm.model.supercontig_30.1 7 (locus evm.TU.supercontig_30.17) derived from phytozome v7.0 (chr-ID supercontig_30; pos 275039 to 275727 reverse strand)
tgtcgcgcccttgatttggctccttttttgtcagggtaattgaactttctattatatgcggcacatccttgtggcagaataatgttttctctttgttgttttgatatttgtcaggtcacttatttccatgcatgtgaaatatgaattgctcttttacttgtaataagttttgagtaatttgagaagcaattagagagacaaataatatcacttatctgacattctttcgggtttgaagatatactaaaaaggttggagtgtgagatttctttgttaggtcaagggctgtttgaaatgaactgattggttgataaatgagttgcaatgtggctagaaacataaagtattacctttccaattttaaggtcataggacaacctccagtgcctgtaatttgggtgactaaagttcatttatgcaattatcaattccttttcaaaggagctctttcaccacatagctaaagttgtaaattcatgtcaaggcaattgcaccctgttcatttgttcctttttttattaaggctatcctttgttatatttgtttgtctgtgttcagcaggtgctatctgctgtagattgatcaataaacgaaaagaagttgtactaaatttagaatgaacataccttcaaagaggtttcttttctattgcaggtctgttctgacttatttcaagtttgctccacctc

SEQ ID NO: 75834 - DNA, 602 bp, Carica papaya
  Intron number 1 from transcript evm.model.supercontig_50.1 50 (locus evm.TU.supercontig_50.150) derived from phytozom e v7.0 (chr-ID supercontig_50; pos 1412509 to 1413110 reve rse strand)
gctagaagggaggagcgtcttgcccaggtgggatagtttataactaaacttggatggaatttcagtttttagctaattaagaataaaagatgctaggatgccccactattctttccatttgagaatgactcaatttctgttgctgccgagcctcctaggttcagattgaccttttgttatcctctttcatgaagtgtattaaactagctaagaaggtaactaagggtaacttttgatgatatgatccttccttgggatgaccctgaggctctctcaagttggatctatcttttgtcccttgaagacctccctctctcttgagatatatgccttatattaccaccatttccctttcctttacccagggatgacacggtctccaacctggaaggcattgccaacttataaattcactgttgataaattttccagggtggaataaggctaggaccattacgtcttctttgatttcactagatttttcttgtgtaatgatcttcacaatttgtccctgtctctgccgatgttcttggtattgttagttaatttggacaactctctttgcagggacctggagagagggcagcagctacacctgcacc

SEQ ID NO: 75835 - DNA, 882 bp, Carica papaya
  Intron number 3 from transcript evm.model.supercontig_3.39 1 (locus evm.TU.supercontig_3.391) derived from phytozome v7.0 (chr-ID supercontig_3; pos 2721529 to 2722410)
tttgcccctcaacagacccccacacagtctccgtatgtcattgaaaattcttgagcctaaatagatcatttataatttctcagagatttcatgattttatatattagactctttagtatcttcttttaccttagtagactgttaaactgaagtggtttttcactctcgttattttggtttatgaccttgattttcatgtgggatttttctgctcaagttgttacttccttcttattttcttaactgtacttttgagcatcaatcatgcaaaggcctgtagatttaaaatagtcaggagtaataaatattttaaagtgggacaaaaatatcctgttgaaaacattcagatttgagaatctcgttttagataatttgctcccatcagacatcatgctgctttccaggtgacagagtgcagtcaggttttagagcatttacatttttccagaaatctcctaaatggtttagttttgttatgaaggctgctggtaataaaaaataaaaagaaaagaaaaacaagcccccataattttttttctttgagacattggttttgcctgacagcaggtcaagctgtggagcctgaatttagagaacccgacttcataccccttttagtttgtttatgaccagtaggaacattaccatgcgcaacgagttttgcatttcattaatactctagcgatcaatatatctatcatggttgttggagtcggttgtactgaataaatttaccactttgtcaatcagatcacacttgaatacatgaacgactctttgttaagaattcaaggaaggatttcttctattcaactttagttccatctaacttttggataatttctttgcgttaggtggtcaaaagggttttgataaggtgat

SEQ ID NO: 75836 - DNA, 926 bp, Carica papaya
  Intron number 1 from transcript evm.model.supercontig_18.5 7 (locus evm.TU.supercontig_18.57) derived from phytozome v7.0 (chr-ID supercontig_18; pos 416952 to 417877 reverse strand)
agcctctgtcttcctttagagcccctccgttccaggtattatttcccttttttgaattttgttgcggagaaactgtaggtaaaagagaatttgatcggttttttgaagcatttttaattatctccaaccaagcagaggaaactatttagttgagccaatgattattatttggattagttatagggttatgctatgttattttttcttctttcttcctcattatgaggtgggaacagcttttggtcttgtattttgccgtgcttgatatttatcggaagtaattaggtgctggaactgttctcaaatgtgagattttttaatgatttttttcggaatcaattgtatagaggcatggtaccttatttaactgtaaggtcctgactggttgattttctattgaattcttatttagtttctaactgtattagtcttgagaagtagaattgaattgtcaaaggatttcaaagttgggtgagatagctcaaaacacaaagaatgattttatacttatgcatatcaagaatagtattaagattagaaataggaattaactaagaataaaggaaaatgaaaccaagtgactgttaaagtttgtttttttcttttcttttcttccttgtgacacttgattgaactcttccgatccagtattttatgctgtgcttttcggaaaccatgaagatggtgcttcatttctagcaaactgttggtcatcattcaaaagaagttttgacaatctataaagtatcagtcctttatggattcaagttcgtttaaacaattactgtctgcaatcattaaggcctgctactagaaatttcgtgttgtaatatttccctctagcttttccttgttggttaaacatgagcaaacattccttttgcattgtaggaaactaaagaagctagtcagtaatcagaagaaag

SEQ ID NO: 75837 - DNA, 493 bp, Carica papaya
  Intron number 1 from transcript evm.model.supercontig_146. 8 (locus evm.TU.supercontig_146.8) derived from phytozome v7.0 (chr-ID supercontig_146; pos 37282 to 37774 reverse s trand)
ctttcacttggaatccttctggtatttcttatcctccactttcttcttcattcttaattgctttgtctattttttggtttttccattttgtgggtaatattcaaatttctaaaaaaattccaatatctttgaaatttaacatcgttaaacaaggaagccttatttaattggagacctggaggactcgatgctaatgtcttctgtttttgtttatttttctgttttggataattacacatgctagttttcaccttttcattcattatggaatataacaaggtagggaagtgcttattcatctctatattttattaaatatacctgtttgcggaactctctctttgatgaatttcaggctgttcattatgtatggctttttctcgccaagattttgcactgctccttaattatttggttgtcgttatatatttctttagaatgaaatttggttggtatagacccagattcggaggtggtggtctttgcaaaaagg

SEQ ID NO: 75838 - DNA, 756 bp, Carica papaya
  Intron number 3 from transcript evm.model.supercontig_1.23 6 (locus evm.TU.supercontig_1.236) derived from phytozome v7.0 (chr-ID supercontig_1; pos 3358381 to 3359136)
tggagaaactcgaaaggaatagaatccttgctcaggtgtttcttttatacagttctgttgcttttttttattccttgtcagtctggttctctccttttaaatttcggttctgatcatctttaatgtatgttgtcactctgaattgctttgatatgtttgtttcgttttttttttcttttctgctgagtgttcatttagtctgttgttaagccagtactgtattcctgatcgaatgctgagagaaaagaacagagaaaaggcgagatggagaaaatgagtttgtaaaggcaccgtgtttttgtgaaaaggaaaggaaaaaagtttctccactctgcaaatgttttgttattctatttaccatctccagagaataaaggctattttctggttcatttcttttctgatggtgaatattctggttttccgatatctaacttttcgtcttctcttttgtttttgacaaatcactggaaaagcacaacagaagaagacagtatttggtgcacattataatgcctttggagaacacgaacaaattgtctataagaagcgtaatttttaatatacaaatttatagtttcattcagacatcaattacgcggatcatttcaggattcatggttttcatctattatgttattatcttttactttgttttcttacctattaaattgaccttaaattagattttctatacttgatagtgtgactgacctttttatggggttgattacgtgttataagagtgcttgtaat

SEQ ID NO: 75839 - DNA, 697 bp, Carica papaya
  Intron number 1 from transcript evm.model.supercontig_1170 .1 (locus evm.TU.supercontig_1170.1) derived from phytozom e v7.0 (chr-ID supercontig_1170; pos 524 to 1220)
tgccataaaaattccgcttggcattgttcctgcaggtttatttctctttattgtatttgtatatttattttattcgcacaagtgctctgttgagggtcagaggattgggagtagttgccccctagaagcccttctctgcttacatacactatctgaagttcaaagcaaaagaaaaagaaatcttgttatttgtgtctttctacaacatgtaactatataatgatgagaagattaaatattcatgaagataatgctggtgaaagattaaattgtatacccttcgtttccttatactgtatgatagttactgtgactgctgtcttcttgttaccgtcaaagaaaaaatgatcagtgctgtgctcgagtaatatttggatatttggcatgcatattttactcatcacattggttgaaacaaggttccttgttgtcatgatgccatacttttcggatcttccttcctgaattgattttcattcatttctctcaatgacaacatggcatcctatgaaaatgttttcgataattttttatcgccaaacttatcattcataattgttcaatggtcttcattgtgcttgttttgactttggactctagacccttcattattttcttcaaaagtctcaacaatgtaaacttctctccattccccttgatgtctgacaccggtttttcctttatgcaggcactggaa

SEQ ID NO: 75840 - DNA, 803 bp, Carica papaya
  Intron number 1 from transcript evm.model.supercontig_19.1 (locus evm.TU.supercontig_19.1) derived from phytozome v7 .0 (chr-ID supercontig_19; pos 35619 to 36421 reverse stra nd)
ttcggaatttcatccttcatacccttcagttgcaggtaatgtgaaattttatgaccaggatcatatttgccttctattctggcaattaatcatttgcatctagcagattggactaaattacttttttgcttgtttctgcaaattgagaagtgcaacagatgcacgtgatatccatctttcttttagttgttcatatctcagctgggtttttccaagaaatccctctactgattaggtgttttttgcttatgaaaaaatatcatataaaagaaatgtatttttcaaataagcatccatctaattgctgataagtagtccacatagttaaacctctgtcattgagttcactttcaaatctggctgtcaagataattccataaattgcttagtaactggttatgtgtggttgaatgtgcacaagacagcatgtgcctttcctataatatttttgcaggactatgattatgttaatgaatcttcttgatatgtaaccatattatgaataaaattgactacttgtcttacagttgcgagaatgtgactgttggcacctacgaaacccatgcactgatgtaatttaaaaaatgctttgagtactaggtaaatctgtatatgagcaatccctggtggggccatggccatctgataaattatatcctagccacttgattacctcagacataattgatgcatattttgttttatgaccatctgataaattaaatcctagccgcttgattacctcagacataattgatgcatattttgttttatgactttctttgcagagctgggaaaaaacg

SEQ ID NO: 75841 - DNA, 329 bp, Carica papaya
  Intron number 1 from transcript evm.model.supercontig_190. 13 (locus evm.TU.supercontig_190.13) derived from phytozom e v7.0 (chr-ID supercontig_190; pos 84068 to 84396)
cacttacgcaggaaatcgagaagaagcttcaacgggtgcgtttctgttctctgttatcgggaatcgtttttgcttctgaatttatgtttgttttgctccaaaatgaaggggaaatggaagggatttgatcttagctgtgtagctttggttatggtaacagtctttgggaatatagttgtttctcttttttttatcttataacaatgtgatccttgcttctttgaagcaaagagatcgattccaaagttgtttgttaaattattttttgcatggatgctcgttgaattcttccaggcacttgcttctcaatcgcagagacgaaacttgct

SEQ ID NO: 75842 - DNA, 484 bp, Carica papaya
  Intron number 1 from transcript evm.model.supercontig_2.20 (locus evm.TU.supercontig_2.20) derived from phytozome v7 .0 (chr-ID supercontig_2; pos 249294 to 249777)
gagaaaaggtccttgtcgccattgtggagttgaaagtgagtttttttttcctttacttttttaccataaaattcttatacttatcagtttaattatcctttagtttttaatatatatgataatctgctatgtgtgtgtatatatatatatatgaaattaaatcattaccactaaaagaattaaacaagtgttcttgactgatgtttatatccatttccactaattttatgtgtacaataagatttaacctaattatgaattacgagcaatgtatttttaatactaagcatgagcatgagcacgtactcttgtaatacaattaacaaataggaatttactagaactaaatgtaatcaaaaaaaggaagaacacatggctgcttcaatttatatcataaatactaatgttgtttgggtgctcatgatgagattatgattcatgtgtataaatgtatttgtaaatataggtacaccactttggagag

SEQ ID NO: 75843 - DNA, 1026 bp, Carica papaya
  Intron number 2 from transcript evm.model.supercontig_37.1 01 (locus evm.TU.supercontig_37.101) derived from phytozom e v7.0 (chr-ID supercontig_37; pos 773331 to 774356 revers e strand)
taatcttgtaagttactttttcttgctgagtagtctttgtaaggatcttgaatcttccttgagggtttcttctggtatcttttcagatttcctatgagagcattcaagtgattgttaaagttacaataccaaacagcacgagatcattatttgactgaatttattgtctattttagttttatttatttatttctactgttagtggagaagttaatagattttggtttcctattatttggagacttgtcgttgatggagaagttagtgacagagaatatgacttggttagtggggaagttaatgatagagaataagagaacataatttgattagtggagaagttagtggcagagaataagagagcatagcttgattaatggggaagttaatggcagggaacatgacttatatgagctcttagggactagttgggtgatttctgggactatgagggggaaaatttgggcttgggatgggcttacctgcaaatgtaatgttgtcaacttgatttctttgactgttttttgggttctttggaaagaaagaaatgctagagtctttgatggtaaagggttaggtctgtataaattaagagataggtggattaactattttgggactagtttgttgggttataatattgttagggatgaggattgtggagatatcattggcatactaactactttgtaaatctccatgggttggtacgccccttttttttggtactttgttaatatacaagttacattttatttcaaaaaaaaaatatgcccataaaagacagcctatttaaatgaatttattcctttgtagcttcacttactgttttgtgatttatctttctttgagtacatttcctctttcatctctgcaatgtttatattttgttgtgactcttttgttgtgttcctcaacagtaatgacgttggttgctaaaatgtatataaaactaaagatgacatttatgactattaatgctgatatactttcaggacactagacagaacaatctcttcattggaa

SEQ ID NO: 75844 - DNA, 698 bp, Carica papaya
  Intron number 3 from transcript evm.model.supercontig_53.1 15 (locus evm.TU.supercontig_53.115) derived from phytozom e v7.0 (chr-ID supercontig_53; pos 966835 to 967532 revers e strand)
aaagtttttcttgtaagttcataattgagtgtttaaatgtgttcagtatatataacttccatttgtcggagtgatttttttttttttgaatgtattgtcggagtgattttatgagtgaatacttgagtaagacaaggattccagttaaggcaccagtccctgcttgtaaacgttttagaaattaggatctaattgaaaaataaacacataaataaaagacacaaaaaataaactattagaatgatcattatttgattggattggcttaaaaatggtacaatattgcaaaactatgcatttattataaaatgtaaatgagctattgattcgatcacagctatttattagattaacggcttttagccttttcttttcccccttttaaaatagcattctagttcttttgagaaacttgctcagttatgtattaggagtatttcagaatttttggactatgaacggatctcaatgtccttctaaatgtggatcttctttctgttgtcaaattttactcctattgaaagtcctgtaccttaattttccttttccattatcttctctaataataacttctcccccaaagcaaagagagagatagcgaaaaaatagaaataaataaagtagttctttttgtgtaatatttttaaaggaattagattattctaagaggtatgagatggtagattgcttgcggagca

SEQ ID NO: 75845 - DNA, 711 bp, Carica papaya
  Intron number 3 from transcript evm.model.supercontig_441. 1 (locus evm.TU.supercontig_441.1) derived from phytozome v7.0 (chr-ID supercontig_441; pos 327 to 1037)
gaaagagttatcggtatgtttttactgaagtacctaatagcttcggagaagaactctttgtgcatatgtttttgcttttgattactgaagaatgaaagtatcttggtaaatttccttaatagttttagtttacggattatatcagtctaatggtgatcggagtaaagcacctgctaatgcttcttccttatagttaggtagtctgaaaataagaatcagggtttggaggtcaatgaggcaggtcttgtgcccaagctggtgttaatatatgttttgttaaatacagttttgttagtttacagtctaatagatgtaacatataatggaaaggaatggctatttagaacggtaagtgaattttgaggaagttcccaaatggtgagaggagacagatactcttattctcgacattgttttccaatcactgttgacttatttataggtatttttctgttattggttcccaaatccataaattgtgttcttttgacatatgctgttatgtaattatttatttgaggcaattagattaatcatactatgaaattatataactaattttttgttgttatctttgtgagagtttgatactgatcattctgttaaacaatataaataaaaaacaaaccaacatttgaacttttttttttgaaataacaccaatatttgatttgactggacataaattgtaggtcaagctagctgatccag

SEQ ID NO: 75846 - DNA, 901 bp, Carica papaya
  Intron number 3 from transcript evm.model.supercontig_34.6 4 (locus evm.TU.supercontig_34.64) derived from phytozome v7.0 (chr-ID supercontig_34; pos 601901 to 602801)
gtcctggagatcgtaccctcacacaaggactcaaggtatctctctatattattgcaaaatgttctccacaaaccaatctatattcaaattccaagagctactttagatttcttaaagccgtatgaacttgttggaattgtaatttggataatcttttactttcacaagattttgttggatatgtatagtttatacctccataacccacaactcttacaatcttactgttgaaaataatgatctgcaaatttggacatgtctaaattctttgttttactggagagttaaagttaactgtaagttataaatatgataattgatatgtgtcttctgagttttccaaagtggttatgtattaaacttaattataattcgtgaattagacttaattatacttcatggatttgaaattttaagaatcgtgttagtgtttatatatgtccatgtgctcaaagatttatattgacaactacaaattaaaaatttagtctttctatcagtatctcatcattctttctcccattttcaacaaagtatttcctagagatactctatctcttaattttttttctaacccttaccttcatattactaagttggataccaccaattacatatgcctcatatgttatgaccagttgatgacttgactgagtctcagttctcaccctattctgtttcaagattctttctttttctccaaagatttatctgtcaatgtgatgttgaaatttcaaacttacgtagaagaaaggtttaattgatctaatgattatgttctaaaatcttagtctgattggaaaagaaaatgaagattacattaaggatggtgcattgattgttgaatatatgtattgaaatttcagggagatccaacctacctagttgtggagaaggacag

SEQ ID NO: 75847 - DNA, 789 bp, Carica papaya
  Intron number 2 from transcript evm.model.supercontig_5.18 (locus evm.TU.supercontig_5.18) derived from phytozome v7 .0 (chr-ID supercontig_5; pos 93229 to 94017)
ctatcaaggccgaagaagggctgaacaggaccagagtactttaagactgtgtaaggatactcaagtacttgaaaagaactcttggaaaaggactgatgtaccagaaacatagacatgtgcaaattgaagtataaactgatacagattaggctggagataccaccataggagatcaacctcttgttactgtacatcgttggaggcaatttagttacttggtgtggtaaaaaacaaaatattgttgctacgagcagtgcagaggccgagttcagggccgtagctcgtacagtttgtgaaatattgtggattaagaaactgatggaaggattgaaagttgcaagttcatcgcccatgaaggtctattatgacaataaaacagcaacctttattgcttatgttccagttctacatgacagaatcaaatgtctataaatgaataaacactttataaaaattgagaatagactaatttgaacaagtgtaaagaaatattcaaggatgattttatttatcacacggatgttattattttttatgatacttcttttctgtccccccaaaaaaaacgttgctgaagaattttgagcttatgttttagcaagagtactgcatcaatgattttagttcttaatttttgaaaattcttttgggtgaaacttccattaacttgagaaaattaatttttttggataaaaatttctgatatcaggaaggagaattcatgcttccagaaaaatttaggattcatgttacattttcagttagttatataaacatctttgcagatct

SEQ ID NO: 75848 - DNA, 638 bp, Carica papaya
  Intron number 2 from transcript evm.model.supercontig_46.6 5 (locus evm.TU.supercontig_46.65) derived from phytozome v7.0 (chr-ID supercontig_46; pos 583341 to 583978)
gctatcaggttaatctcatctatatgcttgtgtttccattatggttttgctttctttaagtcataattatgattttttttattatgaattctgggccagtgaaatgttatagaaatatttttggacttctatccaaatctttagaaaaacatgtaaatgtataatttgtttctcttgcaagttacaataacttaataaaaaagtttccatgcatcctttgatatgttgtgggtagatgttgcatagctgacttcctgtggaatcatgttatcttcttctctaccttgttgtttccaattttaatttttccacatttttttccttacctgacctataatcttagtagtgggtgctttaaaatttttttttctttccaagttatatttagctatgtaaaagtttgatggcaagacaaccaggatggtgtttgactttaacaactaggttgttctgtgagactttgattcttatagcacaatggttccttctggttaaaagatagtgttagtgcatgtagtagtgattttgacttgggagttgcatgctgatattcttttgatagaagacttgcatctcgtttattcatttttataagagttgcatgttgattcttaggatgacttgtttgcagacaacac

SEQ ID NO: 75849 - DNA, 902 bp, Carica papaya
  Intron number 2 from transcript evm.model.supercontig_14.1 62 (locus evm.TU.supercontig_14.162) derived from phytozom e v7.0 (chr-ID supercontig_14; pos 1846049 to 1846950 reve rse strand)
aagtgcaagtgaaaattggtcaatatgttgattttgttcttccaccaggattttatactcatcaacaattttgtgtttttattatgcttgttattgaagagaatgactgtgcataagatgcattggatttttgtaaggtaccttgaaaattaaggtttcacatcattcatcacttcaaaactagcagatgagttttcttcaaacattaaaattttattatttttaatatttatttttcttgtatgttttaaatattcctaatattattattatcagtttcctgtcttattctgagtaatattcctattcttattaggtttaatatttttgagtttaatcttatttagtaaaggtcactaacattataaatatcttcttatttcacttcttgagggcatccaattattcaacaaaatattttgagagttttttcagttttttggttgtttgatacaatcaaatctttagatgtgatcgctgagactttttggagtgagttataagaaatcctaggtgcaatgtctcagtatttatttccaaattcctaattggacagatttagtctatttgtcctatatgattagtatattgaattttatgctgtgtactgaattccatacccaatacaagcctcaaataattttgactttcaagcatgcctacagaggcaaaggaagtgtaatttcgtttttgttctaaatctatcatgataagatgacaagccaggcatctgttgtaattttcttttaggatgtttaagaatagcagtgcttaacatctgtgaattttgttttcttttgtcattggtaatgatttttcaaatgtaatatcagtaaattgctcatgccatattgttttcttctgcagtgccttaataagagccaatcttcaccgtggaagag

SEQ ID NO: 75850 - DNA, 702 bp, Carica papaya
  Intron number 2 from transcript evm.model.supercontig_58.1 15 (locus evm.TU.supercontig_58.115) derived from phytozom e v7.0 (chr-ID supercontig_58; pos 1046891 to 1047592)
ctgtttctggtttgttgttttttattcctcatcaaatcatttttatgcagtaactttgctaaatcctatgtcaaactcttttttttaggtagagcaatcacacaatctgcttggaaaagaatagctttccctagtttttggtagagcaacttaatacttcttcaaacttcaatactagttttaatcatatttggactcactagatacatatcctttagtaagttagactgttactctttcttcaccctaattgtttcccttgttccgaaaaatacaaaaattatatttgaaatgctttctcatattgtttgatgtgggaaatgaacattttgattctatttagattgtatatggaaccaactgtttaattctcattgactgtgaatcatctcaacacagaaaaataatagaaaaaagctaaggtatgaattgttccagaatccagattatgcttttctcaggagtgttttgattattgaccaccatattcaatatttttcttttttttttcctccgaggaacaaattttttccttttctttttctagagaaaacaacttcttaaaatatttattctcaacttcctgtcatcatcttcaataattaatgctacttgatcttaagatgttttcccctaaaagtaatttttggttgtgtatatcatgcaggaactccagcagattgtacatctttgggtatttca

SEQ ID NO: 75851 - DNA, 776 bp, Carica papaya
  Intron number 3 from transcript evm.model.supercontig_3.40 2 (locus evm.TU.supercontig_3.402) derived from phytozome v7.0 (chr-ID supercontig_3; pos 2846015 to 2846790)
gggcaccctctacaaactgcagtacactggcagaggtccaccatattctacctttgtctttctttcacatatgtataatatcccaaacaaaaaccctacttttctttttttctcaattcccacctcaaatttattttttattctactttaatccctaaaagttataaaaagtccataacttgcaattaaggtttcataatcattcctctgattattacacattcttactcattattttcccaggtttagattaaaaagctatacatatcatattatgtatatgaaagaaaatgaatcacatacgtacacatgtatgtacatgatgtatgcaatggaagggaagaaaagctcaatttgtttgttgggaaatgaaaagaaaagggtgtaaaagctgccttccttcctttctgtcggggctgctgttatgaaacttgctggttgctttttgggtcttgtgcgtgttaagcattcatggtgttttagggctaaagtgataagggtcaccctcccctctgctactactctcattgtgaaaagacaatactacccctttatatagtacactttgtctcttcctttttttcccccacttatttgaattaccagcctcaatttcgaataaagacaaattgaaggactacacccaaaaaaaaaaaaaaagaaaaagaaaaagaaaaacttctttggcatgcatatagtaattttggaattatcaagagatgaaatttcgtattataatttcatagtcattgtgaaaatttcaggaatctgattca

SEQ ID NO: 75852 - DNA, 909 bp, Carica papaya
  Intron number 2 from transcript evm.model.supercontig_103. 12 (locus evm.TU.supercontig_103.12) derived from phytozom e v7.0 (chr-ID supercontig_103; pos 112115 to 113023)
agtacgttatcctctttattttttcagtttcggtcgaataaaatttgctttatatggtattttccattcggtctcttagatagtaattggactgtaaaaggaatatcctttcagggcgcaacatgattcctgtggaaattggtagtgaatttggaatgttggtaaagtaacaagttttacttgatgaaaattggacaaccagcaaatctcacttgagcaatgcttgacactagagaaaaaaagatcaaaactaaagatgcttgtaatgaaactagacaaaagttaaaattttcagtcttcattttgtagttagcagtgtctagtacactaatcaggaaagatagacagacgggtaagaatggaacaaaagttcagtccttcttctggctcttccctcttatacacattacagatgttagacatggacccctttgagtaggctctgattattgtctaattgatactttactgattgtagttacttatgtttttggtttattcttgctattctggttccgcattgttgaccctttttcagctgttatgcttttgtttttttttttttgacctttacatcattgtagttgcttgcctctttgggtagaccttttaatgtaaattaattttccttcacaaaaaggagacaagatcatattttaggcataaccaaggagagatctagcttctgtggattctgttccttaaaaaagtctaattggattgacacactgaaagacatcacattgaccacttcattaataatttgcctaacaatttctcagcaatcactacaaaacagggctgaagttctgggcttatgataggagttcccttcccttctcttgggaagcaattgcgtgttgattatttcattcttttgtcctagatatacaggcaggcttcctgttc

SEQ ID NO: 75853 - DNA, 345 bp, Carica papaya
  Intron number 1 from transcript evm.model.supercontig_18.2 8 (locus evm.TU.supercontig_18.28) derived from phytozome v7.0 (chr-ID supercontig_18; pos 180947 to 181291 reverse strand)
ttgaaagacgaggtttgtttttgtttccctactactttgctcttgtagtctaggaattcctgattgtaatcgatcgacttcttcttcataggttactgatatttcttgtgtttatgtttagtctaacatagttactctgtttattttgcatgttcgaaaatttaaaattattccgaaaggattcatggttttcattgtgatatatgtatgatatttgttttcattcgttttctcggcaaccaagctattccgttttgctttcaccgggaattattgtttgagtgattgattgattgtggcttgatttcagaggctggctcagcatcagccgacccagtatcctac

SEQ ID NO: 75854 - DNA, 718 bp, Carica papaya
  Intron number 1 from transcript evm.model.supercontig_12.1 73 (locus evm.TU.supercontig_12.173) derived from phytozom e v7.0 (chr-ID supercontig_12; pos 1561007 to 1561724)
cagggcgatcagtccagtatgtgttccttctctcgaatatcgttttgttcttaatgttttttctgtcaatgttaatataatcaacccttttgtgaattgtctttggacaaaaaagtgatatatgaaggcaagacaatactctgatacttttattaagagtcttctgcattcattaatcatataatatatttacactaatcatgacatattgtaaataatcttaaaataaagacatccacaggagtacaatctgactcaaacatagaactttgtgtagaggaagtgacgtaccaatcatcaaacaaaacaatgattggttattaagaatctttatgaaatttgatgtacttgatctttttctgtagtcaccaatatcaatctgttaaattacaaattaaacttcacttgtaaaagacaaacttcaccttgttaagacctatttatgatttactgtatcaggtgttattcatgcataaatcagatcctgcatacttgcatggttcttgttggtagacatgtcaattgttagcatttgttcttatctatgtcacaactgtttgtgttctgtagttataactctgaggtattatcaatattttgatatgctaacctggatattggaccaataatttattgagctacctttctgaaaattaatatgcttatttttattttcaatgcagatttgccaaaaggggatacagtgcaatcagtagag

SEQ ID NO: 75855 - DNA, 711 bp, Carica papaya
  Intron number 1 from transcript evm.model.supercontig_5.12 2 (locus evm.TU.supercontig_5.122) derived from phytozome v7.0 (chr-ID supercontig_5; pos 911211 to 911921 reverse s trand)
tccgtcgaaggttcatccgatctcttcctcgtcgggtaaattggttttatggtttttcttcttctgccagattttagagtcttgtaaacggtttttctagtcttgttgcgcaagattctggttttgattgttgatgctaacttactgtttctttttaatccgaattcattttcttgttcttgtttcacgacatggggtgtttgaacttggtaaggacagcgttcctggctcttcttgattaatattgtttctgtttcttttcttctggctaagacatttatcgttcacttttgtgtatgggtgatttaatcatccatgtttcttgccgttcttttttatttttgagaagtttgatggataatgaacagaaagagaaggaatgattctaataatttgctttattttggcaaagaagagagattacttattttcttccattttctttgcaactgaggaagatatgttgtttgagaatcgaaggattcttatttgaattgcaaaacaaactagtcctttatattcttcatatcaccttaagatttttagatgatttatttattttattatttaagttagagttactgtgttcaaacttcgataacctcgttccttcttattatttatacatttgttctttttaattcaagataagattgatagattattttttgtttaggctttattttacaaaagtgaagctgggctctcctc

SEQ ID NO: 75856 - DNA, 611 bp, Carica papaya
  Intron number 1 from transcript evm.model.supercontig_1.42 8 (locus evm.TU.supercontig_1.428) derived from phytozome v7.0 (chr-ID supercontig_1; pos 5301983 to 5302593)
aattgctccttccaaggaccttcctcttgtcggtatgcaatttgcagcttatgctcgattgaatttactaagtttaagtgtgctagagaattctgaatagtttattgaaaatgagctttgtagccagataatttgtttgatcgtgtatgcatcagattctgttgatcaatttgttggcttttgttgttcctcatgtttttatcatttagttcatatgttccttgatagatttgcgaatgctttccattgtttgtaaaagagatagaaggtagctttaactttgtaatggcttagaagaggatagatttgcatatgctttcgatatattaaacaaggcagagaaggtagttttgactctataacagcttagaaaagaagataatttcttagaaaatgaaaattttcaaatcaacgggggttggtgtttggtgtttgggctgatatgttagagaaccccatccttcgccagcatggacgagaagtggctgattttccctcatgtttttttgtgttcttgtctatttcagttggatgacaaacatttttcacctgtccacaaatcttttaggtcgatgattattcaatttttttatgcgtgatggcagttcact

SEQ ID NO: 75857 - DNA, 684 bp, Carica papaya
  Intron number 4 from transcript evm.model.supercontig_23.7 8 (locus evm.TU.supercontig_23.78) derived from phytozome v7.0 (chr-ID supercontig_23; pos 1029445 to 1030128 revers e strand)
atcattggggccttgatcaggtgacctttttgttatcatggcaatgaacatagctatagcatgcaacattaagacatacacgtcaccctgttttcctttgtttttattaatgaatgcctccagctttgatctgcaattttgatgtcattgacgtcccactgagtttttcgacattagttgataattctaactcaggtttctggttgtatattacatagcttgaagcataacttatttccatacctgggtaatgtaaaaagcaattggaaagtcagactcaatgcatgacaactttatcttattacatcccgaaagaaaacatttactatctcttgattttaaagtaatacaaagttgagataataatctgatattaggaagttatattacctttggtttggctcatgacagttttatagttttacattgtcagtgattattagttgtgtgttaagtcatgccatagtcaaaagtcatgaatagctcttcttgagaacaaaaaaaagtgaatagctactatcttataacctctttctatctgaagacagtttatttttccctgttcatgtctagagagtgtttaacactcttaactgtaagttactgcctttctggtctctcttgaaatcctgatcaagaaaacattcatcatttttcagtgcaacagctaaaaatcttgaggga

SEQ ID NO: 75858 - DNA, 347 bp, Carica papaya
  Intron number 4 from transcript evm.model.supercontig_194. 17 (locus evm.TU.supercontig_194.17) derived from phytozom e v7.0 (chr-ID supercontig_194; pos 271442 to 271788 rever se strand)
ccatctgaagaagacttgaagttctggccccacaggtataagttgcggctctgtcaactttttgttgaatttatcaaacaagacaacaaatacaattgttaagacagaggcactcagaacttgatgttctgacttctttgtttttgaagaaaaattgatcttttctgttgaatgaaagatatgtagagaatagttcatgagatactagttctatatttatcaaaatgactacatgtttatcctatgcctttacgaagctcaatctttatttttgtgtttctaatgtaccatttctttgattaattttggtagtttcgagttccgccttagggtgtcgctcactgcag

SEQ ID NO: 75859 - DNA, 838 bp, Carica papaya
  Intron number 2 from transcript evm.model.supercontig_3.28 9 (locus evm.TU.supercontig_3.289) derived from phytozome v7.0 (chr-ID supercontig_3; pos 2037246 to 2038083 reverse strand)
tcacattaccacccgcaaatccccttgcggtgaaggtacttatcttctatctatcttgccatacaagccgctgaaaattttgatgtacaaccatttggctgtgttagttctgcttctttttggccttattgaccaagttatatatatatatttgccagattcttttttcttttagccttggtagtctacacatgcatgttgtcgttctcaatatttctcgtaggcattctgaggttcactgtgcattacataattaagtcgatggcatattttattctttcgtggtttatgattttttcagttgtttattagcatagttgataaaattaaattttcattataacactaaatgaagggagcctgtacaatttgttatgacaaatgtagattttctcattcatgttctgctgcattatggctgggattgtgtattgctgatacttttattctatgccctgaaagtggtctatttggatagagaggaataggactattatgtttcagaaaaaggaatagaaagattctcagagatgtaattggagattacttccaccgaggccttaatgattgacatgtaaattccccttatatgcggtggtggcatctccttttgccttggtgatatattgacatagatcaaaataattcaagctagcaacctctctctttttattgtacattagaaacagggaaaaactgaaagttctattgggattacatgatgattttacaagttatttctggttttatatctagagttaactcgcttggagcagtttaattagttttcatacgccgtgtaggaaccaacacttgggacagatttgagctacgcgtt

SEQ ID NO: 75860 - DNA, 369 bp, Carica papaya
  Intron number 1 from transcript evm.model.supercontig_3.28 9 (locus evm.TU.supercontig_3.289) derived from phytozome v7.0 (chr-ID supercontig_3; pos 2038128 to 2038496 reverse strand)
tgaagaacctcgagaaaggttcctttttctttcacttattacatcttcgcgatattgctttttgaagtttaagtgggttataagcttcatccggttaaatcttatgccttacatggcacgattttttatcttccatgttggatgtgatatgacagattaaagtgaattttgtgttttctggtgatgaggattcgttttaattttctcaagcttctctagatgttttttgcaattggatttgctaacttgatcaaggatggtgactaatttgacttggaacatacgtggcaatggtcttcacttattctgattgtgcatttctgttcaataatagtttgtgctgacttggttcggggtgccaaggataaa

SEQ ID NO: 75861 - DNA, 539 bp, Carica papaya
  Intron number 1 from transcript evm.model.supercontig_26.1 48 (locus evm.TU.supercontig_26.148) derived from phytozom e v7.0 (chr-ID supercontig_26; pos 1114881 to 1115419 reve rse strand)
ttcgtagctgatcttgtcagacgtggccagttgaggtctgatagaagttgcatctatgattccagtccttaacacctttcacatgccctttttttttttttctgtaagttgtagtttatatgtttcttggatctaatctaatttattaaaatttttcatccttcttatgtaatcatcatgtttgcattggtagaaattatattattctatccgattttaactttaccatttgataattttgttcacatgcgctggtgtttgaatcaggtttcaggtgttctgcatgccaagtctgatttgttaatatttttcttgtcattatgtaatcatcgtatctgaggtggtaggttatattactctgcccaattttagattttataattttgataattttgttcacatgtagtgatgttacaatcacgtttcaggttttctacatgccagccattttgtcataatttgatcctatgacctgtcatataaattctgatttatcctttcaaatggtgccttttttcacagctcaaaacctctcaaat

SEQ ID NO: 75862 - DNA, 1069 bp, Carica papaya
  Intron number 1 from transcript evm.model.supercontig_33.1 49 (locus evm.TU.supercontig_33.149) derived from phytozom e v7.0 (chr-ID supercontig_33; pos 1540044 to 1541112)
acgtagcattcacttaaacataagacactcagaaagtgtgtcgtgtcttcaaatttaacacgtgatatctaacttcagtgacaatagtcaatcatagggagggactaaattgaaaatttttcaaaagtatgggagataatttgaaccgaaaattgaggcaagaactaatttgaataaaagttaataatacagaagttaaattattattttaacctatgttatatttatctataatatacatagaaaagtagacatatatttaagtatatgtatgattaagtataataaaaaaacattctagagaacattgaaactagctgttttcttttttcctatttttattttattttctaacaaaactaaatatgttttttatgttcaatgaatgtgaaagttcagaagattgtttcgtgcactaaaccccctaaaatattttctaaaacaaaagtttctatcttcgagcaattggatgtgtttttaaccataattcactttcttggaaatttacttgaagcactttgggaagtgataagtcttttcaaaggaattagttgtaatgcttgagaattagtgcttatcaatatttaatgctggtgccttcctagtaaagaatgctcaaatattagtcaatttaattatttagtgccagagtcccttactttgatctgtgagtcctataaaagcttagtaaaataaaagttggtccttgtcactgtcagattgatatgactgcttgtttgatttgcttgctagaaatggtaaaaactatgacattctaagaactgaatatgtggaaacaaattggctgtgggaagcttaatatgagcaattgctcagagcatctggttttagttatatttggttgggctcatgtggcaaaatatttcattgatgtgatgtactctactgtttgtttaaaatagtgattcatcgaacattgttttccactgcaagcaatctcatagagttgtatggaattatctctatcccagttttgtttcactgatgagatattgttctatcttaacatttagggccacgggaattgactggtgctgttgatctcatt

SEQ ID NO: 75863 - DNA, 495 bp, Carica papaya
  Intron number 1 from transcript evm.model.supercontig_50.1 41 (locus evm.TU.supercontig_50.141) derived from phytozom e v7.0 (chr-ID supercontig_50; pos 1292139 to 1292633)
ggtttccgttattgagcctgtgaagattactgaaagtaagtcatgcagtatgtttggataccagttttttccatcaagcgatttaatcatttagaaaatttaagtcatggcatctattatttttcttcaattttgagcttgtggatggagagcatggcaatttggatagtgtcactaatggccagtatttgaaatgtctttaatatatatactttaccggaaattaattgaatataaaagataattctgttggtaacaacttcatttcggttcgagtttcaaattggaaatttgcatgaattatgacatttctaacctggcttcctctggattctagctacaaacgcttctgcccattacttttcctgcttgtactataaattcattaatacctcccaggaatagctgaaactgaaagtaacaatgtaacttcagattattgatgctcagctttagcatattttactgcaggtgagaaaacattcaatagtgata

SEQ ID NO: 75864 - DNA, 427 bp, Carica papaya
  Intron number 3 from transcript evm.model.supercontig_112. 25 (locus evm.TU.supercontig_112.25) derived from phytozom e v7.0 (chr-ID supercontig_112; pos 212988 to 213414 rever se strand)
gaacataattactggtgaaatccatttttcttttatatctttacttcactttatgttgcggttggtttaaacagatcctattccttttcagtttctatatcttagttattttatatgtaaaagttaattatatgttgcgtatttcatgcataatgtaattagcttcactcatgttttcaattctacatatcttcaatttcacaaatttgtgtttttcagttgtcagttgagaaatcataaaaacatgtaatttaacgtgtacatgagttcgaattggaatgctacttccgttgagatttttatccattcttattgtattctcatgcatatttcaggaaattaagacttgcacttaatgttactttgttccatcaatttgatttctttctcaggaagtggcgagatccaacaggagatctcaacaaca

SEQ ID NO: 75865 - DNA, 800 bp, Carica papaya
  Intron number 3 from transcript evm.model.supercontig_198. 21 (locus evm.TU.supercontig_198.21) derived from phytozom e v7.0 (chr-ID supercontig_198; pos 111393 to 112192)
gagatatagctgtagatcattatcatagatacctggtttgcccacgataacctttctcttgatttccatttggtttattttaaacctgtagattactctacaatagtaattaattaatcaacttacatctcattgactagatacccctatatatatatatatatattataatgctattgttagttaatgcaatgttactatcataaacagtgaccatattttggtttttatctataaaaaaatgtaggatctggattaacctgtttcgtctttaaggtgcatacatatatatatatatatatatatgttatgtatttgtatatggattttgaaggtgacatgaaaaaataaaagaaatttttctttctccactttagcaagcaagagcctaaatcaagaagagccgtgtttagtgcagatccagagatcttctgtaatattttacttgtaaacttgttcttcttttcaactattaagactaatcatcatactcttttcagtagagaccaagaaaagataattaaagtttactcaaattgcaaactaattaagagtaaatttggaggaactgagaagcttgaattttactactaagtggggggaaaaaacttacaatcttcttttcaagaacttacaatagaaaataaacaagattttcaagaattaattagtacatgttgtagctaaatcgattcttttattggtatttaaattattttttcaattatgattatgaaaatgagagtatgattgttgattgagaattggcaatgtgatccttaaaggaagacattgatctc

SEQ ID NO: 75866 - DNA, 947 bp, Carica papaya
  Intron number 3 from transcript evm.model.supercontig_3257 .1 (locus evm.TU.supercontig_3257.1) derived from phytozom e v7.0 (chr-ID supercontig_3257; pos 3941 to 4887 reverse strand)
tgagcgagcagcagcttgttgattgtgatcgccaggtttgctttgtttcggttttcgcattctttttccgctaaaagttcgcttcctttagaatcctgtttagtttcccgtaaatcatgtttaattacaagagaattagtaaattaaagtaaaacgaaattaaaagaaagatatgctattatgagccagctgaagaatagtttactcgctttcttgctagtgcaaccttcatcagcttagtctgttaagagaacataaagcttctgttatagttcttttatagtaagaatctttgtcccccctcccccccccaacaaaaaaaaaaaaagaaaaacaaccgaattcttgttaagcttactctagcctgtaatttgtgacattcatcgctgaaaagtgattcgtacaatatgaaatttatttgtaacacttttttggagggatgagggggtttggatgaacttcttgttatcaaatagttctggctttgaagcaaaatattgcttcaacgtctttgttattaagtagctcccattttgagggatgagatggtttggattaacttcttgttatcagtagttctggctttgaagcaaaatattgcttcatcgtctttatgtctgtatgtacttgtgtcagcctttgtgtttctgcatcaatgtttttgtgggttcatgacataaattttgcagatagtttcttccatgcttaaaggaaacttgtaaatatctgcaatgattgtgtatggtaaatgtctgatagtaattggctggttaagtatcaaacatgtggagactgccagataatttatattaggcaaaacctttttgttgaatttagaaatttccttttgtggattaaaaatgattcctttcctcactttatgaaaggtcagcatcaccatctttactgcctaaccttgcaccttatgcagtgtgatccagaagagt

SEQ ID NO: 75867 - DNA, 384 bp, Carica papaya
  Intron number 5 from transcript evm.model.supercontig_27.1 97 (locus evm.TU.supercontig_27.197) derived from phytozom e v7.0 (chr-ID supercontig_27; pos 1974084 to 1974467 reve rse strand)
caacaggtgctgccctctacttgaccacatatctctctctctctctctatatatatatatatatatatatatatgcatgttatatatttatatattccaattgggtttattaagccaatcactattttgaaagtagaaaatgttagaaaattttaagatatagaatagctctacatgacattttcttgaaaatggaagaaagaagaatgagagattaattaaaagattaagttttcataacgtggattataattaactctaactaatgaatcatgatcacttataaaaattcaaaaggctcatattgaattttaattttcaaaaatctcattaatttgcaaattttgatttttaacagaaaactgatcggagcaagatacttca

SEQ ID NO: 75868 - DNA, 711 bp, Carica papaya
  Intron number 1 from transcript evm.model.supercontig_37.1 99 (locus evm.TU.supercontig_37.199) derived from phytozom e v7.0 (chr-ID supercontig_37; pos 1543304 to 1544014)
aaggagaagacttgcgctggtaaaaagtcgtaatttctctagggttttttttttttttttttttttttttttttttaattccttagttgacagcttcccgcgttttcgttttatgtcgtcgtggtgatttttttcttattttttttttttttcaaataagtgaaacgcggtttatgttctacaagatgttcttcctagctgttatattcttatgggtttattgagaaattgaaggtggtattcactgattggttaattgttcttgttatttctgtttcggtttgtgaattgaagtctgtgtttgacacttgttagggcttctatgtctaattcgattggtaatttttatgtaataatgttgccttttgacctttttccctccttaagttactttaaatagaacaagatcgcattgtttggcttccagttatttttcaaagcttgcttattttccctcggttttcatcagtctgttcttttggatgatgtttttctttttcttccatgcggttcattggttaggaaaatgttggttggggaagaaaattaaatctaaatcttcgaaccttttttcctttttttgtttgatacaaggcaattgggtatgttattgtagatcttaagttcaattttgtctaacggaattctttcttttcattccgttttgaatgattttcaggactatcactcaaatcccaggaactaacagct

SEQ ID NO: 75869 - DNA, 488 bp, Carica papaya
  Intron number 2 from transcript evm.model.supercontig_116. 51 (locus evm.TU.supercontig_116.51) derived from phytozom e v7.0 (chr-ID supercontig_116; pos 499489 to 499976)
gttgatgtgagtgtccatcattttgtcaatgattatggtttattatatcccttttttttcttccggtggttggtaggaggcttgtaaaaatactttaaggacaaaggttttccagattatctttgcctagtacagtgtaatccgcactgtgaattggtgtttttttttaatttaactggtcatgcaagagtttcctggtggaaaaatgacttatggaaatggagaattttgatgtgcttttacgtttatataggtacatttacatgaattatatctcaatgcgtctagtaaaactttagccatttcaacagttattctgtgatgatcagtaagagaaattcaacagactgtaatgcaagacgatcatgcatggtggtttcaatgactgtaacatcactgttgccattgatttctggctttacaaatgggatttgattttaattgtggttttgctctcaaacagatccctttgtctcatatatctgaag

SEQ ID NO: 75870 - DNA, 758 bp, Carica papaya
  Intron number 1 from transcript evm.model.supercontig_150. 46 (locus evm.TU.supercontig_150.46) derived from phytozom e v7.0 (chr-ID supercontig_150; pos 442503 to 443260)
cagacagaatagtcagtatctcacctcctcttcaggtatgtatctctctgcgctctccttatacagcatatacgtacagttctatcttgcacgactgacattcaattaatacacacagatctataatgttcttctacatatctatatatgatacacacagagaaaacttcaataacccaccgtatcatttgcgtgtcgtaatgaatgtggtagctagagatcgtaaatatatatatacacccagtaattttagcagcttttttcttgtaatttttcgtttttactgttaaagggtactgtagaaattctgacaagaacagcaaagagatgatcatcagagaagaaaaacaaaaattttaaactatttataggcttgattgaggtgaaataatcagtaaaaatcaatacagaactaatttagaagccagaatatgggtttgaatctttcagaattgactttacgactgatcataattaatcagtctcagaaaacatagatcttttatcataggaaagctagtttttagtcaatatcgatttttctcgggaaaatatcggatgaatttggttaagagtcaataaattaacccaaaaatgatatattacatgtgaaatactaattttaattgcataaataatcttttgtttcttaaaaaaaaaaaaaaagtggattgaacttgattacaagtaaaattttgagatctttatgggtggtggttgtagggttagagaagggagattttccgggagaagtgagg

SEQ ID NO: 75871 - DNA, 469 bp, Carica papaya
  Intron number 2 from transcript evm.model.supercontig_11.1 12 (locus evm.TU.supercontig_11.112) derived from phytozom e v7.0 (chr-ID supercontig_11; pos 1193822 to 1194290)
ggcatattacactggtatgctctcttttatgctcgaaaaattcaaaacaaaaaaattgaaattatcctttttgttcctttgaggaaatatgatttcattataagatcaaaaagctaaaaaagaaacaaaaatcttccccgtaatcattcttgtgtagcactcgactcctttcatcttcaataaggctaactgcttgtagtcccaaaaatatatctcttattacaaattagtacctagtattttctttttcttgtttcaagtggtttctcaataaatgtttcaatcaggtcactttaagtttatgaggctaatttttcaaaactaaattttttgcatgaagtaaatgaatatctcaactttggggtctaaaaacatttgaacaaatttgtaacatagtctaaaatcctattaataaaatggtaattttagcctttttgatatactcctgacttgaggatttaataggcaa

SEQ ID NO: 75872 - DNA, 699 bp, Carica papaya
  Intron number 2 from transcript evm.model.supercontig_11.7 (locus evm.TU.supercontig_11.7) derived from phytozome v7 .0 (chr-ID supercontig_11; pos 93875 to 94573)
tggaagaataccttcgcatctgccgtcaagtgggggtattatcatcttttctgtttcacatctaggaaaaagagtgtttgacttggcataagataggggttcttcactaccttgataactaagctgtatgtttgactgagtttctccttcagtttttactgttagaaagcagatcgtttggcaagatagcacaagatagaaattattttaaagtaaaaatagaatctgtttttgacttactggtaaggtcgaagttagaaataggcatacgagtatatttactaattatatgttttattaatttattaataaattgttttttaaaaatgtaatagttatttcttattaataatttaatatttattgtaaattatattttttattttaaatatcattataatttgaaattaataattatattaaacaaaataaatataacaattaaaatattttttttaaaaaataagtaatactattaaatgattgttttaattatcactttgatctaatagtcatttgctgcagtttggaatgcctatattcttgtttctgtatgatataaatagataaatattaatgttttatggttttagagtgttgaggttactgaattggcagaactgctaaattctgatttatccaaataaataacgaaccattgtaggttcgggcagagaaactgtatactgaactggattc

SEQ ID NO: 75873 - DNA, 1027 bp, Carica papaya
  Intron number 2 from transcript evm.model.supercontig_14.7 4 (locus evm.TU.supercontig_14.74) derived from phytozome v7.0 (chr-ID supercontig_14; pos 877664 to 878690 reverse strand)
aacggttgcagtcggagttatcttgtgtcaaggaggtaagcaacttcaatgctttttcctatgtttattcccagttatttttccccttttactggcttgaactggaatggatggtagggaatgttgagaaatggaggagattctttaatttcttgataggaatcctgctttccagattatgcagttttgttttcatctaatttctggtgccactaagccgaaagtgtgaccggaaagcttatatttccatttgtctgttaggaattaacgtttcttgactttaaagaagcttgcaaattttggtttcttattagccatttcttgatggctctcagaagttgatccatccactatcatttttgctcaaagtatatgtaattcttaacttgtttatatctgagcatagtgatttaaactttagcaggcagattttctgttgattaatataaattatttttccattcttcgaactttgttgtgcctatttactcccagtttgtagttagtccccactgagttacaccattgccacttcaattgaacttgggcttgtccttactctgccggaaagttcttattgcatctttagaacctgatgtattaagttctttttgttagcacattcaatttaaaagaaaagcttggtcatttcttttttttcttttccttttacataatccttacagagcacttaagaagatctgtggtccaatctgttagacaaggcctctgagtatatggtgatgttgaatattttaatggtacagctcatagcttatcagcattgtggcctgattattttggactgtctgtttggggaactagggaacagagtttaacttcagtaatttaatgtgaaattttatgttattaatatatgcattcactggtttggaggttatttgcatgaatcaatttgtaatcatggacgattttggcatgccataggactatgatgtgtatttgattgtatggttggcgatgttcctcctcttagaatatcactatatgtggtttcaggaactaa

SEQ ID NO: 75874 - DNA, 552 bp, Carica papaya
  Intron number 2 from transcript evm.model.supercontig_30.1 59 (locus evm.TU.supercontig_30.159) derived from phytozom e v7.0 (chr-ID supercontig_30; pos 2042422 to 2042973 reve rse strand)
ggtgcaggtaaacagttctcttgcaaccgtacaggacgatttaagataaacgaaaatcatattgatgataatgaactgaaagtttcacttactttctactctgatcctgtatcctgcttgctccttgtgatattagtgatttagtgcccgatattttcttctctgattatgatggcaaattaaaaaaattctagcatctttgggattggtaatttgatgcgggtaagaaattctaagcaatctgttttaatttactcatttactgacgacataagagtgcttactaggtctttggaagtaacgttacgtaagaaacataatcaccattttcctaaatctttatacgtgactattttccataaaatttatttatttttttatccccccttatagataattgcttatttcttaaatgagcactagattgcacctactctatttttccaaacaatcccaaacgttcttctattttgaattatttacagatcatttatttgtttcatctttctagtaattcatttttctttcctggatcagcttcttcttgatttg

SEQ ID NO: 75875 - DNA, 218 bp, Carica papaya
  Intron number 3 from transcript evm.model.supercontig_118. 27 (locus evm.TU.supercontig_118.27) derived from phytozom e v7.0 (chr-ID supercontig_118; pos 378008 to 378225)
gcaaatcattcaaggtggaagcaattggtaaatttagattattgttaaggactgaattttatttggatttagaagagacttttattgtaccgttatttagatggaatgtaatttttgtttctatattggacaaatttggttattcatgttcatttgaaaataaaaatttagtttttttcttaattcaaatctaattggttctacttttttatcagcgc

SEQ ID NO: 75876 - DNA, 688 bp, Carica papaya
  Intron number 1 from transcript evm.model.supercontig_168. 16 (locus evm.TU.supercontig_168.16) derived from phytozom e v7.0 (chr-ID supercontig_168; pos 330548 to 331235 rever se strand)
ccaagaaccccgtcctctacatcgatttccctcaggttgtctttctcccatttttttttctctcatttctttttctgaaatgctcctgtagatttgtttgtcttctgggagaaggcaagctttcttgattaattgcactttgttggtattttgataatttttatgagtcgggtgaacataacttggggatttctgtttttgagtttgaattagtgaagaggagcaatgaaattatgattctcaaacatctaatgaaacaaaaagggttagctactctgtgttaagtaaatacagtagggttttaattttattgtcggtcgaagagcgagaaggaagcattcattaataatattttcataagtagaatagaataggagattaagaaaagcttcagcccgttacgcattcctttttttgttacatacaaacatgagaaaaccaagtctcctatgtggtttgagaggtaggttttgtatgagggcgttgtttctgcttccataagggttaacgaaaaaaataaaaacacggacttcaggtcttattgctactcatttttttgggactttgaagacatgaagaactatttgagtggtacataatttctaatattgtattttctgcagtaactagatgttgcaccccaatcattttgtttaaaaatgaaatttcttctttcttttagggtcga

SEQ ID NO: 75877 - DNA, 338 bp, Carica papaya
  Intron number 2 from transcript evm.model.supercontig_5.5 (locus evm.TU.supercontig_5.5) derived from phytozome v7.0 (chr-ID supercontig_5; pos 20393 to 20730)
ttcgaggagtgagaccagaccaacaattggtcaaggtatgagatgaatttccattaaaccgacatgctttggaaggaaaacttatacactatgatgaatttttctttgtgatatgaacttctaaggacacatatagcaagttaaatacttctgttgatccactatcttactttttcttttactctatgatgctaacaacaaactggtttttggcagaatatataatatggtaattggaagttactggtagaagagcagattgtggagtttgaatctttattttagtaataataaaataatgattatcaaatacaatttatttttcccacagattgttc

SEQ ID NO: 75878 - DNA, 757 bp, Carica papaya
  Intron number 4 from transcript evm.model.supercontig_5.5 (locus evm.TU.supercontig_5.5) derived from phytozome v7.0 (chr-ID supercontig_5; pos 21005 to 21761)
ctgcaattgaccaacttgttattttgggtgaacaggtacctgattttctttgttcgtagtctgttccggtaccagattgataacaacaaatttatttcattaggtgtttttctttccaatatattttgtgtctacaaaagtgaactatttcatcaaatgtttaggtatttgttacttagagaagctctctctctctctacgaaaattatggaagtactcttactggtgagatgttgtagataactgtgctaggtttttgtttttcttcaatttagtatgaagatgacagaacaatactgaattttctattagttgatgtgaaaccacaatgaaactcagaaggtgactgcagaagtagtttcttgcaatttgttaatttttactctggcgtctagagaacttgaactctttaaatttaataaatatgaagcaccagagacaaggagtaagacaccttgattctggctgtttaatttgaataactatataaaagttttaatcataatcttttttcgctagatgtgattagtatactaatgtttttcttctttgaagaaaccatataatcatccttttcttcttttgggtaagccatatcattatattgcattacctgataggtaggtgataaaagaataacgaagtacaataagtttaattataggtcattgagctatttttcgcccttagcattttttttgggtctaattatgatttaatgtattctcttaattcagctatagcttgtgacaggtgg

SEQ ID NO: 75879 - DNA, 486 bp, Carica papaya
  Intron number 1 from transcript evm.model.supercontig_128. 27 (locus evm.TU.supercontig_128.27) derived from phytozom e v7.0 (chr-ID supercontig_128; pos 217592 to 218077 rever se strand)
ggcttccgttatttcaggtaatttctttatgtggtcttgtatgggcattagatggagtagtgagtagagtaaggagactgcgttaagttcagtagttggattcaatgaatttctcgctgccaaatttgaaggcaatgttgtagaagctatgatagtttctttattttttgtgtaccttcactcccgatggttgtggtgtgagaaatgtggataaagggttgtacttgcatttgaagggaagggatgaagtggcaagagatatttttttgttggtggccattcagtttgttaatgtgtttttgagttggattttggcaattctccctggttttctcttgttgacttgtttcaaaagttttatcttatatccagttcctcaacgggatcattttcctggattaagttttgggaatttctccctgatgttctcttgttgatgtgcttcaaaagtttaactctcgggtcttctatctgtgtcagggtcgg

SEQ ID NO: 75880 - DNA, 389 bp, Carica papaya
  Intron number 4 from transcript evm.model.supercontig_48.2 18 (locus evm.TU.supercontig_48.218) derived from phytozom e v7.0 (chr-ID supercontig_48; pos 1191005 to 1191393)
aagccaaaagaaaaggaaaaccagctcttcccaaggtgtggcttttgtctatttatcaattgtgtttcttgtcctgaaaggcatgcttgatgcagaacgtcatgttttttgtttcttaacttgaagactgagctgtgttggtgacctatgatgactttttcagttttcagtatgttaaaaagtgtcttaatctttttttcttctcaatcaatcatttttgtcttttatttatattttttaatcgggtgataatgttaaaagtcgtcttattattttttttccctggaatttctttgattttatattctgtttctaattagaaatagaaaaccttaaaattgtagtgcttaacaggcaaaagttgtacaacctctaaactttgtgaagga

SEQ ID NO: 75881 - DNA, 859 bp, Carica papaya
  Intron number 3 from transcript evm.model.supercontig_57.2 1 (locus evm.TU.supercontig_57.21) derived from phytozome v7.0 (chr-ID supercontig_57; pos 358183 to 359041 reverse strand)
ttcaaacacagggacaagggggtcggcgagaacaggtaaaacatgtggctgctttaagttaccagctttggctctctcgataattacccgtatgagattttacttttgtcttctacttagcataggcaacaattgttgaatattgagataaccatgacgacatatttgaaaaaaaaaaaaaaagaattatacaattaattggttaacgtgcaaaacttgaattggaaagcgagcttccacgacgcggagtcattttttccattatattatatatgcaatataatttatatttttggtatagtttgcccagttcagttctaagtacttttttatttaggagactaccaagaagattgaaaagtttcatctttaaacttctcaaacatgttccattaatgacttcaatcccaaaccaagaaaacatatatgtagtagtcgtcatatatatgcaagtaaagatcttttatatgtgtggtctatatatgtaaatgaatggaggaggtatgggcttgattgactgctgcgtgctggacacgcctggagaggtttgtcacgaataattcctgagttagcttcatgagcaatctccatcgttcctttggctacctcatgagaagtgtaattaactaagtcggcagttgacttattgaccaactttttctacaaaggatcctgcgtttcttaaaactgcccaatttgtcgtcatatattacgagttacaggaatttggcagctgaagtagttcgtatttatacacacacacacacatatgtatattaaattctcattttgatttgattcacgttggtcaaatattgaaaaaggtgttggtgcagaaaggggtgtcaagtcccataaa

SEQ ID NO: 75882 - DNA, 664 bp, Carica papaya
  Intron number 1 from transcript evm.model.supercontig_17.1 68 (locus evm.TU.supercontig_17.168) derived from phytozom e v7.0 (chr-ID supercontig_17; pos 2086073 to 2086736 reve rse strand)
tgcatctttgggtgtggtaaagaagaaattagaatataaaggatacccaaaggtttctagcgagcttgatttttgaatggggctctttgttttgggttttattagtgatttgtagtagaggttttattgtgtagcacttgaaatttacttgcttaatcagtgtatggttttttagttaatttgaattctgaaagtggatctttaagattgttcctttcagccacaactttggttgagtgcattgtagcccaaaaagaaaatctctattactttcatcagtcaaatgcttctgagaagatgtgtagaaaaacaaaagaacttccaagaagctctgaacgaaaatttaaatctttgtctgacaaacaggattcaggaagatagatcttttaggtgtttgtttgccttggatagttatgtttttacttgtaccatatttgtcaaccgggattatccatgaacagcaacaggcataaaatagccttcattccattaaatatctgcagtactatctgaagtgttttcatggcgtatgcttaaattgagtggctgattgttttgtggtcccagtaaatttgttgaccacaaaagtaatagataatgccactttacataccctctattctattttctttttggtgcagcttgtgatcgccaccggagaaca

SEQ ID NO: 75883 - DNA, 516 bp, Carica papaya
  Intron number 2 from transcript evm.model.supercontig_21.6 4 (locus evm.TU.supercontig_21.64) derived from phytozome v7.0 (chr-ID supercontig_21; pos 761324 to 761839 reverse strand)
tggaggaggtaataataactcatttatcttctttttctttttttggttgatcatcttccataaaactagccagttggaggtatctgtctccgttttgggtgaagatggtggttgatgagaatcttataatcacctgcttgtttgtttcttagaagcctttcttccagtttggcaaacaagtcttgtaaattgatttggattgctaataagcagccccaaataccctcttcaaaaatttcagtttgtttggtttagttcttctcccgtttgcatttaggttggagatgtcggatcccaccttgaattcttttaaaagtaggaaataaagtgctgtccctcaagaatttgtgtctttgaggtggggaactcaaaatataaaagattatattattaacacgtgtattcaaaccatcatggatattaagaatgagacttagtattggaacagagttgaacttgctagattttagagttattactacgccttcatgcattttgtccttatttcaggtgaaa

SEQ ID NO: 75884 - DNA, 707 bp, Carica papaya
  Intron number 1 from transcript evm.model.supercontig_318. 6 (locus evm.TU.supercontig_318.6) derived from phytozome v7.0 (chr-ID supercontig_318; pos 39347 to 40053 reverse s trand)
gttcaaatcaaggaattgtatcctttccatcatcatcatattcctataattcttcgttttatttagattatttgttgatttgcaggaacataagctagccgaaaactgtttacgtggtaatatgtatagggaattacttattttcggaactacagttggttattatttttgctccgtgattgtttttgtttgtggtggaaaatttcaatttaaaattggtgaaaatagtaggttaattttacggtttaaatctcctgtatagttcagtgatgaagaattaagaagatacagaatatatctaggtattctccaattttcaatggttatggtcgttgatgactgttttattactggttttcatgtaaaaaaatttgcagacaagggatcagaattttagttcagtttttatctttttttttttttttttgttttctttagaggaattttgaactatgacatgaatactcagtttaagtgcacaagctttatcttcactctttgctttctcttgtgattaatggtcaaggatttacaaagatgttctttctttatctttatgtgtttacatatatatacggataagtttgttgtgtctatgtgtatatatataaattgtatatatgtaaagtttttaaaattcctcatgagaatacttctttttttgataatttccttaactgggtactgaaatatgaagccgagttgtc

SEQ ID NO: 75885 - DNA, 372 bp, Carica papaya
  Intron number 1 from transcript evm.model.supercontig_37.1 91 (locus evm.TU.supercontig_37.191) derived from phytozom e v7.0 (chr-ID supercontig_37; pos 1486414 to 1486785 reve rse strand)
ccgggctcctccaattcgggtcaagtacttccgaggttcatgcttatctcatgttttctagttacaatttcatttatgtgtttttctttttctcttctcgagtttccttttcgctgctgagaaaaatttggatggaaatcacaattctatagggttttacatacgtctgcacgtcatttcattctcttttgttattcattacaacttggtttggttggtttgaatatggagaaaatggagagcgttatttcaggtggacgaagtgcagtaatttttatttttttatcaatcagttaatctcttaataattgcttgtcaatttttcttcggatttcagattctcgagactgcttttaagaaggaaactgttgg

SEQ ID NO: 75886 - DNA, 398 bp, Carica papaya
  Intron number 1 from transcript evm.model.supercontig_230. 3 (locus evm.TU.supercontig_230.3) derived from phytozome v7.0 (chr-ID supercontig_230; pos 204203 to 204600 reverse strand)
ctctctattagttcaagacggctaaatcggctcaggtaatgctagtaggttgtttgtgactttatgcggaattgaggaattttgttttacttctataaagtaaattcaagaaaatatctgcttatattccatatattaatggtcttttccttttaatccaatcctgtagaaggtattcactttctacttaagtcattaaaagtcagcagagttaatgggaaaatgaatggaggcagataaagaaacaaacataattctaaatcaaatggtgtatctttctgcatttgagagagctcgttgtatttaagcttttttcatatatgaaatctctattatgtcttgtacatatgttcttcttatttctatgttgtatgattttcactttgtttacagtggtt

SEQ ID NO: 75887 - DNA, 662 bp, Carica papaya
  Intron number 1 from transcript evm.model.supercontig_36.1 3 (locus evm.TU.supercontig_36.13) derived from phytozome v7.0 (chr-ID supercontig_36; pos 131528 to 132189 reverse strand)
ctgatattcaggctgacaattcttcggctattgaggtctgctcttttcttttgttcccattttctgtttgttttatgatttaacttttttgggagctttcccctgttcaagtaaaaacaaggagagagcgaatttaaggactttttatttatttaaatttagtaactgaatctggtctggtagtagagattgtctccagtccaggtggattttgaaccagtgttgtgtatctctggatctgtatctactaactcagctctgtgattctgatggatgccaatatttttcccataaaaatttactttggttatttttggcaattgctttcaccaatcatcactgaaagtgatagaggggccttgttcatctacctaacagcaaaagtacaagttcttcactgatggactccttcggtgcaaaatctaaatggaaaattttctttgagaactgggattttcaaatataataataatttaatctggagttgagcttcttctgttttgtttggtatcataagcactgtttttttttctatggattgttttgctttatcttttgtttttatgtggtgcataatgtttaatattttgatcatcgtctgagctgctgtactgctcctttttgcagttgtcatctgtctggaagtacaaacgtcggttgaa

SEQ ID NO: 75888 - DNA, 729 bp, Carica papaya
  Intron number 1 from transcript evm.model.supercontig_201. 10 (locus evm.TU.supercontig_201.10) derived from phytozom e v7.0 (chr-ID supercontig_201; pos 278167 to 278895)
ccggcctctgcctctccctcgccaggcactcccatgtccatctacttgtttatctgtttttttagatgattattgcccgttttgttccaagtcgttctaatttattttgtgtgagtgaaatcgccattccggcgctaggttttttaattatagcttatatttgttgaaaatttctcttgatatttttatttttgctttcttctctttgtttaattgccatgagaagtatattgttgaacaataatttttgtttgtgtttggttgatgatacgaatttctgtttgttattaatcatgatttagtatagtaaataattctgcgtttagagcttttatgcaatgaaaatttattaggaaaaagggaattgaacttatagaagtattgttggcttattttttcccagagaaagatagaaataagattataggcaccaaggaggtgcatcccatatagaaaaagactcatatggagaactacaaagataagtgtcaaatatcatatctgcatcatccaccaagaactaattcctgttcaaagactgagagttccaaccaatgatgggatgcatgcaaaggggtataagagcgaccgaaagctcttccgtttctctatttttaattgacccaaaatagaaacaagaatgagagaatttttttctgattcttggaagtaggtatgctgttcattcccatagttcatccttgatcaaggcactaaccaccctagaag

SEQ ID NO: 75889 - DNA, 319 bp, Carica papaya
  Intron number 1 from transcript evm.model.supercontig_163. 17 (locus evm.TU.supercontig_163.17) derived from phytozom e v7.0 (chr-ID supercontig_163; pos 421695 to 422013 rever se strand)
cgaaacttcacgcttcctgcttccacgagttgaaggtctcagctagtcgtatcgacatgatattcctatgttttttcttctcgaattctcagctatttctttcttgctttatttgcggatttttttttttttctgagataaaagctttatttgcggatgatcgtgacataattattattttgattagagcattaaactgcttcgttcaattgccaaatccagcagttgactggcttgattatgtagtgattaaagtaaaattccataatgtgatcgactttggattttgtaatgcagactgcggtggtattgcttggaa

SEQ ID NO: 75890 - DNA, 307 bp, Carica papaya
  Intron number 1 from transcript evm.model.supercontig_1066 .1 (locus evm.TU.supercontig_1066.1) derived from phytozom e v7.0 (chr-ID supercontig_1066; pos 12404 to 12710)
aaagtaattataaaccttccccctcacgctctctcatatgtattgttctgttgttatatgattactatctatataacatctaattaatgaatgtatgagtttctaatcaaaataaaattacttaagttctgagaaaactcttctccttcaaccctcttggtttctcttcatttgtatgtatgcatatgtgtgtgtgtgtgtgtgtgtgtgtgagggaatatttatatattgactaatgaactatttttcctttgtttggggactggaatttttttcaggagctacaccaaagtcagttcttgagctc

SEQ ID NO: 75891 - DNA, 510 bp, Carica papaya
  Intron number 2 from transcript evm.model.supercontig_108. 27 (locus evm.TU.supercontig_108.27) derived from phytozom e v7.0 (chr-ID supercontig_108; pos 296413 to 296922)
tataagtaagttttctcatctatatgttacatgtattccgtgtaagtaagttttctcatctatatgttacatgtattacgtgcaagagaatcttattagtttgaatacaaaaacacgaagattaatggctgttctttctgaataaatctattatctatattctaatatgcatgtttggtagacgtggatcttgcagttccagatagagctgcaagcaggattcaaactccataactcgttacagtattatgtgaaattgattttgatgtgtcataacagcagtttaaatatataaaaaaataatttaatttattactcaatcaaaattattgatactaattaatttaattttgagaatatctctcaatggaattttcttagaccaggaaacttttatctgaaattatttagcttaattaggttttaatttccatttaaatgcttagaaggaattcttgctatttacaagagaatgaaaaacatatgctgttttcctttttaacagaaccg

SEQ ID NO: 75892 - DNA, 920 bp, Carica papaya
  Intron number 1 from transcript evm.model.supercontig_20.1 38 (locus evm.TU.supercontig_20.138) derived from phytozom e v7.0 (chr-ID supercontig_20; pos 1517611 to 1518530 reve rse strand)
cttggctggtaagccaaaattagatggtttgaatttgccaaatagagtgaataaccaagaaaacgggtcaaaatcaatcaaaattttttaaaaatagtaaaaaaacctatctgcgtaccaatctcaaatgacgagattagatttttttttttaatttttttgaactttttatttacgttgtaattagtgataaatttgatatgtttaatattctatataaataatttttaattttaatttttttttaatttaattattttacatgtatacttttttgaaaccttgttataattaagagactactaacttacatcaattactattgtcctagtctatagaaatttgttagatttctgactggtagagctttaagaatataattgtgaggaaatttcttagttccaatatatatatatatatatagtctccgttgagtatgaactgacttctagaaacattttagcatcaattagaatcttccctgattatttttttaattaattctaagcatatgcattaactctaatttaattacttatttattttcaatcatgtgtctataccctgaacccagctcagttcttccctatggttgacccccctggtttattcactgcgacaaacctagtttgtagcttaagtctttttaaggaataaattataaagattaacaaactttgtttgaactgaattactttaatgatcgagacccatctttctttttcacaaagttatcttcatattaaatcaaatggaagaattatttatttatttattttttgtataatttagaatgttgatagatctagtatatgtatatggagaagaactgaagtttgctggttaaatttagtgttctaattaaaaatattattgtgattgcagggtgtgggggaccatagctttgtcactagtattta

SEQ ID NO: 75893 - DNA, 843 bp, Carica papaya
  Intron number 1 from transcript evm.model.supercontig_56.1 (locus evm.TU.supercontig_56.1) derived from phytozome v7 .0 (chr-ID supercontig_56; pos 125762 to 126604 reverse st rand)
gctgatcgaggtaatctctactgtattctgatacactctgctgcagggaatcggaacttagtattaaatattttctttggccttttcctgttacagattgtttatatggatttcttcattttttgttctcacccaaaataaaaaagaaactttgacacgtgttcttggtaaagattatttttggaaactttattttattgaagtaattatctgggttgcctatgtaatttttttttagaatactgatcagattttactagaggtttggaaggaaatcttaaattggggagtatggtttttattttaatcaatgaatttttctttattatataattcattcagttgtttgaagagagttgcagaaagcagagtaagtgtgaatatgtaggtgaggcagatgagttaaagatacaaatacgaactaatcaaatggttgaactgcatttatacaactcttattgtacttgaagtatcttagtggacactcataaagctaatccataaacctattggtaaggtttagcattgtggttgcttgtgcttggagcaatttggggaactgttacattggaattattctgttttgctttttgtggggaaaataggaataatacaggtgtatgtcacttagctttaacaggtaagcttccttttggtgcacaagggttttggatctgatcggatcagattgaaatccatctcgacatgtctgtctttgtgatttgtagcctagtgatagaaactagtcagaataatatcaaagcgaagcagcatccccttactatcaaagcctactagtcatgaacattgaaattattggattgtatgtgatgattcagggat

SEQ ID NO: 75894 - DNA, 646 bp, Carica papaya
  Intron number 2 from transcript evm.model.supercontig_49.1 41 (locus evm.TU.supercontig_49.141) derived from phytozom e v7.0 (chr-ID supercontig_49; pos 1061366 to 1062011)
ttaccaggtaccttatataccaacttacgatcttcatttctaacatttaggattttgtttttagttttacctaaaaaaagtattctcgactcaatttttaatacacttaaaatgatttttaaagtaaatccttccacgtagcattgtgaatttataattttatttttaaaacattactaacgagaattgaactaaaatcgaattgattaaaataatgagtgtatatctataaaattatattttctaaaaaattttattctttaccatattttgtaaaaaaaattttaaaaagtttaatcaataattgttatttcctcattatcaaaatgtgattgtttaattagcaactgtgtgtctaaaaaattttcagtgttataatatttatgtaaattaaatataattttgatagaagtaaactttaaacttaatataatatatatatatatatatatataataggagaaataaaaaaatatatatattattttatgagtacaaataatagcttgatgaagtgacgaataaatttgaaaatattggtagactttcctttgaaatatacatatatttaacatttgattcttattgttggctgctggtaactaaggattggtgaatgtttttattaaggtcaagtgcacatctg

SEQ ID NO: 75895 - DNA, 927 bp, Carica papaya
  Intron number 1 from transcript evm.model.supercontig_59.1 30 (locus evm.TU.supercontig_59.130) derived from phytozom e v7.0 (chr-ID supercontig_59; pos 1217823 to 1218749)
ttctggccggagatctccactagcgtccccatcatgtattctctctctctctctctctctctctctctctctctctctctctctctcttttcgtcttatcatcttctgaattttgatggttatctcctagaaagtgtcttttgatctgtttggttcggtagggagaagttaaaccttgaaactttctgtatctagtgccgttttgtcctcgttaaagacgagtaatttcgatactggactttattgaatagggtgcgaaaaagatttgaatttttgggttttaagcttcgaaatgtgagtccacgccgatacttgattagtttgtaatgtttagtgaaagatggagcttgttgtggttgtgcttttgaatgtcggggaggtgaaatgtgaaatggtgttattcttcatgtaataactagctcttattggaggattcagatcatccaaagaactttttggtacttccagctatctctgatagttagtacatgaagaatccagtgttataattttatctgcttttggatttctagtttcctatggtttgaagttgaaatgtttgcagtaaaaatggatgcacgatctggccagtgcactcctgaaattaaaagtttctattaggttgaggagtacatttcttcctcctatctgtgtttctttttcatttgattccacttgtatcttcttcttcttcttgttctttttcttttttggttttgggggcagcatattttttgtttcagttcatttatatttaattttttactataaaatttgatgtacttgtcatttcatgcatataaatttgccagacctcaaaatttctcctattttaatgtggcccggctatttgagatctgatattaagatgtaaagttacctcacttaatcaatttattttacttttgtgattcagagaaagtttat

SEQ ID NO: 75896 - DNA, 926 bp, Carica papaya
  Intron number 1 from transcript evm.model.supercontig_15.1 0 (locus evm.TU.supercontig_15.10) derived from phytozome v7.0 (chr-ID supercontig_15; pos 254422 to 255347)
cgggtctctggtggtactagcaatcatcttcttcggtgagtgattgatttttctatcagaattttgtttggatctggttgtactaggctgttacttgtttctgagaaaaatgtagtagatctctccatacagtttgaagatctgtttctgctcggaaatcgatgcatgcatattctagttgatctccgagattgttgcgttttcatttaatagatttggtagtaatatcagatcgttaaattttttgagatcttagagctggaacagtgttctgattcgtttgaatatcacatttgttttactagaatggttctgaaattgttcgagaaatgtattcgtttcgtttggtaaagtttcttgtcacaaattgagttgaaatgaatgaatctggattttgaaatctatgcttaacgctgtctgccattggtgaaggatattagtttctaaggaagtaaatcgagcatggtgctattatgcatagccgtaggctttttccatgaacttggtggttttattaattgtagtatggtttctcttcgaaaattattgtaggcacagttttgatttttatcctttcagtacagcgtgagggtttcatctatctgcgtactggtagcttcaaaatggacttacgcaagctaattataaaagataattacggctatgtccataactggaatagccagatttgacattttgaagttattaagcgttttctaacttgagaaagcactgaaagtttgtctgtatttcaaatttgtttaatacacatgattaatttaccgctgtctgaaatgggcttgccaaagaaacttatttatcataaaaaagtggccgtggtgtttctttatttcgtgtggggtagataatacgcatttcattttcagaatgtttccttattggtattggttgaattctgtaacagg

SEQ ID NO: 75897 - DNA, 259 bp, Carica papaya
  Intron number 2 from transcript evm.model.supercontig_14.6 1 (locus evm.TU.supercontig_14.61) derived from phytozome v7.0 (chr-ID supercontig_14; pos 648638 to 648896)
agttcttatccgaaactaaggtttctctatcactttgattttgatggctttccacgaaaatgagaaaccaaaaagaaaaggaattgcaaatttcttagttttcttgttgtttgcttttagagttaagcaaccttatagcagccagggctgcctttcttttctttttattatttgtcgctcttcctatttattttgctgagtatcttttttaatcgatttcttagacaaggagaagaggggaagaccaaaagacgcgaag

SEQ ID NO: 75898 - DNA, 820 bp, Carica papaya
  Intron number 2 from transcript evm.model.supercontig_123. 54 (locus evm.TU.supercontig_123.54) derived from phytozom e v7.0 (chr-ID supercontig_123; pos 710024 to 710843)
ataatcgcgttactagattgtaagtcttcctcctcttcctttctggatccggatccttttccttggaatccctcttgtttcttgtttgatgaaaatccattttctgtaaaacgaaatccactctcgctcttaaaattttattttacttgacccgaacaacaataaacgaattcgcgggtgtcggcttcattatgcgctttctttccagcaaaaaattaattgcaacttttttaattcctccactgttgtgcgctttgcatctctcgaatccttcgatccgaatacaacaaaccgaaatgatgcttgcttctatattgggaacaatctctgttttccattttttaaatttgcaatatcgaattctaacttcactctttaagtgaatattcgtcctagaaagagttagctagtttggaatgatggatggagtttgagcgcactgtttcaatttttttacttatttcctgagctcaaatttaatttttcttatttcagatcaaattttcaatattttgaattgaaatgagcggatttttgaattaattccatagaaattataaggtgaaggggaatgaggaatttgtttctccttgatcttcgaaatgttcgtttaaccttttctttcgctcaactttctctttgaacatcaagtaataaataaccagacgaattatgttttcgaaattgaaattgggaaaatcttgattattttttgtttttattttggggaaattaacagctattttattgaaggaattgataattactgaggtttatacgtacagagaccttggaaacgcaaatctgtcgggcagtttgg

SEQ ID NO: 75899 - DNA, 730 bp, Carica papaya
  Intron number 2 from transcript evm.model.supercontig_46.3 9 (locus evm.TU.supercontig_46.39) derived from phytozome v7.0 (chr-ID supercontig_46; pos 335834 to 336563)
caattggtaagctttacatttgcttatttattagtttgtttcttttagtactctgtggcccccccgccactgccccccgatgttgttatgcactcagtttgcctctagaatgtaacaactgaacttcattcctcttgccaaaattgttctttgtagtgtgttttacttacgactaatctagaggatttcccttttttattattttttgctggtttagaagaagattatggtcctctgttcagtgagaattttgtgatacattgttgaataaaaaactttatcatttatactgtctggctcttattcaccgtgtctatagggctgtctaatctatgtgatacagagtgggggatgtattttgaattcttcactcaactggtatgtaagaaatttttctgttatccatgttataaaaaaaccacaaagctgccatgagcaacaatgtgctggatgacatcgcatctataatttcttggaacatttgtttgctcaaatcaattttttggcaactggacttatgatattactcttgttgtgatctttttcagactatttaaatgaacctgctattttttcctttatataatttagaaaggtggacctctgtaaaagtcatttgctttttattttttcttctttatctttctatttttaggactggtgtttccactaccttgatctttttcttgatttctgtcagcttacaattacgcacccatctgtaggtcac

SEQ ID NO: 75900 - DNA, 290 bp, Carica papaya
  Intron number 1 from transcript evm.model.supercontig_52.1 05 (locus evm.TU.supercontig_52.105) derived from phytozom e v7.0 (chr-ID supercontig_52; pos 876776 to 877065 revers e strand)
accctcgtttacagcccaatccttgacttggacaggtaacagaacctcttcttctctgcaccttcacacaccatttaccggcaaaccttgaatgtctttgattggcatgttaagttcttttaatggcttgtttctgggaaaagcagagttggctcttattacttgtgcaattttcctggaatttgcattagaaacagttgcataggaaggcctgtaagtgccttttatatactcgtttaatgcttattcatttttttttttggtgcgcctcggttattattttgcgacag

SEQ ID NO: 75901 - DNA, 591 bp, Carica papaya
  Intron number 1 from transcript evm.model.supercontig_20.5 5 (locus evm.TU.supercontig_20.55) derived from phytozome v7.0 (chr-ID supercontig_20; pos 605459 to 606049)
ctttgtatttccttgtgtgatatttggctttctaatagcccatatattctcttttcgttgctttttttgttctttttaaaattatggaattgtgaaactggtaagacattattggccttgcatctggctcggtttagagattgagacattagaaaaaggatttgcagaaattgtgtttattaaattcgtaatatcctatcttgctcctatgtttatcataatgatttgggtcattaaggagaacctaacagtctctaaaagttaaagtactcaaaaacttgtacagaattttttccctgcttctatttctcaattaccatcttacacagtttacaataagatagaaataaattgcccctagaaaacaagtgatataattgaacactgacataaatgaatatttaaaatttgatgaagaaatagactgaattacgtcttggatggacttgtatttgcagcattactccccctcaaactggtgcttgtctggaattttcttttattatttttttaagttctttattagcatttgattaacttccttcttagcatttagttcaagtaaattgcaggtcaacatcagaagcattg

SEQ ID NO: 75902 - DNA, 516 bp, Carica papaya
  Intron number 1 from transcript evm.model.supercontig_277. 14 (locus evm.TU.supercontig_277.14) derived from phytozom e v7.0 (chr-ID supercontig_277; pos 62029 to 62544)
agtataacgtacgtacattatatatatataaatatatattgttccttaaaagaaaaattcatgtcatgtctctggttttggaattttcttctgggatccaatgttgctggaaatatcttttctgggtttgttttgatttgatctgattccttattggataacttaaaaattgtttctttctttgatttttaaggctttgcaattttcttcttggagttttctgtttttgttctgtaaattttcagtttctctttctgtttccatttgggattttttttttctcacgcatctttcgggtaattcttgattgtttgtattctttgatattatccaaatcctccatgaaaaacaaaaatatgaaacgcccttgtcttcttccaaaatgttctgtttctaaatctatctccttccctaatttgacttttataaatatatatgtatatagttgaactgtatagcatgtgattttgtttatgttgggtggcatcttccaatcattacagatatttgtgaagg

SEQ ID NO: 75903 - DNA, 495 bp, Carica papaya
  Intron number 2 from transcript evm.model.supercontig_477. 1 (locus evm.TU.supercontig_477.1) derived from phytozome v7.0 (chr-ID supercontig_477; pos 20727 to 21221 reverse s trand)
ttaagtcatcacttggtcctgttgggctcgataaggtatcatgtttatgctagcaatggactactttattgcactgaaggaaactaattttgttatttctcattaactgttacctttttcctccagtttcttttagccgatatctccattttttttttcttcttttgttaatattttactactttattccttataagaaggcaaaatctggaacactatagcttcaatgaacttctcggcatttgagaagtttgatttgttccaactgcaattaacatttataaagtggtaaaaggaacttactggggctatgtctttgtcctaggcgcatactttttctttcaatcatatactcgccaaaaagttcaaaaatttttttattaagatttactctggaaaattggagatccatcttattaatgttgccatttttgcttgctttctctatctactctacatatctaacctgaaattttttacatttcttgatttcag

SEQ ID NO: 75904 - DNA, 490 bp, Carica papaya
  Intron number 2 from transcript evm.model.supercontig_513. 5 (locus evm.TU.supercontig_513.5) derived from phytozome v7.0 (chr-ID supercontig_513; pos 24920 to 25409)
ctctgtcgaagctctcccggcaggaactcaagcaggtacttgaacactttgaaaactcggtcatttttaggctattggttgattttctactttcacttttagtatttgttttggccaactgaactatgactttgatcgattttcatattaatttagtatatatgttgagtcaatatgtttagtttttaggagcaatgtctctttacttttggtttgttgattaataatcaataaagttgtttttggactaaatctgcttgtgtgcttcggtttttttccacctaaacatgtgtattcactgttcagtaacctgattagccgtatcatggagatctaattgtactgtttctgagttctgattctctctctttttagtaggattttttcgctatagcacatgattggttatgattggttaaactcatgcttttcatgtttttcttcttttcatctaggtttgggcgattgcagattctaagaggcaggggtt

SEQ ID NO: 75905 - DNA, 491 bp, Carica papaya
  Intron number 1 from transcript evm.model.supercontig_49.1 63 (locus evm.TU.supercontig_49.163) derived from phytozom e v7.0 (chr-ID supercontig_49; pos 1403436 to 1403926 reve rse strand)
tctcaacattcagccttcagagcttaaattcccatgtaagtttcttttcacttatgagtctgccgataactctggttctctgaaaaaaaattgtagggaaattgaaagtttgggaggctattagatgctttgcctgtggctacaggaggatcatatcaaacaaatcagcatatttatgttgcaagctgctctattctataagagtcttgacttaccaaaattttgtgtttaggaagaatagtaggggtagaaatatctattatttggcgatttgttttactagagaagtgtcgataaatttcattacatcattttggttttatcgattggagcaatgggtgtataaattttatgcttttaaatctactagtcttctttttgcatttctagtttgttgatcaaagtctcctgattttcacttttcctttatgatttttctttctggattctttggtttgtgacgataaagttgaattgaggaagcaaagctc

SEQ ID NO: 75906 - DNA, 1066 bp, Carica papaya
  Intron number 2 from transcript evm.model.supercontig_52.1 11 (locus evm.TU.supercontig_52.111) derived from phytozom e v7.0 (chr-ID supercontig_52; pos 923336 to 924401)
tttctccgtcggaagagttcgacgacatcgttaaggtacttcttctttcccgtataaaccatatatatatatttgtgtgtgtaaatgcgaaatattcttttgtgcattgatgttatatggtggaagacggtgggtgaaaagaccaaagatctgtgcttttttctgtgtgttcaatccctgctgtgattacgcttacagagttttgtcctttttttaccacttatgtttgcagagaataagtagtatagagacgggagcctttgtctttttccaataaaatctttttatttccataatgattttcaaaaatgaagtactgcccatttatcaactaaagcagctgattgttttcattgataaaattcagacctttacatatatgtgtatatatatatatatatgaaaatgggaaccaatcagaaacatatattaaatattaaaagaaagtgtaaataaagagcagcttgttagctaggctatggcggcttttgttatactttaatctattttacttttctttttgtgggtaatgtgagttaagtgtcaaaattttcttttttaagttcctagacgccgaaagagaaatcactctctgaacttgaattagctgtatataatactatatatatatatatgtaatggtcatttcatgtgttgattgatttgatgctttaagagttttgatgtgatcactgaccctagtttacttaaacttcaacctcacgccacccaatctctcatgcatatacatacatacatatatatatatatatatgtttttctttgtgattgacaacttgtcttccattttaagctcacatatgggctgttcaaagtttcaaacttttgttctacacttttatgtgcctccgaaatgtcacactcacatgttacatatatatatatatatatatattggatgattataaattaaactcttttaacttgaacacgataatgaaaataatttgatctttcgctattgaattccttggttttttttttttttttacttgtaattgatcctgcagtatttccgtacccacaacactatacaaccgctctt

SEQ ID NO: 75907 - DNA, 747 bp, Carica papaya
  Intron number 1 from transcript evm.model.supercontig_29.7 0 (locus evm.TU.supercontig_29.70) derived from phytozome v7.0 (chr-ID supercontig_29; pos 586331 to 587077)
aacactcccaggttcgttctcttctatttctaaattttcaaacccagaaatcttacaaagaaccaaaaaatcagtaactggatgtttcctaggtccttgattttgcaaaaccttaaaacagagtttctgagatttgtccttcatcgttgtcatgctttttcttcttccttttcggttttctctcttgttacagtgcgcttgcgacgtttgatttcctttcagagtcatctcctcttttcttttcaactcaaattgtaatttcaacaattatgctcctcattagtcattcctttctttctctcaagttcgattttgaatctgggtatctcagaacatgttgcgtcatctcttttttcctttgtggagataattcttaataaacacgagcttttttttaatgaatttttcagttattgactttttaaaaagattttatttctattgccatggaattttcactaattaacgcagatttctttcaaacatgaaattttcactaattaatgaaaaattttaattcataatcatcgactaattaatttaatttctctagtcttaattttctaattattttttaagaaaataaagatttcttttaccttcccctgttaatcgccctcaagacttttcaaaaacgaagaaatattttccaaattttgttccagagaatactcgctccaaacttttgaactttggaaataaaattctgacttgacctttcattgttttacagagtcgtgattgaca

SEQ ID NO: 75908 - DNA, 576 bp, Carica papaya
  Intron number 1 from transcript evm.model.supercontig_139. 58 (locus evm.TU.supercontig_139.58) derived from phytozom e v7.0 (chr-ID supercontig_139; pos 407143 to 407718 rever se strand)
tcctgcttcttatccttctattacgtctccaatcggttagggttttccgctttcttttaattatcgagaagatagacctgatgctttctttttctttaaatttctagggattgtttgagtttaattctattcatgctaatgtgatttatagcagcctctgctcaatgattttggtagttggttatggactttctttcttcgtggttgattttgacgtttggatgcgtatgtaaatgttagccgggttcttttaattgatgattttctgcggctgtagctataagggaaggattcttaacttggtgaattggatttcttcttcatgatattccacatttccgttagtccggtcatttatactgaagattagacagcaatttttgtatgacactggaagcagaaatttgcgttcattcttttgttaatttctaagtttaatcaattaaattcagtttcttatttttttaataatttttcttagttgtaattgcttgtgaagagaaagtcgaaagaattatgatgatcctattgatggtttgcatgtaatacatgtcattttgtattccagagagtttg

SEQ ID NO: 75909 - DNA, 368 bp, Carica papaya
  Intron number 2 from transcript evm.model.supercontig_37.7 1 (locus evm.TU.supercontig_37.71) derived from phytozome v7.0 (chr-ID supercontig_37; pos 535093 to 535460)
gttactagtaagttaatccttcactgatttctgcattagtctgcgttttgtttatttgcttgcttttctttttggttcttttttgtaggctttacgttttattgctgagggttatgttttagtgaaggtaattggatgctggattgaaagaattaggtcaaattaggcttagcagttgtgttgagtttgacttaatcctcattatcttcctttactcagtttatagaatgtgagaagatgagatcttaccgatacatccaagaaaattaatctattaaattggctgatttttagttggcatgttgttttctgaaatttgtggcctcttgacagtgattgtaggagagattgccaattttatagcatac

SEQ ID NO: 75910 - DNA, 989 bp, Carica papaya
  Intron number 1 from transcript evm.model.supercontig_165. 21 (locus evm.TU.supercontig_165.21) derived from phytozom e v7.0 (chr-ID supercontig_165; pos 130954 to 131942)
aagaatctacaggagaggaaggagaggtgtgttatgcctgtctaataacataacaactgatttttcattctgagacacgaaacaatactgtagcactaaccaatgtgctgcttgatgaactacattttgactatgaaagaccaagcactttctctgtttgtgaatggcaccccccgtattcatgtttctgtttactcattggctcactagtcaaacttctatataacaagcagatgtcaatatatatggagtactttaagcattattagatggaatttcttttctagatgcagtaatgtggcaggtcattcaactagcattctcggtgatgagaatctactgaatgcaattaatgtagaattttcttgcataaaagcctaccttattttggagtttattataaagaatttaaagtgagggtatcattatgaatacttcaacatatttaggaatctaatcctttagtttttatagattatttcttacttcttagctctgtgtgtgtttatttcgtggtcctcaatacaatcatgtgtttctatttagtccccccttatgtatcctgctgcttgttcgtgatttcctgttgaatgaacatcttcaaaagccatttttgacaaccttaggaaccttcgtggtcatctgcgccatgcaaagacttaatgattagaatgccatgtatgcaagggttttcttattgtcctttcttagcaggcctaatcattcgtgttttctgagggttcaacttaggttttccatttctgctttactatagtcaggtctgcagcatagaactttagttttatggtcagctcacaacatgcttggttggttggtgagggtattacttcgtttcagtttctggtcaaataaatcatgagcaagttcaaatataaaatcattaaagtagagtttgatttggagttgagaatttcatttttcactttaaaaatgaaacaggcgaattatattggagaaaaagttggctg

SEQ ID NO: 75911 - DNA, 649 bp, Carica papaya
  Intron number 1 from transcript evm.model.supercontig_196. 2 (locus evm.TU.supercontig_196.2) derived from phytozome v7.0 (chr-ID supercontig_196; pos 27744 to 28392)
tcgtttgctgctttcgttgacgttagttggacttcccccttcgcttgtttttcttttttcaaaacagaatttttatatgtgtatacgtggatgtatgacacaggactggcttctctcttttctttttggatttagtattggttggagacaaaaaacgaagggattgaaaatgttgattactagggttttttcttccaatgtcctcaatgttagttcctctggcaatttgatttttttcttctaaaaggtttactttttttttttcgtattatcgtgttttggattaaaaagatatgattttgattacgtataactatactttgtagcaatgtagctaaaggtaactgcaattagtgcgtggaattgttcaaaattgcttttcttttttcctgggtaattgtcccttattcgtgaactatatttgcactttgagctacataatgcaaatggggatataaaacttaaaatttagaatgcaaaaacttggttgtctaacctagtaaaccagcatctaacttaaaatacccaattaagctacttgtttttcttttataattggttaaccatggaattttttctgggaagaatgattgctttattggtttttctgtatgtaaatgtttatttttctgttcagggtggattgtga

SEQ ID NO: 75912 - DNA, 503 bp, Carica papaya
  Intron number 1 from transcript evm.model.supercontig_2.38 1 (locus evm.TU.supercontig_2.381) derived from phytozome v7.0 (chr-ID supercontig_2; pos 4204526 to 4205028 reverse strand)
ggtcagttagcaacctcctttctttgtgttttcttgtttccttttcttttattcatagttctaaataagtggcgtttgatttattccaacgaaggaatttggttttcctggtttcatgtggttttttgctgaggagaaatgaaaagaaaaaactgttagtgattaatgcgtcggtaaatgactgtgtaaagattaaccggaagagattttgggtttctcaggtaaagatacaagatctggacctttcaacgttttgatgttcacttttggttcttaattaatcataaggaagaactgttgggtgccaagaaaaaaaattcggcgaagatagtatttcaagaaaaagtttcagccaagatagcttcagcttaaaataagtttcaataattgttataagatgtatggcttcactgatattgtggtaacattcaggcgtcatgtgatttttggtgatatttgattgttttgcggaattatttgtaggaggtgggctgggactgttc

SEQ ID NO: 75913 - DNA, 678 bp, Carica papaya
  Intron number 1 from transcript evm.model.supercontig_58.5 9 (locus evm.TU.supercontig_58.59) derived from phytozome v7.0 (chr-ID supercontig_58; pos 645231 to 645908)
aaaaatgtacttcaacttccttttgtgtctcaattgttaaatgcttgtatttacttactaccgccttctttccttgtatctaaagctacttgaacaaccagatgcattcagtaaattttaatttattggtttttacataagtctttcatctttctattgaaaacgatgaaggcaaaattgtttcccagattctccaattcctccaatttactagaaaagactaaatttattggaatggcctatccatttatattggttccgaatctggatcatattttgatttttttgtgcaagggagtaatgtttctttccttaatcttaaaatatattacgattagatttctctattattttttcttttcgttatatgagtttggttctggctcttgttagttatttcttttgtatggcttggagaatattttgtgagttttgacaatttgtttcattgggttcgccatgcaaaagcactttttctatgcccccactgttctctttttttgaccatttgagaaggattcttgttggtaccttcttttgtctttcatgcaattacatatcagtttataaaaagttttaagtctgcatgagatgcatataggatattttgatgccttaaatcttctttcatggtttttaacagattgcttctgaaggtctcaaacatagagtgtttga

SEQ ID NO: 75914 - DNA, 515 bp, Carica papaya
  Intron number 1 from transcript evm.model.supercontig_34.1 80 (locus evm.TU.supercontig_34.180) derived from phytozom e v7.0 (chr-ID supercontig_34; pos 1612373 to 1612887 reve rse strand)
tcttttcatccctctcgagatcagattcgagccaggtattttactagagaatttgaagtttcagtttctgtttgtttgccgagaaaaatggaccaaacagaatgaatcggaaaattttgtttctatttttgttcccgctctaggtagatgttgttattattcgtatacaatttccttagttgacattagttgaagaaaaagcgtagtggtaattaattgattgtctgtttggttccctcatagtctgttgaattgtgaatatgattcgattgtttcggttaagtcaagttgagttctagttcattttcctgttgtttttctaattttttttgggggtaaattacgtattagtagtttgttataactaaaatcggatagttgcgaaatatgcaactcggcaactcggttttcatttgatacatattcatctcgtctcagtctaatccattaagagattttaatgacggattagattgttttgtattcaataagagtgtttctgttccagttctgtg

SEQ ID NO: 75915 - DNA, 523 bp, Carica papaya
  Intron number 1 from transcript evm.model.supercontig_2.42 (locus evm.TU.supercontig_2.42) derived from phytozome v7 .0 (chr-ID supercontig_2; pos 779333 to 779855 reverse str and)
gctttgatcttcgagtaagtactcgtaattttcatttaatttcttctttctttccagaattttatgagaggggaaaaaaagttttgatcttttatattttctcattattatctgttttggttaattagaaatcaggaagtttcgagagtgattatcatcatcactgtttttttccaaagctataataattcttccattaaatctgcatgcattttgaaagcttttcattttctgtatttattattattgtttaaaaatttactgtggctttgcatttttcattacacgcttttcttaaaaaaggaatgaaaagattaatcaactaagctgtctgctagctatgatttattttccctgctggtttgaccttaacaaatttacagaacccatcagttttgctctaccagattttgtttttgacaaacaaaataataatttttcccgttgtaatgcatacatatatgtatatacatatatataaatatatatatatatacaggaagaagcagagacctcagcttac

SEQ ID NO: 75916 - DNA, 767 bp, Carica papaya
  Intron number 1 from transcript evm.model.supercontig_18.1 56 (locus evm.TU.supercontig_18.156) derived from phytozom e v7.0 (chr-ID supercontig_18; pos 1410392 to 1411158)
tagcactaaaagttgaaggtacttatccatatgaaatccttgcacttcttttctttctctttcttccttctgcatgttctaatcctctattttattccatgtataatcagcaaacttagataacgaccccactaaattgggaatcctcatgctagaattctgtgtttattagaagaagtttgtataataatgaagcttttcattgaaatacatcttttaagttcctgaagtgtgacacctcatactgataaatccttatatgttatgtatatacaatttatgatatcttttgaaatttgctgctgataaatggaggcccttaatgtgtcttttgtaatatttctttttgcataattatatatactttactacagtagaaggtgttaaaattcttatactagaaattcaactttttgtgctaaaagttgaatgataataagaacttttttcatactagagttgtagtgaatagaaaagcttgtagtttgataattgacggagggagctatgtcaatgttgttagaacattattagtggaaaagctgaaattaccaaccattaaacatccaaagccatatcgattgcaattgttaaataatgggggtgagttaaatgtatgaaaacaggtgaaggtgccttttaacctaagcaagtaccacgatgaggtagtgtgtaacatgattccaatgcacactagtcatattttattaggtaggccatggcaatttgataggagatatgttcattatggatttgaaaataagttt

SEQ ID NO: 75917 - DNA, 1028 bp, Carica papaya
  Intron number 1 from transcript evm.model.supercontig_35.5 5 (locus evm.TU.supercontig_35.55) derived from phytozome v7.0 (chr-ID supercontig_35; pos 1059422 to 1060449)
agactttatccagttttggttcccggtgaatctttggcagattgttagttcaatgaagcttaagcttcaaggtatgtcgaaggaagaagagttgagtcaggaaacaaggggagaattagatgggattaaatcctttttgaactacagattcctgaaggcaattagttgaagatagaagcctaggttaaaacaggttgaagcggttgatagagatactcaaggcaattattctttttatgtggaaaaaggccaacatatcctgttcagaaaacataaacccttcaaagcccatacaaaagcaaatgtctaatttctcgtacctagcaacatcaatcaataacatattaaatatcttcaggtttcaacttttcacacttgagataaatacacaacaggtttttggtacctggatttcatgatatcgttggaagtttgaaaacagcttttgaaatataaaatttgtgtgacagtggatttggtggtagtaacagtctgtttaaaatgcataactagaacactttttatatatacaactgagagaaaacattgtttgttacagaaaccataagaatacaaattgatgataaaatgattagcacttcaaggcaaaaaaaagacttttcttcaaagaacactactttttctgtagcaaagccactacacagagaaataaaactgtcaaaacataaacggaaataaactgtcaaaactagcaaaaagctaggtcctcttttttcttcagcttcttgtccattacaaaggcatgtagaccaaggctcgaaagcacaccctctaataaaaacttgcaaataccaacaagccaagcaagtggttgtttgatagtaaatttctgtccaatgatgggaggttaactctcatcaaaagtaccctgtctaaccttcctatccattatctcttggtgcttaccatttccaaagaaaagtagctaaaaaactagaattttattcaatgctgttttttatgggaggatgatgacaataaaaggaaatttcatttggtcagttggg

SEQ ID NO: 75918 - DNA, 945 bp, Carica papaya
  Intron number 3 from transcript evm.model.supercontig_58.5 3 (locus evm.TU.supercontig_58.53) derived from phytozome v7.0 (chr-ID supercontig_58; pos 591134 to 592078)
agactgagtgtaagattctatgtcatcttgcttctatgggaaatgcctgtcaagcttacccgcatgacatttacttgtcacttaatgtttttatttgattttgaagtttctcactttatcaatcacttattatttatgtgactcttgtataaactttatgcaatttcttcaagtgaattacctgcgctgcaactattcttagaaatgctgcaacatattagaatcgcgtcttccatgaatcaagtaacttgtaggatctacgaaattagttactgagcattcaactcatgattttcaaccaccagtctagtcaaatttaactttaatattctgctggagggatcttctaatataatatctatgaaagtgatccaagcttcagatcctagtgcttctaggaagtggagttctgatcagccaaaatacacagtagtgcacattgcttggctattaattaggtatgattagcaaatatgctatgtgttacctaagtatggttaacgttactactgagcattttatggtcaaacacttgggaatttaatataatccattcttttctttttaatctgagcggtattgttattaatatctctgagaagcttaagtggttaaattatcagatatatccctctcaagaaaagctggatcttattttattttgatagaagacaataaatatgatttccctcttctttcaagaattgtttaaaagtatttgtttcatatcttcctctggtttgacgagttttcttttttcctttttttttattttttgtggacatatatcatctgctcttcacttagtctctattactgacacatcctcgcaatcgtatcactcacaaatctcatgcttataattaatagtctatttctatacttgtattcgacaatattttcccttgtctgcataggaagaagttgttagaaagattcaatcaa

SEQ ID NO: 75919 - DNA, 636 bp, Carica papaya
  Intron number 3 from transcript evm.model.supercontig_146. 59 (locus evm.TU.supercontig_146.59) derived from phytozom e v7.0 (chr-ID supercontig_146; pos 337420 to 338055)
ataattattattcctaggaattcaacaagcacagagttagttaaacttttcattggttcttaattttctctcgctttcttagaattcatatgtcggatgtgatgttggcaaaaattgtgaatataagcacattttcttaatcttgaaagtaaaattttttagcttttctgagtttgatttcttttatttaaacaacttatttctggatataggtattttgtatgagattgaattgcttctggttcccgtaagcaaattattgcaattgaatatgtgtatgcatgcatatttgtgctttaattccctgcgatcaaatggactggacaagagtctgaaagttgcccaaggcaattatggttttgtctttttagtttacattttcacactgaattgtgtctttctgtttgtctctccaactcccacaaagatgtgcttgaacaaaattttcctatcttttttagtttaaaggtgaaaggtagagaatctagacatattaaaaattcatttcttttgtggtggattcttagcttctctaggttcttgcaacctgatttaaaacttcagatagtcaataaggttttttttattcggttattggcagtttcattcaacttgaccttggtcagctacgagtga

SEQ ID NO: 75920 - DNA, 528 bp, Carica papaya
  Intron number 3 from transcript evm.model.supercontig_26.7 5 (locus evm.TU.supercontig_26.75) derived from phytozome v7.0 (chr-ID supercontig_26; pos 557446 to 557973 reverse strand)
gaaaatacagtgtatcgaagtaagattctgacatttgtgcaccttcatcagcacattttttcatgttgtttctttagcacttagtttccttcaagttctgtttgatcaacagagagcaaaagaaaaatgacccagtaagctcatgcttacatctggagcaagtaatcattagataaagaagttagaaatttcaggttttctatatttctattagagtggtttatagctcgtgggcaacacttttttatgcactccaaacgtaatgtactccaaccaaaattaattttaaaatcactttcattacacacgtatatttttcaaaatcgcttccaaacttgctatatggaatcaacatctatctattctgccaagtatatacatggagctcatgatatcaaaatagatttagactacttttgctttcctgtactttttgtttgcttgaaaatctgtggtctatagtagttcctcttctcaagggtgatctgttctctaaataatttgatgcctatgttcatcagggaaacc

SEQ ID NO: 75921 - DNA, 689 bp, Carica papaya
  Intron number 3 from transcript evm.model.supercontig_104. 105 (locus evm.TU.supercontig_104.105) derived from phytoz ome v7.0 (chr-ID supercontig_104; pos 699368 to 700056)
atttgccgaaagtaagctggctgttataacaacatttgctattttatgtactacatttatgtgtacagtcctttatgttgtcaaatttaatgagttttttttttggggtttcttctgtatttcctttcgtacggttgatttgttggtttgatctttttatttgagatatttgtgtatggggcttcacttagcttctcatgctactgtagtgcgagagaggtcatacaggctccctagattgattttccattcttagaattttcagctgggatcagtttcttgccgctgaattgggattggttgaacattcgcagattttgatttgttaacttatatcaaattcttatgttgggactatatgttgaacccacttttgctgcaaaaatatgtaacagcgggcatcatagtccctatattgattgccattctttactttgtcagctgttatcttctacttgcagttgattttcgtgggtggtacattttgtataatgattaaatattgagattgttgtgtgcatagcaatatcctaaaactgttatctcgtattaaatatttagattttagtgtgcctagcaagaaagaaatctgttttttgataattcttacaaattttatttgtttgccaatgctagatttactgaatgttcttttttggtttatgtttgtaacttgttctttttgctag

SEQ ID NO: 75922 - DNA, 328 bp, Carica papaya
  Intron number 2 from transcript evm.model.supercontig_108. 71 (locus evm.TU.supercontig_108.71) derived from phytozom e v7.0 (chr-ID supercontig_108; pos 822929 to 823256)
atcagatacaagtgagtttttgtagaacttgattctcgaattattcctttttgtaattgctaagttccgattccgtttctttgattttttcttttgtttttcttgaaatattcttttgtttttcttgaaatattctttgatcttttcttcaatatctccagatatggtaaatggcgagtactgaggatatattaataaattattgtttctttatttagtttgagattgtattgttcttttgagcagtaagccactatcacggaatttttctcttgaattctaaagattgtgtcgtcttcttgtgatttaagaggtttgaaggattcgg

SEQ ID NO: 75923 - DNA, 908 bp, Carica papaya
  Intron number 2 from transcript evm.model.supercontig_6.38 4 (locus evm.TU.supercontig_6.384) derived from phytozome v7.0 (chr-ID supercontig_6; pos 2937651 to 2938558 reverse strand)
acaaaaagccaatcgatcacaaagtagcagaagaggttagaaatgatctttaaatagtttaagatatctctccaacgacaatcacagcaccataatctttcaaaattaggatatgattctgatagaggcatttctctccacagcattctaatattccatgagagattctttttaaaatacaaagatttgttaagataagggaagaaaaatacaataaaaggagggtaaggcaatcttcggtatattctatcgacaggaaatggaagagttgctactaattaagatatgattcttatagagtaacaagaaatattttctggtacaacacagttagagttaggctgcctaaaacttttttggttttatctttagtgcttttagaatgaatgtgaaatggaacagtctctgtctgtccatttgctaaaaattttaaatttggagggatttcaaaaggatgattgtatgttatcctacttggaacttggacagatccattgacttaatttcatatctcaaagctcccatttcaagatagcatgtagtacatgagatgacaaataacaatgaataacaccttcgatggtagatttagcagtaatcttatcaatgctatcacattatcctctattctcattaacagtagcttccttgtctaaatacctctgggagttctatcttttgctgtcttgatttacttctacggaagttcatgattgggctttcacgatctttagctctattgctttgccttcccttaattggattatacttttaacctgcctcttaacttttgctgggtttttgtttaaaacgccaattttaatctatttatataaagaaagttctgaatttgactttctttttaatgtattattaccatgaacagggacatatagatattgaattaa

SEQ ID NO: 75924 - DNA, 696 bp, Carica papaya
  Intron number 1 from transcript evm.model.supercontig_6.38 4 (locus evm.TU.supercontig_6.384) derived from phytozome v7.0 (chr-ID supercontig_6; pos 2938568 to 2939263 reverse strand)
ccgagagaagaattcaggtaatgtttttgttgcagcactattgaaaattttgaattatttaagcgatatttttttgggtgtaaactggatttgttgtcacgcaatttgttaattcgaattgattcgaatatgtgcggtgaatgaactgaaattttaggtctttctatggcgtgggtgattcgtgttgtatggtatgatgtggagatggtttgtgcactcttttttgaagtttgctcatctgaaatttactacgccattattggattctctcgatgacgttttgagctccggctatctgtttctggtagttcgtttttgcttccaaatgcatgtgaattttgtgttttaggcaaattcctaattgaagagattttgcatgttgtaaaaaaccagtaaggtatttttgaatgaactgattgtgtgatgtagttagaaaatgaaaaattttcgaactttgcttgcaaattctagctgtccgagcccaattttgcaactaaaaaagatgctaggtagagtaaaaaaccaataagatatttcgttaataaaaattaaatattagtggagcaagaagtatatcaactgagtagagattctccttgcaaagaaagagatgatgaaaaaaattaatatgaaactgctgctcaatctctttgaaaaatagccataagagatattctataaggtccataagtcttg

SEQ ID NO: 75925 - DNA, 899 bp, Carica papaya
  Intron number 1 from transcript evm.model.supercontig_20.2 1 (locus evm.TU.supercontig_20.21) derived from phytozome v7.0 (chr-ID supercontig_20; pos 138964 to 139862 reverse strand)
tttacgatttctccgagattcgcagggagattcaggtacttcatttcaaacaggagatttgatgatttcgaattgcgcttacattttaatggagtagggtttactggtgtggttgttaaactagtgaaaggcatgacttcttgtagctttcactttgagttgaggtatatcatacttctcattgcgtattgtttttgggatttttcctcatcatgatccatgactcgattgtacctgaggaattttcatgcggaagtttggcttaaggaagaagcgaataaaatatagaaatgctatccccatggatagattctttgctctagtttctgctagtataacttgctatattgcctttttcactgggttgatgaatgctttgtatcttgcttacgtgctacccagggatgatgtgtagatagcactttggggattggtaagggaatgtgagaagaagctttttttttaattgttgttgaataatgttggtcaggggtatccctggtttgcatttcatctggaacataacagagaaatattagaggaggcaggtttagatcggttttttaatttaagtcgtttttttaatttaagtattcccgtattataaactgtaatcctcttcctcgcaatatgcatatggtgaaaatattaaataaacaaatatttcttctcgcaacaaatgtctgcttaaaatatccaaaaatctcattttatcctccattttgaacttaaagcaaaaagtggtcgaacttttacatcagggtttgcatcagttgcatttagtgtaatactagagtagttttttataatgtcaatttcatatttctcctgttattttccggaattaattgaacttgcatttaggctgagacaaatagggaagcaggagaaaacaaagg

SEQ ID NO: 75926 - DNA, 996 bp, Carica papaya
  Intron number 3 from transcript evm.model.supercontig_59.2 0 (locus evm.TU.supercontig_59.20) derived from phytozome v7.0 (chr-ID supercontig_59; pos 204941 to 205936)
ctgccagtttgaaaggtaactgaataagacttttactttccttaaatattgttgctagtgatgctttttggtataataagcttatattaaatgttggctttttttagcgtttgtgattccagtcctgcttatgggcttaacacatctgttactatctgcatcatagcttcaaggattcttgtatcaattttatctcaaatatttgagcttaataagcatcctatataattatgtcacttccacttcctttggacagagagtcctttttggcctcattatgaatcaaggcttgtttattaaatgctacctccggctatgtaaatgatttcatgctctgactgcaaaatatttcctattttttgtgagaagcgaagatttcttatgtttatcagtgttatatgttagatatctctatactgtggagcagggccgtgaaccctcttttggaatatttctttgaattttttctttttcttaagtttcttaatagattttcatggattttttggctctcacttgttttggtttctgtttttaccttaggaatcatattaaatttttagcaaattctttagtaatgatgtatggggaaaaaccatctttgacataaggagttcttgttgctgtgcagattgttaatagttaaattaatagcaatcatttaccccttcctcttattgttacttttaaaccccggaagcatctctaagttctcatcatgaggttgtttgcttcttgcttcttcatctgtctccagttactgatatttagcacccatttcaagaatatatccgtggaaaatttttaaattggagaagatggcaagaaaaaatttaattaaataatttgtttgttgaactttctgtcttcttgtaatccttgttgggttatttgttgagcttgtggttttcttgtaattcttgttgggttattttcattttaagaaaagttgcttcatccacttcttcagctgtagaagagtggcgaagaaggaag

SEQ ID NO: 75927 - DNA, 745 bp, Carica papaya
  Intron number 1 from transcript evm.model.supercontig_142. 40 (locus evm.TU.supercontig_142.40) derived from phytozom e v7.0 (chr-ID supercontig_142; pos 447623 to 448367)
tcaatcactaccgagcagagtggcccctgaagcaggtcttactcagtattttctccattcacaatgaaacccttaatgtttggacgtaagattctttttcgtaagcatctgatctttcaatattctgatgcttatattgcatgtttgcattgaattgtgctatgactactgctggtttccttggtaaatattattaacctactaaaatgaaaaatattcttgttaacatgattttgtttggatattctttcttctgaactgcactgtggtatttggtttctgaggaaggcactgtgaataaatcagtatattttattttctagctgttcttcttcgccaacgacttagttttcgtacatccaatgcatgtcccactagcattatataaatttttgcattctagcatatccaagaagtcaaggcaaccaagtaaatcagactagtcccgctgtcttgagcattctaattttagaaaaaagaaaatctttttgttttaaattttcatcgacaaaatgtgagcttgataattctttctttgctcttttatgccctctttttgcagtcattactttttttaatactattgtcttgtatactatttggattgcaagttgttgcatagttttgataatatgtatttcaagaaagaaaaatagagcaaaacaatgttggtctaattattgctcttaaacttctgaattttctttcaggcatttgattgggttcttccttttcctctttctta

SEQ ID NO: 75928 - DNA, 664 bp, Carica papaya
  Intron number 1 from transcript evm.model.supercontig_136. 37 (locus evm.TU.supercontig_136.37) derived from phytozom e v7.0 (chr-ID supercontig_136; pos 552047 to 552710 rever se strand)
cttcctcttttactcccattcgagctcaacaggttatgtgtctttcagttatttattttattttcaaaaaataattttgatttctattcgaagcttgagatggaatttcatctcttaaatgttttgcaattattcggccagaagatcattattgtgaaaagtatgatttgatttattgaatttcattgtaaacattggattttacttgtgcatttgtttggtagttggtgcttttttttttttttgttaaagagataaggagttattttgagataaaatttcttctgattagaagcttattctatgctctacgtaacgtgcctgattgattggaggattagttccttgttttttttttttaatttgctgtatgtgttcaatttccgttagttcactgcttaataaaaatggctccgcttcttgtctgcacgaggatggccttctttgtttatggtttaattgaaaaaacacgcgttgctttttatttgagctaaaaattattggagattgctctatatgtggaaatgagccatcccaaatatgctattacctgaagttatatcctcatatactttttaattgattcttcattgtacattaaaaaaaagttgagttacatattttttggagctaatcgggctattctgaactcctctccagtcgg

SEQ ID NO: 75929 - DNA, 732 bp, Carica papaya
  Intron number 3 from transcript evm.model.supercontig_199. 3 (locus evm.TU.supercontig_199.3) derived from phytozome v7.0 (chr-ID supercontig_199; pos 25190 to 25921)
gctggagtgatcaagatttttgcaggaagaaaaaggtttgggttctctcttacttttaatatacataattaacgttatgtatgtatgtaatatatatatatatatatgtatatatttgtatgtttatgaactccttgatatataatatgaggtgggtatttttgtaaattaatgtttggttatgtcagcatatatgtaatatatttggccttattcttccattaaaaatatggagatagaagtcaactgtcttttcttttgaaatgtcttattataaacattgtcaatatctccatatcttttctgccttggatcatgtatctggacttatttttgaccattcactgtatgttctcgctaattgagttcttcataagaaaaatacacatgtaacctttatttatttacattttcagatgctatttttaatatggacttgagttttgcagctttaaattttttaagactgaaaatttaattttttacattttcaatttagggtttgaattcctatcatcaaaagcatttcaaagtgaagttatactaactcaaacgcaatatgttgtattctaattatgcatattaagatttatataaaagctaaaactagtaattgactaagaaatggaccaaacacagagagtagtatctgatggggtttactgacctttaatcttccgattcatacttccaaacataacatctctgctttctctggttcacagctctggt

SEQ ID NO: 75930 - DNA, 625 bp, Carica papaya
  Intron number 1 from transcript evm.model.supercontig_11.6 (locus evm.TU.supercontig_11.6) derived from phytozome v7 .0 (chr-ID supercontig_11; pos 73311 to 73935 reverse stra nd)
cttagctccatctcggtccttcctcctcacacaaggtttggtttctctgtcacttactcgttgcttggcgctatgagaagatgcagcaaacttttcaatgaatttgattctgaaagctttgctgtttagggcattttaactccactgcctctaattcaactttttctggtctagttgatgatagttttgctgttttcccctaaattttctgttaattttggtctattacgattatgtttctcggcatcctaattgaatgattgagttctgctatttatttttgcatgttttggttgtgatgctaaagagatcaaactccattggtaatcaaataattataacttattcttcatcttataaatcatcatgttaaatattttttgtcgctggaaattaagttcttaatttattataggaaaaaattagtgagatttaagattttcttgtacatacatttgagtcactagatttcgggaagtccaaagtctctctcaatttacatgttagcaaccagagaggaagagtaatgtgagcttgaaatttaattcatgaaaatttcctgttttcttactgacttcactgtttggtttggtcatcataagaagaagatcaagcattccatcaa

SEQ ID NO: 75931 - DNA, 953 bp, Carica papaya
  Intron number 2 from transcript evm.model.supercontig_46.1 46 (locus evm.TU.supercontig_46.146) derived from phytozom e v7.0 (chr-ID supercontig_46; pos 1457203 to 1458155)
gaggactcaaaagattgcaactcattcttctccaggtatgtaatgtgttttctggttttcccaatttgggttttgaagccatgtgttatttcttttttcttggggatcaattggggagttgggtttattagcttggtgttcatagagaagatggtgttcaattgcatttgcttgtttctcctggtaattgtaagtggggctggttgcagaaacatggaattgggttgagataagcatttttttgctggattataatgttcaggactctggagtttaccttgtttattgtccataagcaatgcccttttttttttcttgaaacatcttgcagtgattttcacacattttgtagaaattttggaattctatgtaggaatcgattaatattgggagcaatcaaataatgccatatgatcactacataaagttattagatttctatgaaagtttagaaagtttatttttttttttagataaatgaaagtttaaaaagttaccatggagacatggtgacttcaagacactactaaattttccgtggtttggtgcttttgaaagagaacttatgtgaaatatcatgtgcttttgctagcttttctatatccggttaaatttttttgattcggtcatattctcctcatgaaggtaggaccccttctggatcagtttggaacttaagtcgatcacttcatggcacgttcatcctaaaattatttagcattctttagcctgtgtttgctatgattttatcaggccttgtgatattgcaatactttattatttaagatttttttcataaggaatcaagaaggtgccaacaggaaatcagaatatatcactgagactcggagctggcatgaatagtacttgtttaacgctgttgtgctattgaatatttttgcattttctttaacagattcctcacgttattttgtgattggcaggcatttatc

SEQ ID NO: 75932 - DNA, 807 bp, Carica papaya
  Intron number 1 from transcript evm.model.supercontig_179. 9 (locus evm.TU.supercontig_179.9) derived from phytozome v7.0 (chr-ID supercontig_179; pos 68996 to 69802 reverse s trand)
aagagcccaaggtcgacactcacttactcacaaatctccatttctatttattttctttcatctgaaacgttcaattccgttttggtggtttagtttagttgttttttgtttggcttgataagaattgattagttatatatttttcaaactagtgatgctttaactcggtgccgcctttacaactttggtttagcggtcgaattatgttatgctatcatgatttccttaacaagtagcttgtttctggagggtgtgttcttgtgcttcctgatggaagcttacacacatattcttagacagtacagttttgcttcatttgattcagcgctgcttctgaaagttgagattggatgatatgttactgatttgtttctttaaaaaagctttttgattatttctcttgtcagaggagaaactttttttgcttttccttagtttccaatgggttggtttggctggtttttactttctcagatatcatgcctcttctatcatctagaaactttctggtgatacaggaaccccttttatgtggttctcaaaggagaaccatttggcttggagttagttgattggacttatgaaactcattaacagcctccacaaatactttttaacatttgatctgaagttaatagagttttaaaatttattatattgtaggaagaagctttctcttctactatttatgctccaggagggaattatatttttcttggttctgtacatttttccttagcaagggtaagttgttgacagttgatcaaactttatatctcaggaatctattttgttgtggcaaaggaa

SEQ ID NO: 75933 - DNA, 661 bp, Carica papaya
  Intron number 1 from transcript evm.model.supercontig_112. 54 (locus evm.TU.supercontig_112.54) derived from phytozom e v7.0 (chr-ID supercontig_112; pos 448803 to 449463 rever se strand)
ataagcggtccggtgggttttttaactccgcgctggtaagttatcggtgctcaagttatttgggtacttaagcaacgagatgcgtagctaatatgggcttaagttagtcataagaattatgtgattgatgaagctaagtgcccaaattccaacgttgtcgattttcgccattatagtaaactgtcttaacgagaagatataaccattgctgtatcaaatactcatcaaagttacgttgcaataatgggttggacttggtccggttatgtcatccattcctctggtgtacattgacatatgtggaaatgggtatctagtagttttctacctgcaactagtagacaagctaagggctagatcagtatccctttcgcgtgcaattcatttttttttcgttttttttttgtttttcctcagctaggagctgcattctgcggaaccgtttctcatggatggataaattatgttacttgtgtaaatgaagaaagggtctttcttacaaacctgaataataattgaaattgacaaaaagttgggaacttgaaccttttctttcttgatttagaaaaattgttcacttaagatataaggtttttgtatcatggtctttgctttgttatttgcagattgctcttttctatattgctgctcttgcaggtct

SEQ ID NO: 75934 - DNA, 873 bp, Carica papaya
  Intron number 3 from transcript evm.model.supercontig_58.4 7 (locus evm.TU.supercontig_58.47) derived from phytozome v7.0 (chr-ID supercontig_58; pos 526343 to 527215 reverse strand)
gcggctaccaggtgagtaactgtgttttgttttgacttttttggataagtattttagtttaaaattggaattttaatttataaatttgtggatttttgttacttatctaaataaaataattttactttaccctgttctattgtcctaccgaattgatgttgaaataaaataacgaagagaaaagaaaaagaaaaagtaaaagagaacattctgaaaaaataaataaaaaattatattaaataggggattttttttttttagaggttaccacgtagcatgtttagagggaaagagacctcttttataattttattatttaaagaaaaaaaaaaaagcccataagattaggaatgaattaaatattataatttatgtctaattattatatttccactatcaacttgtccataaataattattttaaatgctctcttggtcgccatcttccatgttagtgtattttttgggaaaattgtcttactggaattatgtaactaaatttaattttgatcaactcaaataatttattataatttttttaatcactctatacatacataacaaattattgttatttatttatttttccaattcaaacatcaaataatatagttcaaaattcataaaacttttcaacccaagatgtgataatttgaattcaaactcaaatcacatcaagcaaatgactttgaaattcaaaacaacacgtgtgagggatattgttaattataaaaacagaatttaactttaaacataatcttataattgttttttttttttttaaaaaaaacattgtaatatttgaagttcataaaatgtaatggacgggaatgtaaaattaaaacaggaaacagagattcgagaaggtgagca

SEQ ID NO: 75935 - DNA, 657 bp, Carica papaya
  Intron number 1 from transcript evm.model.supercontig_26.1 39 (locus evm.TU.supercontig_26.139) derived from phytozom e v7.0 (chr-ID supercontig_26; pos 1049897 to 1050553 reve rse strand)
tttgaggttagcttattttgattcaggtttagactattgatttattttatggtcttaatctagttaacgtttacaatacttgaccttccattttcgtgttctatctatgtatatatgtgcacaggtaagatacatatatgtaattatgattgtggttactgccggtatagtgatctcaatgttaatcatttgctaactaccaggagagtggaaggtgatttacttgctgacaggaaggaccataagcagagtaggctcttaggatttaaatttaaaaagctaggagtaacatgcattctttgtttggtgttgatatttggtttggtagctcatctgatgattggttgcattttgctccttagctacttggcactctcatatgtttgtttttggattcaattaatttttcttagcttagtttgtaatatttctttcgtaacctataatttctagtttcctcttcctgataatggttttctggataaggtatgattaactcatgatgattgtgtttttcttgaaaaagctgaaaattcattactaagattatttgtatttggtaatcatgggatttggtgtcagtatggatattttcttaacatgttctcttttgcttgtgtaggttagagctgctgaggttcggaaaatattggtggc

SEQ ID NO: 75936 - DNA, 320 bp, Carica papaya
  Intron number 2 from transcript evm.model.supercontig_1889 .2 (locus evm.TU.supercontig_1889.2) derived from phytozom e v7.0 (chr-ID supercontig_1889; pos 11507 to 11826 revers e strand)
aagcaggtcatttgttggtaggtatgaacacagtagatatgttcatcttctttgaacaggataatttatcctgcctccttccattagattctaattagaggattattcacccacatccaaaaatcatcatcttaaatgaatatcaaacataagattgatcgaaaatcatcctagcacttctttaatggtgctttgaatttgttttgtattaagcacaacagtttctcataattaaatcaataatttagaataaagaatatatatttttttgttcttaccaacataaattttcattcttgatatattttgtagcatatctt

SEQ ID NO: 75937 - DNA, 710 bp, Carica papaya
  Intron number 2 from transcript evm.model.supercontig_14.1 8 (locus evm.TU.supercontig_14.18) derived from phytozome v7.0 (chr-ID supercontig_14; pos 263131 to 263840)
cagaggtaaattaattatttacttttttttgggtatcatcttataattaattattataaatcatcagatattttcaagtagttgatctgggtatgtttagtttttgaaaataacaactgggtcaacagattttggtctctatatcttcattttcatcaaaaaaggaaaattatggcattctgcaattttagtacagaggagctgtaataataggatatgttagtttctaaatatcaatttcagttttcttttagggtgaaaattaaactttgcaagatgaatagagggaaatggcactgaagatgttacatgagatttttatctttcgcccgtctaaaatttcacagcacccatctcaactataggtagaagtagtagtagtagtagatataggtatatatatatgtgtatatatatttctgttgatcattgattaatgattcgtgatccaagattggagatgtctgtcaaaaagtcgttgtatttgataattaactataatttcctttgatcacaaatcttaaatgtcagtgtcagaagcaccatttaaggagcaaaagtttaaatattaattaattaatcataatcatgctatctctcaattctcattttaattactttttataaattaaatcttctttagtggttgatatacagtaagattttgtatctattggtgcagttattggcattgaaaaacaaagattgta

SEQ ID NO: 75938 - DNA, 386 bp, Carica papaya
  Intron number 1 from transcript evm.model.supercontig_138. 19 (locus evm.TU.supercontig_138.19) derived from phytozom e v7.0 (chr-ID supercontig_138; pos 244177 to 244562)
aaatacattgagagaggccacaaggtttgtcttcgttctttttttcctattctctctctctctttttttttttttctttttctgtttggttcccgagaaaattctcagcgagctaccttctgggtcgttcttcaatttcacaaattcacttcgataacattcagctgaggcaggactactttgcattcctatgcgggtcttctacttcaatattaaggtcttaacttgaataatagctcaggaaacagatagtggttgattggggaaaaatcagtaaatgatgtgaaactaaaaagtttttcctgtttgttctcggcaatcaaatggagtgttcagatgttctctcttctcgctgatatcaattattgttagctggttgcagatag

SEQ ID NO: 75939 - DNA, 707 bp, Carica papaya
  Intron number 1 from transcript evm.model.supercontig_104. 84 (locus evm.TU.supercontig_104.84) derived from phytozom e v7.0 (chr-ID supercontig_104; pos 546539 to 547245)
ttcgactgtgttcctcgatactccggccacgttaggtactgagttactattatcggagattcaactgagttccttctaatccttgttatctatttcagcttcgtgttctgcttgctaggttttgagtggttgtggggtttataggaaggtcttaggggagaaaactcaaacccaactggttttacgcacaaattgcttcttgaatccttgattctgtgagtcctgaaatcttggttccttatgtgattaagataccatgttcctgcggatattcttggtgcttctgatttttttaaactttaacgtagaagaaaattctcaatggctttgagtttgcagcaattgcagcccagtctacagtgccattgattctgtttttctttcccgccttgaaatgattttataatattgaaatttgatatgttgttcccagttttatgttttggtttaaagttgaatatttcatgttataattagcatccgttatgtggattgggattatatcttggatgttaatggtaaggggcatatttagagcttcttccctgtgtttcctctacatggctacaagttgtgtgaagctcccctgggtgccagttaccaaatcaatgcaaactattatatttgcagtgctatgcatgattagattatggttttaatttatatgaccagataaagcagagagattggttgctagcgctgctgcc

SEQ ID NO: 75940 - DNA, 488 bp, Carica papaya
  Intron number 1 from transcript evm.model.supercontig_114. 21 (locus evm.TU.supercontig_114.21) derived from phytozom e v7.0 (chr-ID supercontig_114; pos 393930 to 394417)
ctgaagaaatctttactgatccgtctgtcgtcgaggttggttgccttctacccacaatctgtttgataaaatgacgcttctgttacatatgttgttttcctgctcagttgcattatcaatttatcgtggtgacttagaatccatctgggtagtttttgactttgaattttttgttttaaatgcaattttgtaactaaactgatgaaatcaaaattaccttttgacaaaaggaaaagccaaataggtttagcttatagttttagcttcttctaataaaaattcgcacttgaaaccacaaaaagtcatacatttaaagtgataacgttttttacaattatttcagcagtatctttaaacctcactgcatgaattacgagtgcattaaccgatcatttatagtggcattgttgttggagaagatggtgaagttaatttcacattgtattcttcttggttgtggcatttgatcttgatatcttgaatttcag

SEQ ID NO: 75941 - DNA, 462 bp, Carica papaya
  Intron number 1 from transcript evm.model.supercontig_142. 21 (locus evm.TU.supercontig_142.21) derived from phytozom e v7.0 (chr-ID supercontig_142; pos 205205 to 205666)
ctgcaagattggaagccattgcctggattctcagagtcagtagttttttttttttttttttttttttcttgttggttttcttccttgttttagtttatatttacaaattatgatatggttttaatgcagtttttggcatgttgtcaaacacagactagtgaagtctttgaatttcatttttaaacagcttattgattagaatattttctctgccggctttaccttatattttcggatcttgataagggttcattgcaaacacagactagggaagtgtttggatttcattgtcaaacagcttatttgtctatgacttatttcgatcggttcctttcaaggaggtcgattaatgtaagttccctaacagcttttccttttcttcttcaaactgtctcgagattgtatcacgttgtgcttctttttatagatagaatcatcacagaaggtccggttactatcagt

SEQ ID NO: 75942 - DNA, 821 bp, Carica papaya
  Intron number 1 from transcript evm.model.supercontig_11.4 8 (locus evm.TU.supercontig_11.48) derived from phytozome v7.0 (chr-ID supercontig_11; pos 550449 to 551269)
caatctccaacatgtatgtgtctctcccttctgcatctcctctcaggaattactacaggggggaaattccctgctttactggtagctaaagttatctcacaagggcattcagtttcttccatgttctacctacagtcacatactaagaaagttgtacatttctgaatcattaaacatcaaggtcttctttaactgtgaaaaactatcttgagcttttattttctaaatttatataaatgtatgcacaaaaataaatgtcgttgatgaaaataaaaaacaaggtttggaaaataaaaagaaaatattgcatgagtttgaaaagaataaaaggttcttttcaaactcatattctatttcactattatttttaaaattttattttaatttttataactatacatgtttttaatatcatatgtagattttgaaaataaaaacttaaaacaattttctacaagtaaatggaactttctttgtgttaagctggtaatgtcaaacatttctgtcatatgcatgtcttgctattttcaattctttctagaagctttacatgtctaaacaagctaaccaaaagttacctgcataatttatttaatgacttttaagttcaatagacatcaatatatatgatcaacttctaatcaattcaaagaaactgtttgtgcttgataatagtgcgtggcttgatatttagatttgttttgtcttacccttttggtttatgaatagtatagtgcttattattctcataatagttttttttattaatgtatgacaacttttctgcttttgggttttcatgctatgactgcagagcaagg

SEQ ID NO: 75943 - DNA, 793 bp, Carica papaya
  Intron number 2 from transcript evm.model.supercontig_52.1 03 (locus evm.TU.supercontig_52.103) derived from phytozom e v7.0 (chr-ID supercontig_52; pos 860191 to 860983 revers e strand)
gagaagaaaaaacagagcggctatatcccaagaaggttaaagtgattggaatcctcaattaactatgatggtaaaaggaaagaggttaggatggatgaggaattgaatctgttacgtcaatgattggaaagcttgtatcttggaatgttaggagtataaacaaccaatgtaaaagacttgtcctcagaggctgctttcgaaaatggaatccttcagtcgtctgtttgcaggaaaccaaaattgataattacactgagaaagtggtttgaagggttttggggcatcaaaaatttgggatagcatgccatttctgctaagggtttggctggtggtgttcttgtggaatgaagattacgtgaactgcgaggatgtggttaaaggggaatgctcggtctcatatctattcaagaattgtagaggaggacttgattctttttttaaaaaaattgttgaattattaagtttgaagatgctttgtggttttcatagtttcattaatgattgcacattgtgttttggttaagggtcatcctctttatttttatgaggatttaggggagcttttgctatttgtcagatgtacaaacatttttttatacaggttgcacccttggtgttccctaatattaatattatactttttctttcaaataaaaaatgattctgcattgtgcctgggtattgtggaatttttaaatttatatttgccgagtacgatggagctgtactgatgtctcagatactataatgtttattttgttttgttttttgaagtaagcaagagttttataag

SEQ ID NO: 75944 - DNA, 564 bp, Carica papaya
  Intron number 1 from transcript evm.model.supercontig_37.2 0 (locus evm.TU.supercontig_37.20) derived from phytozome v7.0 (chr-ID supercontig_37; pos 151692 to 152255 reverse strand)
cagcttccattcattaccctcgtagtgttcctggagtgagtcacttccttgttcttttctcttgtttgtttcctgagaaaatgtagaacaaaatggataatgataatgctcaaaagggtgtagttggatgcttatttgagtagatttgttttgggttcagtatgagacaccttggggattctgtagtttcttggtatttgtttattatcgtttggatttatctgttttctggaaatcagaggaggaaaaaataaataaaaaataaggatgaaaacagccgttctcaatcgggcacggaagtcagcttgctcaagcaatatctttatatttgtgttggaactccatatgattgtttctttagcttttccattgattcgttgtactattatagccaacttgaagttcgtttggaatgcaatctacttacatgaccatttagttgatctctaaaccataagataaaatgtgtattagttactgttaatttctttatgtgggtttcttatcagtaatttggcgaaaaagtctatatcattttactcaatttgaattgatctgtgacag

SEQ ID NO: 75945 - DNA, 854 bp, Carica papaya
  Intron number 1 from transcript evm.model.supercontig_56.1 05 (locus evm.TU.supercontig_56.105) derived from phytozom e v7.0 (chr-ID supercontig_56; pos 1278871 to 1279724 reve rse strand)
ctgaggaggtcactattgatcatctgactaataaagtaagtcagtggataagataatcgaggagattgtgaaagatgctgcaatttctatcatacaaatgagtcacttggtgatgagtctctcaattcaattgcaagcaatgatgttgttactgttgaaaatgatgatattcttgagaaggcggccctacctgaagatattgaaaaaatttctttcctcctaagagcaatgtgaaaagtttggttattcttccttttatggattttgtcgttcctattctttacgtcttcaaaatccttgatcttggaagcattcatgctttctcattacaatttgaagtcccacaagcttcattattaagaagacaagttctaagttcaatattttttatgtttcaacatttcaaaacttgaagctgagtttttgccaagtggggggagaatgacaccgaacaggaagctccaaaattgatcatattctaataataggacatatgcagcagaaccaatgaaggaacacaaacattttggcaacttagctaaaaggaacaggaagatttgatttgatttatattttttggaaatatttgcaataaaggaaagtaggaaaaattactttcctattttctagatttccaatttcctattttttgatatttatcttttttactatttattaggttttctaaattttctattttgatgtatttggcacctacatataaggttacataatttagttactattttgtatccaattgaatttcgtaaatatcatagttttcttcatgaattttaggaaccaacctcttggatttgtagtttctataattttaagtttgtagtctcaaacca

SEQ ID NO: 75946 - DNA, 751 bp, Carica papaya
  Intron number 2 from transcript evm.model.supercontig_139. 70 (locus evm.TU.supercontig_139.70) derived from phytozom e v7.0 (chr-ID supercontig_139; pos 517858 to 518608 rever se strand)
caggcagtgctcgccatttagagcttgaaaaagaggtacattacttttaattccacccgtaatttcttattgccttagttgttgcttgataattgatgcagtctcttcatgagctttttaaactataagcaaaattctcttaaaatgtagaagtaagcttgttaagatacagtaaattgagtaatttcactagcttattctcttaatagatatggttacaatctatcatttaatatgttatggaagctttcagattctggatttttttcacgggcaattttgcttacatataagataaatgagctctttcttccctgtgtaagctctttttttttgttttttttcttaaaaaaaactagttacaacttattatttaataaatctagcaaaaaatggcattaaataatttcttaccacttattgagctgatcctctatttatacattctggtatagtggtactttgagattgaatgtcaaagttattactaagtcaaatgaagtcaaaatctttcagaagttgtaaaagctcaaagcaagtattgttccacatagaatttctttataatgtttctattatgcttcactatagttcagaagtatcgctgtctttgtcatttgtatatgtttctagcagggaattgaacattttgatgtcaccttccatagtaattatgcatgacacaaatttcggatgcatcttgtattttttggcaggttgttgaaaaagttaaagttgaaatcaagacaat

SEQ ID NO: 75947 - DNA, 1046 bp, Carica papaya
  Intron number 2 from transcript evm.model.supercontig_5.41 (locus evm.TU.supercontig_5.41) derived from phytozome v7 .0 (chr-ID supercontig_5; pos 232108 to 233153)
tcctccaagttttcccattgaatttgtcattatcggtgagtagtctatatttactatatacgtgtaaatatacatatatgtttaaatttacatatatgattagtatatataagagtttatagtgaatgagggttaatgagatataacaaagttacttgtaagttttgtatatgtatgtatataggttgagcatggtgagattataaccctaactcttttcttcaacgtttagttattgttgcttttaagtcgggatgtctctttattgcgttacccaacttttggtggcttaatttatggatacgcaacacttgcatacgtatattttcaccaatattaacattaatattttctcaattattaaaaatatctagatttatttttataaaaagttaacagattaaatttgagttatattattatattaattctttaaattttgatatttaatattttttgttattactattttatttttgatattttctgtttatttaaaatgctcgattttttctcttaattaaaaattaaaagaatttggtgttttggaaaataatttttaaaaatagtttcgattaattaataaatcaatacgataaagatatatgcttaatattattatcaatttattaatatattagttaaattgtttttttaaaattatcttcacctagtataattattttagtattttttaaaaaaaaataaaagatattagaagatgaaattataattaaaaaaatattagaaactaagatatactaatttaataatttactgtttttttttttattaagataaagttgagattcaactggattaaactaaacccgttaatcatttttctgaacctgtattagacagaacgaccatctcagccatctgatatctcttgtataatcatcttaagtcatttaatccagaagttgccttagcgtatatccagaattatgtatttatcttttgcatcctcctcaacactatagctattcaatatataatataatatacatgtacatacatgcaggtgacttgggccaaacaga

SEQ ID NO: 75948 - DNA, 446 bp, Carica papaya
  Intron number 1 from transcript evm.model.supercontig_3.23 2 (locus evm.TU.supercontig_3.232) derived from phytozome v7.0 (chr-ID supercontig_3; pos 1652525 to 1652970)
tagtcgagatagtccctctcgtcgagtccctcatcgtacttactctctttctctttctcgcgaaatttcttgtcatttcttgtttgaggtgtgggaaattagagaaaggaaggagctgaattatttagtttatgttttttctttccaattttccttctcagtggtttgattttgaatttggttactgggaaaatggttcgaaataagtttacttttatatccgcaatttgattaatgaaaccagttagaaatggtggtactcttttttaacataagaaatggtggtacttaggtctgtccgattgaagtttttttcttgcaggactttgttaattaaccagacaatttcctttatcttttcgaacttctttgattaattttttattaataaactgattctaatttggttagcatcggaaagcaagcagttcatttacaaggcgggg

SEQ ID NO: 75949 - DNA, 758 bp, Carica papaya
  Intron number 2 from transcript evm.model.supercontig_112. 29 (locus evm.TU.supercontig_112.29) derived from phytozom e v7.0 (chr-ID supercontig_112; pos 293499 to 294256)
agatctttgaaaacagaagtgcataaacttgcgaagtaagtgtgattctatcttatcaatttcgggaaaatttggagaagaatttcacttaaacagtaattgaatgattccaatggctccttttctctctagtaagacaattcaaaattgatttgaaatgagtggtgcttcctctcttctctgttcatattgtgcagatgcctcttttcttttattttagaatacggttatctcctttgagttcagatatgaaaaaacgacgtcgtaagtcatcattctcccttctgtctctttcctctgctcttctttctcaatcgtattttcttcccaactttccattcccttaatctagtaaacctaatgagtcaaggcccggacagtttattttcttaacatgttatgttttcttttggtaaaaatataacaaataagtatctttatctagatacattactgttatttttctaaattagtacttaaaagtgctttgagaaaattctcaaacacttatgctttgaacatatttatgtagacaaatcgcattattatcgtgaaaccagaaagctttgttttctattgctcagagctagaatatctgctaaatgctgcaagagatctttgatactggtatttgtcatttgagggaagaaaccagatataaatttgtgtcaaattcttttttgtgattttggctttagcaatttctgtcctcatctttaacaggcaaggtattagaatatccataattggggattcat

SEQ ID NO: 75950 - DNA, 571 bp, Carica papaya
  Intron number 1 from transcript evm.model.supercontig_10.6 1 (locus evm.TU.supercontig_10.61) derived from phytozome v7.0 (chr-ID supercontig_10; pos 1005607 to 1006177 revers e strand)
taacaaccatactttcttcgtcggcgaccttatctgtactctctctctctttctctctctctctctaaccaatacgcacttacacacacacacatatctatatgtgtagacatatcagttcaggaataagctcataagtgtatcctattctggtaacaactgaatctgatgagtactggtgaaattatgttctcgttctctcttcttttcaagatccagaacctatatccactttcactctgtacaaacaacatgttgaccacttcgtcacaatcagcaaaattagtaaatgtttacttctatttctgccgccaccttggtgttattttgatttttcaaggatattttatagactaaaaaccctgcgaatggattttaacacgaggatgttgacgaaatcctaattttctcgcattagaatgtagatttcttgctgcatacctagatcttttacttacggacgtttctattacacacatatagctcctgatctgcctatgtatatgtatagctaagctgttcgtttaaaaatttttggttgtagcgtttagataccagaagaatcaataca

SEQ ID NO: 75951 - DNA, 662 bp, Carica papaya
  Intron number 1 from transcript evm.model.supercontig_31.1 1 (locus evm.TU.supercontig_31.11) derived from phytozome v7.0 (chr-ID supercontig_31; pos 318838 to 319499 reverse strand)
cacggctaaagacatcaaagccattctcggatcgggtaatcagtcttgttttttatctattttttttcacggcattgcaaattttaatttcaacaacccataaagtgtaaccaaatcttaagttctattcgagcttcatgttctttgtcatatgtttttgtcctttgtttttcattttggcgctgattttgattaagccttttcgattcagatgtattagaaatttctcttttgttgaagtgctttcgtcatgatatggatggaattaagagattctagttttgttgttttagttctctcttataaggatttggtgtaaatatctttaaattaagttgtaatttatgatttgaagtgtctggcatctgggtgcaatcgtttatttttttggttggaaagtgcgtgctatgttgattttcaagtttctcaatactgaagaataagatgagggtaccctatattttaggaaattgagcggaaattctgtgaacatggtatgctactaagtatttttttggatgaattggtaagtcttatacaggatataacgttttcctatgtctagaggctatgttgaggttggatttctgctgtgagaggggaagccttgcaatgaaaagctaatttactttcgtgttttgcagttggggctgaagctgaag

SEQ ID NO: 75952 - DNA, 1044 bp, Carica papaya
  Intron number 1 from transcript evm.model.supercontig_44.1 26 (locus evm.TU.supercontig_44.126) derived from phytozom e v7.0 (chr-ID supercontig_44; pos 1565708 to 1566751)
tctggagctcagatcaccctggcatcgatttcacagtaagtgcaattccttcctctccatcgagattcgacccaattggcatttgttatttggtttcagtattgaattttttgtttgatcttatttcctcgaggagcttgaggataaatcttgtatctgggttattaaatttgcggattcgcagttaatttagtaattcacgatcggtctttcagattctaaatttgcatttgaatctcattggaatttggtgggtttcagattctaaatttgtactcgcatctcatcgaatccatttagggttttagtttgtgtcgattatctgtatggttgtcaactaaattttcagttagaatttagaaataaaatcgaaatcgttgtttttttacttgaagacattgacgaatatggagaaaacgaatgtcatatcatcctataattgacctcgtattcaacccctttccatcttcctccttgttttatctgcattcgtttgttccttttcttgtgttccttttttttttctctcttggccctttgattaataggaaagtaagatgaagaaaataagaaagaaaataagaaagaaaaagaaaaaggatttgggaacctaatagacttttttatttctgacatttgtaattcttgtatatgggtggcaggcacttggtgactgctaatgtatattctgcttatctcaaaagaaaaaaaaaaagagttgagtgggaaacctcttgatgctatatggagcaattgtgatacgatccaactctaaatatcaggctacaaggagaatctacacttttaagcctattgttaaaatttaagtgtattgttagaatgttcttctcaaggtcctgacagggatagaatgtggttgatgcagcaagattaacagctttaaaacatgtttattggtggatgttatcattatctgcggtttttttttttcttcactaatttttccaggctattcatctattcacttttggtctcggattttatgcaggtgacatctcccgctggtaataccgtgcatacttt

SEQ ID NO: 75953 - DNA, 260 bp, Carica papaya
  Intron number 1 from transcript evm.model.supercontig_42.4 0 (locus evm.TU.supercontig_42.40) derived from phytozome v7.0 (chr-ID supercontig_42; pos 328759 to 329018)
gggttttcctcctgattccgtccttctcctctcaggtattatatacatatatatatatatatgcactttttgattcgtgactaaatatttgaataactgaatgattgttaggttatttattttataaaaagttataaattcgagttgcgttatactcttacgtagaagattatattatgttgtgatgatgaataatatataaatttattcttgaaaaaactgtagaagaggagaccaatccactaaaaactccgaccaaa

SEQ ID NO: 75954 - DNA, 1035 bp, Carica papaya
  Intron number 4 from transcript evm.model.supercontig_26.1 83 (locus evm.TU.supercontig_26.183) derived from phytozom e v7.0 (chr-ID supercontig_26; pos 1319108 to 1320142)
ccaaggggtagtttggaagatcacctttttggtaaattactgttgacttccccagttgctagtcattttcatttcgtattgtagcttgttcccttttgcagttttatttcttttattttaaactgcaagaatttttgctgatctcgctacacattttttggttggaagtttactaccttttcgaaactaatgtctacttggttaacattaatcgtggttggtttcgtttttcctgcaatgttaggaacaacctaggacaggtttattggatcatttaaataattgcttgagcatgtgacatggatatacattgatccatatcggatagtagatgagaagttgaaaagtacagataactgctggactgttttgcactaagctctatagctatgttgggagagactccaaaaccaacagattttatgcttttatgcagacagataagtaaatggattatcagtaataaatggaatgctctcactagtttgggtacgggcattcctcttcatgtagcccccaccttgcccttgattgaaatataattgttctgaagaacaaattggtctttatggcttgattttggaatttaatttatttctagctactttataggcattaccaatcttgtcctactaccatgatagcaatgtactccgaaaataatgattacaatccagaactcttaaatatgggtgtttaaagtttcttgttctcaactggattgatgagaccccatgtgttgaaatttgatttattgcctgcattgataactttcttctcattttattaaggataggtgagatagttttagtatccaatagtcttagatcttttaacatctatcagcatacttacctatacaagtctgtttctttttgttgaaattccataatgtcctcccttctgcacttgtgctatctggttttatgtttttccctattttaagattatttcaattatataatctgaaatgatcaattttattaaccattgatgttagatcttgaacctggtcaagaagagcctcttagttgg

SEQ ID NO: 75955 - DNA, 682 bp, Carica papaya
  Intron number 1 from transcript evm.model.supercontig_273. 6 (locus evm.TU.supercontig_273.6) derived from phytozome v7.0 (chr-ID supercontig_273; pos 96095 to 96776)
ccttggtcaagcacatcaaggcacctgtccatctcgtaagtcccgccgatcactcatttcggcaactataactttttttacttctttttatctttttaatttttgtgttgataacggaggtttttagatgtttgactttgttttcgtctgtagatctgtcaactatctggttatttgattcccctgtgttgattggcttgtatttattcgcgtcaaatcttttgaatttgaagtaataattaggttagtttttctttttttgttgactctcttggttgttcaagaaaagttttgcggtctacacgtgtcggatttactcatatttcgttagggtgattctgattgttagtttatcctgcgtttggtcgccgggaaaatgcaggaacggcgggcatatgaatatgaataagagaatccggattcgactaatcggtcctccgatttcgtcgcttcccacatttctccttactattttggcagcttttagacaatctagttttaattcttcttgttcaatacaaagaattcagatctttgggctctgttgacttaataatctacccaaatgaattgaactttgccatcaattttttcggtttttcttcatatttttggtttaataatctaaactggtttattgttggtaggtgtggtctctggtgaggagatttgatcagcctca

SEQ ID NO: 75956 - DNA, 869 bp, Carica papaya
  Intron number 1 from transcript evm.model.supercontig_252. 18 (locus evm.TU.supercontig_252.18) derived from phytozom e v7.0 (chr-ID supercontig_252; pos 143354 to 144222 rever se strand)
gcgttttacaggtaatgcactctgtcatttctcttggtcgcgttgatttacggtgttaatggtgttcttttttgcatttccttcgctgtgaaatgcagttcactggaatgcccattttgtctcctgatttgcttcctagtgtcatttaattaatttaatatatgggttttatgtcaatattcttttgacatgcaggaattctaattgaaatggacccttaatatagttaattaatggtgggggggggaggggggggggggaatcaatcttgtaaatttaaatgaaggaaattttttgattgaaggtgctctttttgtggaaagagataatttttttaataaaaaaagcatgaatgtttaaaaaaagttataatttggttaaggagctggtaatatttgtccgcttgttctgatcgtttctcaatttttgatattttatgaaagctttgatttcggtttcttattttgttttgtttttctgattcatttttgtttggcttctatcgcgcaaatgaacccatgagaaattattttggctaatgccaaagtggtagacccttaggaaaggggaagaagaacacgatagtttaggtggaaaaatggaggtagggctcctttttctttactctgaaggtcctatgttctatgcatgcatctacacacacaattgagataaatataagtgtgacagaaaatctgttgatgttaccatgtacctataactcaattcagaagctcccaaacccttctatctgaacctttttgttgcttttttttggttttctctcaatttattcagttaatctgtgaatagttcactcttctcttggggtttgattaagctttctttgctggatgcaggaaaagatc

SEQ ID NO: 75957 - DNA, 676 bp, Carica papaya
  Intron number 1 from transcript evm.model.supercontig_216. 16 (locus evm.TU.supercontig_216.16) derived from phytozom e v7.0 (chr-ID supercontig_216; pos 173467 to 174142 rever se strand)
cagtcaaggaaaccaatacacttatccgcgcagaggcaagcatagaattaaaatggttattgtcgcaaaaacatctgatggcctgattagatgtttatgatgcgtctgatctatttgtgacaacttttgagagccttggcattgatttacatacaagacattggctgtgacttcatgatcaaaagttttcatattaacttactcaatttggcagtgtttcactctatgtcaatttctggattttagcattgttatgtaaccagagaataacttttagatgtgtttttccaaatcggaaggattagaaatatcttgtagaaaaagtataactgttctttgactttttgtcaattggacttttttttaattatttccggaaaataggaaatgtttctcaaaaagtagaagaatttattccaaggaaacaaacttttgcttttccttttttctataatccatctttggaaaatgaatcttgcggtggactcttgatcttagtggggaacatttgcatgttatgctctgtcatctagtgttgttttgcagacatgttgcatgtatgagatttattcatgttcaagaaaactttacatgtggatagcatgctatccctaggcacgcagtttctaatagcagtaaacaattgctttttctaattcttaatggttttttcagg

SEQ ID NO: 75958 - DNA, 568 bp, Carica papaya
  Intron number 2 from transcript evm.model.supercontig_101. 20 (locus evm.TU.supercontig_101.20) derived from phytozom e v7.0 (chr-ID supercontig_101; pos 494095 to 494662 rever se strand)
ggaggtactttattgccgctccagtgtgtaattctctgtagttcattttccatctatattacggttaagccttttttcattcatttgacaacaactgaatttgttatacctagtaggaggggattcaaaagctagaattaatagttccagggcttgtgataacaccagaagaaggtatctaattttgttagatggtcttgtgtctatgttttctatgataagagaaagacggcttcagattttgaaggtcatcctcgtaaaattagaaaggatcttaggaactgctagatatttggcttatcttttaaattttatacttgtgtacttaggtggcacctctgtgacacttgttgtctataatatctcttttttacccaaaaaaaaacacgagaataaaggctcaactgcatcatagtcaatgcaaaatgtagttgaactgatagttatgttgttttgagcaataaacagtttattacacttaattatggtttaattaaaagaacatctctcttatatttgaaacacttttctgcatgtatatactttgaatttgcaattattttgcaga

SEQ ID NO: 75959 - DNA, 810 bp, Carica papaya
  Intron number 1 from transcript evm.model.supercontig_10.2 16 (locus evm.TU.supercontig_10.216) derived from phytozom e v7.0 (chr-ID supercontig_10; pos 2723143 to 2723952 reve rse strand)
ggttcttccttattagtgctagcaagggtatgctctttttttgctctttctgttgattatgaattttgatcatatggtataaatttcgaatttttgtaaaattgtcattgagggtgatcagtttgttatcagcctatttttgaaatttgaattcattcatttagatttttgatcttttttcccctctaggtttttatgttttatcttcaattgtaactaatctgttcgttgtaatttggcattcaattatctatgacttaatttaatactcattgattcaatttttctataatccttaattttggtacagctgtgaatttgaagaaaaaaatattcttttctttaaacagcaatctaatgcgaatgtgttttttcggctacatatttggaaatggtcacatatttttcattagtttctttatatggccatttaccgattattttccgcttactatctgaatttgatcacatatttttcattagtttctttagatggccatttatccattatttttcccggctgtcaatcataaatatggatcgattatcctttcattggttctttgctggtcagtgtgttaattgtaactataaatttcaattcaacatcatagtacaacttgcattttcttaagatactaacttagtcatcactatttatttactgtcttatttggaactggcattttcttttttaaaatttgacttcattatgccaatgttcatcgatggatcttatgcaacattactagtaactaaatttgtaaatattttttgacatctacttgcttaacttcagattctagtcca

SEQ ID NO: 75960 - DNA, 952 bp, Carica papaya
  Intron number 1 from transcript evm.model.supercontig_189. 7 (locus evm.TU.supercontig_189.7) derived from phytozome v7.0 (chr-ID supercontig_189; pos 54551 to 55502)
agttgagggtagcaaccccagagttgcttatctctgtaagttgaagttaccttcatcgtctacatccattaattgataaatatgtctgtaaaggtttatgaacctgcaatttgattatgtgtccacttgattcagagctgacaaactgaacagtttctgacaaattgtgcggattagtggttctctttttttgattctgtttgtctcaactataatgttttgttggtctttatacgggtatcaagggacagctaaggcgtgtggtcttttcttatagtaatatctatttcaatttattttcatttggtatccttggaaacaaagattcaaagggaacttagaagaaatcgtctcgaatattagagttgtagatcatattaaatgctaaactataatttgcatgttaacatgaagaagttaaaagaaaatgactggctgtaccaagggatttgagccacattcttgggcggtacttaagctaaccttgatctgcagttggtgtgatgctcagtatgtagttcttgcgggaaagcattaggcacagtctttatatgtcatgatgtttctttgcctgagggaacaatatgttgcactgtgttcagtcccctgcctagccatgcaggaggaatacttctgcgaggtgatgtagaatttaatcatttgtctgcattggcaactttattaatatggataattttgtactcgattataaatagttgattatctgcattgggatttggttgtttgattatatattttcttgattgtgtcttaattcaatcaatagccaatttgatgccttctttctttttgttctcttattgggattgtctaagcaaacatgtcatcaaataaaatgagatgatttctagtctatttatctcaaatacaattaaggttgtgaatgctgtattcaggtcgcttctacgcatttgaaaaagctcacaggcta

SEQ ID NO: 75961 - DNA, 602 bp, Carica papaya
  Intron number 2 from transcript evm.model.supercontig_255. 6 (locus evm.TU.supercontig_255.6) derived from phytozome v7.0 (chr-ID supercontig_255; pos 184877 to 185478 reverse strand)
attactgttactatttctactactgctactacactgttactactattattgctaatacttctataacaggtactactgttgcagccgccgctgctgttattgctactactattattatttatactactgctcgtgctgctattactactgttactattactactactaatactactattgctactgttgttgttgctgctgctgctactactactatcactactactgcattacatttaacaccaaaaaaatttagtttattttaatagtattattaactatctaacatttcttttcaggtttctttactttaactaattaattaattaaaatgaagaaaaaaaaagtttcgttgtcttattaattcaattgaagaagaatttaaatgtaaaaatcaacctacaaatgagaaaatgataaattagacttgatttatttctgttagaaaaaaatgaagagataagcttgctgaatataataatttgttgaaatatgagaaaaagaagtaagacagactaattgagaaacttaagttttgatttgtgattgatgcttaaagccttcaagtacatgagtatttataagtactactactactataa

SEQ ID NO: 75962 - DNA, 716 bp, Carica papaya
  Intron number 1 from transcript evm.model.supercontig_1337 .3 (locus evm.TU.supercontig_1337.3) derived from phytozom e v7.0 (chr-ID supercontig_1337; pos 17403 to 18118 revers e strand)
ggtacgtgcttagatctaccaactttttctcccgtggttctgtgctagctgttgccaattgccacgaactacgtgatgctattgatgattaattgatccgggttcgatcccctctttctcttactacccacagattatcacattaatgtcactttttaaaaaggaaatgagattatgctgattgtagtttgattagcgcttagatgggaatattcctttccgattgtttggtgttgtgtacctcatttgatttattgcatagttggagcttaactcatcaaagtgatagctctataatgcgcggctatgttttctctgatttcatgtatatggactagtcgcagtagtttctgtatcttcccttcttatttgcagcttgtctctagatattgttttccaatgtccgcttgatctggtttttttcatggtataacatcctcgtttagttatgattttgcaattggttctgctttttatatgttttcttttaatcaatagactgggtctgcttcatatatatattttctgttttcagcctaaccgtgtgttctctgaagaacaaatgaaatgttaaaaactatattttcataccatccagaactgtctgattatgttactttcttggtgatattatgttattgcttagcagttatgttcttgtggtgattaattgagttattgtctggcaatagctggggattggttgcagggcccat

SEQ ID NO: 75963 - DNA, 391 bp, Carica papaya
  Intron number 1 from transcript evm.model.supercontig_4.71 (locus evm.TU.supercontig_4.71) derived from phytozome v7 .0 (chr-ID supercontig_4; pos 1602314 to 1602704 reverse s trand)
agctaaatctggtgatctcggctctccagtttgtacctattttctacctttaaaactttattccttgttaataattttgggtttgcttatggcaaatcacgactctccagtttactgtcaactgatctactgggaaaaacataacatttacttattaaagggagaaagaaaagaaatcaaagcaaaaaaatcatagtagaaactttacttttctactcaatcgagttcctgatgtattggagcaaattggttgattgtattcgggtctgatctgctgaaatttctttgctgagagatttgaagttggaagattatgtgaatttgtgcaagtgatatatcctcttaaattttgatagaggttgaagaaacacccatctctaagcatcgcacc

SEQ ID NO: 75964 - DNA, 527 bp, Carica papaya
  Intron number 1 from transcript evm.model.supercontig_26.2 54 (locus evm.TU.supercontig_26.254) derived from phytozom e v7.0 (chr-ID supercontig_26; pos 1754725 to 1755251 reve rse strand)
ggctcatttccataaactccctactaggtacactcatgctcaaccctagttttttacggtgaactcaaaactagtttggttcatgtcaagagcaaagaaaacaatggaacaagaaatattccatgctatagtttcttgaattgtcagttgagagaattttgacatttacattatattctacttggattttaatttatccaattacttgtataaataatgtgttaatttacgcttattttgtttgtagcttgccagttgcaattatcttgatctcactgtcgttaaatatttctgcctagttaataatcttcttcttctttatttaagtttctgtcaaggaactgttttggacgagattcttttatttcaatccttttctgggtaatgaaatgcaatcattcaaccaaaacatgactggtgactgtcaatattcacaatagtcaaaacggtttggtttcttgaggattttcatgtatggagattcgataagaagccactgagaaaaattctttggggtgaaatttcag

SEQ ID NO: 75965 - DNA, 513 bp, Carica papaya
  Intron number 1 from transcript evm.model.supercontig_142. 57 (locus evm.TU.supercontig_142.57) derived from phytozom e v7.0 (chr-ID supercontig_142; pos 701654 to 702166)
gaggagaaacgccttcaaggtacatgatcacatttgactggtttccgctttttaattgttattcttcaagttgctaatttaatcagtgcttgtttttgctcaataatagtagttcatctgttgccttgtttgcaacactcatcattgtgcttgagtgaaatttatttcaagtcttttgatttgattttgcattgaagaggaaatgttgatgccatggaattagaagtataatagtgaataaggtaaattctgaatttagattatgcaagtttaactgcttaagtttgatcttgattattgagattcaagttgcgtgaatgcggtcaatcttgcgtggatgttctctttatctgaattctgaaattcatcgatatagttttctgttcttttttttttttcacaagatctattttaaataatttttataagttaaacttcatatgagacatctatttagacttaaaatgctttttgtttctgaaatatctgttttctaggtgtgaattactcagt

SEQ ID NO: 75966 - DNA, 743 bp, Carica papaya
  Intron number 2 from transcript evm.model.supercontig_1.41 7 (locus evm.TU.supercontig_1.417) derived from phytozome v7.0 (chr-ID supercontig_1; pos 5150551 to 5151293 reverse strand)
tgcaccaagaggaacatacctctgccattgaggaggtttggtggatcaacattttagttcatagtagctcctacatttgaaatatttttcattggtctgttttctatttttctgtgatgcaaattatgcgatatatagttaagttgcctttcacaaatttcattgacgagtgtactagcagattccaacttgtttctccaatggtagagatgtatgaatcttcattctttctgttacacgcacacatccttgatgcgtttctccactttctctagctttttagttcttttgaggagtttcttgaagcaagggatttttgcataaaatcatattgaagttcccaagttcctgtagtgtatacaattttattttattttttttgaaataatgtagtgtgtacaattataaacacatgcatttgtgaatattaattaaaatcacttaagaatttcagcactgtgttttaattatcaaaatatctgttggaagatctgtcttacttttcctacttggacatggtgatgaagttagaaacacttaaggcatctgcattgtataatttgaaaccctatgactgcctttttcttactgaaaacaatatgttccatggtctgagctttggagacattttgcctgtatttattttataattttaaaggccagtatatgttctagtaggatattttccaatgtcaaatttataaaatttaaaaatgatctgcagcttgttggaatcctgttaa

SEQ ID NO: 75967 - DNA, 611 bp, Carica papaya
  Intron number 1 from transcript evm.model.supercontig_12.1 26 (locus evm.TU.supercontig_12.126) derived from phytozom e v7.0 (chr-ID supercontig_12; pos 1155261 to 1155871 reve rse strand)
ctcctatccatgtaatactttctttccctttatattttctttttgttggactattttgaaatttgaagatgttgaacagtttttgttgaatctggagctagttagtgatttacacggccgttttagatattgaccaggatttttcttgtcattgataccgtgctttagctggaatttgaaggaaaagaaaagaaatttttttattgttttgattttttattttcggggtttctttttctcagtttcttcaagctccgggggaaatttttttttggatttagcttaaatatagttaagttgcctagacaagtataagaaatttcctttatgtgaatatgtatattttctgtttataccaatggttgaggttttggtataatttgcttctaggtggttaaatgtgaactagctgataaagttaaaattggcatctttaggaatagagattaacagatatgacaatggaagcatcaaacttccttaggttagcttttttttctttgctgcttatttgttttctatgaaaaatttatttatctcatagcctaataatgcttttgtatctgcatcttgtagacagagggcataacctatagtggtgcctacgactc

SEQ ID NO: 75968 - DNA, 593 bp, Carica papaya
  Intron number 2 from transcript evm.model.supercontig_12.1 18 (locus evm.TU.supercontig_12.118) derived from phytozom e v7.0 (chr-ID supercontig_12; pos 1045455 to 1046047 reve rse strand)
gaagttgaatttggaggtttctcctcatagagctggtaattataatatctaatatcagtattgttttctgatgagtggtaattaggtcatatctttaatctgattgattgattagtgattagttattgcatttgaaattttgttatttaaattgtttacttaggctatttggaacaaattaatttatttgtaaaacttatattagaaatccacccttaatggatacaaattcattataaaatgataataacttcttaaacaatatcaagtgaaatttaacagatttggaaatgtattgtttcacctctacctgaaattgtctgagagatttttttttttttaatcattttggaagacagttacattaattggaattaaactaagaataattttctaataaattgccaaatgaggtttgttgttccaaacatagccttaaacaaagtttgcggacattcgtatttctatgattccattccctttttgataaaagtgatcagtttgtccgaagctgttggctatgagagggttactattcattttcttatacgaatgtttttttaatggtttatacagtttctgctgtgaggttg

SEQ ID NO: 75969 - DNA, 461 bp, Carica papaya
  Intron number 3 from transcript evm.model.supercontig_26.1 15 (locus evm.TU.supercontig_26.115) derived from phytozom e v7.0 (chr-ID supercontig_26; pos 894245 to 894705 revers e strand)
ggtgcaaaaggtatgctataatttccaagtgctgtcacttcttctcttctcatgtgactaaaattgcaaaataccattgtctcatttatttattaataaccgaagtgttccatggtttgtgttaatttgttatgtcagattaatttcatcagtttctattcccatatatgttttgagattagttggaagcattcttatgagtttccatattgcctgaagttacatagtccttcctcctcccataagaaaaaatgtgctttgttggattttttttaaaagatggtccaaggctgaatgatagttattcatgtaaaaccatgtctttgttttgggcgggaacttgtttaaattttcatgaccttcctagtctctgaagctgcataggctctaattcctgtagttaatagtatcctgttccttttacaggaaaagtgacaagtttggtggctaaaaaagaccag

SEQ ID NO: 75970 - DNA, 603 bp, Carica papaya
  Intron number 2 from transcript evm.model.supercontig_10.2 61 (locus evm.TU.supercontig_10.261) derived from phytozom e v7.0 (chr-ID supercontig_10; pos 3146010 to 3146612)
attggtaatcttcaaagctcctattcattagatttgcatttatgatttcttgcttgatagatttggattgcattctagcttcctttatttcatttccaattactgcaagcaagcagttcttgtttctcttgatgccttaccaattgggatatggattttttttttatgtattagtagtacctctccaggtcatgttaaatgcggattcaataaaaaaaaatttgattttcgactcatcttttgaagtgggtcttttaaagataatagtagcttgaaattgttgaatggtgttcttggaagtagctctcccaggtcatgttaagtgcacattcaatcagtcaagttgattttcgattcattttttgaagtgggtcttttaaaattttaaatataatgatagcttgaaattgttgaatggtgttcttggaataacaaaagctgcaactttgtgcatgtaaatcactataaattggcataaaaataaaatttttataagctaaactttcaccattttgtttacagtcaattatttgagaaattcatgtgtcctagctaaacctttcaccatgcaaatctttttttgcagctatatcctagcttcat

SEQ ID NO: 75971 - DNA, 290 bp, Carica papaya
  Intron number 1 from transcript evm.model.supercontig_16.1 95 (locus evm.TU.supercontig_16.195) derived from phytozom e v7.0 (chr-ID supercontig_16; pos 2856767 to 2857056)
cactcaatactgtatcaacaaaacatgtttcatcgactcagctgtatgaagaaattggtcgtttgagtctcactgaagattaaaaatcacaagcttatatttattttttgaaagaatcaaatatagtgtctagtttcttaagttgtcctcttaaaggtcgcaagaattttctaaagaatttgcttccagaactaggtaataacatatataaaaacttgttaatttgtaatctttgtttttttttatttttctttacttttctttacttttgcaggtatttgaaacggaag

SEQ ID NO: 75972 - DNA, 960 bp, Carica papaya
  Intron number 1 from transcript evm.model.supercontig_295. 4 (locus evm.TU.supercontig_295.4) derived from phytozome v7.0 (chr-ID supercontig_295; pos 119453 to 120412 reverse strand)
tcactacacctccactgatatccccgccaccgctggtctgtaacccatttaccttctccgttctatcgctttagctctgtaccctctccatccagtttaataaattgaagattctaccttttttttttgaagtttaatcgggttgattttgacggagaatggtttgaaatagatagtttacggagttaattcgattttttttttcttttaagacttcattttagttttaatttctaaataatttcgtgttgtggcttgacattcgtcttgatttttgttctgtaaatttcttgtcattcaagtactaaattttagttgttttagttagtgacccagttagctaattcttcaaatttgtttgattcctttatatctttccccttcttatcttaacagttccgaacttcatcatagttttcagttccgtatgctactcactgagtgtgatagtttttttttgttggatggtgcaatatgtttgttcctcattttcaatactgtgaatctagatttcctttatttcttttaattttcgaaatacgggattttcaatggtgatgcaatcccctgaattttgtatttctctctttgaatagattttaagtgatgttcctatgtgactatttttctgtaaagtacaaagtagcttctcgaaatgatgaacctaaggttgcctattgttttggtcttctatgttaatgtcataactggtgtagttgagttcctttttattttgcaaatggactatcagctttttgtaatgcttaaattaatgagaagtggcaaaaaaaatctgtatttgatgaaagtggcaaaaaaatctgtatttgatggtgagtgcgtctcaatagttgagtttcgatcaaaactttttgtggcatatgttttatctcccccctttgaggaattcatcaattgactatttgtattatgtttaactgtatttttgcagaccttatc

SEQ ID NO: 75973 - DNA, 703 bp, Carica papaya
  Intron number 1 from transcript evm.model.supercontig_11.7 3 (locus evm.TU.supercontig_11.73) derived from phytozome v7.0 (chr-ID supercontig_11; pos 744874 to 745576)
tgcctttcggttcttacgagtctagcgataagcaggtgttggtttctgttttcagaaaaattcatagtcattcatccctttcgtataccctactacatatagtttagcgggtaagtttcagttttggaaatgattcggaagataatcaaagcgtgtctctgtcattttctttatgctataaataactaatttacttggcataaacttgaagagtcaacttttctaatacttctacagtgaaaattcttgccatatttcctgaagacatactttattttcttaatttcccattattacttgatatagaagaaaatgtttatgcataagtagtaaattcagctctttcctatataagttttttggttaaagggttacaaagtaaattgtttcatttgatattggtgttattgaagtttagatttcgaactcgagttgtccgtctttagtttctggtagttaaatttaaacacagtatctagattatagtttgcttttgatagttacaattaggggcttgtatacagggggatgtgattttagatagttgatcaaaatctattatttaacaagaaaaatgtttaggcctggatgctgcattagatatttggtttggcagtttaagcatgaaaattttggttggtgatgttgcagtctaaattcatgaacaggcagttgataccgcggtcaaagtcttgaaagaagg

SEQ ID NO: 75974 - DNA, 491 bp, Carica papaya
  Intron number 1 from transcript evm.model.supercontig_51.1 (locus evm.TU.supercontig_51.1) derived from phytozome v7 .0 (chr-ID supercontig_51; pos 5945 to 6435 reverse strand )
gttggaggaagaggagtgtaattaaggagattgggttaaaaaacgggagttataggaaatagaaggaagggcatagattgaaaggttccttatttctatagaaaagtagatatagaaaaagaggcttatagaccatttttagaaataattaattggtgttctatcaagagagaaaagataatagtgttagagagaccatctgaagaggatgggattagacaagcaattttgggaattaaggagcgacaaatctctcggatttactatagaattctctaaagaatgttgaaagattatcaagaagaataccacgaaggtgtccgagaaatttcatttgaattggttaatacgcaagagcataaactctatgtttatcactttgatccccaagaagtccacaaaggtctctaactattgccctataagcttagtgacttgtgtctataaaatcatcaggaaggtcctatctacaagacttggtggggtgttga

SEQ ID NO: 75975 - DNA, 561 bp, Carica papaya
  Intron number 1 from transcript evm.model.supercontig_282. 4 (locus evm.TU.supercontig_282.4) derived from phytozome v7.0 (chr-ID supercontig_282; pos 11400 to 11960)
ataagtggggttgtcatctccccttcttattcaaggtacaaatatgtatatatatatatatactttatttttatttttctcgaatttttggttttatccgagcttccattgtttgctatggcgtttcgggtgattctggtatttattcgagcggaccaagaattgttctgtatgtgaagatacagaaacatatatgtatactacacatatattaattagtttccatttgatttttcgtctggttaatcatgctttattataattcgttttttctttctgggcacttaatagttctgcgtttcattcagttgggtgtgtcctctgctacagctcaactctgttttaaatgatttaattaatattttcttctacaacatacagttggtgggttttaagttttttaatcccctattcatttaataataatattttgaattccattggattcctcccttatttttcttttgattttctaaattcgtttatgggttgcatctgatttccgggatggtgggtatggggataggttctgtcggtggcaaaagcactgtcaatacaggc

SEQ ID NO: 75976 - DNA, 581 bp, Carica papaya
  Intron number 1 from transcript evm.model.supercontig_49.1 8 (locus evm.TU.supercontig_49.18) derived from phytozome v7.0 (chr-ID supercontig_49; pos 84369 to 84949)
gtactgtctctactcgctattgattctacgttttaccttccgcatgattatatacctaatcaccgcaatttgttttttcctctgcaccttctttttctcgagtctgaagactgaaaaacaagtatgtcgtgtgaaattgacctgtgaagccataaactgcaaacatttatatgtttcttctgtaagctacgatggtaggttctctactttatggctatcagacttgatttccatggaggaataattctgaatgaagaaaatttggggttaattggtatattatctgagttgtttgctatttgatttatcactataggcaaaagatcttgttgctagggttattagtgacctcgtattatcaatgttaggttctttgtttgtttgtttgtttttttttttctaaaactttttttctgaatcaagaacgcaatgaatgtaaataaaagttgttggttgacaaattccgtttaccagttatttctggaaaataccccccttggttattagaatttccagagtttcctgatgatgattttaatggcatgccagaattctcagattgaagaaggtaagagtgcaga

SEQ ID NO: 75977 - DNA, 413 bp, Carica papaya
  Intron number 1 from transcript evm.model.supercontig_52.7 9 (locus evm.TU.supercontig_52.79) derived from phytozome v7.0 (chr-ID supercontig_52; pos 711374 to 711786 reverse strand)
ctcaccggtatctcctctctcctcttcatcttctattccgtgcgttttcgttctgtttccatttttcggtttctttacttgcgagttcgcgtatggatcttttgattctggactcaatttaattcttacaattctcgatttggaatttcaaggccgggaagtaattaatgccgttatactagaatgtatctggtttctatggtgtataaattcttcctgctactacgtatgccctctgccattcattgcttaatctgtgaagataaacatgcattacagcttggatttgctttcagtttgtggatttttctatttcataaacatactatttgatttgaagagggatgtgaaagtcaatatccgtattttggaatgcagaagaagagactaatccatacagcattcctagtaag

SEQ ID NO: 75978 - DNA, 1004 bp, Carica papaya
  Intron number 1 from transcript evm.model.supercontig_3.11 3 (locus evm.TU.supercontig_3.113) derived from phytozome v7.0 (chr-ID supercontig_3; pos 895364 to 896367 reverse s trand)
tgatagagggtatcatctattttgcctcagacctattctcgtttctgttcccaaaggctcttggttctgtccttcatgctccaggcacaagaagcctatatgtaatgttcatggattcttctttccttttctgctttctattacaaatgttttctgtggtagttttttctctctctggattacggtaattgttgtaatgatcaattggatgcatatctgtgtatgcttctgtctcatttctttgttatataggttttctcaacatgggatttgtcttgtttaaaacgcttggagtgaatatttggtttacttatagctatcaatttatgggtatgatgcactgggataaccataatctccgaatctgtttttcaattgtatcattaggttttcgggggatttattaggtatctgtttggtggtattttgattgtatcaattatcttaacttatacattcatacacacacacacacacacacatatatatatatatatatgtatatgtctatgtgatatgaatatgatttctgcccgggaaactcactgttaggatttttgaattagatttcgatgttcttgttttctttggatcacccaaatttcccacttgctactttggttgacccaattttccttgattgatttgtatatagatatgatttccactaggaaactcaatgttaaggctgtcgaattatatttgaatgttcttgtttagtttttatcacccaaatttcctaacttgctgctttggttgacccaattttccttgattgatttgtatacgaatatgttttctactgggaaagtcaatgctaggattgttgaattagatttggtgcttttgttttgtttgtatcacccaaatctcctaacttgctactttgcttgacccaattttccttgattgatttgcagctttccctcttgtccaaactaaaattattgatttcttttgcatccaaaggcccatagaaataactcaaaagctgagtcaaggta

SEQ ID NO: 75979 - DNA, 970 bp, Carica papaya
  Intron number 1 from transcript evm.model.supercontig_33.2 00 (locus evm.TU.supercontig_33.200) derived from phytozom e v7.0 (chr-ID supercontig_33; pos 1905372 to 1906341 reve rse strand)
gccggtgctctgtcctccactcagactcagagcgggtaagttaagcttcttcttagtaaatgccttttcttggttaataaattcgtgcaagattgtctaattgtttttaattgatcaattttccatactgattcagttgattgtatatgtttagtctccattgccggtttttgcatttaagttctgagtctgtaatggttatgccgtacagtcgatccatatactgacaattaaatgaaattaattgcagtttcaatttccacccaaattgtgttggcctgaacgagaaattcgtggctggtttcacatgtttttgttttctttcgtcatgtgaatttcacatttctaaaacaaaaacagattcatagaatgcaactttacagctgcatagagatgccagtatttcttaagagaacgcttagaacatcaataaggtgttttgtttggtaaaaacaaaaatttactaaagggaatctacagcaatgaggcagtttaacttcagtaatgggtaaccaatctctccatgatgatataagaatatttccaagtgaaacatctgctgctgtctatttttatgaataaaacatttttgaattactggagagaaaaagaattgtatattaggtatgagaatcttttggagatttgggtcttgttcatgggtgacatgttgtatatgttaaagaatctgtacaaatacaatagagaaaataacaatacaataggaacgatcaaaccatagttgtgttatctacatttcccgcttttggtgcattattgttttttaagggatacaatgaaagtgggactttattttcctaaagctcccttctgcagtgctcttgcttgatcgtcatgttttcactttccagtgcttctgaaaaatttcagtacttgaaagttgttctgacaagttaaatttaatggctaatctttcagcgtcttgaaaagtctggagtcactgaataca

SEQ ID NO: 75980 - DNA, 327 bp, Carica papaya
  Intron number 1 from transcript evm.model.supercontig_55.1 70 (locus evm.TU.supercontig_55.170) derived from phytozom e v7.0 (chr-ID supercontig_55; pos 1034747 to 1035073)
atcataggctcctctttcgtttgcagaaacaggttaatgtcttgtcctccctttggctgccgaaaatctctctttgagtttgattcattactacttttgtcattttatttataagtttttagctgcaaattacatgtttcttgttccactcactttaattttgtgcggttttgtttattgtggaaattaaaaactagagggaaaagaagagacataatattggagtctgtttttgcttcgtgggttgattaaattactgatcgaaattttgtttttgtctattcgcgtgaagaaattcattgagctgttgaggggaggaactgcgga

SEQ ID NO: 75981 - DNA, 619 bp, Carica papaya
  Intron number 3 from transcript evm.model.supercontig_32.1 33 (locus evm.TU.supercontig_32.133) derived from phytozom e v7.0 (chr-ID supercontig_32; pos 1682337 to 1682955 reve rse strand)
ggcaaggatacttgatcattaacagagaggtgagactaggttcttgcttgtgctataatttcttgatttctctttcagatcctggcctgtgccatctgtctgatttgagaatttacaagtttctaggagacatagttggacttattctcttcagaagggaaaatttcttatcatggatcaatatttaattttaaggtgctgcagagtttttcttgctatcaaatattacctttgtgcatgtgatgcttgtctgtaacaagtgctgcaattccttcttttttttgatcaaatcggttaggctgattcatttttcctccatgctctctcccgccatttcattttcctttctatctattaaacccttgatattaaattgttaatgttcaaaatgccagtcaatcatataattgtttaaacttatggtacttaaggttcctacaagcaggatatttggaatgaaaaatatttttatctttgtttgttttgaattgtgtttgagttttctgactgttgattgcattccagattctgctgctcatgaactattgcttgcaatatgaaattcattttgcaattgtcatcagtgtgtaggtgaagatatagaagacctggagtatac

SEQ ID NO: 75982 - DNA, 985 bp, Carica papaya
  Intron number 1 from transcript evm.model.supercontig_164. 4 (locus evm.TU.supercontig_164.4) derived from phytozome v7.0 (chr-ID supercontig_164; pos 90505 to 91489)
gattgcccagggactgtttgttaggtaaaatgacatattaactttaattttctgcccttttcatattaagctttcctttcttactcttttttttttgggtattatttgagtcttaagttttggatacttttacttctcccctaaatattgaaatcatattatgattgtttctttttataatatgatctagtgatcgatactgaattatcttgagcataaagcagtaaccagaattctgtctctggccttcgtttgctcgtataattggtgttgacatgttgtaatattaaatatccttttgtgtgcatcctttggacaaggaaaggaaaacaaacagtttgcatcatgcataaatgattacttgctgctcattttcttgttacttttgttgtctattctgttttgctcaggattaggcaatctttacgtttaactatggccaatagcagtaggtttgctgcagaaccaatgggttctagacctagtttttatatgtccgctgtaggacatttcaaacaggactagaatgatgcctgttctcgtactaggaatgcaggtgttgagtattctgtttagggcagatgtaaatctagatataagctctacttccattgtgatatatatctcacaaatatgttttattctggctgaaagtagccttgagctttttctgttgctggtcaaattaaaaataaataactagcccttaacttgaattgaggtggaggacttattgaatgtacgtctattggctgcaaagcctagagccaaactgtaaaggtttagcctttagaattaatgttttcagttttcttctaagaaattgtatctctccctttctctctatctgattgatctattctaatttctcatttgatcacatggttgtcaatatatgtgatgcaggaatttcaaatggtagcagatggaaggcaaaattgctgcctttgttaatgttcatggtctgttttgttgcagtagtgca

SEQ ID NO: 75983 - DNA, 729 bp, Carica papaya
  Intron number 1 from transcript evm.model.supercontig_135. 14 (locus evm.TU.supercontig_135.14) derived from phytozom e v7.0 (chr-ID supercontig_135; pos 342094 to 342822)
tcagccacgtacagtgtctacctgctgcccttgaagtaagatactttggttcttttggctataatttgattctagtcttttaactaaaatgtctattgccctgcaacttctttcccctcattttaagtgtgtaaaatcatgcacaaacataattctggtcaaggtcccgtttggttcaatttcctcttcaatttatatcttattctcacttaattactagataactgttgatttgtagaattgcatgctaacttcatgaccaaaccacctccaatcttattttaaatttgtggatcttgaatcctacttctttggtagaaaatggaaattcactgctaagagattcaaagtgggagagaaaatgttccagataagatataatctagtcctatatttgaagactcctttagtaagaagtgaaggactaaggtaggaatggaattataattgattcaaacatgcactaaagaaattacttccttaagaaccgaacctgttggagtgggtggacatagcttcttcaatattatttaattctgaaggttccattgttcaggaagaagaaactagatgacgaattgtttcttcatgatttcaagtttttttctttgttctctatctttgtctacccatctatccatttttctatctatgaatctttatcatataaattgttctacttgaatagcgctctaaaatactatgcaacgggcagggtcctggaggcgt

SEQ ID NO: 75984 - DNA, 764 bp, Carica papaya
  Intron number 2 from transcript evm.model.supercontig_2.29 9 (locus evm.TU.supercontig_2.299) derived from phytozome v7.0 (chr-ID supercontig_2; pos 3634558 to 3635321 reverse strand)
cgaggtgattttttctgcgttactgtgagcttgtttttcattctcttcctgctgtcatatattattgtttaattacgttgctttttgtatctttactctgtcacttgttatgggcatgtggaatatgctctattggttctattgatggttttgttttgttttgtcagtaggttacttaaacctctggttttttaactaacttaatcatgggttgcatggggctttacaatgctttcttcttaatgacttcccaggctccaatatgggtttctgaaagaaaatatattcttgtaatctccaagatgttattttatttcttataatttgagatgacttattccaggttctggtaattatatttttctgtttatttgttctgcattgctatttgctgttctttcatgtgggggaatgactcttttcagaggctgtattgccgtctgaataagggaacaatgtaaatgctattgcctttgcatattatgtggcttaactgactcttctttttttgtgactcagtattttagctgtaaggatatttcaaacagtttggtgcattattgaacatttagtgtaatggcatgcttgattttaaagtaacaagagaagtgaaagaaagatctgataagtggttggtagagttctttttcctctttgctttcagagtgagggatccggtgatatttatactttagtattaaatctttgtgtttattcataagaagctgagttgcttcccaaatctcatatacaggtctttccat

SEQ ID NO: 75985 - DNA, 756 bp, Carica papaya
  Intron number 1 from transcript evm.model.supercontig_176. 11 (locus evm.TU.supercontig_176.11) derived from phytozom e v7.0 (chr-ID supercontig_176; pos 196985 to 197740)
tgaacaatacgaatctatactttctaccttggccagtattaatctcactaacagagacgataaattattgtggaatctcaagaaaaacagtctcttctctgtcgactcactgttctgttttttcgatggtcaccatcagcatagttccaagaacctttccttccaaaatcatctggaattttggcgctaccccaaggatttctttctttgcatgggaggcagcaaaggagaagatccttaccttggagaacttgatgaaaagaggtcacacaactgccaacagatgttttttgtgtaaaaatgctttggaatatttcaaccaccttcttttgagttgcccaatcgtgcataaactctggagtatgattcttggattgttgggaacttcttgggttatggctggcaacgtttgtgctgaattaatagcttgggagggtcttggcagcaacaataaatccattagacttattctcctcaccattttttgggtcatttggaaaaaaaagaaacaaaatcatagataactggtttcactactttggttctaacttacttgggggtaatctcgacttttttgaggatcttggtgacattgtagatattctaattgagatgtaaattttgcaaatgggtggtgctccctttgcaccttacatcaatacaacttcacacttttctttcaaaaaaaaatagagacagagatcttttttttttttttttgtaaggaccagagagaaaagtttttggtagagaaag

SEQ ID NO: 75986 - DNA, 430 bp, Carica papaya
  Intron number 1 from transcript evm.model.supercontig_147. 7 (locus evm.TU.supercontig_147.7) derived from phytozome v7.0 (chr-ID supercontig_147; pos 216792 to 217221 reverse strand)
ctctcttgaccctaagaggcataaaggccaggcaggttagctcattgcgctttcgacgtctctctttaattgatttttcaatgcaaatttatagtatgttacttctgaatggataatattttatcgcttgattgatcatgtttctgccgtacgaaattattacggtaacatggtaacttatgattacttgatgttcagtgaatccttgcaatattgagtgttgagatttttttttttgaggaaataattacttggaagaagaacaatgtcaaggaagagaggttttagggtaaatttataactggaagcgaaaggactagctatcttttgtcttttgtttttgtttgtttgttatttttttttctccagagaacgaaaattaaatttctctcctccatacttgaacaggaaaggtagctgttattggtgg

SEQ ID NO: 75987 - DNA, 457 bp, Carica papaya
  Intron number 2 from transcript evm.model.supercontig_21.1 (locus evm.TU.supercontig_21.1) derived from phytozome v7 .0 (chr-ID supercontig_21; pos 3004 to 3460)
gctcttcagagaagtgtatgtttttcctagcactcagggatgttttttgtttcattcctccattttgtggaaatggtgcatactctctgtatctctaagtttctagaataagtataacaataaccactaaacagcttttgaattggtatgttgggaaataaagtctcatttaaatgtaacatgtccaaactagcctatagactgggtaacatgtctaatagtgttatattcctcttgttgccttattccatcatcttctttttgggtatttggtgtcaatcatgggttattttattaagtatgttagttataactgttacttaatggattagcttttggggtattggtttatggaattttaagatgctttggttccatcttctatttgttgagatattgatatgattctgtattctttctagcatctgataaggtgtctgtgagagctacaattatt

SEQ ID NO: 75988 - DNA, 826 bp, Carica papaya
  Intron number 1 from transcript evm.model.supercontig_112. 95 (locus evm.TU.supercontig_112.95) derived from phytozom e v7.0 (chr-ID supercontig_112; pos 729405 to 730230 rever se strand)
ctctcagattcgcccttaatcaagagttagtttctacttattttcttatatttatgcctttatatgcgaaaatcctgagtcacttaatagtgagaagatttattataaaatgatacattagtttgatattgttaaattgttgcttttagggttttttcatcgaactatttctttttgtgcctgcttacttcacaaatatatgcgccgcagtgtttttataaaatatgcataaacatataaatctggaaaattaaaactaaataatatttcaatgtattaaacgaagtttttaagtttttatttagtgggtgactttaatttaggatcaattgttttaaagttttttttttttttttttaaatattttgatttgctatcaatgtctacaccaagggtgttctttttaaaatgtatatggatgtcatgaaaactgtctaaattcctcaagtgatttcattccttctctattgctttaacattttctttaatttgggtaaatgcaggagaaagatcataatgttaataatttgttgtaacatagaacttgaaattgaaacacctacctttctatttccttttcttggttttttgaatgtcttaccctctttgcactgcaccattttgtatttccatctccaaaatttgggcatgagagtactgtactataccttctttgaaatggtatttcgttatttcatcgtcggattttcaatcttttcgatcttcatatcaagaatgagcttgttaacagtattttgacctttaagcacgccactatggaatttttgcagtgcaagagtagaattctgtggatacagtatccctc

SEQ ID NO: 75989 - DNA, 965 bp, Carica papaya
  Intron number 3 from transcript evm.model.supercontig_12.9 4 (locus evm.TU.supercontig_12.94) derived from phytozome v7.0 (chr-ID supercontig_12; pos 817705 to 818669)
tgattattggaaaccttgatactggtaatcatacttatactctgtttggaacatatttaatttctattaatttgcatttcttttcatattttagcattaaccaatccatttttctgtggaaattgaagcaattttttttgtatatttgcatggatttatgggtgattgaaatgatgtctgcacgtttgagcactaacttattgcatgagaaaaaaaaaaagttgactctgattgcaatatattctgccattaagctttacatcatgagaagggtataatattcaagactaaagttcaaagcttttgtagcctaccgtgagtaattgaatgttggatttaggtttgatttctttatttcgagattatcaagattttttttttccgtataactcggagttacttagagttagattgcgggttagacttaaaatttaatttatatagtacgagatatagatatttactagcaaacatgtgttgagttattagttagatttacattatcttgaggctgtggaggttttatgagtttaagaaacagttgattaaattagattttacttcatataatgagatttttctggcagactttttaaatcaaaactcataatttattgacgattacagcttataaactatgtcaattaattaaattataagattattgaacataatcaaatacgttcttggtgagaaatttcaagcccacttaaaaattttcgaaggatttgctatttataatgtaaccatcatttaaagcttacgtacagttttctttttgtctaccattttctgggtatctgaggaacaagtgggattgttttgggattccttatgtgtttcccactatgagtctgtttggcaaaagggaaatgatgaaatttccttttctgtggatcataagtttttcattttgattggttttgttaggcgtctggtcggaatctgaaagctttaaagacgaa

SEQ ID NO: 75990 - DNA, 641 bp, Carica papaya
  Intron number 2 from transcript evm.model.supercontig_19.3 4 (locus evm.TU.supercontig_19.34) derived from phytozome v7.0 (chr-ID supercontig_19; pos 315080 to 315720 reverse strand)
caactcaagatcgttcttactactcatcaccactggtaccctcttatattataactcttttctttaatcctatgctctttttcttttctcttggaccctcaaagttaggtcttcttcgagtttgattgattgttcaagttagttttttggtggagccataatacaactccgtagtttttgtttcttgggttgaattcattgtaaaccctttaggctaatcttaataacagttccgtagcttctcaaattaattgctttttagtttcatgaaagtttgctgtggtttcgctcaatgtttgggataaccgtagcttgttctatgagtttcaaaagtgttgtgaaaatacttatttgctaaaattgctcttagtcaaaatagttatttacttcagcatttttaatcaaaagttattgggtagttagtaaaaataacggtaaaaagtactattttgtctttggcgaacatgactattgagagtttaagtatatttttgggatataaaggccaagactaaaagtccagtcaaatgcatgatcacttggtacccgattaacaacgtcaaagtccttgtttgtgctctatcctttaagaattcaaattggatttaaaaatgaataaatcatcacttatgacagggatc

SEQ ID NO: 75991 - DNA, 501 bp, Carica papaya
  Intron number 1 from transcript evm.model.supercontig_56.9 3 (locus evm.TU.supercontig_56.93) derived from phytozome v7.0 (chr-ID supercontig_56; pos 1186557 to 1187057)
ttagttctgaattgaacctcgccgtgctcaaagaggtaattcaagttccctaaaccctaatttaatgtattcatagttatgaattgaactcgcttttctctgaattacaaatatttgtcttactttcaaaaccaactttaagttcttctgaaggagttttcaatttttacttggaatatagtattgaaacataaaatagtttcaaacgtcagttttaatcttacatatcaaaactaatgaaaattgatagtggcaattaactaggattgaaacatgatttgaaccaaaataggcttctgctttggtgtaacttcatgattgtttatggagtccacatggttgagaatcaagtgaacatgttggaagtaaatttattctcttgttagataaatttattcttgagcaactgcaatgatttaactcttactgctggtatctgtttattggctgaatgtctttgattcaggctaaaatttttcacttcacttcagaagttttgac

SEQ ID NO: 75992 - DNA, 487 bp, Carica papaya
  Intron number 1 from transcript evm.model.supercontig_376. 8 (locus evm.TU.supercontig_376.8) derived from phytozome v7.0 (chr-ID supercontig_376; pos 38879 to 39365 reverse s trand)
atagtggcttgcgtacgcagctatcttgcgccaaggtgcgcatttgcccttttctttcaaatcctgccttttttttttttttttttttttgcttttttatttaaaaaacactcttaacatcaatccagttttctcttcttcttcttcttcttcttcttcactctatttctctgcttaaaataatctttgaaccagcatctcccgtgttgatgtctgtgcggaaaattttgagtttcttttgatcaatttaaaacccaaatccactcgttatattgtcttgtttgtttacccggaaacgtcagaggcattgagaatttagaatttgtttcacttcgctgtcggttctactcttcataatgaaatctcatctgtaaaggcttgaatccggtagtctgtcttttagtacaatctcaaatcttttagtttgagttttgtttcatttgttcatataattgtattgagatgattgaatttgatttccaggttg

SEQ ID NO: 75993 - DNA, 697 bp, Carica papaya
  Intron number 1 from transcript evm.model.supercontig_224. 8 (locus evm.TU.supercontig_224.8) derived from phytozome v7.0 (chr-ID supercontig_224; pos 40420 to 41116)
aattcagtaagtatttgcgaatgtttatgagtttttcttcatttacttatctttaatctatttatggactcattaagagagaactcaacgatcttttaagtaagaaagtactcaaattgataatattcttgatacatgaatctgttcaaattacagccatatgttttattacaacaaaaaagtagtattttttttggaagttattcaaatttctcagaattaggaactatttccttgttttattcttataattattgactacccacaccttatggctcgaatggagtcggagaatttttgatgatcagtatacatcaatgccagagatgtgggacaggcttgctatcttatgggccgaagttcacgggaatttctccaattatacccttagtcagatccgttgtcattgggatacaattttttggtctcccacaggatgacccttttcatttgtgtatttcttttctattatcttttaggctctttttttgatactttgaggaggatatcttattctctgtgattttattaatctctttccatccctaataatattttttgctctaccaaaaaacgaaaaaagaaaaataaacaagcagaaaagtgaggaataaatgtctcctactcttgtgtgatgaatttggatatgttcattttgtcaggtccttcccagggataacggggtgcgttatccttg

SEQ ID NO: 75994 - DNA, 521 bp, Carica papaya
  Intron number 1 from transcript evm.model.supercontig_46.1 62 (locus evm.TU.supercontig_46.162) derived from phytozom e v7.0 (chr-ID supercontig_46; pos 1601836 to 1602356 reve rse strand)
ttccagaggtaattatttatatgtatatatattgattgttctgtttagattttattttttgagttgcatctgctgtcttcaaatgtttattgctgtaaatacgtgtgtactttcttttaccattgtgcctcatttttgctggtttctggttatggaactttgagcgttacattttctggtgctccgactcttgtcaattgagctagtcttttgataatgagattgaatcttagttcaacctgtgattgttatttgtgaatattcgggaagtcaatgggttactgaatatttgaaatttaacccccttgagttgaattaaagctgcatcctggtatagggtaatgggacttctctgttgcattatgaagggtatttctaaagcatatgataattgcgatattgattttacttttctgtctcatctgtacttggagctcacgttaatatatgatcgtaacttatttctcattttttgcttgtgcccagtattgcaggcaaggcaaacttggagaaggcagatt

SEQ ID NO: 75995 - DNA, 914 bp, Carica papaya
  Intron number 1 from transcript evm.model.supercontig_44.2 7 (locus evm.TU.supercontig_44.27) derived from phytozome v7.0 (chr-ID supercontig_44; pos 237244 to 238157 reverse strand)
aggttctttgcatctaaaattttggttcttcttggccattgtggcttttggttaatttctctatcctattttacaagaaatatttcatttatcaacttttagttctacagatttagaaaactacagcctccgttttaatttcggaaatctgcatgaagctttctgacaaagtaaaaacaagactattaggggtaaattaatttggaaattgcagaaaaaattgactgcaaccacatttaaaccaaatttactgagagttcacagttgcattttgctgttagatttcacttgtaccacttacacataaagagtacttcagctggaggctttataaagtcaaagaaatggataagaaacaatgttaattcttctttaatgcttttggggacttgtttttggagttaactttcacttttgatgtagtatgtttctaggttctgctttgctagataattcatggattgagcattgttctaatttcatcatacttatttccttcagcttctctttcacaatatcctcaagttgggcaggttagtgggaaagttttgacacttttggtctgaacaacagtaagtttagattatgggggttgatatttcattcattttggaaggaatatttgacacaatctgagaagctattatttctgtctaaatttgtctaaacatggaatttgaagttgtaaattgcttacagaactctgtaccctttacatccttttgggattctagcaattgacctcatttctccacattatcttctttatgtggttatcatgatttctagatgttgttttgtaactctttcttaatgctcaaattttataaaaacttggtatatcttatgtggagctaagtaagagatcttgatttacaggaagcaagagcattattaggaaggcttgagtatca

SEQ ID NO: 75996 - DNA, 704 bp, Carica papaya
  Intron number 2 from transcript evm.model.supercontig_6.35 (locus evm.TU.supercontig_6.35) derived from phytozome v7 .0 (chr-ID supercontig_6; pos 218915 to 219618 reverse str and)
aactcttgaaggtaaacaattttgttttctccagcatgatgataacaggatgcgcataaagaatagtttagaatgtatgctgacaaaatatcaaagtaaaatcggcaatatattttgtgttgttacttcaaacttctttgtttttctttccattggttcttttattaaactcccttttatctatttgaaccttcttttggggtggggggaggaatttatggagatttcattattttgattacattagtattttcataatcatttggaaatgaaatctgatttctaagtgcgttgaaggacctaatccctcataggaagcatgattgtctcctctgctcaaagaaatcaatgtttttttggtcgggcatggttcttgttcatgtttggaagattcccgtctgttttaatcaatttgatgttttccccttgggatccggagacaattgcaaatgtgtttgaatttcagggtggataaatgtagtatctatagaggtttgtgagtatctatactggtaggtgaatatacgccatttgtcacttttatttcagactttcatcagttacaacactatcacaatcgcattttcagtaattagaattttctgttatgttttgagttcaaaagcagccactttttttaaagctagccttgcacggggtaaatgtttgtacaggcattggattattgtcactcacaaggtatc

SEQ ID NO: 75997 - DNA, 1016 bp, Carica papaya
  Intron number 1 from transcript evm.model.supercontig_46.1 53 (locus evm.TU.supercontig_46.153) derived from phytozom e v7.0 (chr-ID supercontig_46; pos 1528133 to 1529148 reve rse strand)
ggttacgccaaatattggtgcgttcttatccattggtcttgaaatgatttgttattgttgagtgcagatataaaatgaatcttgttcattggttaatgttcaacagaaataatagtcatttaaagctaaccagaaatggatttgttgttaatatggttgtaccatttctgaaatgaaaatataatttatgaaaatgaaagtcgggttcttgagtatctttttactggattgagtctttccgtacagcctgttttgggactagtaggtgttgagtaatgagttcaaataaattgatatcttgtacatttttgccaaacctgatccaacttagtgtggttcagacaggttcatggcttccaaaacttgtaggattactgagggcctaaatttttttatctacagtatgaggagcataatgtgtgttaatatgaaactgggtagttgcaatgagttatgaaatgggaacctcaagctttttattgttggttgcaagatccatatgcattttgaaaccaatgttatcattttaatttttcaccataggaacccactgaaaggacatctgtcttgtcgcttgcaatgattaatttttccaggcatgtatggcatatgcatgcaaatgtaaaaagtatgtacaaaactgttttattttagcatcatatttgttagtaaagaacatattttctccttatttcaattttgtttctcaataatttggatattttgagccaattgcactttgtgtatcatgcatttgatccatgtttcttttcttcttgctggtgaaaactagagatatgtttatcgtaaatctaaaattacatcccctcatacattcaaatcttgaaatgaaggaatacgtattaatgcacaaaatgctgagttgcatacgtaagttaattgtgctcaccactttgttacaacttcatcgaggaaactgattcaaggtgttaacggttggttgaggcttgtttgaataaggcgttgactatttgttgtatgttgaaatcagatcc

SEQ ID NO: 75998 - DNA, 787 bp, Carica papaya
  Intron number 1 from transcript evm.model.supercontig_34.7 2 (locus evm.TU.supercontig_34.72) derived from phytozome v7.0 (chr-ID supercontig_34; pos 647635 to 648421 reverse strand)
agaaggtgaatgaaggaacattttcttctgattatgtttttggttgacattgtgatttattccttattccaaagtattcattttatatataaatacggaaaggcgaagagggtgattttaactttttgaagaacaaaaagtgttgaggtgtggttcatattcaaagagatgtttattcagaagaagtccctaaaatgatgatgttttgtcatcagtcatcttgtcttggcattatggtatttctaggcctaaggaggttttcggttgttagggtatgcttgttctttggttttcttttctttgactatataaaggaaaattcctaacttaagatacagtttctagtggtagaaaatttttgcaggtgtttttgtggagtcagcacatgttaactatgtttcactttaatccatgtgttgtacaggtatgtttttacaaaaaagaataaggattgtttggttatttgaaaaagctgcccaatctttggttatgtgcggactcattatatctaatttgcaagttggtaatagaatttatatgtttgtcttcctggtgatgaagcttatgcactatatcatagttactttgctttctttggtgagagcatttaatatcttgtggcaacttagtaactgggtatttttttaattcgatttatattctcatcagtatacctgttttgtcgaattctgtttgtttggtactgagagttttatgttgtcatggcttgatacatttctatctttctgcaggttgagcgttgcctccgtttgttgaagaagttttc

SEQ ID NO: 75999 - DNA, 639 bp, Carica papaya
  Intron number 2 from transcript evm.model.supercontig_33.1 25 (locus evm.TU.supercontig_33.125) derived from phytozom e v7.0 (chr-ID supercontig_33; pos 1250712 to 1251350 reve rse strand)
ttaggcacagggaggtcagcatacatgaaatttctccttgcttatgtcctttatgttgaaaataacaatatttgaatatttcctccttgctcaatctagttaggtctattttgaagcaagagaaatttcatatatataataagtaataagaatcaaacttttattgggaacagtctttctcattattcagatttgcgagagttacgaatacatcaattattggagtagaaagaaacgcatcagatgcttggcattatgcacatgttcatggtgtccagaatatgtaacagaatttctcttgcaatgcaattgaaacaagcaaaaaggatgtcaccttacagcgtttaatcgttttagcacgttgaaatgggaggaaatttctcatatagtcttttcccatatgaccagtttttaacgtagttaagttcctttatatattctttcccattcttttcataggtttctctatattgattttcagctgaatatttaaagtaatacaatattatgtttgtctattcctcttgatggtattgtagccagagatttactagaatcttgttgtcccgtttatgttaaataagtttaaaaacaaggaataatggtttgcaggtgaaagagcatattagaatatcagta

SEQ ID NO: 76000 - DNA, 816 bp, Carica papaya
  Intron number 1 from transcript evm.model.supercontig_52.9 9 (locus evm.TU.supercontig_52.99) derived from phytozome v7.0 (chr-ID supercontig_52; pos 848312 to 849127 reverse strand)
ctgaaacttttgctaaactgaagaaacaaggcaaagtaagaactttactctcctctctctcgcattagactgcgctcaatctctgagtgcgttttctctcttatgaaatgggttgccattttctgatcgttttggcatttgggtagatagctacaaaaaacgtgcggcttacttcgttagagaattatatttcagcccctttttgcattggttgttataaattttaatctatttgatatgggtcgattttttagctggtaaaattaatgcccatgacgaggtgaaatgtggagacttgtcttgagtgctgtaatctttacattagccgtttctttgtgagtttagggtggtgactagtctattctaagggtttgtaataaatgtttcagatgtttgaatttacaaaatggatgcaggttttgcgagcacataatcaaacggcaaaatcagtccaaagagttaaattcatatcaattttcatctgggattttgatttgtttgattttctgtttgcaacagcaaatcatggttgcactgtcgtttggagttgaatggaccagtttcttcactagtttgtattctagcttttatcacatggaactgtatagggcttataccatgaagattaattataatccctcttgattatagagtttataggaaaggagcagttatttttcatacttgacatgtagaaaggggtttagacatctaatgatttgatgaacactgattcttttgtggattatggcttgatattggaagtaaaatttataatgctgctttctatgctgatgatcatacctctgtttgaag

SEQ ID NO: 76001 - DNA, 1049 bp, Carica papaya
  Intron number 2 from transcript evm.model.supercontig_5.35 4 (locus evm.TU.supercontig_5.354) derived from phytozome v7.0 (chr-ID supercontig_5; pos 3282620 to 3283668)
gatcggtttctgtactcacgtccgttgccggtaagcttatcgtcaacgttaagctgatgggaaaatagattagctggataattatattctcgggattgaagtcattaattattttttgactatcaagtaactatattttgactttttaaattagtatgaaaatgatttgagtacttcaaattgctgaaagaaaatttaggattttgtttcaatctctcttggcacagtttgtttattaaaatttttaagttgagtttaaaaaattaaaaataatcatttcattcttttattttttataataaatttatttaaatactctacattcattctaaataattaacaacatgtataataatatcaataatatatacatttttctttttattatcgacactttactcaaacgtgtctaattatttattttcaaataagtcgaaatattagagatttctttaaatattaaacactataaatacagttattgcttttgatttgataaaaaaaaaaaagaacaaaaattaaagcgatcctaatctgtcatcacagtggatcagagttagcaagtggctccattccttctaagctgaatggtttaaatgggagtggcattggacctagaaaggccgttggttagtactttaaacagttaaatagttggtgggtttgtactgtagaagagtactttgtaggagtaccgttgttcttggatagtgtatgtcaagggaacacaatcaaacaagacaccgaccataccaaaaccaagtagaatttgttacaagtgtctcagtgttagctatagtttttaagtttatttatttttattttattacaccttttcatagtggtagcaatagtatatatatttttacacataaaatacttttctttcattagaaactttaattattattttgtcacgcggataatacatcatcatttcaacattatagtcattggcatcatcatctctaacaatgtgattttgtttcctttaaattggcttttgctgcgcagcaaacgagtggttggccattgcaacttttatctgt

SEQ ID NO: 76002 - DNA, 393 bp, Carica papaya
  Intron number 2 from transcript evm.model.supercontig_12.2 41 (locus evm.TU.supercontig_12.241) derived from phytozom e v7.0 (chr-ID supercontig_12; pos 2119370 to 2119762 reve rse strand)
tggaggtgagtggttttgatatcattccttctttactaaccaattgttggagagatgtctatataacttattttccagtatacaaacagatgattgatatgtctctttcaatgttttcttttgcttgttcttacttttaagcatctatgtcaaaccatttattgatgatcttgtgctacgtatatgatgttatcatgcgccttggtgctctttgtttctattgttctcttcacctgtgcacatgtgtgaattgtgggtcatttttgtgttagtctgtagaggccgctgataaaaccagaaatacctggggaaatcagcaagttagttatttttggtttcatcattcaatatcctttgcttatggctgtttttctgttgtgctgcagccaatat

SEQ ID NO: 76003 - DNA, 466 bp, Carica papaya
  Intron number 1 from transcript evm.model.supercontig_49.1 21 (locus evm.TU.supercontig_49.121) derived from phytozom e v7.0 (chr-ID supercontig_49; pos 857641 to 858106 revers e strand)
attcatctgtctctcctcaggaagccgttcccacggtaagcttttatgcaagtttttctttgaattttgtagtagtttctaaattagccctaattggattttgttttccctttttgtgtttacaaatcttgatcactaggtgttcttatacaaaattatgcataggtatgtagttattttatttatcgagttttctgagtcgaaaacgtttggtgtaatcgagatggaggtaaaggcgtctccttcatacctcttcaattgtgacccatggaatatgtcattaattctgtgggatttgaatttgagatccatgatttgttaggttttgcttaatcatcctaacacgctaatttatcagcatagttgagtgaacttcttaccagagttaaaaattggaacaggatataggtttatttattttttcccctctaatacagcatgcactattacttgtcttgttagacaa

SEQ ID NO: 76004 - DNA, 316 bp, Carica papaya
  Intron number 2 from transcript evm.model.supercontig_166. 17 (locus evm.TU.supercontig_166.17) derived from phytozom e v7.0 (chr-ID supercontig_166; pos 94662 to 94977)
gatagattggtgtttttggctaaggtgcataggtgttttagggggatctctatgtaactatgtccatctgacaaagggagtgttgccattgctatattgatgattattttactttttcttccccttctattgtccttttggtttcttcctgttgtctttatttggagtatatctcgtcctcctaccttggtggtgctttctttctaatatagtttcttctttcattaacataaaaagaaagtacagttgttttttgattaaatttaattatgcgcatcaaggtgtgctgttatcagctatccaaggaaacatttct

SEQ ID NO: 76005 - DNA, 568 bp, Carica papaya
  Intron number 3 from transcript evm.model.supercontig_13.2 70 (locus evm.TU.supercontig_13.270) derived from phytozom e v7.0 (chr-ID supercontig_13; pos 2429316 to 2429883 reve rse strand)
gttattggagcctcccctcgtggcatcttttcaaggtatttgacttgtataaaggtaaaaatgaaattaatacataagcaatgatcttcatttgaatgcttgcttgcacagtagatgttttacatatcttattcttccaaaagattgatgaatgctcttccacaaaagtggagtagagaactggtttctccatggcctataagaaaaaggaaaagaaaaagcttatgttgtagaatggaaatgatgcaggtcatatacatatcagtgcatgctgaagccaaaaatattgaaaacactgttgtagagaaaaattattaggcactctaagagtgcagatgagttggaaggctttatacatgtgattgaaatactttaaattttgtttctataattttctaaatgaaggtttgaaatgaaacaatcacatttacaggctgcacatactaatctgtacacctagatcaccaaataattattttgtttgaggggctatatttttttttgcatttttacttttgaattgtaaaacttgctaacaataatactcattgtaggaaggtgaacaaga

SEQ ID NO: 76006 - DNA, 599 bp, Carica papaya
  Intron number 1 from transcript evm.model.supercontig_18.1 87 (locus evm.TU.supercontig_18.187) derived from phytozom e v7.0 (chr-ID supercontig_18; pos 2022949 to 2023547)
ggctcactggtttgccttggttagttgtctcttactttggttgattgtctcccaatatcatttatttgaatttattatatatcatatatctaatccacaaaattagcttaatggaccaaacgtagcctgaaattacttatttcccgagtttgttgcattttttctggaacgcttatctctggattcaacaaacagggtcctgaataatctggatcaacatctacactcccatctgtttttgatgatactacaacattgttgttgatcttgacatgcttgtttacaccttttcattgttcactgcttgatgaaagtatagatgatagatgcaaagaggattaatttttttggttagttgatatttgtggcaatatgcattcacattagcttacttattcttttctagcaagtaatgctttgtggtttataggctatgcatcaagaattgcctttttaaaaaaatcttatttctttaactatctaatagaaacaaaaggagattgtttatatgccttgttgattatgaaagttccgtggttcttttaaagcttttatacttaccaggtggattgttatagcttcatccactgtggctctca

SEQ ID NO: 76007 - DNA, 891 bp, Carica papaya
  Intron number 1 from transcript evm.model.supercontig_1.55 (locus evm.TU.supercontig_1.55) derived from phytozome v7 .0 (chr-ID supercontig_1; pos 1083680 to 1084570)
aggtaaaatttatcatattataataaatttacactatcttttacaactgtagtaaatgtaaaatttttaaatttatttagacaaagaaaaaggtagtgccgccaactattgcaataaactctattatttccactaatttatttatttttaaaaaaataataatgatgttaattgtattttatgatagttttcatgaggattataattattagatgaagctccataaacataaatgagttataaatctcatcattatgaattataaaaaattataaaaattaaattaaattttttatctatcttaaaagtaacttagtcatcatataatatatttttttgactaaacaagtcagattcactgatataaaatataacttaatcatcataatcttactaacacattaataaattaaactattaacttattaaatcaaatattataagttggttcccaccaatatataatatactcataaaataatgaattttacattatcaatgagattaacttaagatattcaaataaaatataaaaatttaaatcactaaactatcatgttaataactgagagattaattcctgagtaatataaaaaatagtaaatatcatagcaaaaactttagatgattcttgaataaacaaagtcctatatgtaaattttttgtgatatattaaagtaatacttgtcatctaatcataacttataggaatatagttaaaaaaaataaaactattatagacattaggattattaacatcttaaaaaatactcctacttttcctgacctgataaatggatgagatagatttttatcttctacttagtgcttattaacttcctaaatatgcatgcaggtggtcggtcattgcaactcacttgcctaagagaa

SEQ ID NO: 76008 - DNA, 915 bp, Carica papaya
  Intron number 2 from transcript evm.model.supercontig_50.1 06 (locus evm.TU.supercontig_50.106) derived from phytozom e v7.0 (chr-ID supercontig_50; pos 993295 to 994209 revers e strand)
ttcagggccttagctgagaaggctcgaagcgagaggtaattatccttgtaaacaattgaacctcgctagttttgaaaaattttctgctctgctttttcattattgcttaccttaacttttcagaaattgtgaacctcgttggtcaagtaattgagcgccagtgttctgtatcatacttcattagaaactgtgatttcaattacattgaaacaacgagttatatttacataaatccgtgtttatgttacgttttataatttgcaattaaggactttggcggaggtaatcaaattctaaacagtggaaactgctttttgtttctttaagcaaatctaaactctggttaggactcaaaatgttatatagcacgcagtatgagacctaacaaagtttttacttcatggtttatgcaaatgaatgatcatatcatcccaatctgcaggaaagaaataaatttcacaaaagaaaattagggagctgctttggaggttgatatttttggttttgtacttcatttaagttctgaagaaagtactaacgtgagacgaccaagtgagtgcttgaaaggaaatcaaaacatggcaagttgagtgtaaaggaagaattagagtgttatgagtgttagaaaaattagaacgaaagatgaagctaatggcgttgtataggtgaaggcattcattttgaaacaaatcttggctattaaagtttatggtttctaggaatagtctactctttcagggtagctacctgctatgactcttatgatggaaccgagctgcaacttaaggtaaatatgagtattagttccaatttaggttgattaaacacatgagatccaaatgtctatttctattgtttcttataacctttaacaagtctattcattttaagataatttctccgatatttcagcct

SEQ ID NO: 76009 - DNA, 704 bp, Carica papaya
  Intron number 3 from transcript evm.model.supercontig_116. 26 (locus evm.TU.supercontig_116.26) derived from phytozom e v7.0 (chr-ID supercontig_116; pos 171801 to 172504 rever se strand)
ctatactcatcttttgacaggtatcttaagatgctccattccttatttgatctgttggaacttacatgtaatgctcttattgcatcatatttttttttggtgatgggctgtatgacatttcctaaatgaaagagtttatgacataatgaaaaaagaatgtaggagagcaaagtaattgacgcctggccaacaccaaaaactaaaagaattagaagtttatttgcacatttcaaattttaaacctgtcgaaaccttatcaattaatagattatatgattactgaaatagatatgtatatatctacaggtataacatgattgttctttgatgcagtttttaggcaggctagtttctcgttatctcaaatttttttggatttattttcttaaaacttgatatgatgaagtaataacctgatttacttagataaactagcaacgtacctgataaaaacttagcaacatacttgataaaaactagtagagctttgttaaaccatattaaaagcaagtattcacaatcttcagttatatgattgtcaattttatgtttagttcatgggatacattgcattcctttccccactccctcctctctgtatttttctttatccggagatgtctcactgcactacattgcagttgcatttgattttgtttatcatatttttgcaggttatattggttcggtctcatttttgaaca

SEQ ID NO: 76010 - DNA, 1039 bp, Carica papaya
  Intron number 1 from transcript evm.model.supercontig_50.4 7 (locus evm.TU.supercontig_50.47) derived from phytozome v7.0 (chr-ID supercontig_50; pos 527061 to 528099 reverse strand)
cccttgttcttggtttgtcctttatttcttttctttacgattttcgttggagacatttggacttacacttaagttgttttgaatcgcttaattagactgtttatagcttttgataaagtctcaattgctttctgctattgtatgcttgtagcatatgtaagcttcatactcttctttatcaaaagtattcttctgttacttgttttttaatacattatagaggattgggtgttgggattgtagattttttcttagaatctggcattttctacttgttggttaaaccagagaagcgacttacagtactataagaactttctgacctcgtggttaaagtgctctttttagatgtattattatcaccattttatccttttatatttctcccttttatcaaaaaacaaggaagtgcttatttttatgataaatacttctatccagatataaatcttcattttctaaactcaacgccaagtgatactggggcacatgtttttgccaaatctcaatcacctctctatgtttaaacaatgacttagaatgtcaatgtctaaattccggcgattatgtgttctaatagctactactattatacacgctctagtaatctacattatcagatgcttatcatggtgcgatacaaatagacttttgagtcaaatactagttaaaggaggccaatatctttcaaaatcggtcaataccagttaatactagtcaataccggtcgatttagtttagtgtttattgcatgtctttctgcttgtggactctcgaaagttttttggtttagagacaagaataaacagcaatagtatcttgtttgattttcaaatctgaacatagggtcaaaaaagggattctgtgctgtatcaaattatcaatgaattgtagtgtgtagcactgaaaaaagaaaattgtaatatgctctatgtgaagaatatttcaatgatcatgttggctttattgcattaccaatatggattttcctttttcctttctcttgtagctactagggatacttcaaatttgttagcac

SEQ ID NO: 76011 - DNA, 759 bp, Carica papaya
  Intron number 1 from transcript evm.model.supercontig_26.1 52 (locus evm.TU.supercontig_26.152) derived from phytozom e v7.0 (chr-ID supercontig_26; pos 1151436 to 1152194)
tctccgatctggtcctctccaaggttgatcgtcgggtatgtttctcagcgttttcgatctcccctcactttgatctccatttctctctctctctctctctctctctctctgttttttggcatgtccctttgtagtcttcttaaaggtttgtaaaattttctaatgctttcatcctaatacttcaaggtttttctcttttcttttttaatgtagattcttaaatgtttgtagagatcttaatctgctacttgatctgatatgccatggtaattgtttgggagctttgaggtggacagttgaacatcccacgtttaattagtagaatagtttctaaaaattaggttgagtaaggttttttctttttctggtatcagttgatacaatagttacatattcagccttgatgaaatggcacatctatttataatttaatacataaattgcatgtgatatctaataattaaatgccacccctctgtggtgaagaaatatccttcttcgtagtttttaatttgtagattggcagaaaagttaaaaactttttttctaggttatttgtacttggctacttgcactcaattggttttcctagcttcagaagcgaaattgaagctctgctttgttgttatttagcttttactcttggttccctggtcattgtgattccttttcccctgttgtctttttatatatttggttgatcatttttcatcttctatcgcaggttgatttaacttctcaggttgtacgcatcacttc

SEQ ID NO: 76012 - DNA, 498 bp, Carica papaya
  Intron number 2 from transcript evm.model.supercontig_26.1 52 (locus evm.TU.supercontig_26.152) derived from phytozom e v7.0 (chr-ID supercontig_26; pos 1152170 to 1152667)
cttctcaggttgtacgcatcacttcaactcttaaggtattaactattccgctttatctgtgggctctatttatttgactattgttggattttggtggggttaaagatatttggttctgaatcttttgtttttcaaaggtcatcttctctattctgaggagaattttggttaccttgttaatattttctcctatttgtaatcttttcttctacatttttggcgcttcctcagaactttatcattacatatttaccttgaaaaagtttgatcatttgcattcacctttttaattacactctaaaaatgaaaatgtaaattgccgaaatttcacacttctttttcgacttcacctaatttgcaattcttttgttttattggaacaccatttgaattcttggaatcttatttgcatctaacttattggttaaaactatgctagataattaagtgccttgctaaatatggtttgtctatcctactttgcataataggtggaga

SEQ ID NO: 76013 - DNA, 942 bp, Carica papaya
  Intron number 2 from transcript evm.model.supercontig_58.1 10 (locus evm.TU.supercontig_58.110) derived from phytozom e v7.0 (chr-ID supercontig_58; pos 1008670 to 1009611 reve rse strand)
aacaaaaggttcgcctcttctcagtctccctcgtcactttgtatcgatgtccaaagtgaaatttaagattgaatttggcttttgatttgattggtgaactgttcggtttttatttgcttttggtatttgggttattatttctttggttacctacttactgtaccttttctggcgttacttgcaatgacgtttttgtagcttcgttcttctgctataatggatgaagttcaaatttgttatcgaattgtttggatccgaacatgatttttcttcctagatttgaatctcactgaaagaaataaaacccgccacataggttgatcagtctactggtttcacttttagttatgtgcttctgttctttacaattcaaatctgagttgagaacattgttttccttggtccagctaatgtcctttgtgtttggcctatattttggtttcttttcttctatatttcgtatgaagcttgtgttgttttgcttgttcttatccatatgcctttttcccaaacaattggaacgtattacaatcattttatctgcaaatgactcaatagttaatttatttataagtaaggttttatgtctgaattaatcataaaatctttaaatattttgaattggtacatttgaaatacgaacagttcaactatttctttgctcttaacttatgagtttattttcagatttgatagatcttaaaattagcttcttcaattttatgtgaaattaggctcaaaattaacttaatggtaaaaaaaaaaaactttcaaacattaaaattatagatttgaaaatgtaaggcacattatatatatttatagatacttgtagatttgttttttttcctagtgatattgttttggcttgagctttactagaatttttcttaattggtttattcagagccggtgaactatctgccgctgaactggagaacc

SEQ ID NO: 76014 - DNA, 472 bp, Carica papaya
  Intron number 1 from transcript evm.model.supercontig_44.7 8 (locus evm.TU.supercontig_44.78) derived from phytozome v7.0 (chr-ID supercontig_44; pos 923480 to 923951)
acacgtttgttattctttccttttcatcatttattttttccttcaatcactgatcggctatggttctatttgattctcgcctttatctgtgtgggttttgattttaatctcttgatttttggatcgtattgaaaggaaaaatatttcatttctaagtttggggtttaatgcacggagaagataatgaaaagtgagaatttatgaatcatttggtctcttcttcagtgctgcttgcatttagtttttgctctagtccgatgagaaagagaatagaatctttattaagttattctgcaatgttgagtagccaaacagttatggattagggatacagtatgtctatgtggggaagggatggaatagtgtctcatttgaggcataaacatttattggcttgaaagtacggtcgtttactgcaatccgttgtttgctttcaggggtggagcagagtttgatttttcatctggtgttg

SEQ ID NO: 76015 - DNA, 488 bp, Carica papaya
  Intron number 2 from transcript evm.model.supercontig_44.7 8 (locus evm.TU.supercontig_44.78) derived from phytozome v7.0 (chr-ID supercontig_44; pos 923986 to 924473)
cacgcgaaagaggtattaatttgctctgttatccttaaatttttacccttgatgtttgttgttgagattcaaaagtcttgctgtcttttgtctttctcatcctgttttcctcgtagttatatgttttcatcttttcgcatctagttttttcaacaaaaactgttaagatagaatttggactttctgaagcttgaacaaattttagagcccctgctttcttttcaagtttgatttgttcatatatttgaaagtttataattattttgagtttctgagttttgtttcttttattaatatttcagagatgatttggattttagagatgaaataacagaacactattacgtcaaaaattggttcccaattattacacagacgtgctctttataattttcttcattgttctgtagtagtgatgaactgatttttgcctattgtggtttacatgatgatattgttcttatggttgctaggggacgaactggatc

SEQ ID NO: 76016 - DNA, 590 bp, Carica papaya
  Intron number 1 from transcript evm.model.supercontig_126. 36 (locus evm.TU.supercontig_126.36) derived from phytozom e v7.0 (chr-ID supercontig_126; pos 397447 to 398036)
gtcgtttgaactcaacaggtttgtttccgttcgtttcctctctccgccgtgtatatacatttagattttgagattttgatttcggccaatctttttcgtttctgattcaatttgaagcacacagataatgctgtttcaattcttcagtatcgtttctttttttcttttaaattcaaaaaacaaaaccgatattcaatcgcaaactgatcggattcctgaaatttattttataatctgaaatgttcgaggttggtgggaattagatattctatatacatccataagagttagtcagaaatgtgctctgtgcgcttaataatttggatttgattctattctaattaacatttgatatttagaatcacacttttaaaataatcgtagagttaaaaaagtattcgagattataaatacaaatctcaaacttaaattgtctcaagaatatataaataattatatctagttagtacttagttatcatattttcttcgtttttataaaatttcatttcttccggtcataactcaaaatattaactgtttcatcaatgaacagtgtgctacataaagggactagtgaacaccaggaga

SEQ ID NO: 76017 - DNA, 618 bp, Carica papaya
  Intron number 2 from transcript evm.model.supercontig_53.1 01 (locus evm.TU.supercontig_53.101) derived from phytozom e v7.0 (chr-ID supercontig_53; pos 818129 to 818746 revers e strand)
ggatttcttggaatcttgcctcgtggaaactgaaggtattgctttgattcaaaacagaaagaaaatgatattagccctgatcagtcgctaagttgtaggacgagtgctaggttttaacattaatgaagcatggaccatggaactgcttgtttttagcataactgatcggaagaatattaccttagtacttaaaagtcgaaatattctcatggaagcaccacttgttagactacctttaagaaaaagtgaaactttatcatcttgtatttggtcagcttttataatgcaaaaaaggttagattacattgttcccagaacgttggtgatcatgcaaagcattgagttttaataaatttagttttttgcttgtcagtgtttgtactggcagtatcatctgctgttggatgtcggaattagataattaatattcatatatccactatattccttctacatagaaaccgagcagttgctaatggaaccattcttgcagctatggatatctgtttggtttactctgtaaaaatttttgatttagtatttcttacttttagttttatcctttcctatattaagttggatttaattggtcatagcaggagatcttggatcgcgcat

SEQ ID NO: 76018 - DNA, 1023 bp, Carica papaya
  Intron number 2 from transcript evm.model.supercontig_130. 31 (locus evm.TU.supercontig_130.31) derived from phytozom e v7.0 (chr-ID supercontig_130; pos 376529 to 377551 rever se strand)
aagagatcacacataaaggtatagatttgattttgatattcttcatgtcctttggtttgtaatatttgtccaaaattgttattggttaaatatggagcttgaaagaacgataaaactaggcagtactctctagacaaggtatatgccaaatgattgatctaaacaggtaaatgcatttcaaatgttgtccgtttaacttgcatatatcagttcattgattctgtctaatttctcataagatgttttctcttttttttttcctaattttcttactaacattgcttatatacgaaaaaggcaaccaagatttgtttggttatgacattgtggcttaccataattgttgatgttgcgtaaattttggtttgactaatattttgcatattttgatcatactaattattttaggtattttgatcatattaaatattttaaatattttgataatatgaaatcaatttttttttgttcggaaaaccctaatattctggatatattatggtttataactgaagcggcggatgtcctcttttcttatcatcatagtagaaaacttcttctctgtcttatccgcagacatagatatctatgccaaatcatgtaaattttatattttttctttttttactatttactttgtgtgattatgcgtgtgattgtgataattttcttcaataataatcttctttaaagttgttgtctatttggtttaacccagagattcaagatctaatccttatgaccacaatcacgaacatatttatgtctactatcgactaaaatcctgattagtaatcttacaatggatgaaaacctttgtcatactgtttttaggttctccttactctgtctcaaatgtagaggggcagttggcatcctttttggctccaaatgaattcttcaaaaggaacagtttttgaatatcttaatttcgactagaaattttttggtctttcacatcatatcctcaaaatttttatttctttttgttgcagtaccattctgacgagtcttttgcctgcc

SEQ ID NO: 76019 - DNA, 478 bp, Carica papaya
  Intron number 2 from transcript evm.model.supercontig_53.5 (locus evm.TU.supercontig_53.5) derived from phytozome v7 .0 (chr-ID supercontig_53; pos 31018 to 31495)
gagaaactgtactcaaagaggtaaacgcacttgcacttttctataattttcataatatttacatatccctcgagaatctttctttttttttttcagagcaaattcatattcagtaatttagtgtgattgccgaccatcctcctattgcatatgatttggctttatatagatttgatttgggtttctgatgttttaaatgaaacaagtgaaagtctgccaaaatgctcaacatattgttccaaacagttctaagctataaactgcttagttgcgtgtttattggttttaagatccgttcaaaagtctttttttttttgttgcatctccattatagtactaataactaataaaggttgtatgtgatttctatttggcattccagaagaactagtgacgttgttgactaaagaaatgttcgtttaacatctaacttgttttctggattatgtttagattgaattggaggaccctttggaga

SEQ ID NO: 76020 - DNA, 808 bp, Carica papaya
  Intron number 2 from transcript evm.model.supercontig_0.14 7 (locus evm.TU.supercontig_0.147) derived from phytozome v7.0 (chr-ID supercontig_0; pos 4114634 to 4115441 reverse strand)
cagtgagttggcctttctcgcatttctatgaaatcattttttctgatgtgcctttattgctggcaacgcctaatatatgtacattttccagtgaagtggtagtaattgaatcgaactaattttaatttacttcacattacgcactttttgtgcatgatgcttttgaagcagtttttacctttttggtataaactagtcgttgtctacattcttcaattgcgtaaggaaaaaagaaaggagggaggaaagaagacttttaagccgaagcatgcttttgacctcatgtatgttatagagacaggctggttagcatagttatttttctcatggaagtgaggacatttaatgagcatggataaaaatgccaacatcattgttcatacaattgagtattataaagttccacgccttttttctccaatttttttttcaaataaaattaatttttgaatatctttggaatttcttgtgacgcaataataatcattttatgaaacaatcacccaacttttctgatgatgtcagtctctctgtaccaaacttctaatgatatcaatctctctgttccttgtgtggttactcgtggttgtaatttctttgttgtgattcttttgttttttttcttttttttaaatcttaaattgtttggcattctttctatgaatagcttaatgtatgaccttttttcaattgaaaagttgctttatgactttcttttatttgtaataattactgttattattattattttcaccataatcatcattcttcttggcttaggaactcgagaagaagaagcacgaaaagg

SEQ ID NO: 76021 - DNA, 954 bp, Carica papaya
  Intron number 2 from transcript evm.model.supercontig_120. 9 (locus evm.TU.supercontig_120.9) derived from phytozome v7.0 (chr-ID supercontig_120; pos 219926 to 220879 reverse strand)
ttgatatattgtgcttgcaagagacaaaactacaggtaagtacaaatccatatttttcctcattttgctcttgatgataaagtttgctttagtgcaagggataaagttcaggttaagtgatatgtttccccagctttgaaatcgttcatcatgtgcaagatcttgtattctgttcttgttgagcattggagattgcaaaatattggttgccaatacattttgaatcttcgtaatttggccatcaatagcattttaacttctactggggcacgttctagtttgtgcctctcaaggagactcattatcaattaaaaaccaaatgtagaagtaggatttagattctgaaagtgcaattcagcacattagatttacatccttgattttcgcagctacagtgaagggaagtgattgaatgaggattaggtgcagatgataaagttctcccactggtacattgaaataaattagcatgactgcatgcttgaaagtatggacatgctttgctggatttgtatgtatacttgtggttttgtgtgcaaagcttttagtacattatcaagtccaaactatgtcactaattgttgccgcatttaatagacgtaatatctggaataaggtttttacatttagttttctgcttatgtgtatgaagaaaggtgtgaatgcccctttagcatggtgtaataagcaacgcctatgatttaaaaccacctaataatacatcacttgctcagaacatataaatgttttggattgcggaaggatacttttcgtcctcagttacatgtatgtgtatatttgcctatattcatgtgagcttgttaagatttttcagttgctaattttcattgcctatttcctatttcctatttcctatttttttaaaataattatcttcatgtcttgtttctgcttatgttaagtgcatttacttcttttgagaacaggagaagg

SEQ ID NO: 76022 - DNA, 781 bp, Carica papaya
  Intron number 2 from transcript evm.model.supercontig_2.34 (locus evm.TU.supercontig_2.34) derived from phytozome v7 .0 (chr-ID supercontig_2; pos 691518 to 692298)
aaggtacttgaaaattgaattgctttttggctagtacagaaatatcttttgttatgcgttgcattgttgtttgttcgacataaaaaagtatacttggctatatgaagttgaataccttttcaccacttgagttgactctttgatgtcaaaagttaaaggctgtttttttttttttttccttttttgggtttaatcattttattattcagaacaagtgtattttaatcctttagctgttaatttagtaaatttttgtttcttcaagtataaggtgaaatatggttcttaggtctaattttctaatcacctaatttacctagagtcgctacgatacataactaacatgtagataaagatatatatgtagactttttgtgtgtgtatggatgtatttaggcatatgactcaactctacttgctttgaatgcatgttctattaatggcttgaaaccagattttttgtacgaagttcttttgtacaacaaagcaaagctcaactgagctaatatcaaaagttcaaacacatcactgaactctactggtttagaaacatattctattacatcaaattcagttatttcatacaacaaaaaatgaaagttaaccaagattagtattagaataaatttaagccgatattaaaacatctcagccaatttgcaacctcagttatcaattgcttcaattagattacggatattattgcctttctattagtttaccgtttttctatttttgatcgcttaaattttaatctcatatttgggctgtagttcctgag

SEQ ID NO: 76023 - DNA, 547 bp, Carica papaya
  Intron number 1 from transcript evm.model.supercontig_12.1 32 (locus evm.TU.supercontig_12.132) derived from phytozom e v7.0 (chr-ID supercontig_12; pos 1213386 to 1213932)
tcctttgatcccaacgagaccgcccaaaagctcttgtatctcggtatacaaatacatatgttatatctacttatttcatattaggttgattatgttggttgcatgttgtactggatattcttggttatgtgtattttccctatgtttatgttcatttgatggctccgttagggttttatggcgaggttatgttctttgctttttggtctttcaaattgctttgtggtttaatggtgtgtttgcgttgcatcattgtttcatgatctgcttgtttacgtgggatttggtgtatcggtgatgatgattggttggcgagggacacgaaaggaaaaaaaaaggagtggttttcggcattctgtgcgtgttatttgattcattggtaatcaaaataatcatctcttctattccatttctctttagtttttgtttgtcttcttcgagaaaagatttttttggtttgctgaggaaacaataaatgggtggtacttttgctgctctgtttttaaaacattgatcaggcttagcaaacttgctgcattgcccttga

SEQ ID NO: 76024 - DNA, 613 bp, Carica papaya
  Intron number 3 from transcript evm.model.supercontig_12.1 32 (locus evm.TU.supercontig_12.132) derived from phytozom e v7.0 (chr-ID supercontig_12; pos 1214239 to 1214851)
gtgtgtaagttgattgtgtggccagaatatatgctatatcagtgtaaaaatttggaactttttaaccaaaaaagtctggaattattttctttctctttttctttttcttggaagcataactagttcattaccttgattgcagatactttccatgaggtgagaaggaaacgcgataggaaaaaagaggtatatctatttagtgctttaaaaggtttgttaataatgcaagtttgaagctgttattctttaaaaaagtattaaatggtttagaggtttccctttttgcatcaaaatgataaaatgcaatctgagaaggattctgtgcaatctgattaatttttggattgtggacaacatacataaaggtaattttgagtttgggtgatggttttttttttgttcctcataataattttttctgaaaggagtttgttcctcatgtaatgttttgaaaatttcttatatccaccaatttgaagaacaaactttttctgctgtcattgtctgagcttttgaaatttttaagaaatcagcaatcatatttttttaaactttcaagtactaatatctgtcactgtaaactgggtctttgttcttttgttgttgcagagta

SEQ ID NO: 76025 - DNA, 640 bp, Carica papaya
  Intron number 2 from transcript evm.model.supercontig_114. 1 (locus evm.TU.supercontig_114.1) derived from phytozome v7.0 (chr-ID supercontig_114; pos 16469 to 17108)
caaatatcaagccggtgattacctctacaggtctctctctctctctctctctctctcttcaaaacttagtaaacctaccctttgaaattaattaaggctatatatataagtacgtacatacacagtactgcatatgtatatacgttatcagagcttgaaatatactagcagttaacaagttaattttcagaatttgtgatctttaatttttttattacaattttatccataatctctttacatatatttcaaacatttagatttttttcatttcttgatgataaaaaagttccaaaaaattaattttaattaattaattaagttaataaaataaagtttaataatactattagttaattaattaaaattattcttaaaacgtttaaatattacctaatttttatgtaagaaaaagtttctttaaaacattaaaaaaaaatcaaattttaattaaaaaaataaaaattatgacgagtgttaccttggagacatatttttataatttcttccacataatataaatatataaaatatatatacaggactcatgtgatgttgtattgaaattaatatctccatgtccggtggtttattatatgaatcagtgtggcaagaactggagaaagagaacaaggagttc

SEQ ID NO: 76026 - DNA, 990 bp, Carica papaya
  Intron number 1 from transcript evm.model.supercontig_44.1 10 (locus evm.TU.supercontig_44.110) derived from phytozom e v7.0 (chr-ID supercontig_44; pos 1345669 to 1346658)
gtggtatgtgtgtgtttgaacttttactccactatttaggcaacactttatggttcttccgactgtatatgatcctttgtttcttgcttaattaattttgtaaacgggatgcaccaggtttaatctcaatgagtggctcttcgtcttgatttttgaagcttgtaggcatttggaccctgaagatgtttttttgcatgacctttatcacacacattcttctttttattagttacacaagaataatcctttgaaaagatactaatgatagttattaatactcaggcactttgttctatgggtattttgactgttaattttgtcatgtcaatcatttcttttagttagttctcatacttgcataaagtttctttcagcttattgatatgtctataactcttcaatttattgtggcttttattgtactcctgagtgaccttcacctgtttttttttttttaattgaaataggcatgaccttcacctgtcgacttctttaaaatcatccttagtgtaagaacttccatgatcgcttttaggatggtttaaaacttttcatttacttttatttataaatgaactttttgaagaagaaattgatggtcaattttttatattgctgttttttcccaattaaaaggtgccttgctttttttttttttgtctttgtttcttcattttcttaaatacttttatttgatttcatcaagagaaggcatgtgtacaaatagaaaagataacttataacgtggaaggtgcaattaaatggtgattatcctgtctttttcacatgatatatgtctattgaagtttactatttcttgtttaaattatctatctttttagcaagatataatttgaatctcctcattgaagttttggattttgctttctgtttccttgttagtgtaacgaactcttcatgtcaatcttctgacattgagttcatgactttatagggccaaagccttcggaattatttggaaaatataca

SEQ ID NO: 76027 - DNA, 382 bp, Carica papaya
  Intron number 1 from transcript evm.model.supercontig_3.38 1 (locus evm.TU.supercontig_3.381) derived from phytozome v7.0 (chr-ID supercontig_3; pos 2645025 to 2645406 reverse strand)
agtgctttctggaaaggtaaatgtttttctttgttttttcttttttcttttaatttttccaaattatgtgttagactattttagattaactgaataatattatttattttttcctcgaatgaattttttgagaagttcactttgcaaatgaattattgtcatggaagtaaaccagcaaatggttttttatattggtctgtctggtttttctatactagcaatttccaataatattattctattattttattgaattagaggaattttttttcttttctagagcttttttatgctcaaatttaaagtttcttgttctgacattcaggttttgggtttgattattcttttacttaattgcttagggagagtcatttcacaaaac

SEQ ID NO: 76028 - DNA, 363 bp, Carica papaya
  Intron number 3 from transcript evm.model.supercontig_119. 41 (locus evm.TU.supercontig_119.41) derived from phytozom e v7.0 (chr-ID supercontig_119; pos 248699 to 249061 rever se strand)
aagtaagggagaagaaaacttcaaagaaggtatttcgttaccatctttctctttctttctttatacttcactcttatctgtttgattccttgttgcactgccttttattggttctctccaaatttctgcttaagaaattctggtgaataacaaaatggagcactataagttctttaaaaaattactttatgggatttcagaaccattgaaaagtatcctccattaaccttcaaatcaaaatatggtttcatggaggcgtggtctcttttttttttttttcttggcaaagtaacattctgattctcaatgatgatacatattttatgtgtgtggtttatgcagaggcctagaggattgaaagct

SEQ ID NO: 76029 - DNA, 922 bp, Carica papaya
  Intron number 2 from transcript evm.model.supercontig_195. 26 (locus evm.TU.supercontig_195.26) derived from phytozom e v7.0 (chr-ID supercontig_195; pos 158186 to 159107 rever se strand)
agctggtaaaatgagctcctttctgtttgtttgagccttcttcctacttcctttgtgaggatgtttctacgggattttgatggataccacggttgtatttcccaaaaattggcaaaaagttgaatttaaagttacatatctcctatcaaactttcttttgttctacatattgtccttggatgtcttggttgtatttgaatgtttcatgttgacatgaatcttttagtgatttcttgtttgtgagaaacatgtctctcaacttagtattccttgtagtcaaatctttcaaaagctacataggagataattaattgtggcaatagaaggtccattggatcatactctggtagatgcaacaagaagatattcctatggaatggtagatgcacaagaactctgacagttggtctcattgaatatagcttggaaaatttcaaaactaagcttacttctacagccttgaatattacttcctagtctttctaataatattttctaattttgttttccatcttagcatttttgtgattgtaatattagctgtcaacaactgtttaagttttgcatatttgatgcataaattttgttaatttcttcaactttcctcctttctttttgtttttgcatatttgaggcataaattttgttaatttcttcaattttcctgctttcgttttgttcttaaatctagcaatttgttttgccaagggcagtaacccctgtaaattttaaggtatagaacatggttaattaatgactaaggagagaactaccattgagcaaggtagccagttgtaacctatcgtgtcgactcctgaaatgtgaaatatactgcatttcaccattttaatgagtgaaatgttttccacatgctcctgtcatttatctactagtttgtctatttaataggaaaataataaat

SEQ ID NO: 76030 - DNA, 684 bp, Carica papaya
  Intron number 1 from transcript evm.model.supercontig_195. 26 (locus evm.TU.supercontig_195.26) derived from phytozom e v7.0 (chr-ID supercontig_195; pos 159252 to 159935 rever se strand)
catagtttctgcacttaaaacaagctctcgttcaggttagcacactctatctgtattccaactttctaaaggtgcattcttttttcgagataattgaggaaaatggactgcttttcgaggtcgttggtgagatgcacaataactggagcctgaacatagtgtataattgtttgaatgtttcttttttctgaaactttcttaatttctcttgtccttttttttttttaatgttcaatctaagtttttgtttcgtttgaatgtatgtacacaaatactttgcaagtatggtataggtgtattctctctgttaccttcgtctatatgtgcgagtgacatcttttgctgtatgttgtcaatgccttgccttttgctttcaattatatttcttctgttagcaaattctagttatgggttacacatcagaatgcaaccttctttgtttattgacttgttacactcttttttttttttttatctgattaaaaaaaaagaaaactagttacgccatcttctaacctatattttaaaattataattgcttgttcttataatttgtgagaaaaaagttgtaaaatgatgtctatatttctgctttttcgttgtatgaggtcgatgtgatttatactgagtacttcaacctgatatctttctaacattgatttgcagggagtgaacttgtggaag

SEQ ID NO: 76031 - DNA, 681 bp, Carica papaya
  Intron number 2 from transcript evm.model.supercontig_21.5 9 (locus evm.TU.supercontig_21.59) derived from phytozome v7.0 (chr-ID supercontig_21; pos 741218 to 741898 reverse strand)
tcagctttcgtttgaattcttccttgtttgatcaggtttacttccatattatatatatatatatatatatatatgtattggaatataaagtgtgaattatgtattaatattggcaccaaatgttaccactcatttacaacatttacaagtcaactaaattctccataaaaactagagacataatcctataacaaaaaaccaagaaccacctattcttaaggaaatcaaaaccattaacatcctcaaccctctcaaaagtcctcctaacatccttccatacccaaatttctttcttcaccgatcctgtcatcacacaactaatgtccaacaacccataaatcaaagtccacagcttgtatatctccggacaccaaagcaaaacatgcttacaagtctcttcatcgctcttacaaagaaaacaagcattgaccattatcttttccctcttcttcaagttgtcaatggttaaaaaacattccctactagcctcccatgcaaaaaaaaaaaaaaaagaaacccagtgagggacactagtcttccatatctgcctgatagggaaatgtataccttcatctccatattatatatattatatataatttctcttctgttgacatgcactaaatttaatgatgaatttttgcagttactttctttggatttggagtcaatcatcagcca

SEQ ID NO: 76032 - DNA, 1053 bp, Carica papaya
  Intron number 1 from transcript evm.model.supercontig_40.6 4 (locus evm.TU.supercontig_40.64) derived from phytozome v7.0 (chr-ID supercontig_40; pos 1055289 to 1056341)
agaagtctacagaagaagcaaaccaaataattcaggtaaataatacatttctatgatactgacacttttggctgcattacttttcaggtaagaacagactgtttaatttccttccttgcattggtagtctcttatgaatccgtcatatttctaaaatctaataatttgaagtgttttgatataaataatacaattggatcattcttgagctttagaataattgtaactgaattatttcacttgatttttgtatgggcttatgaagggcctacctccctttcttggaacagtactatgttttggtaccatattaaataattagttgacttatcaattgtcctaaaaactaaactgatagataattgtctaatcttattatttatattctaacataaaaaagtttgtggctgcatgttgtgaagtttgctttctcgctttctgttaatttttttttgtttatagaagaatagatggttgtttctgagacatttaattgtttgtcaaaattattagagattgaacttttggaatgagtgaaggggtgcaaaaatcaaatccatgtgtttgtcatgagcagtccaatagcacaaaaaaaaattgccttctctgagttttcattcgttttttctgacattttatccagaaagattcttgcatattttctgttatctttcatggtcaagtgagtgatgagcagtgaaatttcatggtgtacaaaaagaatcaaaggcataggtttaaatttgttggtggcagatagctaattatctgtccttctcacgattgcaattaatggactctttcattacaaactctaggagccttgtctttttggggtatgagtatctcatacctaattgacacttcttcatatgctgtttaaacttgccacatgttgaggctaatcacctataaattttaatagtgctaaagttattagttattgacttacaggtggtctagttttgtggacaaaatcttttcaacattactaattttcagtgtcatctctcatcagatacaggcttggcaggaagaagtagagcgtgcccg

SEQ ID NO: 76033 - DNA, 964 bp, Carica papaya
  Intron number 1 from transcript evm.model.supercontig_282. 8 (locus evm.TU.supercontig_282.8) derived from phytozome v7.0 (chr-ID supercontig_282; pos 27532 to 28495)
caaatccctgaagatcgaggatctcctcatttcaggtacctgttaatcaaacctcgattcagttttatttgtcttcctctttgtttcctgagtttcttaagccctatcaatctgtttggtgtcattgaaaacactgagaaaacggataggagataaagtttttattattaattatttttcctacttttggttcagttgttcatttgtatgtagatgtggttctggtatgtgaaatgcagtattctgtttttgtaagttagtttcttattatttttgttcattaatgaggaggttgttgagtggttggttcattttcttgtcttcttttttatttccaagaaaatcaggggaagaaattttctagctgttttcgatgcattgcggagtagaaaaattgttattactcgtggaggtgatgcttagctgtaggaattagtgacatgagttttgaggattacgcttacttcctacacttgtttagctttttgaggttattgactgtgctttgttgtgtaggatttagaggttactggttttatcggtttctgctaatcccgtttacttgactaactaatcagctttagagctcctacttcttctagtaggcctagttgagatcgttttgattttcaattgatggacttctggtatttggataatgtcctttctgcgctttgattcagaaatccctttgaagtccgaccagaggctaatgttttgtactggcttattgtctgtagttggagaaaacagagtgcaataacatagcatgttcttatcttcttttcctgtttttctcatttgcagttggaaaccagatagaagttatatcttctattgtcgaactggaatttcattttaggtattattttgatttgtcttgttattagcaggtcaaaatttttttacagttgattgctttcttgtaggcacactcctttgcaaataatacatattgttggaa

SEQ ID NO: 76034 - DNA, 618 bp, Carica papaya
  Intron number 1 from transcript evm.model.supercontig_123. 2 (locus evm.TU.supercontig_123.2) derived from phytozome v7.0 (chr-ID supercontig_123; pos 28919 to 29536)
aattctctcttgaaacaagtcgatcctgggacaaggtaaggtcgctgaattatcattgttttttggttctggtcttcgaagttcagtaccttttattttgatgggtttattttcatgcattctacttctattgattatcaatttgtttaagtttcatgatttttatgattgcttttggcctttaggaatttgatcttgctttctttttggggagtcacacatgtccgaagggcattttcggtctttccacttcttagagaaaatgatactatacttagtggtagcatgataagtttatatttacatatatcttgcattgtaggagaccgattcaaaataaagctatttcttctaatgtactctaggaacgtggagactaatagtcaatttgttcttgtattgcaacactggttcccagattggtctaagttgtttgccatctttggagagaatttgatttgccctttacacttagagggattcaattcttatctacgtatttgagggttttgtcaaagaatggagaccataaaattctttggagagggacactctttgttggatgttaggttttcaatggcaggatttttcatcaacttgttaatagttcccaaagct

SEQ ID NO: 76035 - DNA, 984 bp, Carica papaya
  Intron number 1 from transcript evm.model.supercontig_17.1 24 (locus evm.TU.supercontig_17.124) derived from phytozom e v7.0 (chr-ID supercontig_17; pos 1581097 to 1582080 reve rse strand)
tgcactcttcctcctccaccttctaatcaattcaggtcatttcctcttcctcttctaattttcatatatatgtatgtatgtatctatagaatatatgttagaaatcttcatctcctgtcaaataatttctttctagtttaacaaaacagatataattgttctctaactttgattttcttcaataatttacttttatgcgttcgaaaagagtgcaataaatgaaaataacaataatccttaataacatagatgaatttgaaaatagcaaaaatttgtctcttcaaaaactcaacagcttacatacttaaaagcaacattcatacgtccacacatgtttatgaatgtatagtcacacaaacacacacatacaaacatatatatatatacacacatagacatctatataaagaaataaaccattgatgatataaaatttaactcccaaaaaattttcctaactctggaaattttggcagaaataataaaaattctaatacatttttatattttttttctttctattcttttgaaaattgcaaaaaaaaaaaatgattaagtttaataatctgataaaagcataaacacattgttaataaatagttcagcaaacttgtttgttaaaaattttatacatatataagtagctgcagctctattttaaacaatcataaaccctaattaccaatctcattgtgttgtgattagaaattggagtccctttggtgtttgtaactttaaagaccttacaatgcataagcagcaacttcactaactttttctgtctcaacctttgcagccagtttttttgttcctttccctttcttttatcttgttcttttggtttaaaactaatacctcaagagtgatttgagttcagcagtaaaatttgtgagcatttaaataatcaaagaaaaaggaaagaagtcattgtacctctttgtgtcttcaggttcaagtatagcagggaaaccttcgcctgaagca

SEQ ID NO: 76036 - DNA, 808 bp, Carica papaya
  Intron number 3 from transcript evm.model.supercontig_55.9 8 (locus evm.TU.supercontig_55.98) derived from phytozome v7.0 (chr-ID supercontig_55; pos 596520 to 597327)
gaaaggaatctccggacaaagagttccctgagcaggtaatattttttagtttatgtaatttgtacttaaatcttttggtatcaataattgcacatttgcattctgctaatattattggcaagttacatctttttttttttcttttgattgttcataatggtaaatagcacctaaatgattaattatgttcaaccagggatctacttcaggtttctagggttatgttctgctaaagctttatttccttatgtcaactttgaaatggtttagtctccccctgtgaatttgtcttactggttgcctttgttctccttcttgtctctccccctgtaaagcaaactgttggtaagcaggcgactgatctagatagcaacacatatgtactcttaccttattttctattccttctgtttggttatttattatgatggcatcaaacctgaaatcttaatctgttagcaagcacatctatatgataatatcaatcttgtgataacatgtaactcccttttgtctttaaaagttttaccatgtatttgggactggactaaaaagaaaactgccatggttacttctttcctctttagcagaaggataaggtaagagttgctacatgcaacttgtttattttaccaaaaatagcaaggtgccaagattttggcaatttacaaggatattagctatctgagagtatcacctataagattaagcttaaaattgttgcatttaaaacatcatcataattcttgttgattgtcatggtggcagtgcagaggctggtccgtttaacctttgaacacccgcagta

SEQ ID NO: 76037 - DNA, 317 bp, Carica papaya
  Intron number 2 from transcript evm.model.supercontig_50.1 69 (locus evm.TU.supercontig_50.169) derived from phytozom e v7.0 (chr-ID supercontig_50; pos 1568570 to 1568886 reve rse strand)
tgggaggtattttcttccctgccatccttatagagtcatgaatgttgtacctatttttctctattacaacttcaattccatttctgttgttcgtttttgtttattgtagccggaattgtttttgtcgccttgatgaaataatctttatagcaattcgatgtctctgttaggctataaatatgttgaaatctgatcggaatgttgcttaattgtttttgtgttttatgttttatgttttatgttgttaatttactgcgttttgattctctttgagcttgtgattcagtggatatatgtctaatttgggactgcaggct

SEQ ID NO: 76038 - DNA, 529 bp, Carica papaya
  Intron number 2 from transcript evm.model.supercontig_209. 16 (locus evm.TU.supercontig_209.16) derived from phytozom e v7.0 (chr-ID supercontig_209; pos 63537 to 64065)
aggagaaaaccagggcagacggttttgagtgggaggtagagaggagcttgatgaataaatagatttaaggttttgttttggggcttttaggctcagactctcagagagaatggaaaaggaaacaatgaacaacattttgggtttgttttggagaagatacagagcggagaagtaagattccggaacttgattcaggttcacaattcataacaatcttttttcttttactttagttttcttaatcagtgtattccatggtgactgaagatgagagtttatttgtgatccagctttcatgattttgtgcttctatttgtatcattgttcaaaggatacatgttacttgtttaaatttgtttcagttgtttatgaagctctgggagcagtgtaaaattctattgattatcacttgtcaaattctattgattatcacttgttgagctgtggttaaattcatgcatgactgaaatgcttaacaattattggattggaaggttactgttgctaactgtgtcaagcctttctctat

SEQ ID NO: 76039 - DNA, 972 bp, Carica papaya
  Intron number 1 from transcript evm.model.supercontig_47.7 9 (locus evm.TU.supercontig_47.79) derived from phytozome v7.0 (chr-ID supercontig_47; pos 1421313 to 1422284)
tgggtaagcctgtgcacgcgtggccgcctttgtggcaatttgcataatgtagagccaacggtgtgcatgcgcggggaaaggtttaatcgtgtggcaagaaatccctctcattgtattttttatgaacgaccttatcgcgtatgggcaaaccgatccgatggccaggattcgctttcatacaaataacgatgtaaaagcccagattgtttccctcctaatctcatcagacgacctagatctcttcttctttgaaattcaaacgaaaggcctagatctcatgagatctgatcaaacggttgagatttcaaatacgcgaaaagacccacctttttgcccttaataaaaccctagatagtagggtcacgatctaagggctcctgatcgaatgaccaagatgcattttttatgtaaaaagatgaaaatacccctcacaaaaatcaacggtcaaaatctctcaaaggagattcgacagccaggagcttacctatttaatggaaatactaatcaggttccctcatttgtggccaaatcaaccgacaggtgagagaagagaggagatcccacagtcgcggtctccacccaaagaaggtcgttcgcggtgataactgcgagcctaagaggagaagagagatcgcccaacagtgatctcgcacgagtaagaggaaaggaagaaagaaaaggaagaagaaggggaggaggccgagagaatagagaatgaggtggtgctcgtggcaagcaaccgcgagcgaagaagggtagagagaggaagaaaaatgaagaaaagaaaaaaaagaagaagaaaaaaggaactgagggagagaggagtagtggcacaaacagccatggccgcatgcatgaggaagaagaagaagaaagggtgggaagagaggaagaagaaaaaaaaaagggggggtgggggggagggaaccatgagtagtgtggtgtaatgagcggcgtggtgtcgcaaacagc

SEQ ID NO: 76040 - DNA, 727 bp, Carica papaya
  Intron number 1 from transcript evm.model.supercontig_17.3 4 (locus evm.TU.supercontig_17.34) derived from phytozome v7.0 (chr-ID supercontig_17; pos 389537 to 390263)
atcagaagcgtattctttgtgctgcgccgggtgaggttagtttagtttcatatgttgtcttctatttgtttatgtttgagtttccttcattccaattgctcgtgttatgtttttcaattgcaaggtcttttttttcttagggcaagaatgtgtcattattaattctgaaaaaccctttagttgttcaagcaagaaagcaactcaagtacacgtcaaactgccaataaactgttttagcacttgaatcataagacttgttggccaaggtaattatgcttgcttctccatcggggaagttttagtggtggaaagggagttatttaacatttttctagagggtaagattcacctatgtataacggggaacagttgtcagaatcgttttttctgcctccatttttggtgaatcctctttccagttctactactagtccccttttttttttgagaagtactactggtcctcaatttatatttatcagtggttcatgttgtagttcttttacgagcaagttttgcaaattgctcatttaattttggagcatgcctgttttcttcagtctttgtgaaaaatccagattgatttgagacatcaatatgcatctcccaactcatctaatggtgaatcctttgtggttagggcctggggccaaagtatttgaaagatatcatgccttttttcaatttgcacttttttatttctgaactttcatcatattttgacaga

SEQ ID NO: 76041 - DNA, 815 bp, Carica papaya
  Intron number 1 from transcript evm.model.supercontig_139. 29 (locus evm.TU.supercontig_139.29) derived from phytozom e v7.0 (chr-ID supercontig_139; pos 186183 to 186997 rever se strand)
gggagcaccactgaatcctctggttttcaggttcgcttatttattatttttttatgaagattaattgcaggtttgattcaattgctttctatgttttgacagtgtatgttgtgagtgtgggaattaaagaagagaaaaaataagaataaactcaaaagagatgagaagagaaaatagttattgatatgatcttctgatatgaattttacagctaactgaccagtgtttaaatagaccaattactccaaaaatatagatacaaattcttggtcgttgtcatcttagatgatagttacaatttttataagtttcttagataatatataattcacattaactaaaattctaataaaaaataaatactaaatttatttaacagtatgtgcgcgtgtaacgggtatcttttttttgtttctcaattatctgtgaagcagtggtatggcattcttgttgatcttttatgaagattaactgtgggtttgattcaatttccttctatattttgacagtgtaggttgtgggtgtgtctgtaatgggtacctgtttttttgtttctaaattatttgtgaagcagtggtgtggcattgttcttgattttcatagtttaaatactcttaacttctgaatgggaattttgttaacaatggtttttgtttcttgtctgtgtttgttgtttgtcttcttcaattgaatttgtaagtgaaagctttaagaatgttgcaatgaattacatatattatttcccactggtaactggagttggtttactcaggtgataaatgtgttaattcgttaggtgactgcgaatccttggg

SEQ ID NO: 76042 - DNA, 654 bp, Carica papaya
  Intron number 1 from transcript evm.model.supercontig_46.1 26 (locus evm.TU.supercontig_46.126) derived from phytozom e v7.0 (chr-ID supercontig_46; pos 1176160 to 1176813 reve rse strand)
tcctcgacaagccgctcagcaagggtaaacaagaggtctctctctctctctctctctctctctctctccgcttctatttccaattcctgattggatgcttagaaaatgcagaggaaaaagagaggaaatcaacttgaaacgggaagctttactatctgtagctacgtttttttttttttctagtttctctatttctcacctggaaaattggagttttagatccctagcagtagttgccattttatggctggatgaattttgtcgatcttttatatgaaatttgttttagtgaaatcgaggggtttcatttggagttaatgattgaattttagtttacgaaatcagttttgtcatttgattcaccgaactgaatggcttataccattggtgaactgagcgtgcgttgtcttgtcattggcttatttgaacagggaaattagtttaagtctaatcgaagcaactgaaaatgtgagattcaagcctttgtttcctgttctttgcctgcggttactatagcaatcaactggagtatagctgtgatctggagttgttttattctgaagggaaacatttttagtttttattagtggattgatgatggtgtggttttttttcccaggtcagtttgagtgcctttgcgttcttgttctcgga

SEQ ID NO: 76043 - DNA, 607 bp, Carica papaya
  Intron number 1 from transcript evm.model.supercontig_19.1 56 (locus evm.TU.supercontig_19.156) derived from phytozom e v7.0 (chr-ID supercontig_19; pos 1014841 to 1015447 reve rse strand)
ccactctcagaaaactcatccctaagtctgataaggtaaaattaaactgatgattcttctcttactctataatttacactaatccccagtttggttcaatttaatacctaaccatttggtttacttcgactcaattcaattcgggtgcctacatgctccttagcaatcgaatgatagatgaattgtacatctattaggtctggattaaaccaggaggatcataaaatcattgatcaacttgttaaaagaaggaaaatttcgatctatgagatctaccaacagtggtattgctcttctaataagctaaaaaaaatgcgatcacgggtggtgtctaattcatgaatttaggcaaaatttattggggaaatctggaatgcattattgtaatagcatttgaattcatcgccttccacttgaatcaatactaaatttatgaatttatttcaaaaatagcgttacctttgatttccaaatcaagaaaccgaatcttgatttgttttgtttttcaatttcccaaaccaaacaaaccgaatcttcatttgtttgattcttcgatttccaaatcaagaaaccgaatcttcatttgttttattatccaaatctgcag

SEQ ID NO: 76044 - DNA, 536 bp, Carica papaya
  Intron number 1 from transcript evm.model.supercontig_25.1 03 (locus evm.TU.supercontig_25.103) derived from phytozom e v7.0 (chr-ID supercontig_25; pos 1052865 to 1053400)
gagctttctctttggcacgagaaaaacccccgctggtatttcattggattcctttttctttcttgaaatataaaaccatctcttctttacgtctctggtttccccggtttctactcttctcgtattttcaatttcatttcagttttcgtatttactgatacattttcgtatccaagacttcctttcagttctttttttccgattcgttgcggtagctttgaatacgtgggtggggtatttccgaccttgattgttccacgggagtttagggtttaacattgagattgcaattttatcttctgtcgttccttttgagtttagggtttaacattgaaattgaatttcttttatttgggcatttgaatttttttcgtaagatgaatacttagctctctcttttccccttttggggttttttttctttgctgctaattgatttcgatttttgaaattataattatgtcactgaataatttgcctttgattttattgttttggaaattctgaatgcagaacgattgcgggaaaataagagg

SEQ ID NO: 76045 - DNA, 971 bp, Carica papaya
  Intron number 2 from transcript evm.model.supercontig_25.1 03 (locus evm.TU.supercontig_25.103) derived from phytozom e v7.0 (chr-ID supercontig_25; pos 1053495 to 1054465)
ctaaacaagggcaggtattttattcttttggtatatgcaaaatgtaaatgctgatacccttatgactacgctgcatgattctggtgagactaattatttgtgtgagggatccgtacttcccagtccttattgtgcagttgaatcgtctttaggttttcgtatgtttgagactaggctgtagtaaaaattgatgaagaattgcttgttggattgagcagaatgatgcagtggtttgatgattgtgcttcgctttcgttttccattgtattatgacgaaatgaattggacaggatagtgaaagtaaaaacatgtggacaaatagaactagaaaaaaaaaaaaaagagtcaagaaggatatcttttgggaaattttattaaatttgactttgatttacaaatagaatttttttggttgtaaatacgcatgtctctgtgacacagaaatggaggttctctttttagtgcgagcaaatttcatttaggttgtgaaatgtaagagtattcttttggatgtctcagatgaatgcctgaagtaaagagattcagatggcgatggaagttaagcgggatcagtaaatgtcctcctatttatctttataaactgaaattagttgcatttaactgtccaatgttggttgcattgagtttcacctccttcatgactagttgtttatttggttggctaggtgaagcaattgaggcatatttatctaatcatagtgtacaattggaacaatgattagctgtggtgccatatatgatcttcttagaaagtcaagcagttttaatgggttttgcataattttatgtactttttcatggcactgaacaaagcctttttttgtttttccttttcttttccatctgtgaaacagattaccacacgaactgatgcatttcaaaaacatatttaaatgcatgcattctcttctgagtattgtttatctttgtttcagggagctgttagagtg

SEQ ID NO: 76046 - DNA, 637 bp, Carica papaya
  Intron number 1 from transcript evm.model.supercontig_28.1 62 (locus evm.TU.supercontig_28.162) derived from phytozom e v7.0 (chr-ID supercontig_28; pos 2725862 to 2726498)
acttctctagcttcattcgccagctcaacacttatgtgagtcagggtctttttcttttgtggataaatgttgttattttattactatttccctttatggttaaatgttttggttgattgaattaaatattcttctgtctttttgacttattattttaataaacaactctgttgttttcttcagcatatttcagttaccaaaaagtactgatttctttacgttgtcttctttcaacttgaggccacctgttagaatcaagaatcgtcctaaggtttaagaagagattgattttgcctatgattttgctgaaatagattttatgtttgatctacaaatcctgttgctagcatctgctttaatacaggtttgcattctagaactagaataatggtaagataacatctaatttaaatggtatgctttaatcgattttattttctaatagaattagtataagacaataactaacgtgagtgggcaacctaaagaacagtaaccgattaaagtacggagatttatgttaatggtgtgatgtgatttttacatctttcagtattggttagggaagaggttttggtgttaatggtggagtgttattccagggtttcagaaagatcgattcagatcgttgggagtt

SEQ ID NO: 76047 - DNA, 1040 bp, Carica papaya
  Intron number 1 from transcript evm.model.supercontig_3.38 (locus evm.TU.supercontig_3.38) derived from phytozome v7 .0 (chr-ID supercontig_3; pos 224664 to 225703 reverse str and)
gaagcacgggatacagtgccaccaggtatttatactgctaagtattatatttaatgtttatctgttggaagcaaatttgcatattagataaagagacaatcatctctcagtttctgacatatcacattgttagcctgtggatatatctagtgcatccagaaaaagcttttacttttttgagatctatttttggatccttaaaacttggggtatatccatcaattttggaggagttaggaagatctctcaatcatcctaaattgggttaaccatgaaaatttgtattctaaaagcaagcaacattaaattttcccttattatatgtttgaatcagaatgtcatatgtttttcgttaatcaagttttgagatctttattaaatgtcctttattattcttttccttgaagatggtaggttagcatcttaattattctctggagtcttcagacacacttcttttttgttggagtaactcctccttggagctcagctacccattcacaccccatccccaaatacacacatgccactagtaattttcatgcatctttacccgagaatgctgctcctggtttgttttgggctgccacttgataaaaattaactttagtgagctactgaacaatcctgctcttttcaatgtttcgttttctgcgtaatgtatggttcttttcactaattgcagtgacagttctagaatcctaggcaatatttggaacaaatgcaaaaaatatattgaatttatttgcgaattcacgttatttcagctaagagagaatgtaaattctgtaaaagaataaattcatatggaatttggagtatattgttgctaattctatgtgaaattctatatgaggtcaattttatcattttcaaatatgtttagtttttgaatgcactcagatgttttctaatagctactcaggttcatgtattagaaagtattacaagtctgttgtctgtgcactttgtggagtttcctgactaaatgctgttacaatctagggctctggtgggagcaatttggtgactctgcaccg

SEQ ID NO: 76048 - DNA, 685 bp, Carica papaya
  Intron number 1 from transcript evm.model.supercontig_148. 34 (locus evm.TU.supercontig_148.34) derived from phytozom e v7.0 (chr-ID supercontig_148; pos 426487 to 427171 rever se strand)
ggggtacagaagacggccttatttcatcttagctggtaaatgttatgccctacaagcttttgtttgtctctattttgttaccagattctgtttttaatgttcatacattatcatctcattgcatccaaagaattttcgcatgattttttgccagattgtggccgtggctaagtacaattcttttgatctgtcttcatcttctataaacatttcataaattgggtgctcaaattttgattgctcaaagttacatcctgaaaagaaaggcttttgctaggaaaaggatgttttggaatgatgtacgcccaccacttttgtaatgttattaccatctaattacagaagacaattgtatttggttaaaatcttgttgaaacctatgggtgctagctagatgaacaagattactgcatatgttgcaagagaacttaaactaggactgaatcttgtttgtaatctaattgagagattatgaaagagaaaatttgataatccattaacgtgaattggtccattattatgattttttgagccattaaaacatggccttacgtatctataataatttgataccactttgtttgcaattaaaggatgatgaaacgagttcttgtccttctggtaatgttaatttcaggtttacttggtctttaatgaaaatccagggttacttggtgttgtttcc

SEQ ID NO: 76049 - DNA, 999 bp, Carica papaya
  Intron number 1 from transcript evm.model.supercontig_12.1 85 (locus evm.TU.supercontig_12.185) derived from phytozom e v7.0 (chr-ID supercontig_12; pos 1690998 to 1691996)
ctcacacagtatcccatctattcaaggtaaaatactggtgcaccctgttttgcttcatattgcttcttttactcttcttctttcttcgctttgtattcctgtgagtgatcaaaaaaatttagtttcttcccaaagcatatttgttttgtttactttggtgctggtagttctactgggtcttttgagttcaaaaacagtggtttatgttactcatcaagttgagttcttataggtagttcatattgattttatttttgttatgttccctgattaaagattgaattaccggacgattaacaacaaagtcattttttactaaagggttaagacctttatccttattatgagagcaacttattttgtggaaatagattgcagctcattaaaagagagttgctacttttaatctcgttagaaaaaactccaatctcgtaatttgagataaattcttacttattttattagtagtaagaatatcatttttacaggtcttaagaatttgagtctaattaagaaaattctacttaaaaatctgaatttattaaatatgagtttaattcggaatactagtctcaatctaattagaaatactttaaatatggaaaattctatactatttaggaacccaatactaatgaaaaatcatacattatttaaaaatcaaacactaattagaatttcatatttatttcaagttttaccacctatttacctgttgtcttgcctcttgctgcgccttttatatttacgccctacaaatacgtccacgacatttttgtcctgcattcaagatattgatgtcataatattaatctagtgaacattgatactaatgtataattgaactctttactataagaataagcttttaggaaaatcaactcaactctaacatttgacacaatatcagaataagaaatctagtgttcaattccctgttgctgtcctatttccgttaattaatttcagcataagataggacaggcctacgcttcatca

SEQ ID NO: 76050 - DNA, 739 bp, Carica papaya
  Intron number 1 from transcript evm.model.supercontig_27.2 00 (locus evm.TU.supercontig_27.200) derived from phytozom e v7.0 (chr-ID supercontig_27; pos 1992841 to 1993579 reve rse strand)
gttgctacttgccttgatacccaaggtttcttttcttttttctattttctcatacctgaatggatttccttcccgggttttccttcaaagtggatttcgcagtttggttttttggtaaaaacgtgatattattccacttacctacaaacacattagtatgtgcatatatgtgttgccatttgccttgatgcccagtgttatttttcttttctttttcttattttctcaaacctgtatggatttccttcctgggtttccatcagaatggatttcgcagatgggcttttgataaaatcaagaaagtttttcaccttcccactgacatattactgtgtgtatatatacatggtgttactttcctcgataggcctaacgtttttactttcttctttttgttcctactatttctcaaacatgaatagatttcctccctgggttttccatcaaaatagatttcgcagatgggtttttgataaaaacttaatatcattttatctttggacagatacattagtgtctattattatatatacctatatacatatatatatatatatatgcttgctgaagaagtttcattcgtgggttttccatcaaaatggttttggctgatgggttttttgatagaaacatgatatcattcatctctggacagatgaattagttcgtgaggatatatatgcatgtatatatgctggctaaagagataacgatggcctgtttaacacagtggatttag

SEQ ID NO: 76051 - DNA, 988 bp, Carica papaya
  Intron number 1 from transcript evm.model.supercontig_1476 .1 (locus evm.TU.supercontig_1476.1) derived from phytozom e v7.0 (chr-ID supercontig_1476; pos 3281 to 4268)
actccgccaagcctcctgcaaagtaagtcatcataccacttcattgaatcaaagtttgtagacttctgtcatgttttattccatcaattcatgctggctttgctttttatgattaattatgaagtgggtgttcttttaaagtagttatacaagcaactatcatgatatatttcaagattgaacccaggggttcttgggttatatatggagaaaaattatatagtctcgtgtaagtaattaatggaatttagatagtgaaaaataaatctgattgaatttcccattttatactcttgatattaatagagatctaattatactatttataagatgaactttttatcagcactcatttttctaaacctaatcttttgtctttagcctttttgttaatcaataatatttatatatatatatatatgtataatttcacagtttattatgttgataaacaagattttgatatgaaaaatttatttttaataagaagtacgaaaattaaattaatggtttgataattaaaaataaataataataattagcatgtttaattatgttttttttctggctgtgagttgtctgttcaatgaatcttgtcctaatacatgattatggcttttcaatgtgttgtcgggacgaaagaggaaaagaacaagacacaaggaatctcataattttctctctctctctctctctcttaattttctttcgttttctcagtaaccaaacaaaagttctaagtctgaacactaaaattcaaagccaataagttaagaaagtctacatttagcccacctaatttttgctattttaaatgcaaacaattttttttttttttttcaaaatctttggctgcccaagttattaacttcagttcattactagagaaacattcctttcttgtttttttttatcaattaagaagcttaaaattcatgttcaaattaattaatcacttgttatgtgactttagggcacaagttgtggg

SEQ ID NO: 76052 - DNA, 601 bp, Carica papaya
  Intron number 1 from transcript evm.model.supercontig_42.1 59 (locus evm.TU.supercontig_42.159) derived from phytozom e v7.0 (chr-ID supercontig_42; pos 1527940 to 1528540)
gagaaaagaggcaacaagttgcaaattgcgacatctagaggggctggaagcatacttagtagtcaatcatgacaataacacttggttggaattcaaattttccttttgtaatgaaaacttcatgtgcataatgaaagactagctgattaagggctagtcattttgctcttctttttcttgcactagtttgtgaggtggccaataatttccattccttttgtactaaattttgccaaatatgaaaacatttctgtaaatatatcatgttagggttatagcttatattttagggggtcttctttttcgatattgggtggggttgggggctattgttgcattaaattgattaacaaaaaaggatgattggaacctgtggagtaaaattgtttctaatgctgtggggttaaaatacatcttttgtgggccttcttaaattcctttatgcttctcttctcctttttctctgtccctttttgcatttacagtacacctgagattcagtgtatccggtccatttgttgcctgtgccattgttgaagcctagttgtggttgttccctttaagtaatggttttctattttcttataggtcatccttttca

SEQ ID NO: 76053 - DNA, 801 bp, Carica papaya
  Intron number 1 from transcript evm.model.supercontig_49.5 4 (locus evm.TU.supercontig_49.54) derived from phytozome v7.0 (chr-ID supercontig_49; pos 381603 to 382403)
gtttggttagttaatgtgcttctcagactatgcattgcttttgactttactttgaattgaaatattcttcttgtttgaagatagaagaaggagagattgtattttaattgagagacagcaggagaaatattttaacatatttaaaaaattcatagattacttatttcttgggtcacttcttgcacattttactttaatacaagtgatagacattggatgttactattttggttcttcaatttaaagtagttataagactacattcactttgtgtcaatgagtttatggccattttaactgctagaagttattttcattcttcacttaccaaactttatcttatcctatcgaagcagttaacatgaatatgattcacattattcattgatctccctgcaaaaaataaggcttcatttgatacagagaaaacatttctttctcatttcctagattgattggtagacaaatcagttgagagaatctcttagtggaattttggttgagttactaaaacaatcaccatataaggcaactgcatttctaaagcataaaattatgtagagaaggtgcctgacctaactgagaacaagtgttatatgtggagcaagcatagcaatataactgcataatcattgacagcatatgcattgtcttagaatcattttacatactattcaatagtgctagaaatctattttcttagtatatatatttagagtatggaatttgagattttgatttcatttgtcatttatgatctcatcaggcaaggaaaaaagtgtaagagggagggcattaaca

SEQ ID NO: 76054 - DNA, 798 bp, Carica papaya
  Intron number 2 from transcript evm.model.supercontig_561. 1 (locus evm.TU.supercontig_561.1) derived from phytozome v7.0 (chr-ID supercontig_561; pos 12048 to 12845 reverse s trand)
ggatagctttaccgaaaaatatcctggttaattttctatctcgtttttatctattcgatgtttataattaatttataaataaattttagttcgaagtttttaaatttaaatttataggttttttttttaaaaaaaacttattaactaatgattcatatattactaataattcatatattttatttaattttttaataataataaattagtaaatttcactaatgtttaaagtataaaataataaattataaaaaaaaatttacaaaattttagaaaaaaacacaaataataaagttaaaatttatctttaatgaattatatcatgatcaaaaataattttaagataagaaaagcaaagggtatatatatataatataaaattatgattgatgatgctctagggtttgtatatttgttcattggttgagttactagttcaaaagctatatatctaaaattctaaaatttaagctctgatctagtaaaccagtatatagatatatatatatatatatatataaacctagaaacacaagtatgcaaacaaaacaagaaagaatttacttagagattaaaagttgaaattaaattgtattatcgtattttattatattatgattgattgatgtatgtgcattgcataattaataaatatattaatttacttgatgtattaataattaaaaagatatatgtttttaacgaaatggtatataatatcattaatggaatattacgtagatttcttgtaatgtaaacaaagttgtgactgtgcagagaagatcaaggaccacagta

SEQ ID NO: 76055 - DNA, 525 bp, Carica papaya
  Intron number 1 from transcript evm.model.supercontig_53.1 46 (locus evm.TU.supercontig_53.146) derived from phytozom e v7.0 (chr-ID supercontig_53; pos 1214335 to 1214859)
cttttagccgttttggcaaaattgtggaatctcaggtagccgccggctttttcaccctaattttccttttcatttttgacttctgttacatgattttgctttcgcgctagtttatcatttactcgttctcgagaaaattgaagaatattttggcatctttacttaatccgcatcaagttagctgagtagttttgcgagagccaaatgcttgatgtgggtggttgagattttgtaatataagcaagattctgggcttatatagcccctattttcctttttatataagttatcatagtatgtgttagaaaaatgaagttcatccatctcattgtgcaacatgttcagggtaagtattcatcttaggcatagtaggaaagcgaaaaaacattgtgagattatttcattttattctttgtttgggttcaactgaataataatattttgagccaatgacattctcatccccatacatgtgaattcttttggttttagttcttttaacatatattttttattctgttcagg

SEQ ID NO: 76056 - DNA, 694 bp, Carica papaya
  Intron number 3 from transcript evm.model.supercontig_14.1 08 (locus evm.TU.supercontig_14.108) derived from phytozom e v7.0 (chr-ID supercontig_14; pos 1346498 to 1347191 reve rse strand)
atctgtaggacgaggcatactgggtcttcctattggttagtatgaatttgagtttatatggcaaagcttttctttttcgtgataatgttattaacaaagttgcatagtttacttgagaatgtgtcgtattgggcaagttaacaagtgcctacatctttaatttattcttgcatgacaaaatctttgggagcctccttttccttgtgggtttgctcactggaaatttgctaattgtgcctcggttaattttttcacacacaaagtaatttaattttttctttgatgtttttggtctagtgaaagcaaaaccagttacttccctaaggaaataggactatagtgggaaatagagtgaagcaattatatgtaacttcttatcatattttaaaattgcatcagaatttcctggttgttgacacttttcccaatcatcctaatagcagtgcggcaataatcatacacataggaagctatgtaactttttttgtaaagaggcttttagagaaaagatatttccatgactcgtaattgtgttcaaactttgaactgagagaccctgatagtgtttctggcttatattaaaaactgtttgctgctattacaaggctattagattttaatggaactattttatttattaaaaaattatcctttaataacccatgcatcttttgatttgcaggagccttgctaa

SEQ ID NO: 76057 - DNA, 677 bp, Carica papaya
  Intron number 2 from transcript evm.model.supercontig_107. 43 (locus evm.TU.supercontig_107.43) derived from phytozom e v7.0 (chr-ID supercontig_107; pos 208667 to 209343 rever se strand)
tcctcggggaacctctttctaagcaaacagaaaaggtagtgaaaagttggtggaagatgtggtatattagaactgaaacaatgataaattgttgttttcgtcaatggattgtatatcagtgagttaattttaggagctaaactttttgttctgggacttgcctggcctttctatttgagtggatgtgtaactttaacaggagagaaaaaaacattgtaaaaagctatatatcaaatgtggccagggagatagatgattagtgttttagttaatttagtttagagataataactcaagttaatacttatcctcccctccatatgacagtttaggatttttgtttgttgttattttatgatatcaacaaaccagattgtggttgtgcctttgaacttaaaaattggagaagaaaattcagtattaatgtctgttaaaccgtgtttaaccactataaacatagtttattattagaaatgtaacatgtacgctccattggtaatgaatcagatcaaagagatccaattacgaactcatttactcctagtccttttaccacttcagttgttataccaaatttttcattttttaaaaagaaatattaatttgcattttgtcgttttatctatcaatttcttttcatgcttccattatcttttatcaccagttgctccttgcat

SEQ ID NO: 76058 - DNA, 837 bp, Carica papaya
  Intron number 1 from transcript evm.model.supercontig_14.1 12 (locus evm.TU.supercontig_14.112) derived from phytozom e v7.0 (chr-ID supercontig_14; pos 1388177 to 1389013 reve rse strand)
accctttgcctgattcccacaagctcactgttagggtaacccccaaatttccattttccttctcacgacaacttgtgtttatgttttcatttatgcgagaagtaatcgatggtcttatatctgttgagtttctttcctttcttgaggttaatctggtaggttgatgtctgaattagtttgaacctttggaggtgaaacgataatttgaagagaaaaggactgataatcttcaaatccttttcattaccgttatataatcctaataatattcttagaagagcaatcttttttagggttttctaactctgtgaactttgggcattttgtgtgattttcctgcgggaaaatgtgcaggtgggtgttggggtgaggaagggaacttattctgccatattgttgttcaaatatatttgtgtatatatatatatatatatatatatatatattatatatgtcatttatgtaaggtataaagaaaaggcattgacaagaactgtgcatgagaatcttggagatcaaatagcgtatgtgttttaaagttatgggagaaaagagaaaattgaggtaaagagaagggagagaactaaaggtaatttagttcttataggaaatttttagtttgttcggattgagctcgtttattttaattctgatgttgttgtgaagaacaaataattccaattccttcccgtctggtcccctatagtttgtcgggaggtgcactttgtcctccaatatggttgctaatttcattgtacaatgatatttttgaggcttggtttgggtacttgttttattgaaaatggcgtttgatgttggtataggtgaattcacctc

SEQ ID NO: 76059 - DNA, 666 bp, Carica papaya
  Intron number 1 from transcript evm.model.supercontig_42.6 9 (locus evm.TU.supercontig_42.69) derived from phytozome v7.0 (chr-ID supercontig_42; pos 649346 to 650011)
ctcttttaaacaggtaatttctttttatcagtttgagtaacttgtatgtggcatatgttattgtactatattttttattgaaaaagaagattattgatagagaaagagagtacaaatcttttatacatttacgatttcacttttaagcttttctcaaatgtctaacttttttttttttatagttttaaacatctcataatgaggtcttctccctaattaaaatgtctgattgtgaatatgtccatgttcaattcttcaattcttcacggtcttccttgtaataaaatgtttttgtttcattcttcctggcaattgaatcttttatgctatttctcaatgcttttgataggtgctgattttaacagtgtctgatcactgtttaattgtttgatgtttcttgaaatgaaaacttttgattatcacctgcttcttcgtctctttgttcaactgtgaacctgtccttgcagattatattaactgctttgcaggttgtttaagtttcgtatgcatctaacaaattttttatccacaaagtttctctttgctatttagatatcttataagcttgttgatctattcttttgattttcgtccatttgtatcctttcttgtaatcttgcagcattggtggtaaacttttgtttttggtgtttcagcttgaagata

SEQ ID NO: 76060 - DNA, 730 bp, Carica papaya
  Intron number 1 from transcript evm.model.supercontig_13.3 05 (locus evm.TU.supercontig_13.305) derived from phytozom e v7.0 (chr-ID supercontig_13; pos 2843764 to 2844493 reve rse strand)
aggaggaactccacaacatcactgaagacctctctgtatgcccccaatttcttcatctccttctctttttttcccgctcaaatcttctgcttatatgctcccattctgtttgaacataaatctcaacttctttaatgtttcctactgttgctgtaatcaagtcgtttgaatgtgattgctcgtgttggttgtattctcttgtagttcttagcttgaaaagtgaaaaacccgtaatgcagaatttcaagtgtcttgattaagatctgctaagtttaatgtcttcttttatggattctctttctattttaggactgtcagtttcgtgaatcttgatcttataatgatttgctttcttttcaggttatgcatttgtttaaattgttgaatcggttgacaaattctttattttagtctttagattcgtgtgatattcttaccggtgagattttaccctaagtgaaatttgggttaaatagagtaatgcattgatgatgtaaaggacaaagccgcaatgattttagcagtaaaaaatagactgactgctaaaaaatggaggatgattttgaatttgtgtccatacaaacaaaagagagtgcgttatcctttctaccgaacttcatgcctatattatttgtgatgatatgtttatgccaaatgtggcatgtaacagaatgttgaatgtttgctcttgatctcagtctttttcaagcagcgttgaggacaaggcaaa

SEQ ID NO: 76061 - DNA, 566 bp, Carica papaya
  Intron number 3 from transcript evm.model.supercontig_2126 .1 (locus evm.TU.supercontig_2126.1) derived from phytozom e v7.0 (chr-ID supercontig_2126; pos 6820 to 7385 reverse strand)
gcaaaaagttcagggtatgttgatctcatatgatttccttttaagtgtttgtttatgctttagatttcattattcagttggcacaaattactacaattctgtttctcttctttggtgatgatttgcttgcatgatggaaaagattgggatgtatgttacacaaatgattgagatgagaacaaaaccatatatatattatatttctcaatttgaaggcaaaagaagaatctactgtacgtataaaataagcagcacttgttgcaagagtgggtcacatgggaaaatagagatgttttgtttcccaatgatagcactagcttccttgatgattgttgtagtatagtgtttttatcaaaatttatttcaaatttaatatttatactccaaaatgcacatatattgtgataagcaagaaaaatcataaagatgctcgtgttgagaattggaacaatccagtcgaatcatttcacattctatgtatacattatgttggggaatctaaatactaatttttgataaatttcttaagaactagtaacatttgtttgttttttatttatttcagt

SEQ ID NO: 76062 - DNA, 611 bp, Carica papaya
  Intron number 2 from transcript evm.model.supercontig_1.19 0 (locus evm.TU.supercontig_1.190) derived from phytozome v7.0 (chr-ID supercontig_1; pos 2873234 to 2873844 reverse strand)
aaattgcagctattgtgctcaacttcgtgaacgaggtaagtgttaattactctttcagtgaacgttagcgtttaggttttcacctttttgaattttgtgctcaatgaaacaaaaattttgagttatgtatcgtacaggaatttttctcgcgtttgattattacatgagaattgattaataactcctaaaacttcgtcattttagttcttattttctttagtgttgtttcctgcattttctcggaaccaaaacggtttatgctgagaaacctcagttgctgcttggtctaggaataatagagaaactaataataacaatttgggtctgtttgattcacgacaaatcaattgtagattatgaaacaaaagatgtttatcctgcagatttgagtcttgacttcgtttatatgttcaattgacacttgacagtaggcttccatttcccatagaagtactttttactttctatgaaacattataggctgtgaggatagtatggttctctgagtcctcctgcacagtacacacatattctctttattgttcatcctctggtttctttgatggggattcaccattcatgtcttcttaaacagcaaaatagacctctaa

SEQ ID NO: 76063 - DNA, 458 bp, Carica papaya
  Intron number 2 from transcript evm.model.supercontig_42.8 2 (locus evm.TU.supercontig_42.82) derived from phytozome v7.0 (chr-ID supercontig_42; pos 722297 to 722754)
ttgaaacctggtggattttttgtttttgaggtatggatttattatttctagccaggtatagatcctttataatcttcaagtctatgacataaatttaccctcttcttgtttcacttgtcctttggatgctttaacacaattaccgatctatcatcttaaattgcaaaagtgaaaacctaaaagacaaactggatagaacttagcaacacttgaactgtttacttttttcctaaggaatgaagatctggttcctaatatttgaaggagcattggagattttaacaaaaactaattttttgaatgggagattttaacaaaaaacttaagagatagtgtatgaaagaatcaattctttcctttgatatatagtttctttgcaggcattgttattttgtatcagaataaaatcggatacttccatttacattttcttcttctcaccttcatgctgcagacaa

SEQ ID NO: 76064 - DNA, 609 bp, Carica papaya
  Intron number 2 from transcript evm.model.supercontig_393. 3 (locus evm.TU.supercontig_393.3) derived from phytozome v7.0 (chr-ID supercontig_393; pos 11457 to 12065 reverse s trand)
ccatatcgtcttgctctctgccccaggcatccagggtgaacatggcagccatacttattatagcaaagaagacactgacctagttcccagcctttgttcatttatcaattaatttattttcattattagataattattttcaaaatttttgaagatgcatggactgttagattcttttgatgatagggatgaacatagaccaccttttgtgggactttggtctgtttaattcctaaaactgatactatatctgaggtggctactccaaatctgcagtagtcttagagagttaggcatttatgtgttctccaaaattttgtagaggtggaaataaattatttctcttccagtaagcaaatattgcggatgttgtttggtttctgttagtgtcaaactctgtctaaatattgcttgcaactaattagcattagcatttcttaaaaaaaaaaaaaactaattagcattagcattgttgataagagtgagtttatttagaataaaaaattattgataacagtgagtagatgaggttcttttgaactggatgatacttcctgtgtggttttttcattaggagagtgaaattgtggcaggtgttgtggacagaaa

SEQ ID NO: 76065 - DNA, 818 bp, Carica papaya
  Intron number 1 from transcript evm.model.supercontig_27.8 5 (locus evm.TU.supercontig_27.85) derived from phytozome v7.0 (chr-ID supercontig_27; pos 1034833 to 1035650 revers e strand)
gaggtaagtggatgttgctgtatacattatggctattctttggatagtgagttttctttttccatccagatgttaaaatcatttgcttgatgccacttgggctgagctcagaccttaggtttgaatagcatgtaactaaccagaatggcaatagttgttcttttggctccactaagagagaatgtgtattcttttgattgttagattgttgcattctttttatagacccttgcctctctactattctaactccttgcctaagactcggtaatccaacaatttttgaatctaaaccaccgacacttaaaaattcgaactcaaattatttatgatgtgtaagttgagacattatatgaaactcaataatcacatatatttttgatctaagattaaagaatcataagtatgtaggatatctaacccacttacgcttatcaataaatatcttatgggattttagagcctaatgcatgcactggtgggaatttttttaattacattgcttttattgaggccaactatattcccatactaatctttgagggaataaatctatagtttattttgtagttgccttgtcactagacagacctccctgtcatacagacaaacttttaattgataatgcttcatgttgtttatgcttgtattgaggtcagcctttttccacctaattggtggtggggagcatgattttcttcaccacagttagtctgtgtttaccttataaaaaaatttggtctgtgtcttatatatgttctctaacatgatgacaagttttctccatgttccaggtcctgggtgttcttctgtaggat

SEQ ID NO: 76066 - DNA, 804 bp, Carica papaya
  Intron number 1 from transcript evm.model.supercontig_218. 3 (locus evm.TU.supercontig_218.3) derived from phytozome v7.0 (chr-ID supercontig_218; pos 33545 to 34348 reverse s trand)
aacctatatcagctgctgacctagaggtgtgttggcaacaatgtctatcctttttgttttctttcaaaaaaaagggtccattcttgttgcaatgagatattaagaaagttgtgaacttatctacaggaataacaataattttagcactggctaggagaatttgtctcaatttacaattcttcttgtcccaagaattggcactgtttgtgtatgatatcatactacaattatcactagctgtatctattaggtggtatctcatgcttggtaggaaattacttaggtctcaaatgttaaaatgcgatatcagctaaaaataaacgcattaacgtaaagtttccacttgggtcattatgcactattgtgtctaaggttgtttttcttatcattatatttatatcctttatagagttgctttggaaagcaatttgtattagcttttcttttttttattctttcctgagcttataaggtagttttggaagaaactgcacaagtattttgtaagttcttctgattcagaagcccctggcataaaacataataagctaacttagctaagtttttaccatagtacactttgacaattaaaaaaaatgtaattcatcgagagtttagaagctaaaaaaaggtcaatccaaatgatcaaaagtacaattgtctttttcctgtagtctttactggtttcttgtttttcttttgaagtgcttgcatgttatgctatagaattctggatttgactctttgaggttttcttttctggttgcaggaagcagttcgcagggccactatagcacggaaatt

SEQ ID NO: 76067 - DNA, 846 bp, Carica papaya
  Intron number 1 from transcript evm.model.supercontig_13.8 2 (locus evm.TU.supercontig_13.82) derived from phytozome v7.0 (chr-ID supercontig_13; pos 837885 to 838730 reverse strand)
aggttcaagctccatcgtaattatatacatatataaagatatatagatttaattttttaatccattttgtccagtccaattaaattaaaaattaataaaaatcaaagtgaattagaacgtaatcatttcttctcattgtgtgtgtgacaaaatctaacgtggtaattaataaaattatataaatatattaattaattaagttctaaattctcttaaattaaagattgtagacatacgtcctccaagtataaatatttaattaataggttatttttagtataattacaatgatcgaatttaatcttttgttgaaatcaaatgagatcaattcttgttttattatggaacaagacatgtttggaatatgttttatctcattcaaatttgactttctctatgaaaaataaatgtttattagtctcgaactcaaaaaaatttaatatttttttaaattgttgcaggtctacaaattatcaaacaataacttaacatggttattttatcacattaatataaatataatcatatatttatattaataaaaaatttatatatatatacacaaaggagatcgggtataggcaagatttggctgagcccactccaaactgtacatttttttttcattaatccaaatttaacatgatctaaactcgtactttaatgcgaccaaaacacctattttcttttctcgcattgttaccacgaatgaaactagtcgtattagtaaaatatttggattttaaatctccaataatctcggtaagtatttgagagttcctttgttacgtgataaaattaacaaaaatacttatcattacatctttgagaaggtatctagctgga

SEQ ID NO: 76068 - DNA, 814 bp, Carica papaya
  Intron number 1 from transcript evm.model.supercontig_19.1 49 (locus evm.TU.supercontig_19.149) derived from phytozom e v7.0 (chr-ID supercontig_19; pos 965074 to 965887)
attgcattggaggaataattgggtcagctctctgctatgcttttgctttatcacattatatttgcattaattgttgttatatgctaaaaaatgcgcttagtttctgttgctttcaatgtttagaacagtgatattcagattatttgtttcgatttagttataattgctggcatggaatagcaacaggtcaagtgtattaatgtttatgtgaggtcaatagtatgctgttattattatgttcttattatccaagccatgtatatataaaacatagacttcagtcaattggaactctatgccaaagaacagaaaacgcttgtggagatttttatttaactggataactaattattgtttagtgtgataatgttgtatctagatgttgtgggcagtactttgtttagatataattcgccaatagactttgcatcttttcgaagaaatcctctgctgtgatgctttcttgggtttaaatgaatctacattgagttcaatgaacgtggaggtcagggaatattcagttaatatccggaaatgggatgctgttttgattatttttgttaaggagaaagacatagggcggatagaaacattttctggttaagcataattatcttgatgattaggttgaaaatgggtgtgttagggactgtactccattttttcaccaaaatgttgaaacctctttttgtttgcatattccatgcaagtgcaatgcttctgacatggtaaaatctcatttgtgctgatattctccttgagccgaaggatgcttatggtttggatgatattttgttgccccagataccagata

SEQ ID NO: 76069 - DNA, 770 bp, Carica papaya
  Intron number 1 from transcript evm.model.supercontig_113. 6 (locus evm.TU.supercontig_113.6) derived from phytozome v7.0 (chr-ID supercontig_113; pos 45475 to 46244 reverse s trand)
gcaagtaggcgtctatttacttgctttattttgattggttcagctaccttcatactagttcttgatgcacaattcagaataattcctaaagttttctcccgtgttctgcctattaaaagatcagattggttagattcgaatcttacagttactttaaaagcatattcttgaactcgacatgaaattcgataaatattttgtcataattcatcttataatctacatacaatgtgttttactaaaatttaggtctttatggtgcgtagagaatattgagagacatccgtagttaatctgtattcaatatcaatctattgaaaatgttatctatgctaaaaattctcttagtaattggtatgcatatgataactgttgtcagttaaacatcgactatgaagtagactactccggagttaggaaaatataatattatgtaagaattaaagattgagcctaagaatataactaatacttcctctatgcccagaagatgaagaaattgaaattccttgtgaaccacgaggaatagttagctcaagaaattggctctcgttgaagttgtttttgtttatgttaatggtattgagcaatttccttgtttcatcaattttaatctacctcatgttgctattgatgttcttatctatgatgattgcattaaagagttcttgaacttcgttcattttatgataagagcgtgtaaatttggttaccgaatgctttgactttttcaaaattttaaagagcatattcaagtctttcttatcttg

SEQ ID NO: 76070 - DNA, 450 bp, Carica papaya
  Intron number 1 from transcript evm.model.supercontig_3.27 0 (locus evm.TU.supercontig_3.270) derived from phytozome v7.0 (chr-ID supercontig_3; pos 1916574 to 1917023)
tcaaaagggtattctttttatgtttctatgatttgaattgcgaacacagaattcatttttgatgacctggacgcgagtatttatctcgctttagcctcttgggtaaccattcaaccactaatttaatatttatgcccgaaaataccaccctctttttattactctactcctacttcgttatctgatgagatttttattccagttagtttaactagctgcagagaattttagcgaatttcttctagttctggaacggggattgtttattaggtcttcatcatgtcagaaacttgcagatatccttcagctctatttgacaagtgaagtgtgaatatgatcatttactgagcagttaaaagttctatacgttttttcttgctttgtgcatttaattatagttgccttcagattatggaaaccattctttttggcaggaacaagtgcttcaaa

SEQ ID NO: 76071 - DNA, 403 bp, Carica papaya
  Intron number 3 from transcript evm.model.supercontig_146. 42 (locus evm.TU.supercontig_146.42) derived from phytozom e v7.0 (chr-ID supercontig_146; pos 210510 to 210912 rever se strand)
gccttattgaggaaagagagaggttagatcccttctactgaaatctaagtttccattttcatggacttatttgtctccatgttttttgatttattaccaaaattttgggcctaaaacacttggtttgctactgaagtaacatttaacacacggaatgcaaagtcttcattcaaattcaaactatcagactcttcttttaagttcagaacacttccattaaggcgctgttggtttctggagatgtgatagaaatgatcaatattcaccaatgggcgtcattctcttcaagaatttccaatgattatgctaactcatatgccttctcttatgctgacttggttacttttgatggactctatctatggcagttgtgtttcagaaagggacaagaaagagttagaca

SEQ ID NO: 76072 - DNA, 1040 bp, Carica papaya
  Intron number 3 from transcript evm.model.supercontig_125. 35 (locus evm.TU.supercontig_125.35) derived from phytozom e v7.0 (chr-ID supercontig_125; pos 663941 to 664980 rever se strand)
gagaggtgaattccttaaaatcccttggtgctgtactttattttacttaccttgttttctaccaattccttgctgtgtatcgcaatttgcaattgctgaaacaaataaaaaaaaaatttcttcttattttggacatttttgaatgtgttactttctggaagttgcagaggacacttctttttgttttctcctttgtaaaactttctttaaaggagtttgaaggaggaaagaaataagaaaggtataaagaaccttctatggaaggggaggctagagattggtagtgttggtaaaaattgaagctagtttatatgaatgaaaagccgtccatagctgggtttttcttgaagtagtaatattgttataatcttttgttgggttgaaaaaaaaaactagtgaatcggattagcaactatgaattaatgcatttttagcctctcattgatgtagtcagtgtattgaagatcttatcatcacaatttaattatattacatagatataatccctccacggtttctttattctttcagtaagaccaggaaatgtagccagccacgggcatctcttttatggactgatatgtttaggtgtatgtaatgttgttgaaaaccccaaaggactaagagagaaggtgagagagaggggggaatggaaagagagaaaaaaatctttatataggtcagcacataaggagcaaaattgttattgcatagagatttttccgatgtaagacactgttgaataatgataaaaactgtaggaatgttatcttgaaattgtgaataagatgaaccacgttttcataaatttgaactaaactttagtcatgatttgatattatactagctatgctgttttatgattaggtgacgaatgcacccgagtagcctgaattccaattgcatgtttagatgtgcctaatgaatataaattcgaaacttgggtgcatcacagtctctttaatatgaagaattttattcaattgaaattaattattgatataggcacaccgagagtcaactgggactgtatcatccaa

SEQ ID NO: 76073 - DNA, 420 bp, Carica papaya
  Intron number 1 from transcript evm.model.supercontig_165. 37 (locus evm.TU.supercontig_165.37) derived from phytozom e v7.0 (chr-ID supercontig_165; pos 218442 to 218861 rever se strand)
cctttagttgttcttgttttcgagagacacaacaggtagctttttatccattttctaaaattcctccattaatggttgcctgagtaaaactgccatcatttcttgacgtgggtttcaatatcatctttcaatttttgtagtggatgacaacgtgttgctcgttatatctgctgtgtttgacctttgtcttcacataaaaatatgcccataagtttacttcttgtagtcaaaactgtacttgaacatgttgctttagaactataaaacaatgggtatgcttttgtgttttcatcgcaatgtgttctttcattgtttgttactgtggaggaagtgcaaaattggaacgttacatatctttaatatatttatggtatttacttaacagggctaccgataactggaagactttgaaagagttag

SEQ ID NO: 76074 - DNA, 777 bp, Carica papaya
  Intron number 1 from transcript evm.model.supercontig_182. 9 (locus evm.TU.supercontig_182.9) derived from phytozome v7.0 (chr-ID supercontig_182; pos 86824 to 87600)
agatcgcccacgaactatccaatcctcgctttcaggtttcctctttccagaatctcataaaaaagaagctgcatagtaaaatttcagaaaatgaatatgagtattgcttggactggttcatcaatgctttataaatggtgtcagcaaatgtgatttatgatttcagttatcgttgtttttgttgcctttttattgtcatagatgccgtacttcttcctgttatatatcagaaaaacacctaatctcctgggtaggatccaaattagtactcgagccagtttgttttttgtataacctctttaaaacactgtttcttgtactgcttagtttgtagtcagagattttctcttcagttatcgtggcaataagcttccagaatttgataatagtgattgtttgtggtattcttgtgattggtttaatggagattttctttatggtctgtattctgaattggtgtggcaatcggatgaactgagttgtattgttgtgaataattgtatttgaatgtcaattaattcttattttgatttatttggaaatgaatttttaattggtattatatcaagcattaactaacagatgaaggaatggaacggaaactgaatcacggagttgtaatcttttcgtttccaagcaaccatgttgctccttatgtaattcttgacatttgacatttgcatgtgcacggctcaccattttaggattacaagaaggaagatgtctttgtttctattaatggaacatagttctgtgcattagtacaggatactagtt

SEQ ID NO: 76075 - DNA, 1003 bp, Carica papaya
  Intron number 3 from transcript evm.model.supercontig_39.5 6 (locus evm.TU.supercontig_39.56) derived from phytozome v7.0 (chr-ID supercontig_39; pos 968848 to 969850)
attgctattgaggtggagttgcagcgtccactgacgtaactactgacatgagtttggtatgagcagcagggaagcagaactatcagatgattcttttttagggagagtaaagttaatttcttcaacttcaaggccccagtcttttaaacgatcgagcaagatagagatagatgagaggcatgtgaatggagtttgttttatctgtgatgaaaaaattcttactgggaatcaatttaacaaactttttggaggttgttgatggcatgaatttaagaggaaaaggttctgcttgaatatcctgcataaccgaagcaatttcttctatctcttgttactctttcttctgcacaggacaaagacctccctgacggaaagagtaatgttatgagtcctcaaccagctagcaaggatccaattagactagttcatgagcactcgtgtttaattttgtttatgcagttgatttaggcagagtttcttgtgtttacttctttaggtcgcatagtgagcaatagagatttatgcagttaagttagacagttcagcggtttcttaatactattatgtgggagagttagtcttttattttagttgatgattacctaacatgtagtgggtagtttttctaaagatttctttctactgcatttatagataaaatatgatgaaaaaaaaaaagaagagatcagcagaatttcttttaattgttttgagttactgttgagattgttgggttttctctaatcagcccttacattcaaaataggtcataaatgccgaaaatctaacaagtattcttttaatttctcctagatatctaggtctataactagatctcaaagtagggacaataacagttacatgccggcaaatgtttggccagcagattgaatcggagccatcctcctatttaagtattttagtaagtaaaaacacggaattctttcttttttcacagtcttactgttgcagtgtttctacatttgtttcaggaggagaacag

SEQ ID NO: 76076 - DNA, 574 bp, Carica papaya
  Intron number 1 from transcript evm.model.supercontig_1741 .1 (locus evm.TU.supercontig_1741.1) derived from phytozom e v7.0 (chr-ID supercontig_1741; pos 8289 to 8862 reverse strand)
ggattcattcgatcactcaatcttcgatccatagtgtaatcttatttttcttgattctagttatcttctttttttacttctttgattgaatttttgtggctttagcttttatacttcgtagaagattacctttactaatcaggtcgagacgatttttcctttttttgaacttcttttatcaatttcttcaaaatgctgctatttagctctccctaagaaagaagaaagaataaagaagaaagaaacgctgttgcttttattgcctttttggtttcttgcaaagagaattgcgggataagaaccttctttttttctgataatcctgattcatgatgtatttcttttgacactgcgattttaattacgcgtggagttttgatttctatgttctttattgtgtatttaatctttagtttgacaatctaattgaaaattttcccctcccggcttgtttgttggctgggaaaattttgccaagagtttcttgatttttgcaaacgttttttaccatacgatggatgacgtgttcttgtttgaatttatttcagatatttgtgtacggaatcgtatccag

SEQ ID NO: 76077 - DNA, 479 bp, Carica papaya
  Intron number 1 from transcript evm.model.supercontig_0.61 (locus evm.TU.supercontig_0.61) derived from phytozome v7 .0 (chr-ID supercontig_0; pos 2297327 to 2297805)
ccggtgactctgcttttgagcaatctagctctaaggttatctgctttatttttttctttgtcagccatggatgatggatctctgttttttgctcttactttctcttctttatcccacgtttaccattttctcttatactccatttctgttttcacattgcccttgcgaaaaatcttccttttttgacatactattaattattatgcttctgattaattaaaatggagatagaatccaataatgtttgatacctggattgcaaatcatccggttctgtattgaaatcattttattttggcttgtctcagtgcgcgtcaattcgtactcctaagataaggagaaaaacaggatttaaaatcaatgtttatctctttcctttgaataatctcattctgtttggtctaaagtttcattctcatgggaaccataatggcttgtgtttaccttctgtttattggaaatttagggcttcactgcct

SEQ ID NO: 76078 - DNA, 745 bp, Carica papaya
  Intron number 1 from transcript evm.model.supercontig_2.32 (locus evm.TU.supercontig_2.32) derived from phytozome v7 .0 (chr-ID supercontig_2; pos 601800 to 602544)
ccagtaagagccaactgaaggtattaactggtagcaatggggctacggtattagagggtgtatggcttttttttatttgtttttttaaagtacgaacacataagctctctaactacattttgaatttcttttacatatttgacaaaaaacaaacaacttatatgtagacagcttttaaactctctcaaaaatatttttaagaggactgttggatgtggcttttatttccagagatattattacaagctatataagagacctgataacccataataatgttaaaaattctatccatatacaatatatccaactccttcttgaagagcctcttctcgtcatttgataaacataacattttatagcttatatctatttaaataaaaacattttatagcttatgtctttactaacatgtaataacttaatacaatttataagctcgggttatcaaatacttcaacgacttatttgcaaaagggcttttatcaactttgaagagtttataagtttataagccttgtacatttaaagtgagtaaaattccctcttaattacacattccccttgcttagatgggactttcttgaagagcttataagcttataagccttgtacctttgaagtgagtcaaacaccctcttacttcacatacctgatgtaaagacgggattttgctaggtgtattcccatgtaattatttttctgaaagctgtgttttatgttcttttgcaggataaaggggtcg

SEQ ID NO: 76079 - DNA, 535 bp, Carica papaya
  Intron number 2 from transcript evm.model.supercontig_130. 4 (locus evm.TU.supercontig_130.4) derived from phytozome v7.0 (chr-ID supercontig_130; pos 22159 to 22693 reverse s trand)
ggaaaaaaggtggctgttataggcgcaggcgttaggtcagtcacttcatgaacttggttgttagatatgacacgattggattttggtttgtttgtgatttggtttgtgtagttcaatttaacgcctagtttagctcaatttgctgtctagaagcttatttcttggtttttcaatgctttgaaatacaatgtaggttttgtcatggaggaattgaaaatttatgaatagttaatttagttaaactgcatgcaaagatgtgaaacgctattatattattttcttctgcaaattgtatataatagagtttaatattcttatattatatggtaatctggtttttagtttttagaaatccggttacacaattttaggtattttgtaagagaaacatgttgttccatctagcactttctacactcaagtgttaagagttattgaatttggttgccgaacttatattggtatagaaaatttgactgtttctttgtggtgggaatttcaagcgggctggctgcagcttataagttgaaatcac

SEQ ID NO: 76080 - DNA, 788 bp, Carica papaya
  Intron number 1 from transcript evm.model.supercontig_149. 10 (locus evm.TU.supercontig_149.10) derived from phytozom e v7.0 (chr-ID supercontig_149; pos 246069 to 246856 rever se strand)
gggttgactcagcgattctgccagcagtgcagcaggttttattttttctcccctcttgaatttttaaccttgatatatacatatatatatctatatgtcttccccatgcattcgaaaattttcaggaagatagaatcagtagttgctagtcatgtcaagcttgaactaacctgggggaaggagcgatgaaactgataataaaatgtagtggagagacgaaattgcccctgtgttctgtggtgatggaggagctaattattggtttcccgtactggaataatcccgtttttacgtaccgtttggtttgctcatttttatttcgctgattatttatatatgtatatatatggacttctggtagaccggataatttacttattttgattaggtgagatatgaccaaacaccgttcaaaatctctttccatattttcataatcgactgcaaagtgatcaagaaaaaaaaaaaaaggaaaatggaaactaaataatgcattttctgtagccaaatatgttgaattgttgttgttggtcgaaggagatgagaaatcctgaaatgacaaaaacacccctaggataataaactggagacaatgattgggtagatccgtacatgcggaaatcccgagggcattatcgtctgttgaactgactttgggtctgtttggatattgcgtactgtttgccttgcctgttacggcaagtactcaaaatagcttcacaatcatcatccatctgcaaattactcgtacaggttccatctcttatcggaattcgataacgggaaac

SEQ ID NO: 76081 - DNA, 1009 bp, Carica papaya
  Intron number 1 from transcript evm.model.supercontig_102. 1 (locus evm.TU.supercontig_102.1) derived from phytozome v7.0 (chr-ID supercontig_102; pos 21121 to 22129 reverse s trand)
ctactgttgccggaaggtaatcaaacgacgcaatagctctacttaaatttttctatgctttaattttattatttgattattttgtgatttggttgtttaaatgaatctcatgcaatgaaattctggagttgaaaatttcaaggattttttctatgcaaaacttttgattatttgttaactgcttctatatgcatagggtctggaattctgggttactatgtaggttatagagtttctggttgatcagaagtgaactctcgtccttggaaatgtctaatatggaaatttacttctgcacttgataggccgtctagaggaagattttatatagagaggatttatcgtaatagttgtgtaacttgatgtgcccccatactaataatttggcagcttggaagggaagatgttttgtataaattgatcactcaaccgaatttgatgcgaatctccttctattaggttatatatttctttttgtgatcaatttggcttgctaatgtttgttgtggatgccttttagcatagtgtctccaatgaaaatggtatctttttgctgtcatgttaatttactgataagagatcatgtgtgttgcgaagtattttggtaatctatttccacttgaattaagggatgaaaggaaaacccatcatttgttatgttgtctagtgatctgttgtggcaattatctgaaaacagttggctcctgattgggcttcagaagttgggcgagtgtgttcttttcttatggttgaagtcagttgtataagatacaaatcgagctacagtggtcatttttgtgaatgattccctttcttgtgccttttttttttctaaatattactttgtcgatgtcattgaggttcaaatatatttctgttatttgcttgagttaacagctatgtactttttcatgctagttctctgttattgattcaaaataacagttgcgtttttctttgtgctccacaaacagcataactgttattttctttgcgaaagaaggtgagg

SEQ ID NO: 76082 - DNA, 786 bp, Carica papaya
  Intron number 1 from transcript evm.model.supercontig_217. 22 (locus evm.TU.supercontig_217.22) derived from phytozom e v7.0 (chr-ID supercontig_217; pos 247974 to 248759 rever se strand)
accccgtcgaaaaagggccagcttgagacctccaggttctttttctttcatgttaatcagaatttatttattgtttcccattgttatgattcaatttttgtatgctgacattgaagtgtaaaatcttggccagtagggtttatgtagatttgttacatttgaaactataactaggtatttgtagttatggaagctagtggaacctttaaaagaaacaagggatttgttagctgaattagcattgaaatatgttctatgtctaatcatgttagtgtattatactcctcgatatataaatgattgtaagattttatcatgagatgaattagttcaaatatggataaaatatataaattataatggaaaattatatgcataaaattagaggagaatacatgtaaactaaatgaatcaaaattcttgccaagatgatgctaaatagcatgctgttctttcaatggagactaaagaactccaagtagtagtaaatagtgactggatatcttccccaaaatggtctaagatccctctcacaatttgaccttcattggctatattcatttgtatgtctcctttatttttatttttcaaaacatatttgtttctttttatttttcctgagaataaaatgaagggactacactattctgtttgatttcagtattttatggatagaaatttaaaaaataccttgtaaggaaaaaagtgtttgggaaattcaaatgtattctattttatttattttgcctagaaattctcttaaccaactgcatacaagttccagct

SEQ ID NO: 76083 - DNA, 491 bp, Carica papaya
  Intron number 2 from transcript evm.model.supercontig_6.15 3 (locus evm.TU.supercontig_6.153) derived from phytozome v7.0 (chr-ID supercontig_6; pos 1138259 to 1138749)
cagttgttaaggggttttacaagaaccacatcagggtaaataatgaagattcatcttcttgatctttccgttctcgtttttaagccatacctcatattgaaaatgttcttttatttcttgaaaatggttgagaattagctgagatatcttcttttggagtccaatcagagattttgattttattaagggaatcttgcatataataacttgtaatgatttaaacatttgatgtgttactttgcctaccgccataagatttttgtttaaaatctaaaatggaatcagagccaatctgtttccttggctgtgcagagcaggaagggtagttgatgttattcatggactgagtatgagaatgttgagtagtttatatatctaatagtttatagtgcttttgatcacaaggatggagatctatcctaattttacttgtgacccttttttttttcttcgcagactgttcttaacagatataacagctttaccggaat

SEQ ID NO: 76084 - DNA, 732 bp, Carica papaya
  Intron number 1 from transcript evm.model.supercontig_309. 1 (locus evm.TU.supercontig_309.1) derived from phytozome v7.0 (chr-ID supercontig_309; pos 2308 to 3039)
catcggctgagcgtggagatcaggaggccgaggaggtaactaatctgttttgttactgatttggtggggaaattttgaaatccagcttagaattacttgcttgctgagaaaatgaacaactaggaaagaaaattaagtcttaaatatggcatgctttctgttttgatactaaagcaaggtttttttcagtgaatccaatgaagagattggtttccgatgcttttcttttcagaaacatcgcatggcatcaaagagttaatgtccacaactttgtcgaatgtttaccctgttaggagagcatccagcacctacatttatattctagcattacaattcatacgcacatctaacttgtttctgctctaaactcttccttacaaggatgaaagattggaagggtaatagtcctgctatttaatacagctcatactgagaacccaggtgatcaaataaaggaatccaaagtacagaaagagcaagtcttggttcgagcattagatcttgaatcttctacgctaagtgattaaataaaggaatacaaagtacaaaaagagcaaagtctcggtttgagctttagacttaaatcctctataccatgctaatttaaggatagttgggtcaacaaccatccaataagcttagaagcctaatcagtacctgggtttttttatttttctggctttttctttgtggtcattcctttactcaaattgtattcaggccggtagtggg

SEQ ID NO: 76085 - DNA, 770 bp, Carica papaya
  Intron number 1 from transcript evm.model.supercontig_52.5 1 (locus evm.TU.supercontig_52.51) derived from phytozome v7.0 (chr-ID supercontig_52; pos 455913 to 456682)
attctgtttgggatacgaagcctgcctggtgcgcagtcttttccttctgggtatccattgttttacacttttactccttagttcttgcttcaccgccatcgttttcactgcagctaagcataatggcgatggtgttgggtgatttttctttgattaaatttttttaggcacccggcaaatcaataagcttggcaaattttatctagaatttctcgcttgttctctaaattttatcattcatcgactctgggatgctttaatttcacttaaaagttttcgcttttaaataaaatttcattattttatagttaaaagtgaggatttttaaataagttttacaaaaaaaaaaaattatgaatttgttttgtaggctgaaagaacagtttaagatcttggatctatcccgggtgatgaaaaatgatcaaatgggtttcttgaattatatgagagtgataagttttgagagctatatgattctgtaaagcttctatgataattttcttacatcatgcatgcttctgtaataattttcaagaactgcattctgattaaaagcttttccacttcattgtgttcttttctcaccatgccattttctcaattaaacttcgtgattctgtagtaaaaatgcagggatgtcttggagattccatcttatgaacagcctgctttctgtatattgagttacatggttacatttcatgactttcagcactggtatgatttgttccctaggtgtcagccctggacgataacacttacaggcgtat

SEQ ID NO: 76086 - DNA, 375 bp, Carica papaya
  Intron number 1 from transcript evm.model.supercontig_1.14 3 (locus evm.TU.supercontig_1.143) derived from phytozome v7.0 (chr-ID supercontig_1; pos 2136670 to 2137044)
gaacatccgttgatcataacgtagtgctcgtggctgtgtgttccgaccataagaaattaattttttgactttgtttctttaaatatgggtgatgcttatttgtgtattcactaataatggttaaaacatagataattaagaatcttttcagaagaaaaaaatagatggaattaaggaggggtgatatggatataatgggaaacaatgcctaatattgtgtatgcattctcttagatatcatgtttccttaagttcttatattagcattcacagtttacatcttgttgtctttgcttctaattatgcattgatttaattcttctcatgacactgtggacaggtgattttggagttgcagctcagcttacaaggacc

SEQ ID NO: 76087 - DNA, 1001 bp, Carica papaya
  Intron number 1 from transcript evm.model.supercontig_58.7 3 (locus evm.TU.supercontig_58.73) derived from phytozome v7.0 (chr-ID supercontig_58; pos 744476 to 745476 reverse strand)
agcttcggctttggtcctttctcgtgttcttcaaggttcccctttcatttcctctatttcatttgcattgaatatatttttggtttttgtttaatgtttacactttaaaattggttcttcccagttttgtaaacaagtcggggcgacttaaaaggatttccttttttaattgttgatactaggcactacagcttagttgaaattgaacctagttttgatggaacactgagtgattctatcgagttcaatttgtagtaaaaagctctttatctgttctttggctaaattatttatatataatttttttcactgaatgtaaatcaagtacaggacaattgtttgtttatacgattaattaatagagacatgagaggaatatgaattgtaactcaactaactctgggataaattttttttagaacaattagttcctggggaactgcctggtttaattgaattttaaaaaagaaaatttcaattttcaaattgtattttctttttttttttttttcattttcttatttcacgagtaattggtgttagtttctcatagctgttgcacataaatggaaaaagaatgctctaatctgttgaacaaagtagaattttgatttgatcagttacttctaacttaaacaggttctgtttttactgcattgtgtgctattaacagtctgtttagttgatttcttacttagttcctggttctaaattagtaagttggaattaaatttctcatggacaaatattttcgaggtgggtttgggataactcaaaagacaaaaattcatcttgtggtaatgtacatcaaaactaatataactagttgttgactaggaattgaatgtgaaatgaactaaatttaatgtaatatttaaatgaaaagtcctttatctatgtgatgatcagtggttatggcgcatgctaatgatgtccagctattttttcctatgatctactcacactctcctacaaatctatcagggaatatcattaacttg

SEQ ID NO: 76088 - DNA, 575 bp, Carica papaya
  Intron number 1 from transcript evm.model.supercontig_119. 49 (locus evm.TU.supercontig_119.49) derived from phytozom e v7.0 (chr-ID supercontig_119; pos 345227 to 345801 rever se strand)
attttcataaatccaagacgcttgacaataaatacgtaagctgattatcagaatttttgataccgttttatttttcacgattctcgagtacttgttttagggttttggttgatcggcatttggtatgaaagtggagaattatgaggagagaaaagaatttggtttcttttattttttagttaatttatttactgaattctcgtttgagctgaggctttgagttttccagaagaagcttccatgtggattgggaattgtgttctgtacctgtaacttgttctgtgggaaaatgaggggggaggaaaaaaaaaaagagagatgaagaaataactggaacttagaatgtgtagggttcgggtttggaaatgtaggttagggtggtttaattactgaaaattatgtaagtctttattttattattattcttgttaactttcctgcacttttttaattaattaaactgattattacttagaatctgcttataaatgatgatgcttgggttcctttgcttgatgttaactgttggattccatttatggggactgtgtttttctgaatctcgcttggcgcag

SEQ ID NO: 76089 - DNA, 545 bp, Carica papaya
  Intron number 1 from transcript evm.model.supercontig_13.2 56 (locus evm.TU.supercontig_13.256) derived from phytozom e v7.0 (chr-ID supercontig_13; pos 2301043 to 2301587 reve rse strand)
gtccacggaatccttgggaggtcaggattttattcttctccgtttcaaaatatcttcttcgatcaggttttcaagcaaagtttgattttttatttggtgctctggattgaaattaggtattttgctttggttacttgttgtctgaatatgatttagttcatctttttggtgtgcgtgttttcaaatttcaaattccaattgacatggaaatttttatttgtgaatttaaagcgtactataaccttctctttacttcatcttcaattttgattagaatttgatgctaactgttcaagccggaatttgtttctaattctcagtgaatttggcgtcggactttatgtttcgtttcttaaagtacttaccgataattgctttggttatgttcctttttcgaacagattatgtacgataatcagttaaattaatggaatttcctctacggttaaatgatgcaatgagactttgactgattctcatctacatatgttctgtactttgcttctgcagtgcaacggattggaagtttgctgctgagcagttcg

SEQ ID NO: 76090 - DNA, 815 bp, Carica papaya
  Intron number 3 from transcript evm.model.supercontig_1.41 2 (locus evm.TU.supercontig_1.412) derived from phytozome v7.0 (chr-ID supercontig_1; pos 5111917 to 5112731)
gtactatcaaggtaaagaacaaattatatttattggttttttgtttgaaatttcattttggtatagttttaggaagtcgtacttgtattgtgaagttttgatggaagtcactggttgagccactcgtagttgtcttaccatatttttggtcttcttaatttcagtatggatcccacatttttttttttaaataatatggatcccacattaatacttgtaatgggagtttttcaatgaaaatttgttcaggaagttactctcagtggtactttgagattgcgtttgatttaaatttattatgttgaatatgagcagatatacattatgaatgagacaaagatttttataaaaatagaactctagtttcaatttcatttcatattcaattcaagttatgtcttttcaacaattcccttggtaagaaatagtacaaatgtatatgtttgaagtttaatatattagtgaagttaaattataattaaattctacatattaaataatgaagattgagaaataaaatgagaacagaataaccttgaaccaacagagcgtaactggatgacttggtggtcttacactaataaattgttggcccttttgtgagaacattatcgtgcaatgggtggatagaaatagttgtaatacctgattcaacaccagtgggggaatcacagtacagaaatatggtagtttcagtcccaaatatatagatttgtttctttcccaagatttttcccgctgtattttttttaatcttcattcatgtaaataattttgcagttattgataaagctggcggataacagattgattga

SEQ ID NO: 76091 - DNA, 681 bp, Carica papaya
  Intron number 1 from transcript evm.model.supercontig_109. 18 (locus evm.TU.supercontig_109.18) derived from phytozom e v7.0 (chr-ID supercontig_109; pos 304339 to 305019)
cattaaggctgatcaacggccgaaattgtttgcatgtgattcgacgaatcacttgcactcctccttggatatttaaactcaaaacctctcatttcttctccatttcttcccctttcctcttcttcttcacttgactaaaaagagggaagcttaagatagagtttgagtgtaaaccgacagcttcaagccttcttcctcctccgctgtgaggtttttctcgtgccttcttcctttaaccaaaggtaagtctcctaactctcattcctgactcttttcttcacttagggtgccatggatctcacccttgagcttttcttctctctcaaatttgcagaataccttccgcaagtcccaaggaaagcttttctccctttaaaccgcaaacatcctcacttcccttgaacccgaaagtttgacagtaagaggtaggggtttagtatttcttctcaccctcctaatgagttttctaggctttaaaactgtttaaaagtcaaaatgcttgttttgtttttgattgcttcatgcatgaaattgtttactatttgaatttggtttatgtcaaatgtttgatgaagtttttgaagtgatttggaatgctaaatgccgaggtgattatgcatgtttgaagaatgactaagatgtttgaataatgtagattgaaacagtaaaaataggtttgga

SEQ ID NO: 76092 - DNA, 929 bp, Carica papaya
  Intron number 2 from transcript evm.model.supercontig_223. 8 (locus evm.TU.supercontig_223.8) derived from phytozome v7.0 (chr-ID supercontig_223; pos 113506 to 114434 reverse strand)
ggtgtaagtattgtctgttcatgaaacgataatttttagataaagatttgctcgcccagataagatttgaaatacatgaaaaaaatcagattaaatagaggcaaagtgcatgtgttgatggttaagtgtaatattctgtttaccttttttttttgctttttccttttttttttgtttttgtgttgatcaagtgatgttaagtaaggtatcagtagacttttaagaaattgtcaatgtggcctcatgaacatgtaacaacttatgtacacaataaagtgcacgaattgtggaccacctgattcaaaattggtgtaagtattgtttgttcactaaatggtagcttttggataaagattaactcacatcagcagagaacttcagattaaatagaggtgaagtgtatgtgttgattgttaagtgtaatactgtttacctctgttttctgctttgttttttttaatgtttttttgtattggacttgatattcaatagggtgtcaataaattgttaagaaaatgtcaatcatgcatcatgaacacctaatattatgtaaacattgaaatatgcgcatgagggtatacactaagaatttttaaatttttacttgcatgcttaatcatgcatatgctgatactgagctgaagagtgtgtattttgctttctaatagtacaaataaggaagcttctactagcattcttcttgcacttttgatttctgtgcatttctctttctctctctctcccaattgccattatttgagttcttaatagagaaggttcagagtatgatcccttccacaattcatgatggcattaactcatgttagggcatcttcatcacatatttaacctgggcttcaccttgttttgactatttcttttcgtggatatcagatcattaagtcttggagtatttatctgtatcaagt

SEQ ID NO: 76093 - DNA, 478 bp, Carica papaya
  Intron number 2 from transcript evm.model.supercontig_125. 23 (locus evm.TU.supercontig_125.23) derived from phytozom e v7.0 (chr-ID supercontig_125; pos 383194 to 383671 rever se strand)
ttcctcaccctcttcagtacaaaatcattgtcagggtacatattttttgtcttttagtttttttttgttcattgttctccactaaataatggcttttagcatttacttattgtcagtttactctttggtgtaaaagtgtgaaaaattatgtctgccttctcttcaaataacaaaagcatcagagaatgtttaattagcaatagagttctagccttaagatcagttgttgggaaaaaaacactttgaaattatatgaaagttgttcttttccaaatttgttttgtttgaaaaacaaataacttgtggaactttttttttgtttggaattggtttttggaaacaagagaacccacaattatagcattttttctacttctggtttcagtttgaaagtttattacctttacgtactactgctttagaggttggactaatctagtgggttctgcagattcaaacaacaagccagtcttcacca

SEQ ID NO: 76094 - DNA, 475 bp, Carica papaya
  Intron number 1 from transcript evm.model.supercontig_27.2 37 (locus evm.TU.supercontig_27.237) derived from phytozom e v7.0 (chr-ID supercontig_27; pos 2179427 to 2179901 reve rse strand)
tgcgctactcatcgtcctcacaacacaggttactttctcacttttcttcttcctttaagaaagttacaggtctttttgttgtggaaaatgggaagagtgaaatataaatctaaggcagatatggaaagttaatttttttagtttagtgtaaaattcatgtgccatcgatactgtaacttgttttgaaattaacgagcttttctttttgaagttagtgcattgatggctttttttttccggatagtgtgtaaatttttaacagttataatctcagtggacccatttagtttcaattttgaagtctttttatctctttagattttcttttcaagaacagatgagtctcccacttgtttcggatatttacataagaattattgtcgacttgtttggttctctgtaaagttcaggctgttttttttttttaattgagaagtttaattatttgttttctttttattgcagatattgggat

SEQ ID NO: 76095 - DNA, 449 bp, Carica papaya
  Intron number 1 from transcript evm.model.supercontig_21.8 1 (locus evm.TU.supercontig_21.81) derived from phytozome v7.0 (chr-ID supercontig_21; pos 999627 to 1000075)
gtccaggtactttctggtgttcatttttctttctttgagaagggttctttcaggttgtctttttgtgtggaattgagtagcggatccagatttttatatggctattagggtttgatatgtaatttcagttctttttcatgctttagctttcttgctttagttttcttgcagccaataacagggtgaatgtgcctgtttctttagttattttctagcaaaataatggttgcgcttagatatatatgtatatggttaagctttcaaatctctgcttgcttcatgagcatatccatcgagattatttccactgatgcaatgttcttttgataaatgtatcggtgctaatatgcacgctatagtatttttttgttttcttggctcttgtgacggtaataggagtcatttatccattctaatcctagatttcttggttgaccaattaacagcta

SEQ ID NO: 76096 - DNA, 434 bp, Carica papaya
  Intron number 1 from transcript evm.model.supercontig_33.2 (locus evm.TU.supercontig_33.2) derived from phytozome v7 .0 (chr-ID supercontig_33; pos 4937 to 5370 reverse strand )
gaataccaaagaaaggtgagctgggtcttcttttttcaggaatattggattttgaaattttgatggttcaaactattctagaaaacaaaaaaacacagaaaaaaaagggcccgtaagattttcacttcgcatgatgatacacgaggctagtgcatcaatatgaaaacatatctcatcattcttcttgagtaatttgacctcaatctcgccatcatttccaagtgtagatgctcttttttaccctttcaaagctctgaaaatcgaactgaataagtttctgcatcttcagtgataaaatgagaacaaatcttaacatcttttgcaggaaaccacggaaattctttgttttaataaattatagaagaaaaaaatttccgtgaacttttgctcttcctgcctgccttttttttattccgcaatttgtctcagggaga

SEQ ID NO: 76097 - DNA, 837 bp, Carica papaya
  Intron number 1 from transcript evm.model.supercontig_30.1 27 (locus evm.TU.supercontig_30.127) derived from phytozom e v7.0 (chr-ID supercontig_30; pos 1680646 to 1681482 reve rse strand)
cccgttctctcgagcaagccaagaaactgtaattctccaacacttattttttgaatttcttctattgctgagtttactcttctttgttttcctcattttccccttttaaaatatcttgtttgatcccgttcttatttttgttggaattttgtgtgtcttcattttctttgaagggccttgaaaatgcctatgcgtttcggaattcataactttgtttcttttttcttttttttctttttattttttgggtctccctcctagtttatttttattagttaggcgattttttatcaaaaaaaattatttaggcgattttcttctttatcttcttcacgtggatgaatgacttaggcgatttcatttatgttttgtgctttctctctgtttctttagtttttatttgttaagtgggttctgattttgttggattagaaaattgggttactgtacttttcatgtaaaccaatcggattaatgattttatttgtcttgtctggactgatgactgtcaccggaaataacttttttttttttttttcagttctattgctccctggtcagggatcatatttctgttctttttttctcggtgtccttctcagaatattatattttcgtttgaggtggaaattatgtccaatatatcttgaatattaacagcccaattagaaattctctgaactaaggtccgggttaaacttgggtttttttactccgtaagtagtgtatttatgttagataattttagtgcatttggagttattcacaagtgagacttgtaagattttctaacccattgctaaactgcagttttccgaatacgtacttgcttgttgg

SEQ ID NO: 76098 - DNA, 940 bp, Carica papaya
  Intron number 3 from transcript evm.model.supercontig_145. 3 (locus evm.TU.supercontig_145.3) derived from phytozome v7.0 (chr-ID supercontig_145; pos 140017 to 140956 reverse strand)
tgaggagatccctaaacccccacccgttaatagacgtgagattcttgatatttctctctctctctctctctcttctttttttttttttttgaaaggtcacttttttctctaattactttacgtggtgtttttctactatgtatgatcagacctacaaatgagaattaggtcaatgtctttttttttggaggtccacattaattttttttctcaaacaagtcaatagatctttctcaaattctgatagcacataagtcttttccactcaccgtaacttttattccacaaagacatgtagttggagaaaattcaagtgaaaagagctatgcctttgcgatctgtgcttacctgtcaaccgtgcgtaggctaatgtttcttggtttgttccaagtgacaggaatctttaccacatttatttcaattcttagccttcttcctcctcatgtcatttatattcacataatagatcatctcacacccacagacatggctaacttgcttttaatttttcagaaatgagctttccatgtctagactctaaaggaagttagtaagccaaaacccaccaccatttcttagtagttgaactcttcacgttgttattattaaccctaacataaaaaaaaaataaaaaaaaaaaactggagtttgtttaattatgagtgtgcatgggttgtttgcttgcccaaatgtgaatgagacagagaaggagataagtagtttatcccccggaaatatagatatatagaatccacggattagatggttaaagataatgatgaagtgatgatggagagagaaaagataataagtaagttgatgcagatacagaaagtcagcgaattgattttaatgtgtctgttgtttttgtccgcgtttgatttgtctttcttctccatgtccagctccagagaagagacagagagtcccatctgcctat

SEQ ID NO: 76099 - DNA, 1025 bp, Carica papaya
  Intron number 1 from transcript evm.model.supercontig_205. 32 (locus evm.TU.supercontig_205.32) derived from phytozom e v7.0 (chr-ID supercontig_205; pos 253327 to 254351 rever se strand)
ggaacctgattcttcgctctcttctatcgtctgttcgcttctcttcttttcttctttgtactgataaaaaatttccctactatgctctgatacttttgttgctctccttttctttttttttttgaaaaaaaaatcacgtcgagtcaaaacggcttctcactactattcggtcgcgggacagacaatgtcgtgaaatttgagttctcgtgcaaatttgatggttgattacgtgtagtgaacaagtgaattttggtcttgcaactcgtacgttttaccctcatattccgcacttttgaaccaaattctttattgttttgaattttttgaaatggagcctactgctaataatttgttttctaaaggcttcaaatgaaactacttgctttaaaaggccgttttgttactttttcctggagagatagatacaatctatctcattgtattttttctttttaagattatagcagttgatctttgcacggcaaccaaaactttgaatgttttttaattgtaatattaggttttaatcataatattagatttctcgccgattcagccaatttcttgattttgacttgatgaaagctcaaaatttcttaggttaagaagagtctagatcatttgaaagtgtttttaaagtacaaaattgattgctccatgtcatagatgtaaagacactattatatctaagttctcaaattgtatgatgtgaactctatgtagtgttcaggataatgtggttaaggaaagggggcaaaaatgaaattggaactatgatatagcttattcataattaactaaccacaagaattgtgtaaattgccaaaaaaacacatgttcttagacatcttagtttcgatgacaattgccatttatttttcttgctagtgattttggcagcactggtacatgtcatctgaatatgagttctgagtgttgagagatttgttcagctctataatatataagcttcatttattttttttgctaaattattaagtgcagacatttcccagcaagtccag

SEQ ID NO: 76100 - DNA, 907 bp, Carica papaya
  Intron number 2 from transcript evm.model.supercontig_21.8 0 (locus evm.TU.supercontig_21.80) derived from phytozome v7.0 (chr-ID supercontig_21; pos 989463 to 990369)
gggagctccaggcgacatcagtatagtgcttccaagtaaatcattttccctgttatttatctgttcagtttctttctggccacttatagtctttgatatgccacatacaatatgcttgcagatggtttattacaagaatattaatataaaagatatttggcctttttgaactacctctttcttcatttaacatacctcttgttgccattttaactctagacattttttgctactttcattcattatttttgcataacaatgttagatggggatcttgaaataaacgaaatttaaagggataccttcataagtatgaaaagattctaatgtgaatgtgggctggtttgacaatgtaaaaatgtgtatgattttttttttctatatctcgtcttagttcccgaatggttttgatgctactgcatattcctattatttagcttatctcaactggttgctttattgtcatgtattttctgtttccttttcctttttgataaaataagaagttcattacgagtagatagagaaattacaatctgagggaagaaagctatcctccagaaagatagacagaacaattgtgaaatcaaggaaaacaagctgtatcaatattaataatatcctaattccttcgtagcatagatgaaaacatgctttagcccaaaaagaagcaaagcacccatcattcgcgaagtgcattaatgaaatgtagacctttgcttatagattctcgcatttctccgctttttctcatcaattaaactggttgatattttctttgtggtttaactatgcatacatgttgctagttgcaaatcttaacagctgctgttatatttagtacttttgttaagttgaatcatttattgcagatctaaaggaacttgacatcactgggaatttgatc

SEQ ID NO: 76101 - DNA, 394 bp, Carica papaya
  Intron number 2 from transcript evm.model.supercontig_5.85 (locus evm.TU.supercontig_5.85) derived from phytozome v7 .0 (chr-ID supercontig_5; pos 664694 to 665087)
taagaaggcaaaattaggcacaacccaaaaatctggtgattttcaaacttatgttcttggaatgaggttttttattttatcatgcctcagaatataacattttcatatttgactttaatgtgacaattaaaacttgcatagagcttatttcaaaagaaaaaacttgcatagagctgtttatgagttggtcttgtgcatgactgggagtatcagatttttgtttctgattcaggcatttccaataatatctgcttattgtctttctcttcctctacttctttaatgttgtagaaggaactctgtgctatgtgatcttagttttgttttgcttatatgtcactgattctttgctgaaatttgttgcatgtggatgattgcaaaaaagctggtggcc

SEQ ID NO: 76102 - DNA, 632 bp, Carica papaya
  Intron number 1 from transcript evm.model.supercontig_183. 26 (locus evm.TU.supercontig_183.26) derived from phytozom e v7.0 (chr-ID supercontig_183; pos 245121 to 245752)
gcctacatctatcaaggtgttctccaagagactctgtaagtaatgttatttctatcttctcttttttttaaaaaaaataaagatttttggcgtttaatttggttattagcattattgatttgaaaaagcattttcggttgctgtgatttgtttcatttctggatcattcttcattcttgttttctgattttatggttttctacttttgttcaagtgaaaatgaagagaatctaggttaggaaacagttctaacagttatctatcctgaaatctacaaccattaaaatggacaccccagtgattattatttatttactaaatatttttccgagttacatgcatttaaatgtaagtacttggagtaccgagcactgttgtttcaaggtttgattcaaatgcattgataaactatcatctattttcagaggaaagacgaaattgtttattattcttattacttttgtttaaccgacagaagttgaagataggattacctggcaacatattatacttatcttggattagtcaattaaaatgtgaatccgcagaactagccttgtttcttctcaaaataataacgttttccttttgttgaaggtcaacaaagcgatttggcccagacgggaagaggt

SEQ ID NO: 76103 - DNA, 910 bp, Carica papaya
  Intron number 2 from transcript evm.model.supercontig_3.34 8 (locus evm.TU.supercontig_3.348) derived from phytozome v7.0 (chr-ID supercontig_3; pos 2392126 to 2393035 reverse strand)
gaactttgtgggtttcttgattcaaggaaaatcaggttagcttccttaagatttaagggattttcttccttcctaatatagtatatgttcctgcttatattgataattaataccttaaagtttttggcaattgatcatcaaattatagtattccaacatggtgttagagtttataccggctgttccgttcttattgaaaataaattttagccaatcatttgatggtcatgtgtttctatccctataattgtttattgctaattctggtgattgtgaaaattggtaatttctctttgaccttttctttttctgtccaattgttccacatcaatctgttcagctctttctaacttataaccaccatatgagcctatttattactctaatccaataatgaaaagagtatggcaagacgatcagccttttatatgtttgaagttgggagtgaagttgcaatttccagctttatttcttagaagttcatgtcttatttagttgaggatagagattggtgtattgaggcttttgtggagtagaattcttatattcacaaaataaagagctaaatctcgtagtctactcataggttgatgttaagctgttgctttcattctgttgtctatttataatagtgggagcgcgtgacttttttcccctgcttgtgtagtttttgaacctgttaaaccagagctaacaatggacatcaatagttgtcaaaatacatgttttttgcttgcctaaattaaaaaaagaatttcaaaactctatctggctgcatcattttgaagtttgcaaaatcttttgcttctttctagtattcagtgactaaaccatgttttaatatgtttatttctgtcagcatgttaacagtgtatgtgatttttctccagaaggggtttaatcactcgga

SEQ ID NO: 76104 - DNA, 195 bp, Carica papaya
  Intron number 1 from transcript evm.model.supercontig_35.2 9 (locus evm.TU.supercontig_35.29) derived from phytozome v7.0 (chr-ID supercontig_35; pos 637209 to 637403)
gctgagacctgaggtatgtatgtttcttaaacatcggctgattctatcttccgacccttccctcccttgattttgtttgacttctttttcttttctcttcttctttgattattaagagaaaaagtgggtttagatctcatctgattttggaatcatgtaggtatatccccttttcgctgccgtaggggttgccgt

SEQ ID NO: 76105 - DNA, 926 bp, Carica papaya
  Intron number 1 from transcript evm.model.supercontig_157. 47 (locus evm.TU.supercontig_157.47) derived from phytozom e v7.0 (chr-ID supercontig_157; pos 299923 to 300848)
gctcatatcagtggcctcgttgctgctcaggtattttcttgccttcgttttctgtagatctgtgcttaattctgtctgattctggtttcttgtcggagatcgaatgctgggagattggatctgggttctatgtgatttagcgtctttttctcgaaatctggatcaatgttttcctgtactcatttatttattgaatatgttgcatagatctgcgtatccagtaatgggaatctttgggcttttttgtctgttttttcttctactctgtacttatccttactatgtaaaggaaatggtagctaacttgcttgtcattctccttcctcctttttcttccagaccaaatattggaatctcccgttagaacaattctactatctgattcactatctttaaatgcattatcttcatacaagtcatactttcacaagcagtgcgttaatgtctcattgttccttagatctttggtgttggatcttgaatgagcacaggagtactgtaagcaacaaactggaaatagaagcagagtaataggttttgttttacaaaatggggcttctttcctggatttagtggtataatgtgacacttttttttaacatttcttatggcagggattttgaatcttgataagtttaatacgattcaatatttgagcatatgctagatcagtactattccacttaattcaatcagaagatggtggatttgtattctcccttgttatgggagaaattttgaaaaaccgaactttaattggaacttagaattacaatgctattatctttcagatattgatttaatttcttctgttttcccgtttcttttagatagaattacattttgagctaaactcaaaccttattattttgttgaaattgttgtatataggaagctgcaaatccttttgagttctgtgacattgt

SEQ ID NO: 76106 - DNA, 446 bp, Carica papaya
  Intron number 2 from transcript evm.model.supercontig_103. 20 (locus evm.TU.supercontig_103.20) derived from phytozom e v7.0 (chr-ID supercontig_103; pos 173720 to 174165)
gacactggaagtcctctctcactagtgattggcaggtgaagttctatttttatcatgtaattgattggcttttgccttctgataattagaggaagatattgtgagtatctattgttatttttcttaattgttattggcagaaatttcctagtgtttgcaaactaaaagaatccaatggatctgatggaatgtcctataaactctgttcctaacaatttgagttgaggttttaagcctcagttcaggctcagagttgttaaggtagtggtgtttggttctaggtgttacaatagaaagtatatttcctattactttcttgtttttcgttgttagatgtagttttattaacgggaaacaagcagggcattgggacagtagtttaacagttagattcaaatttgtttcttccagtctctgcattaagcatcctaatttatttggtggaa

SEQ ID NO: 76107 - DNA, 882 bp, Carica papaya
  Intron number 1 from transcript evm.model.supercontig_139. 56 (locus evm.TU.supercontig_139.56) derived from phytozom e v7.0 (chr-ID supercontig_139; pos 396615 to 397496)
gccggtacgtttcattctattttcttcattgaagtttaggaaaatactactgtacattgcaaggtactgtgttttctcttacttacgattattacataattgtttttgtccaacttactttctcatatgagaggaggtaagatattggtggggactaatgattttagctcattgattccgtcctaaagtgatcttggacctcatgagcttttggagtgtgaattaaaattgatatgtatagccattacgaggacattaagaattaactggtgaaaattatgatactcaattttacatacgcgatgtgattgttgagttctatataaaaatttaaattattataaataatttaaattgaattttgagagtcaattcaaaaggttattagttaagtggtgcttggactcaaaatagctctaccactctcttaagctataaaatccactctgatcatagacttacatgatatatgaaaaattcttcatccaagattgatcagagtagagagaattttcttaatgttaagaagatgttatcatcttttttatgcgagacactttttacaaaataaaattttaacaaaaagagatcttatttaaacttggtaaaactcaaatctagtcaagtagattctatacataatttcttatcaagtttaagctttcagaaaaactattcaccgccacatcttgtctttatcacgaactattttccttgattaacaataattgtagttgatccatatattaactaccatcgaatttctacttgcatgcaaggagaacattggagtttttaactgtttttctttttcggtactgcagtactaacttcgttaacaaaaatgttgtgcttttttggttgaaattaccagggacatta

SEQ ID NO: 76108 - DNA, 900 bp, Carica papaya
  Intron number 1 from transcript evm.model.supercontig_18.9 (locus evm.TU.supercontig_18.9) derived from phytozome v7 .0 (chr-ID supercontig_18; pos 39208 to 40107 reverse stra nd)
gatagaggtgctcttgtcgagttctacgctccctggtataatctatcactctatctcaaattaacttacgattcgagatcttatatgatgatcgcaattgctatatggatctgcaatttttctcgatttctcgtgaaaaatctcactgttgaagtaagtaatagattgtattatttgtatcgatcgaggaagctcgtgccttatattttaatctctctttgttgtaccagctctgtggtttcctgtttatggatgagcatatttttgaaagtaaacagatacgagactagattcctgtggtgaaatttaggcggaaaatgtagagatgtttattctgttattgcgctttacagaaaagcgacaaatacagttaaaaagaaagaaaataaataacggatgaggcttttaggaatttatggagacagctattggctatggggccgtgcatattgtctctttttaagttcgtccaaaatcctaccttacagaaatattgaaagaaacttcttctaaattctaagagccgaatttcagttgagcaaacatgtagaatagatacgattctcaattttctccatatcacactaacagtcttttaaatacactttctaaataagtatgatgtggtcgaataactactgtcagtctgaattgaatgatccagttccataaacaaatggagaccaaaatcaaaagagagaatagtaaaaatgccaaaatccacttcaatgaatttcactggatttattagaagcttcgttagacttttatgaaaatactgttatgctgttgaaattatttattttttctcaatgaagatcttatgtcgtgtttctttttctttttttgttatcctccaccatgacaggtgtgggcactgtaaaaagcttgctccggaat

SEQ ID NO: 76109 - DNA, 557 bp, Carica papaya
  Intron number 1 from transcript evm.model.supercontig_37.1 7 (locus evm.TU.supercontig_37.17) derived from phytozome v7.0 (chr-ID supercontig_37; pos 134428 to 134984 reverse strand)
gcgtctaacaagcgaattgccaccattgtaagactgtgtttcttgctctccctctccctctccctctccctctctctcattagtttcacccaaatcattcaggttgtgtcagaatcagtggttactattcagcttatggtttgaaactttgacgtacgcttgtgaaactgatttattatgtcagccattgattgtcaatttgaggaatttctctgccgagctcgagtctaaacgactggttctggacctgtctagaatgttcagcttcttgctccggccaatctcctttgtgttcgctgttttttcgttcaatttttagtttcttttcatattccaactaatttacttaagttgtgaggatgcaaaagcagagagaagaattcttgatcttcaaagatcaaaacagatgatacttccgttgaatcatttcctggtgtccttaaacaagaccaacaataaccttattcttgtactttctgctcataaatttagtgaaaaatatgttgaaaatacttgtgacaggttgattctaccaataacagcccgctggagtgcat

SEQ ID NO: 76110 - DNA, 845 bp, Carica papaya
  Intron number 1 from transcript evm.model.supercontig_427. 3 (locus evm.TU.supercontig_427.3) derived from phytozome v7.0 (chr-ID supercontig_427; pos 15532 to 16376 reverse s trand)
gctactttccgccaccgccttatcctttcgagacggtattatcgataatacttactttactttctttcttcttccgataatactcagctgcagatcgaatttctattatctgttttctctttggctatacatatatatatatatatacatagagagagagagagagagaagtgaattacatctatgtatatatgctctcttctttgttcgatagcaactacagaagtgataaatatatacttacatttacatattcagcttttgagatcttattattctttttagttattttttggaggtttttgtcgatttcaagcgacgaaaacagtgtttctcggtctgattattgaattaaatgtgtaggtttatcttttgtcaattttctgcgaagttaatttaatctccttgcagataaatttaatatccagcaggatctctgatgaagatagttatcaatctttttctgatgacagttacttgtttttaattttgaattttgaaatttctgtcttaaatgtcaaagtcaaaaattccctagtagcaatttgaataaatgtttatgtacgtatagaattagttaaattgggtttccagcccatcatccgacaaggaagtaatggcgtagatgggtatgtcgacggcccagtgcctggctggttttgcagataaagccacatgataagatttcagtcttccgtctctaaataaacttaccattatatttcccgggtcgggtgaatttgacatgataagatgtttgtttgattacctgaatgttgattattccatgaaagtagattgatctctgttaatggtaactaaattgattataggactgttgccga

SEQ ID NO: 76111 - DNA, 700 bp, Carica papaya
  Intron number 3 from transcript evm.model.supercontig_169. 47 (locus evm.TU.supercontig_169.47) derived from phytozom e v7.0 (chr-ID supercontig_169; pos 480534 to 481233 rever se strand)
accatactggcttaccacaagtaagcaaatcttgtttaagagttaatttctgtttctttccattcactagaccatatcaattttgtgtgcagagtcgtgggcattgccttgaaccaaatgttggcacattttcatcttcagttttgagaaaattttaagcatatacaattgtgtcaattattttatcaaattcaccacttggctattaatgttcacaaataatttttaattaaaaaattaaggcaatagaagaagggctttcagaaatattgtgatgatcagtttttcttttcgatagaaaagaagaaattttgttgagaaaagaagatactgattgggaggattagatatcctccaaaacaaacaaagaaccaaaggaatgaaaagagagaagaactagctaagttgtagaaagaataaccagctaatctctatacaaaatagattggcaaacgtcttcaaaacatctatgggccttcgcccaaacagaggggccatcaagattgttaacagttcaaaatagtatgtcatgttgtcatctaagccgaggcataatcaaatcttcatcctgtattttcttgaataaaaatcttcatcctgtatattcatatatatttatattttgtggtttgctgtcaattttaaggcttaatctctttttttttttgggtcttatttcagaatagtgtgggttctgcag

SEQ ID NO: 76112 - DNA, 577 bp, Carica papaya
  Intron number 1 from transcript evm.model.supercontig_138. 43 (locus evm.TU.supercontig_138.43) derived from phytozom e v7.0 (chr-ID supercontig_138; pos 558861 to 559437)
tagatccgtttattgcgatcagtgtcgagtcgtcggtgagtccgactcgcctgagtcattcctttaacccgttttagtttaactcgtcttccttactaactagtctccgagttcccttgtatcacgcatgcgatctgcaatgggaagatgacacgtgtataatcttaaatttaatttaataattaatttttaaatgaaatgtgattaggtcgatgatgattaatttcctaatttgccccacatgttaacaaaattttgtcagatatttatgcttgccacgtaatgatagtgatatctatgttgttgacctatgactttttctttatctggtttgacttgagctggttgcattatggataattgaagtgatttctaagaatcgtatctcaaaatgccaacctcaatctgaagccaacccctttttctagtagtaatgttcttctggatttccgtgttccctttgtttttatttatttatttctctatctttgtagttaagagttatcactatatttctcattttaatgttgttatttcttttacgttgttaatattcaggttggagtagccaccctgt

SEQ ID NO: 76113 - DNA, 1017 bp, Carica papaya
  Intron number 2 from transcript evm.model.supercontig_138. 43 (locus evm.TU.supercontig_138.43) derived from phytozom e v7.0 (chr-ID supercontig_138; pos 559511 to 560527)
cgctgtggggatatcctctatttatccgagtctaggtgagagcttgtttgctgatttagtttgttattacgtaagtaggaatttggttgataccagcattttactgaatatgatatagtatacacttattttctttcttatccatatgtagttgggtattggtgtctgttgaatttgattagtggatggcgggccaagtgtagtttgaatctggcaatactgggggaatggaattgttagaatcaaagtacattggggaagaaataggagaaattatgagttaattccaatcttttatttccctttgtgccatggagtatctcttgaattatgttttgtcaataagctgtttcataactaagttattatgagctactgattgtcatctggttgttcatctcggaactggaagtccattatctccaagtatgttctgtaagtaagttgctgatgcaatatcatcagtatatccctaaatcgtctcccgagattatccttttacatcaattatattatatggaacgactaattcctaaacctgtgtgacacatattacatcatatgttttagttttggcagaattagaagtatggttatgaaagagtgctacatcttcggtggattctgttcttgtagtaacagctaaattaattagcattttttgactgttagaagatatctatgtttcttggattacatggcaccaattgttttaatatctaacttgccattggttgccattcttggttaaaattaagtcagcacttttatcttcatctttagagttttcttagaggcagaaaggggatttatgtcccattcctgggtaaaattagactgcaccttttgatatttcattttaaatgcagtttgcatcagatgttgtgtatgtttatgttggctaagtttttaatttatatagtttttaacattttgctttcaatgtagttttgcatcagtgatcatgtatattaatctatgtatttcttgatgcattctacttcacaggtgtaagtc

SEQ ID NO: 76114 - DNA, 739 bp, Carica papaya
  Intron number 3 from transcript evm.model.supercontig_109. 47 (locus evm.TU.supercontig_109.47) derived from phytozom e v7.0 (chr-ID supercontig_109; pos 918251 to 918989 rever se strand)
aacgtgcagtggaaacaagagggaaaggtaagaaggtctggaatccactcttatgctgctagttagagaaactggctgtttatgttggttcaatttctctttctttggtaacagcaaaaaccctgctgattctttaaatttatggatgcatatccataataatatgtagagtgattataatgagacttgcttgaaactattttcctaactgcaacaaaaaagtaggagctctagctgcattttcttaggattaatctcgttgcttaatacatgtggatgtatgagcattaggcactctgtaccaattggaagggtggaaatgactgatttataccaatggtttcacttgtgaatcacttgcaatcagaatgaagataagcttgttgaatcatgtcctgtataacggttgtaattgccactttgaggaatgttttcttgtttcttgttctgcatgttcctcctgtgtggaacttacatggccttattctgggactcaaaaggaaagatcctggcctgatgtaattataagttctatttgtttttatttgaaaagtatgattaaaattcttgaggcatgggttgaattctcaaagaaccacttactgttctgcttcttaattattttctttatctttaatcatctttatagtatctctatagttttttttttaaattttaatttttgttttgtgtgcttcctacagtcagaacaggtttagaaggacctggacttactatt

SEQ ID NO: 76115 - DNA, 305 bp, Carica papaya
  Intron number 2 from transcript evm.model.supercontig_10.2 19 (locus evm.TU.supercontig_10.219) derived from phytozom e v7.0 (chr-ID supercontig_10; pos 2767915 to 2768219)
agagagaggaacttgaagcggagcttgaggtgattatcttttcaatttctttttccgaattttgattccttccaaaggtgatatcaagcttaatatacaccacgggacaagatagaagaaaaattcaatgttgtttagtatttaattcattttagtttgttgaaaatgacaagcttgttatggctaagtggttatttgtattaagtaaatgattatgcttattttctgaggttttgacaacttttagtttttggtgaatgggatttgtagggaagagatctgcttgaaataaactatcctgttgg

SEQ ID NO: 76116 - DNA, 294 bp, Carica papaya
  Intron number 4 from transcript evm.model.supercontig_40.2 3 (locus evm.TU.supercontig_40.23) derived from phytozome v7.0 (chr-ID supercontig_40; pos 534458 to 534751)
ttggctgatcaagtgagcataaattcatagtttgcattctctaaaactttgaagcaaacagaggttcctactctcttgtttattacacgcttagacattatgaacaaagaatattgtgtcttagctagtagaagcttgcaccataaacttcttcttggactgatttgataaaatgcttgtgtttgatatgattgtgagacagaggttatatggatgactgatgttaatctatgatgtactccttgattgttcatttctttaattgttttcttttccagattacaagaatagaat

SEQ ID NO: 76117 - DNA, 587 bp, Carica papaya
  Intron number 2 from transcript evm.model.supercontig_46.7 3 (locus evm.TU.supercontig_46.73) derived from phytozome v7.0 (chr-ID supercontig_46; pos 709568 to 710154 reverse strand)
atcactactgggctgtgagattcttttcacctccacctctttctttttacttggatcttttgctttgagattttgacatttgggtagtattagttttagatggattgaggtttcttctgtttaataatgtttctcttatctgggttttccttagatttatttattagctgtaaatttctagagactggtttagcacatttccacattgtgaatcgtttttttactggctgtatttctcagtttaggactagggtttctgcaaaccttttatttgatgtcatattaatttggtgcttatgcataaaaagtctctaatctctaaatggtagttttcattgatggacaagctgtgaatgcctcaaagtagattcaaccattttattcctttaattaatagccttcttgtaagtagtttaaaaattaattcttgcaatttgccttgcttttcgttccttttttaagtatcaaatctttgtttgctagtctctttattatttaattggtcaagttggcctttgtgattaatagagttattgcctttatgtgatgcagtctgtggctttcactgccgctccctttttcgttat

SEQ ID NO: 76118 - DNA, 954 bp, Carica papaya
  Intron number 3 from transcript evm.model.supercontig_173. 2 (locus evm.TU.supercontig_173.2) derived from phytozome v7.0 (chr-ID supercontig_173; pos 17105 to 18058 reverse s trand)
ggtgtaagtcttctttttttaccctttgaggtttgaaattatggcgcattcttgatggaatatagtataaaccaataaattgcatactttctgtggattggattggagttattgagctaaacttaatttttttagacagagaaacttaaaaatttttcatttggaaaaatatttgtgagggttgtgattgaaaatggattggactagattttatcagttttagctttttggatgattggtcgcggaatttatgcgttcgcattctgggtttatgggaattagccatagtagcttttcttttttgtgaatgtaagccatagtagcttttaaatatgcttccaaaatactatgtgaaattcattgcaataattccagtcctcaagggtgatcttgttcacacacgtcatttctctgctggagaataaagttttcgtatttgaacctttttccttatttttattggttgaaagtggagagtggttgagggtctttcattttgttatcttctttttatttttttttgctttatttgttctgctcctgcaaaattccaagggataatagctggatgtccttaaagcatgaggttgttattaatctcagcagattaaacattcttagacttcttagagaatgtaggagataggtttaagtcttctctggactttaataagccatcctacagtagatattgtatgcacttaaagatatttgacaacaaattgactcactgttggtttcaagtgataggtacttgcaactaaattttctttttcctaaatgtttggtggtcttgtatgtttgtgtttgtattttgatgttataagcaaatatagatgcatgcacatacattcccttttcttttatgtgcataagtttccatttcttttttcctatggtttcccattttcatattccatatgatggttttgttattttgtgcaataggcgagc

SEQ ID NO: 76119 - DNA, 883 bp, Carica papaya
  Intron number 1 from transcript evm.model.supercontig_264. 15 (locus evm.TU.supercontig_264.15) derived from phytozom e v7.0 (chr-ID supercontig_264; pos 162161 to 163043 rever se strand)
gcaggttagcatgcaaacttaaaaactgtgtttttccagttttctgttttatttattttacccttctttgaaactgaatgtaatttgtggctattcttgcatagtagatgtccataccaatttaaggtataaatatgattatgaagaggaacaagaaatagagttctttgtcaggttgaacacgaagaggaataaaaagaaaagtgcatatgttgatagatttccctttgattttgtggcggcaatcgaactctctacttagtttggctttctaaatataaaacactaggatgctattaatcccagaatttcaagatctctatcaaaccgtaaagtaaacatcaaaatatgagaaatcattttgaattaaaacttgaagagacagatgattggatcatttgcattgtgaacgtccaggaaatttaatattgttgaaagtcttctatagtttcttatctgtcagaaattgtcaattaatgactcttcagttcaatgaaagtagccagcaattcagaaaaggcgaggtcatagaattttttcaactattttcattctatttatagtgagtagtacttgcaatagatgtattattaaccagtaattttccaagaggaggtgatttgtttgttctttaagagccattctgatcattttttgtactaaccattctgatcatatatgaattgtgttccaaatgcttgctgctctttttgatccattgatatgagttgctcaggtcttttctttttccagtttgaagtacaatgatctatattgtgttcaaaaatttattcagttgctgattaaaaaactggatctattttttttttgtttgtggattattttagacagctccagcagcaagggtgcctggttctgttca

SEQ ID NO: 76120 - DNA, 775 bp, Carica papaya
  Intron number 1 from transcript evm.model.supercontig_10.5 3 (locus evm.TU.supercontig_10.53) derived from phytozome v7.0 (chr-ID supercontig_10; pos 900020 to 900794 reverse strand)
gcggaatcgattcctttcctctcttggttttgcaggtataataattatttaaactaatttggtgcttagttgaagatgatatttaaccggtcaagtttggcgaatatatttaaataaatttgaagtgtgatgaaaatcaacacaaattgatttttaaaaattattcaaataatgtttttaaatttgtattttatttgtaatgataaaaattaaatactcaacgcaataattattttttaaaatatttttacaaataaaaattataatttttgaataacataaatacaatattttccctaattttattgtttcatatatttttttgaataatccatttaattattgagtcatagatcagtaaaccaataactcgtctgcttttaaagaataagtcgattagttttatgggctttagtgttaattatttcaagccattaatttaatctcacatcatcggattgcaattttttatgtagtatttcagatttgcagtatttttaatagtatttataaattagtataaatcaaatgtttagtaatagtatttataaattattttttggctgtatgataaaaattcatatttgttttttaaatattatttaattaataaaatatatgaatttataaaaataaagtttggtcatgcaaattaaatgtcctaacaattttattgaagagacgaggagtttgagttggagttcatctaatttccatctttaaaaaaagtgtgtaatttgagttttatctgggtgttgcaggtcacatatttcaa

SEQ ID NO: 76121 - DNA, 566 bp, Carica papaya
  Intron number 2 from transcript evm.model.supercontig_2.13 7 (locus evm.TU.supercontig_2.137) derived from phytozome v7.0 (chr-ID supercontig_2; pos 2093992 to 2094557 reverse strand)
cagattatactgctggagttgttgttgcgttttatgtgagtaatccattgatgaaactcgattaaaaaaatatattttccccattttttaaatgattattttacaagtttaatcgctttagtacatcaagtttttgacttgaatctaaaaatacgaactccggcttagttttttcctctgtttttaatatttcctcaagtacgctgatagagtttcaacagtgaagtcaaactgatcaacctaagacggaagggttcatcatatattgttcttcctttttttatacaatagttagaccttgtattttaaaatatattgaacctcttttggacgtcttctttttcaatctcaatctctaatctttccataaaattttgaggagatgtttattcatctgttaatttcttcgcataaaatgttgtttatcgatttttgagtttccaaagcggatcaaatcgatgacacccagatcaggattcatgcaaaggcaatcactttcaatgagagaacattcagccccagaaaaagtctaaagtctttaatcatggtttaccttgtgggtacag

SEQ ID NO: 76122 - DNA, 681 bp, Carica papaya
  Intron number 2 from transcript evm.model.supercontig_211. 1 (locus evm.TU.supercontig_211.1) derived from phytozome v7.0 (chr-ID supercontig_211; pos 4029 to 4709)
gcaaaaggtgaagaaactgcttcagagaattgaaggtgctcactgtctcttccatcctttttattttattttttaattttattcgttgtttgtgttcttgtttttgactcatttttatctgtgtccccccccccccccccccccttcacccaatatctttgccgagaaattcaggcagaaactactaataagatatttcatccatctttatttattcttggacaaaagtggtgatcccccccttaagaagcaagttctgtcatttactaaaactgagccctaatggcttttatgctggtgggattctttttgctagaaaatatctctcttgggttcttttctgctttccggttagatgaggaaacaagagcaagtctttaaaattcacttcacctttgtggttcccctcattaaaccagggcagagcatttgttactctgttttctgggtcaggcacttgagaaggagaaaaacgttttccattttacttctagttaacgtgatttgaatttttaattcactatcttgagaaaattgttacttttggcttgagaactattggataattcactatcttcggctgaagaaggctttcgaagttactctgtagtggtcatcctaatttagtgttcgtaatatgaagttttcaatgccttccaggtgtttaccaggtaagcatag

SEQ ID NO: 76123 - DNA, 669 bp, Carica papaya
  Intron number 1 from transcript evm.model.supercontig_14.1 77 (locus evm.TU.supercontig_14.177) derived from phytozom e v7.0 (chr-ID supercontig_14; pos 2017845 to 2018513 reve rse strand)
gaactgttaagggtacgtttgtttcttttcaactcttgttgtttaatcatacccaaaaaaaaaaaaagagagaatttcttgattatgattagtgaaaaaggaaaagcagcaaatttgggtgtggaactgcaagtagaaactagaggaaatttagttaaagttgaaccatacaccacctaagagatttgtatggtatatatatatattgatattggtattaaagggtacccaaaagctaagatttcttggataagggttaaaatttatgatactgtttcaagcagtgaagtttattttaatgttacttgatatatcagaaggcagagaaaaccagatccatatttacattagtttacccttgtagaaactagaggaaatttagttaaagttgaaccatacaccacctaagagatttgtatggtatatatatatattgatattggtattaaagggtacccaaaagctaagatttcttggataagggttaaaatttatgatactgtttcaagcagtgaagtttatttcaatgttacttgatatatcagaaggcagagaaaaccagatccatatttacattagtttacccttgtatagaataatcaaattcacgttgaaattacccaatgttttgcagggacaaaagcatcaaaataccacccttccacatta

SEQ ID NO: 76124 - DNA, 838 bp, Carica papaya
  Intron number 1 from transcript evm.model.supercontig_264. 14 (locus evm.TU.supercontig_264.14) derived from phytozom e v7.0 (chr-ID supercontig_264; pos 148739 to 149576)
gaggaagccagtgagattcttgattacgtgtttgatcctttttcatttctgggtccttcgtgtttctgggtatttttgttttttttttttttaaaaaaatctttgaatcgagtagattacttgtgcccatattgtaaaatacgtgaccggttgtcttttcctttggtttttctctaattttgtcttgctgtttcaattgggttcgtctttatttctgcgtttggtatgttttcggttggatctgtctgggactgatgcgtatagcttgtgaattgttataattatgtgttcgttcggttccaggctgtgtttgtgttcctcctgtgtgtatagatccatttgttctggactcacggtattagtactgaaattatgtagactttcgtctataaattaggaatattaatttttctctgatgcagaattgttctggtaacaattgggagtagacctttgttaagcatttacgatcagtaataaacatgtttgagctgtctagtgatgctgggaagttgatctgcttctgcaatcaatcatggcggaagctctgattggctaagatttttgagaccttttacttctccatgtaaagttttgtcatttgcttttccgtgcatgtcgtgagaagtaaaaatgttgattggctaagaaacttggatggattggtctttgtttttgccattatgctatgtcgatactggtggtggatgtgaccgcagctttatactaaatagttttatttgctttaaatatgtatatatctcaatttctgatcgcttgacaattgtttgtctgtctgctttctcccttcatgtttcaacagtggtggaaactaaag

SEQ ID NO: 76125 - DNA, 538 bp, Carica papaya
  Intron number 1 from transcript evm.model.supercontig_58.5 1 (locus evm.TU.supercontig_58.51) derived from phytozome v7.0 (chr-ID supercontig_58; pos 581022 to 581559)
agaaacccttcgtcttctatctcaatcttgccaaggtatgtcaatctctttttcttcttcttcttcttcttcttttcttttctttttcaactacgacgaatttgtttttcctgagaaaattgcagggaaagacatatgggttttagttgcctttttccccagcaaagtggttttccttggtgttgaattaggatattttctttatcttttcagtctctcttttggcttctgggttttggaaaggaaacggatattcaagattttgtgaaaactaaaatattcaatagggacttgatctacatttggggattctttgttcgcttccgtttatgattgtgttgatttataaacattacatcagaataggatatgaatttaatccactacccgaattctattagcattattctacatattgtctgggcatttttctttcctgcatcaggctaactttcagtttgatttggttttctattcaaaattctgtttataaatgtaatgttctgtttgttgcagaagtacatcaagcagtacaata

SEQ ID NO: 76126 - DNA, 741 bp, Carica papaya
  Intron number 1 from transcript evm.model.supercontig_1773 .1 (locus evm.TU.supercontig_1773.1) derived from phytozom e v7.0 (chr-ID supercontig_1773; pos 994 to 1734)
ctgacctagctcttgcccgtacccttcaagaacaggttatcactcctttctctttctttgtatgcgtgttgattttgattttaggggtttttttttgcgatttaatattcgagatttctaacttgcttcttggcataatttccaattaacactttatgcaatcttttcctttttcatttcctcctgagcgaggatatgggagatgaagttcgaagttttatcacattttgtttggttggagagttgtatgggtgaaatagttttctcagtttatttttttttttcccccgactttcgaacttatgcaccctcgactagttcatgccaattaacaattcctatgtaaaactgggaaaatctttttattatttagttattattctaactttgtcaagtactggacacacttttttgaacgctgaatttaagacccttgtgttggcgccttcttactttggaaaccttaacattaggtatgagatttcaagtagtgtaaacctgaaattttttggaattggtgaaaccatgtgtggaataatgttatgcacctagaactaatgtttgaagtttcttgatgtttttttttttttttttttttttatatttggttctgcaatattcagtctgttgttttattgggagttttattcatttataatcaggagcatgtttggttctgcaatattcaacttgttgttttatttgggagtttgattcatttataattaggagagggcttac

SEQ ID NO: 76127 - DNA, 901 bp, Carica papaya
  Intron number 2 from transcript evm.model.supercontig_131. 88 (locus evm.TU.supercontig_131.88) derived from phytozom e v7.0 (chr-ID supercontig_131; pos 694225 to 695125 rever se strand)
agtttgcttaccattatctttccaggagctccaaggtatatatacttatctaatgccctccttttatttttatcttgtgcttagtggtttttcattctacaattgacagtaaactccatatcttactgatcattatgaaaaccaaagaaaagacttgataatgtcagacattttctgcatatgattacttcacttcttccaagaaattaggttttcggcctgtatagtgttaattttggcccaagaaaatcagcttaaagcttactttccttgtttgcatcagtacaaagtagtatatgattttctgtaggccatgttgtttatggcgtgctagttatggtcacttcgatgcatttaattagaactgtgtgcgtatatatatatatatgtttatatatgtagtattcttctatgctgttcgaatgtgggtgaagtcatgataacgaaatatgtagcttgttcgtttcatggattttaattgaaccatgtcaagatcatagaagtcatttctcttttaaagcaaatgttacatcaagatgtcccattcgagtcgattccttcttaacttaatgatatcctttgctttttctcgaaaagcaaaaaaaacttgcaccattgcttaaataaataaatataataaatatacagatatgtgtgtatatgtgtatgtatataaagtttttatagtgattgtgttgcccttttgtagagcataaaagtttttatgccgctataaataaaatgttaggttattaaagtggccatacgatccgacggtttgtcttttgaagcttggctttttatttaaaaactgagactgtaattaagctcttgacgtactttgtaataatgtgcaagtgattccattaatgaactgctgaatgtgtttatttattgcagg

SEQ ID NO: 76128 - DNA, 966 bp, Carica papaya
  Intron number 1 from transcript evm.model.supercontig_106. 53 (locus evm.TU.supercontig_106.53) derived from phytozom e v7.0 (chr-ID supercontig_106; pos 640330 to 641295 rever se strand)
tgaaagtcactagaagatatataactgtatgcatacacatacatgtgtacatacatacatacatataatattcattgtatgagcaagtcaaattttcttgatgacccaaaaatttattataattttccacattaagaaaacagaaagcgagccatctcattatcagattcttcttttgttggccatacgcgttaattaaatttcttgttcttttaaatttccttttgggttttgataagaagtttctataacccaaaaaagtcaatagcaatcccaaaaaaaaaataaaaaaatcacatttccaagattttattgaattaaacaattttaataaatataaataacaatttaattttagggtgcaaaaattaatttaaaaaaaaaaatacccatatcactcaatttttttaaaaaaatatatattttttttcataaaaaatcgtgtttttatatatcatttttaattaatttattaaaatttttatattttaaaataatacatgcaaacattatatctaaatattagaaagtaattagcacttcccacctatagaaaatgggtgtgttttctaaatattttaaaaattaagtccattaagaaatgactaaaattgttcagaaaaaaaaaaaaatattcttgagtaagttagggcacactcctaatgatttaatcccaaagaaaatgttagtactcaagttggtgaggataaagattgacactaatataaagatatatatatatatatatatggaatgtatatctagaagtcatgcattgacatttgaccatcaattaattcaaaaaccatacccctggttttccattataaccatatacttaggacccctctatatatatatatatatacatgcatgtatctatcttcttccataacaaaccgtctgcaattcaattcgtaacaactttcagctcatcaagacaaaccgagaagatcaacaagaagg

SEQ ID NO: 76129 - DNA, 212 bp, Carica papaya
  Intron number 3 from transcript evm.model.supercontig_3.37 0 (locus evm.TU.supercontig_3.370) derived from phytozome v7.0 (chr-ID supercontig_3; pos 2504091 to 2504302)
gatcaggacttggttcacagggggtaagatcctagtcaatcatagtgctttctgcagcaaacagaattggttaaacttctctgctcagtttttttttcttgggttaattttttacttttgatttcaaccatgatagatgcatggttttggttcttcttttatggaataatcatttttccccaatccttaggttgatccgtttgaagtatata

SEQ ID NO: 76130 - DNA, 795 bp, Carica papaya
  Intron number 1 from transcript evm.model.supercontig_177. 4 (locus evm.TU.supercontig_177.4) derived from phytozome v7.0 (chr-ID supercontig_177; pos 214457 to 215251)
atcgatcaggtcagttgattctctctcgcgctgtatcttcttggaattttcaaatttgtttggatagactgataagtttattgtcagttcgcacacaaacacagtctctctctctctctctctcggttgatctttctttttgaactaatcaaccttttgtccttcactgcgtgaacggatgtaaaattgagaggatcagataaggttagagttcaagaataagctttggatttgctttcactcggctattttagctaagctggttcacgtctatcctgaaaatgagttgacgagaaagggctatagtttttcgaaaatgaattatctttccgtttctggtaaaatttagcattcgattggtggagctcttattggaacgcaatcaaacgaaataagcagtctgctttatctcgctctaccaattatcttaaccgtggtaacttgtatctaagttcaagattttaccttgactgtttagttcaatctgtgggttactaaacagatgctccaaattattccgcactggttctgaagttactattttcaaaatcatgatgcaatgatgtaacagccctttgatcctcaatattgctttgagaggcctccttaatttattgatagggtttttcagatctttaatggcaacatgttcttgtcttgtacatgatcttgaatttcaagattaagccattttggctttgaatttaattcaatatgcttcatttcacattatgttcttattttgtttttcttctttactccttgtcaatgcagattaagagggagatatcaata

SEQ ID NO: 76131 - DNA, 964 bp, Carica papaya
  Intron number 1 from transcript evm.model.supercontig_23.6 6 (locus evm.TU.supercontig_23.66) derived from phytozome v7.0 (chr-ID supercontig_23; pos 794357 to 795320)
cggaagagattgaacttgaaaacggacggtataatgtaattgtactttggtttcagattatttcttttacattcagtttagttcgtaaaattacattcaaatacaaaagaatatattctttttttatatggagtttttgaaggttatataaaatgaatatatatatatatatatacatacttatttagaaaagaatttatgctactattattaattattatggtgaatctaatttatttatttatttaaaaagaagaaaagtacacataccatatttgctttgatgataaactgattgattcggtcgtctgcatcttgatttgactttttcatccgatacccatttcttggatgttacctcgaaattaatatacttcatataaaataaatgtttgtatttatttaataataatgttcttattattatattcaatcaattggatcataaatcaaagttatcataataataatttcacctccaacatatttcttgccaatctccttgtttgcatctccttttttttattattataatttatagaagagtcctacattattatgattttgtattaattattatttaagttaatattttagagattaaaagtttgaatgggtgtatgtattcttatttaaatattattttttttatgactgatattcatataaattttctttcaaaaaaactgtagtttgtatcacttggctgttgaatatcatatatatttatttgaaacaatagacggtgaccttcccctctatttgtgctccaatttcaaatagaaaaatagattaataaatttaaaccggttttcatgccgtcaataaaactagatgatagcgagtaccatacccgataaagtttgaaaattctttatgttcaacatctgatcataaaggtcaatgatttttacttctgattcctgcagccaatctgggttgacggcgaaagatcagttgaatt

SEQ ID NO: 76132 - DNA, 753 bp, Carica papaya
  Intron number 1 from transcript evm.model.supercontig_176. 21 (locus evm.TU.supercontig_176.21) derived from phytozom e v7.0 (chr-ID supercontig_176; pos 296677 to 297429 rever se strand)
cgcagcaagccctataacccgctggtaaggacctggatattcattttacttgttttaacacacaaaaccaaagggaacaaaattgtgtcagcaagaaaatggatataaaactatgttgataaagagacttgatttatcattatggaaatttggtgatattctattctttgagctagcaatttccaccttgtagtgaggcctagtaatgtaattagcataaaaataggacagcaagtcatacactcggccttatctaaaaaatctgccaattaaggaaataccactagcacttaatatttgcaaacatctttgaaacagaagagaactgctgacacctagatgcactatgacctgcaggtcataactataccggtgcatagaaggttaaaaaataactgctgcatcattaaatgacttaatcatctttgcaactgatttaccttcctttttccttccttttcaattgggtttccatagaaaattcatgtttctttaggattccatactgaactgaggatctaaagaatttaatagatatcttgactcctgctcaccctacttacatatcagttatacaccctcattgccatgttctaccacttcttctttccttttctgaataaaaaggattccatatagaatttaggttgtatgctttctgttccttttatcttatttactcattctagcttttcttctttccatcctacagatctcattaattgttccattatgcagatatttcgctttttt

SEQ ID NO: 76133 - DNA, 561 bp, Carica papaya
  Intron number 1 from transcript evm.model.supercontig_13.2 16 (locus evm.TU.supercontig_13.216) derived from phytozom e v7.0 (chr-ID supercontig_13; pos 1917417 to 1917977 reve rse strand)
gattctctggtcaatcagcaactctctcaggtatgatccattgataccctttttcattttctaggatagattgtgtttttctgagttagattatgtttatatgtatcttcttctttcaataggtattttctattatattataattgatatttattgtaccatttaatattaattaaaaaatataatatatatatatatatatatatagatgatattcattgtttatcaatttttttagataatatataattgaatctgactaaaattttaataaaagaaaagataaatactaaatgtatttaacatttttttttctcattttctataagagatcatgtattggaatcaggttatatttatgtgtatattatttgaaaattaatttttataattgatacttatgtattagttaattaataaacgtataaatttttgttaaaaaaatatttaatactaattaaaatctgaacatatatatatatatatatatattggttaatgaaaaaatatttgaattaatgggtaattaatcaatagctataatatgattgcaggaactaa

SEQ ID NO: 76134 - DNA, 805 bp, Carica papaya
  Intron number 2 from transcript evm.model.supercontig_57.5 2 (locus evm.TU.supercontig_57.52) derived from phytozome v7.0 (chr-ID supercontig_57; pos 818378 to 819182)
ctcgctgcaacgatccctccggatccaaaattcaggtcttctttctctatatatttaacattcattttgtacttaattatctttaatttacatttatttcatgattttatttcgagacgaaaaattaaataaaaattaattacagatattaacgcatacatatacatcgacatggtttcccttaattagtgcaggtaattaagatgatattagaagggtccattgtaatttacataatccaaaggaaggtgtcaatttctatcaattatgaatattgtatgtatgagtgtatataactcaagattaaataaaattgtcacatctgatgtgtgtgtgtgtgtgtatatatatacctttcactaccaccaaaaaactatataaatatatattattggaaattaaggaaaagaatggatgaattagattaactagcttatagactctcagagaagacggaggaggaataaagtaaaaggcaatgcaggatatggaataaaaacaagaaaacacgaaggaaaaatccaaaattacatttatggcatttaatctaagcacagccttacatgtcctttttttttcattactacttactctggaatattcttcaagctggactctgaaactgactctctctttaatctaacttttttatcatttatatttctcatgattgtgactcaatgcacttgtttctcttaatctgttactgaatctttctgggttcagttgatttttgatttatatatatttctaaaaagtaaaatgttaattttgtataatgtattgacaggagtgggttaaagaa

SEQ ID NO: 76135 - DNA, 486 bp, Carica papaya
  Intron number 1 from transcript evm.model.supercontig_47.7 2 (locus evm.TU.supercontig_47.72) derived from phytozome v7.0 (chr-ID supercontig_47; pos 1313844 to 1314329)
tttgaacaaatttgctttgagaaacaagtactttttactcatttataatacatgtctaaattccttaaaaacttttatttttaattactttagttcacacaatatatatataaataacagtagtttttgattaataaactatatttgaatcttatgattcaattcaatatacaattctcatctaaattttggattctaaatatttaattcaaatctcaatttagcaactgtagagaattattagttttttcattctatttttttattattattcgggtaaaggaaatctccagcatgttgggagatgtgtgattccattttttttcttattacacctgactatacagctgaaaaaatatagttgtaatctctttataaatcaacaccatttggtgcccgtaaatgtatgaaaaagaagggaaatttcaggaaattatcttcatggtatcagagctctcctaatccatatcctttatcccgagcgag

SEQ ID NO: 76136 - DNA, 845 bp, Carica papaya
  Intron number 1 from transcript evm.model.supercontig_112. 23 (locus evm.TU.supercontig_112.23) derived from phytozom e v7.0 (chr-ID supercontig_112; pos 191642 to 192486 rever se strand)
atcgggtgggtactcatccttctttctctctcttctttttttttttttttttccaatttctctctggttctttgttgtatggttgctgagaaaatgaggacgagaagtggcaatttggacgctggatttacttgttaatatcatttatttgtttgcttgagttcatcatccaccctacgttagaaactgaaacttcggtatttaatataatagcggataaattagcataaaaagatgttagttgtcttcttaaattgctgttgtattggtgttactataagttccttcgttttctggatctgaatttttaaaattaggatgtttcagttataaattcaaagtatgtttgaacaagaacttatttggaagcggtagtttcatgaagtcatttccatttagcttagtttaaattttattaattttgatagggtttaagagaaaaatatcccaatactgcttagaatttatttataattgaatttttaaattttcaaacgagttccataaacataaatcttttgcataaacattgatcttttgttatgaacattctggaacaagcattcaacggattgataacatttgagaattaatacttgattttcttcattggttggctgctgtctgtggattcatcaatacttgaataattgttgtttctgtagataggatatacacacacacatatttactcttggcatggagtttgctattcaagatggggttatttatatgttgtttttggttaacgatagaaagatgattctggttttacttttttccatttcgtctacactcgttgagccatgctagatatctaactacatcttacatacaggtccacc

SEQ ID NO: 76137 - DNA, 791 bp, Carica papaya
  Intron number 1 from transcript evm.model.supercontig_116. 3 (locus evm.TU.supercontig_116.3) derived from phytozome v7.0 (chr-ID supercontig_116; pos 5793 to 6583)
gccctcacagctacagtaaaaactcttattaccaggtaaataatttttactgtagctagcacacactcatacacacatatatatccgtatatatatagagaatttgtgataaaatttcaccttaacctttacaaatgttgggttgggtaaagttactaaaataaagacttctaattactcttggctatgtaattttgaagcctaattagttccccccaagaggtaaaaatttcgtagtgccccttgaaaattttttgcgagtaaaattaaatatgagttttttatatttgaatataatataaattataatttcgttcatcatttttgtgaatagataatttattttctacaaaagaaaatatatcttatatctagttacatatatatatatatataaatatatttatagttatgtttatcatgtcctcacagtttttttccttcattatatttttacaaataaaattggtgttattttactgtttgtttttatctttttcaactcctatgattgaatgtaatatatttaatgtttaaactaaattaaattttaacaaatatacatttttttatataatcactaaaatataatgtttaaaataacatcaataaatccaaaaggagttatacccaaaagtaagagaagaatcccattcctaatttagaatataacatacatacacacacatatatataggatattgtttagttactatttttatattctcacccaaaaacattacaataatttcatgtgtttacagagaggtgcaattgaagctactaagaag

SEQ ID NO: 76138 - DNA, 1016 bp, Carica papaya
  Intron number 1 from transcript evm.model.supercontig_201. 8 (locus evm.TU.supercontig_201.8) derived from phytozome v7.0 (chr-ID supercontig_201; pos 212144 to 213159 reverse strand)
ggttgagcgttgcagcactctaatcaaacaaaaaggtggaatcgttgctgctacttttagagatacgttttttttttcattttaaccggattgttctttttagcttcggctttgactttttgtttcatcttggttttgatgttgcgaccttctttcggtcattacctctctccttatgcaagaaatggacggatgtaggtgcttaatatgcttaatttggttagctgaaacctaattgtttacagagatgaagtgaacccaacgagggttttctttggaaattatcttgtatggtcatgcttgcatatatagacttcaagaaggtgatagactgcttctatgattctctctcatcttccttgtttgttgggtggggagtgtgcagggacgtttgtgtttttctgacttacttgcggctctggatatctgggcttatgagctgcattgtataagttaggttggaggcggttgagtttctaggcatgatttgtgggaaaaagaattgattctctctttcttctttgagaaaataaaatttgttgctctctctttcaagatgaggtacctccaagtgcaaaatattttgatggtccatctcagctaaggatgtactgatgaatcatttctcccagggacgcggagagttgttccccaaggatattgttaatatgccaggagagatctctcgtgttctgaaatttgcccagttattgtttttcttcattaagaagaagttaaatgtgaacaagatgatgtcatacttaggtcccgtttagttattattttttcccttttctaattatactgtttattctctttaataacttttatagaatggtccaaggttacaatctatgatgctcttcttctaagatatgaaatcaacatgtaaaatgggattggcattatcttatggtcttaattcatcgaaacatggagtgatttttcttattttgtagattatttagtatactacttttgccactactttgttgtttcaacttatactttaggaa

SEQ ID NO: 76139 - DNA, 593 bp, Carica papaya
  Intron number 1 from transcript evm.model.supercontig_27.2 52 (locus evm.TU.supercontig_27.252) derived from phytozom e v7.0 (chr-ID supercontig_27; pos 2358171 to 2358763)
gagaagtgagtttttttcttctttctcactttatatttttattaacattttggctcttaatttattgaagtagaaaaggcaaaaggaagtcatttctgaactagtttttcccttgatttgattccttcaatgatctcttcctattttggaaaggaaaatcatttaggtgttctgaaatttgaagttataaaagaagttcaacgcatacccaatttgaattatgaaggtttcatttgaatattaatcttttttattaagatgggtatggtgggtctaacttgggtttgtgagataattagactttaagcactgtttttagagcaagtgattgtaaaacacatgaatgccattattaaatctgaacttctacgattaaactgagaataaagaatagaactttaaataaattccgtaccttttatggaattagtatgttccaaacattgcccaaaagcttaaaactttctggacttgttcacattgcaaattaattgttttggagatgggatacaatgttcccgttggaggaagaagagttctttattcatgtctatgcttccatggaatctgcaggtggagaagctgaaagattt

SEQ ID NO: 76140 - DNA, 735 bp, Carica papaya
  Intron number 1 from transcript evm.model.supercontig_5743 .1 (locus evm.TU.supercontig_5743.1) derived from phytozom e v7.0 (chr-ID supercontig_5743; pos 2342 to 3076 reverse strand)
gctctttggggattgtcagtttcagaagcaaataggtactgtgcttgttcttttatctgggcatgtgggtgcatgtgtgcattatttgtttgagattatattttgtactaaacaatcaataatatcagcctattaagttgttttcctcctattagcatgaatcctaacacatgcttgggcctagataggggagaaggactgtctaataagttgcatggttttagattgaaacaattaactataaattgcgtagtaggcatgcccccttagtttgtatttgagtgtagtggacacaagattttgttttctcactggacaacatttattagttttttgttgtgcgttcatttcttttgagaggatgtctcattcttctattttatattttcttctcccaatcttaatacattcttcttttttttaattaaaaaaaagtcaaatttttttcaataagaaaaagtaaacttctttatatatatattttggggtggggatgaagagagttgagcctcttgagctaggtcttggatttacttgaaggatgcaactatctttagatattttctcgatttatgtaaaattttctgtgcaagtctatatggaatgacttacatgagattcttgtctttacataaagttatatttactttgcattccacggttacatgcttattgttgaatggactttgttggttttcagcattgctatcggacgagaaggtggtgttgcacctt

SEQ ID NO: 76141 - DNA, 900 bp, Carica papaya
  Intron number 2 from transcript evm.model.supercontig_296. 4 (locus evm.TU.supercontig_296.4) derived from phytozome v7.0 (chr-ID supercontig_296; pos 118807 to 119706)
tgagccggagcttctttctatttccgtggggcttggtatgttagtcaaatcgattggaggtgggggttgtaaaccaagttcagtgcgagacacgactgcagaaaggacaagatcgagggaggcagtgattaggagaacttgtggcaacgagtaatggtgtcgcttactgggctggagcttcacagagttaagtggtggggcttcatggagttgcttaatgtggtcttgtaagactggtgataggggcgttgttggtggtgaactggctgacagcttttaaggttttatgtgtgcgtgacttttctgtcattttctttttgtccagacagatctgtgactgtttggggtatagtactttgtgaatttagtgtatataacttttagtttcatatcaactaatatatgacaagttaaagataatttgcctacttgaagatttggggatacaaacttagacatcacatctaagaagtcttaaataaggtttgattgcatcacataacaagaaaattgagatctctcaatgtagtttattgaatggctgaactttgttgaaaaatttgattacataaatatttataatgcttcctatgaaacttttcataaataggattagagtaagaaatactaatactaataagattcaagtagcactattaataataaaaataggaaaactaaatgctgaaaatactaaaaccctaaagtgactaaagttatgataatagactcttaaagaatacaatagttttatgtttaacaaaaataataatttctagtagatttacgtagtctaaacttaagccattatatattattaaggctcttgctagtttgaataagtaatcaatacttttttatgcttacttgtcgtatttcagagttgtgaaagtagcaagc

SEQ ID NO: 76142 - DNA, 562 bp, Carica papaya
  Intron number 4 from transcript evm.model.supercontig_12.2 56 (locus evm.TU.supercontig_12.256) derived from phytozom e v7.0 (chr-ID supercontig_12; pos 2303097 to 2303658)
cacaggcaggtataagttgcatataacttatggaaactactgctatctcatgtaactgatagtgttgttgatcgaggaaatgaatattttctatgatacacgatataattatcctttctgcattttttttgagataattctttctgcactttaggacaggtggataattcatggtcctagtggcctttattggcttcggtcagcttcatttctttaccataggaagtaatgactgtgctttagatttttcatttagcagtagaactaatatttatttcttgagtttgggttataaatccgtttttcttctcttttgtaatttgttctatttgatttctgattgtacttgctctatcagtcaaatcttttattttgttttctgtcagggactagatggactttctattctttgtacacgtgttcttcatttgatttactcaatcgctatctgtttgcttacaaaatgtatgatatggaatttctttcacctattttcttgatcttaattgtcatctggtcttctttaggttatccacactgaagaatatattggccacccaaa

SEQ ID NO: 76143 - DNA, 563 bp, Carica papaya
  Intron number 1 from transcript evm.model.supercontig_47.4 9 (locus evm.TU.supercontig_47.49) derived from phytozome v7.0 (chr-ID supercontig_47; pos 714860 to 715422 reverse strand)
ccatcgatccccgtaagatccaggatcacttcgaggtattttttttttaacatggctgtttcctttttgtcaagttagggtttttcttctatttaggtctgtcctatgattattcatgtatatgttaattatacatatgcactatctagctggagctaagtttctatttttatagggatagattgattcacgtatgtgttagttatacatatgcactctctagctggagctaagtttctattttttaggggtagattgattcgtgcttttttttatttagatacggattcaagtttgattgggatgcagtttttatgttaatatttgaataaataaattgttgattttcctagaaatgatatttttgtgagtaaatttggtgaatattatcttgatacatttaaaattaatcataacagtggagaaagttagtctttgaggagttgatgaatttgtgagaataaatttattcccttttgatttgcatacatttgaaagtgtttttgagtctttcttttccgtttaaatactgaagctgttcaatatgaaactataggacttct

SEQ ID NO: 76144 - DNA, 745 bp, Carica papaya
  Intron number 1 from transcript evm.model.supercontig_6.34 8 (locus evm.TU.supercontig_6.348) derived from phytozome v7.0 (chr-ID supercontig_6; pos 2674027 to 2674771)
ctcaatttcgatactcttgctgttgtcttcaacaggtttgtttgtctcttctggttttttcgctttgccctgaagaaatctatttagttactagttaattctacgaagtacacaacttcaaattttaatttcagggacagagttggcattttgcaccttttccttcccattcccccattcctaaatatgtatgaagtattcaacacagaacacttccagtcaacaacagggggtggttcgtaaacaatattaaaactaaactttgctcaaataaatggatctgtacggagttttagaattttgttttcaacaactacaaaaattttcaacaaaatacgttataaacactgccctatgaaaattacgattctgtagaaaattatatcaaattagaacaactttgccggagcttgaaatacatatttgtgttcaataaaatgaaattttctaggtagatcttaataaagaatgttaaatgattcttgatttgttcccactataaggttaaaagatttttctttggatgtactttctgtttttgggatgtagttagtttttaatttttacatatcctggccaaccataattgattgattcaattttctaaagcttctcatcattatcaaactactgtcagtagaaattgtgctttgtcatgcaaataattaatgttgatggatagttttatgcacgaaaaatttattaacaaaagcaggtgggtgaatgcagatcgagcagatacgca

SEQ ID NO: 76145 - DNA, 354 bp, Carica papaya
  Intron number 1 from transcript evm.model.supercontig_14.1 05 (locus evm.TU.supercontig_14.105) derived from phytozom e v7.0 (chr-ID supercontig_14; pos 1279982 to 1280335 reve rse strand)
caatttctcctcaatctttaaaggtaattaagttgcttctttcttaatatttaatcaaaagttatgtcgcttccatgaaaactgttaattcagtggaagaaacgaagatgtacgaactttcttgtttatggcttcttgatttgcaatattaatattctctgctattactatttttgtgaaatttatttgttccacagacagtgtaacttaatattgtaattctctttctccatgtatttgtcaaattgaacttcttctgtttttgatattcagttcttttttctggttctttccttctgtgcaatcataattatttcagaaattcttcaatttaagctataaagtgcctagttg

SEQ ID NO: 76146 - DNA, 555 bp, Carica papaya
  Intron number 4 from transcript evm.model.supercontig_152. 43 (locus evm.TU.supercontig_152.43) derived from phytozom e v7.0 (chr-ID supercontig_152; pos 337313 to 337867)
gatcttggtccaagtaaataccagtggagaagaatgtaagaactaattaattattcatactgaaaatagtaggcttgcctgcatttcaagagctgttattgcttccttaattataagatgtctacttacaaagcataatgccggttatcttttcgttttcttctgcaaaatgttttcaattgcagttctttattttccttgttttggctgcttgagttactcctcatgcagtggaaccattttatgaagtgaaatagctatatcgtgttcttgatgctgttgttgtttttctatatatccatataaatgtgtgtatatatgtttataccatcgactgttactatcaattatgtctcaggtatgagtttagcatagaagatgagacctgctatgaggagctaattggtttactctgttcactacactgttctttatggaatacggatttcgactatcagttgtgctagtttgtcacatgccatttcatgagtttcccacagtttgtttgatttgtggtatttctgttccagcaaaagctggtgttgagccttcagg

SEQ ID NO: 76147 - DNA, 653 bp, Carica papaya
  Intron number 2 from transcript evm.model.supercontig_5.28 3 (locus evm.TU.supercontig_5.283) derived from phytozome v7.0 (chr-ID supercontig_5; pos 2590642 to 2591294)
ccaccattgccgtcgcttctctcgcttcttttgtatgttattcttcactccattttttcaaaaaaattattacatgcttaattcacaagattaattaaatgattttataaatgtgctgagttgttttttcctaattggttaattttatcttgctttatatataaggtaaattcttttgtagatgagtaagtccagcttgcactattttttatgttaagaaattaacattaaaaaatataaattaagttccccatgaacccaccttctaatttttctaaaaatggtaccaccatatcttctataattaacatttacccaatttgattacatagatagaaatgtacaaataaaattgaataattaatgcattctcttttctattaaataatttttaattaatgaaatataaacaaaaaatatggtgacttcattaaagtcgttgagctcatgtgactcgtatgttatgctttgcctttgcccataaatacaatactcctctcttcttttacgcccgacagccacgtgattaatatatattctgcaattaattccataattaatttatatacgccaactttctttatatatatatatatatatatatattgcatttatagtattaaattaataatatatctacatatcaacaggga

SEQ ID NO: 76148 - DNA, 570 bp, Carica papaya
  Intron number 2 from transcript evm.model.supercontig_150. 43 (locus evm.TU.supercontig_150.43) derived from phytozom e v7.0 (chr-ID supercontig_150; pos 425703 to 426272)
gaagagaaggtaattttcattagtttgatttttctttctttttctttttttttaaatgatgttgcgtgaaatttcttagcaattccattgtcatgtgctctaaattattctcggtgattagtgagtatctctgattgaaatgggtttgaagttaaggattaagtgaatgatttttgtggttgatgcaataatttcaatgattcaagagaagaaaagtggaaaatttttaacagtctttacgagttcagttgtcatatttcattgccacactggattccatcattacaatgatacgtccatagccagaattacgtgttttggcttataagaataagacaattctcatttagacatcctgaataactgtttaaaacaatttttttgatcattctttaccatcttctgttgggagtttctaacaattcatacatatgattcaatgattatctgtggttctaaatgctcaataatcacttttaagttattactttggtattcttgtaactagtggatggaggtatgaataataaactgtcatctttcgatctaataaaacaggagaactttgat

SEQ ID NO: 76149 - DNA, 656 bp, Carica papaya
  Intron number 3 from transcript evm.model.supercontig_150. 43 (locus evm.TU.supercontig_150.43) derived from phytozom e v7.0 (chr-ID supercontig_150; pos 426353 to 427008)
caaatccgaaggaagtaagttggctgtactatgctttttgttggttcttactgttatttgttttcagcttgatgtctcttttaattgtaaattcagaaaagagtagcttttctcttgctactcatatttttcgttgtcataagaatgctgcttagtctgcttgttgaatgacctattaggtaaagtgaaaaatgttagtttttcttgcttccttatttcagcatatctttcgactagattttgccaatatgtaatttgaccatgtgatattattaaagtttcatccagaaaatgatttaattatttttcatcttttgggccttagatttcaataaatttgttggaatgggatgatatatttctcagagaagatcaaaactatgatcttatattggcttttatgcaacaaactagagaattttattgtcaaattatccaacttcaattcatatccatcaagttctgcatgatcatagtgcttactaatcctattactgttagcacattctctgggtgatggtcttttgtctgctaaatgtgggacttcctctttgcaactcttaattcatctttaaatacttttaacgcgaactcattatttcttatttaacttatgaacagcttgataagcttgttgttgaaaatatacttgcttt

SEQ ID NO: 76150 - DNA, 927 bp, Carica papaya
  Intron number 1 from transcript evm.model.supercontig_12.8 0 (locus evm.TU.supercontig_12.80) derived from phytozome v7.0 (chr-ID supercontig_12; pos 632657 to 633583)
gatctctgtcatcgagctgtcagttcatctctactcatgattgtctacctttcttctttaatttatgaatttgctcctgtctatgcataattgtgcatctcttgctggtcttaacttatggttattacttctggttcgtttcttcgagtcaggtgcttgttacaaaagattatcctgttccgtacatgtcttcaatgtgtgtttgtttgtcttgctatgattggtttcggtatgaattgttcttccttttacaaagtttcaatcacttcttaatagaaggggattgaattattcttaatagaagtttgaacttggccctcacttatttttggttaattatgtgattgagtatcgagtttagagagaaagtcggattttccttttcttgtttactcgtgaggcaaactttgactacttggctagtaaggcgactttgaccatccagtagtgttgcaaacaactattcagatgtacttgttactcatggtgttaatggcgttgaggcactgactgtgctggaaatcacatggattttcctttatgtatatacagcaagatattacactctttaaaacgtttgccaggaggtgaggtactcgtagttattcctattgcatatatccagctctaaggataattgattatttcttgactactagattttgttcaaaggatagctatataatattagtagtatggacaaatgttgctggtttcgactgaactttagtatcataattgctatcacctttacaattttattggttgatggaagactcctgctcaaatttaatgtttatagaggatcagctgtcattcactgccgattataactaaattttatacaaagtttgggccggattaaggtcttattatatctacttttttgcagatttataaaagcaaaaagtgagttatccttggaag

SEQ ID NO: 76151 - DNA, 292 bp, Carica papaya
  Intron number 1 from transcript evm.model.supercontig_48.1 48 (locus evm.TU.supercontig_48.148) derived from phytozom e v7.0 (chr-ID supercontig_48; pos 865170 to 865461 revers e strand)
ttggcatgtaatagaagtgatattttagatgacattaatgtaaacaaataaactgatcaaattaaaattataaactgtaaattgggattgtgttgaaagtttagccttctttttctgggttaatttccgtaacaatatatttttgaagaataaatactcaattttcctgccttgccttttcccttaggaaccaagcttttatggttgctaccaatgtttttcataaagctgataagcggtttttttatttgattatttttgtgatcttatgttaggtatattcagattggga

SEQ ID NO: 76152 - DNA, 595 bp, Carica papaya
  Intron number 2 from transcript evm.model.supercontig_183. 29 (locus evm.TU.supercontig_183.29) derived from phytozom e v7.0 (chr-ID supercontig_183; pos 276177 to 276771 rever se strand)
cagaggtatctgtaaattcttctcttgtttttcttcatcttagttcttatttgcttggtatatatctcctgggtttaaacagatgatgagattaaagtttggaacttttgaatgtgttcgtgctgatcctaaacaagcagaagtgtatacatacatatatatatatataaacacacacacacacacatatatatatgcatttggagatgatgatcatggtcttacatgtcttttgacttcttttcattcataattgtttttcagaatcttcatttctgttaacttgctggagccaatgattccttttaaaaaaggctcctttttcatctcatcatcatatttatgtcaaaaacttttaatatggattgattgctaatatataaatatatataggtgctaactaataggtgtaaatgattactgaaagaacatttttttttaattaaaaaaacccagatcgctctttcatatatatacacatataaagagtttcccacttcccatttttgcaccatggagaacttgatcaaacatatatacatatatataaaatgtgattgatggatgaatggaattttaatgagtggtgcagata

SEQ ID NO: 76153 - DNA, 178 bp, Carica papaya
  Intron number 1 from transcript evm.model.supercontig_50.1 53 (locus evm.TU.supercontig_50.153) derived from phytozom e v7.0 (chr-ID supercontig_50; pos 1441806 to 1441983 reve rse strand)
tcaagacgctagctactgttgtgggcaggcaaccaatcatcttgtcttttgttttttttttttttgctgtatcgattttcgttgtttcctttcttctctctcagttaagtttgattattatttttttcaatcgttgattgcagtgaggaggaggctaaaaagaagatctactctgtct

SEQ ID NO: 76154 - DNA, 777 bp, Carica papaya
  Intron number 3 from transcript evm.model.supercontig_17.1 62 (locus evm.TU.supercontig_17.162) derived from phytozom e v7.0 (chr-ID supercontig_17; pos 1995478 to 1996254 reve rse strand)
catctcttcaagatagtatacatgaactttttttttgggtatatctagcaagtggctgatttatttaacttggacaatatttatttgctgatttataggatatctatgactaagttggtgctcgttgtttcacgaatacttttccatctttactatcatctgttccttctaatatataagttgtatcttctatgtgtctgtttcttctaatataagttatatctttctatgtgatggtggcttttgatccttgtgatgtccgtattatacttacatatgcttcaattgctagatccacggaattaagtgttgttatggaagttaaggtagcatatcatattttggctcattggagttctgaacaactttaatttcctgtctgataaaaaaggacgtctatatgatttttgcaactttattggctgaacataattataagaagttttcttgtatcgaatgagattgcttaacatactctttttttctttttgtggattcatccgtttgatacataatcttgttaatatgtattttatcattggaaatttacattaaaatgtcatgagaacagaatatgcatcaagtaaattgagcattattctacaaatttttgtatatcataaaaccttccaaatttggtcaaaagttgattaagtgaggtggtcgtatttttgttgctgttatgttgataatgctcttgttcttgctaataacgagaatatagacacttaatatattgtatttgttctttacctgtaggatattgtgatcctaacc

SEQ ID NO: 76155 - DNA, 1042 bp, Carica papaya
  Intron number 1 from transcript evm.model.supercontig_183. 16 (locus evm.TU.supercontig_183.16) derived from phytozom e v7.0 (chr-ID supercontig_183; pos 188086 to 189127 rever se strand)
gttgggggaattcattccccgaaggcacgtaggacacacattaacaatgatctctcctctcttcctcaagttttccattgtcaatattgtgccgtaataaagattcagcaaaccaaagatttcaacttgtaaacggaggaggatagttttgacgtttaaaaactttgcttttattctttagctaatgttgttttactatgtttttttgttgcatcactttgtgcgatatcctaaatttggcagccatttgttttttttgtttttgagaaaaaacgaaacacatagtaaacaaaggccccaagagggtgccacccatgttaatcaccataaacaaaatttacacaagtgagttggtcaagatgtcaatgatatatacccaagatctccccaaaagagtgcggcactttttagcaaaatacataaggttttaagccaatggccttaatgtagccaagttagatcgaacatccccaagcactctgctgtttctttcttttcagatggaccagaatatggcattggggatgagtgtgaggaacttatctttttcctcatccccatggcatgggggattagtgttaggccattgctttttcagttaaaggcatcttctcaactgctgctatggctttgttggcatcgatgcctcattgcttggttttgttaaagtataatggtgctaacttctaggttaaaaggcatgtataatttgcaagagataggacatgggtgtgggaccatatgtgcatgcatcctccaagttgcttgctaaaaatctatattatctacccaaaaaaagtccatggtgaatagttttttgagttaaattttctattgataagtactggtaagtggctttgatggcagtaatggcttttattttgttttgtgctgaaaagttattgatgtagtttcaatttgagattgtagccaatgcttatatcagctatgaaacgtcaactataacataatgataataatatcagtgactttctttcctgatgtagattggggaattttccaaatataaagaaagactcat

SEQ ID NO: 76156 - DNA, 500 bp, Carica papaya
  Intron number 1 from transcript evm.model.supercontig_3.39 3 (locus evm.TU.supercontig_3.393) derived from phytozome v7.0 (chr-ID supercontig_3; pos 2730482 to 2730981)
gctcttgcatatacgtactcgcggcaagacgtaagtttctttcttactggtctttaaatctgatcattactggaattccatggaaagtgtatgttgtactttctaaaaccaagtgacctttatgcttaatcaattgttacctgtgctacttagcttggtttgattattctgtttttgtcattttaagtatcaaagctatttcaattaaacaaattttagtgtttttccctccggataaacatttattagttaacatgtcaactgtttgataatattttcggtcatatattgatcgtctattgaaattatttttgtttttagtaatatatgttgtaaaataagatcttggaaccatggatcttgactatgttgaagtttaatgtcttcagaaagagttgtaagaaaccctatctttggatacgactaacagaacttttgaatctccaatatgtttgtcttagaactacattaacattcaaccgtttcatttttggttccag

SEQ ID NO: 76157 - DNA, 735 bp, Carica papaya
  Intron number 2 from transcript evm.model.supercontig_26.2 61 (locus evm.TU.supercontig_26.261) derived from phytozom e v7.0 (chr-ID supercontig_26; pos 1793239 to 1793973 reve rse strand)
tctccatatccaagtttgattataaaattttggtagtgagtcctctcagaaaggctctttcacctttctacatggatattcaacacttgtactttgtgattcaatacttctttctcatgacactttgtctttctgaactaactaaatctgttgccctatgtattcaaccttcagtttgagacgcacctccagaaaagcttccacatattgtcttaatgggcttactactattttattacaataaggtcacataaaaaattttctcagttcttttggtaaaagaggaaatttcattagaagcaaggagaaaatacacaaaccaaaggagcataagctatcctcaaaagaaaaaaagaaacaactaataaaataaacagagaaaatgcaccagtgctaccaaatagcaacccaatcgcttcgttagttggataaagaaattatcctaaagaaaccatgggctttaggtgaagagaagccaaaacaccaaatgtcataaaatgaatgagagcatgctcagaatgttctcgtggttctctccaaccaaaggacctgtaaccttacaaaattagcccctctctaagaggatcttttgatccttactccactgtaaaccacataaagagatgaagattagggagtgctcaatgaacctcataaagaagatgacattttcttatttttctgttccttttcaacatttaaattgacatttttgcattattcggataatttcag

SEQ ID NO: 76158 - DNA, 387 bp, Carica papaya
  Intron number 1 from transcript evm.model.supercontig_199. 22 (locus evm.TU.supercontig_199.22) derived from phytozom e v7.0 (chr-ID supercontig_199; pos 256923 to 257309)
agaaaccaattcatactaggtgggataaatctccgttcttatataaagatattaaatttgagtgtttaacgattcaaaatgaagaatctttgttgtttcaacaaatgaataaactgatttttacattttataataataaatggaagagaaattaaaaagtattttataactttctcaacattgtcctggaatctgtaattttgcagtaacattatgttattattatgctgcaaattattgttagccagcataaacgttatagtgcaattgaatattactagtcctgataccttcatttttttggcattatattaactatttgcttttctgtgactatttctctatattttagtttcaacaaacgagaggaggattttgcatccttac

SEQ ID NO: 76159 - DNA, 1011 bp, Carica papaya
  Intron number 4 from transcript evm.model.supercontig_199. 22 (locus evm.TU.supercontig_199.22) derived from phytozom e v7.0 (chr-ID supercontig_199; pos 257743 to 258753)
tcctgtacaagcagataacgacggggtaagatgatttggtttaatttcttaatttttttcctcgagtctattgtgatggttcactattttcagaacctagtgaattgagttttgcttttttatcaagtttgcagtttaatctattagtttattttgatatttagattagtagaatgagtcccttcttttgatcctatcgcgtgcaatttcataactaaaggctagcttaaaggagaagacacatgtggttcagtgatagaaaatctttgaggaatgaggatgtcccagtaaggatagtatatgttgggctcttatcaacttggcactaagatacgaaagtagggaaccaagaaaattatagaagatgtcatctacataagaaagaaaaagaagaggaaaagtgtaaaacactcgctctaatctatatgcagttcatttctttggtccacttcatagtgctgctacatgttgacctgtttatgggtatagagcactataaaaatgaatgatacaggatgagttatggtaacatgagaaaaattagagttaagaaatgactttattctgttgtttttagaaaggcaacgaattcatttgtcaaaaagtgaaaatagaaaggtggtttgaagtcttggtacagttcactctagagtgacaggggcatacatgggaagattagggtttaggtaactaaagtctgtttcttttagaaaaaaattgctgtaggtataatcagacgtagctttttattggggaaattttggacaggaaatcatctaaaatggcagttttttgggcaaggggatagatccttttatagtgtgggataggatccatgcacttgagctctgactattaagccttgaaatagcttaatagcagctatttcttttgacagtcattttttccttcctagctattacacactccactgattgaattatctcagcaaacttattcagtcttttctcagtagggtgcaaaccagacctcccaggctgggtttaattc

SEQ ID NO: 76160 - DNA, 1007 bp, Carica papaya
  Intron number 1 from transcript evm.model.supercontig_50.1 17 (locus evm.TU.supercontig_50.117) derived from phytozom e v7.0 (chr-ID supercontig_50; pos 1050902 to 1051908)
tcaacttaaaatgtgagttctaactcaattacattgacacatcaaatacccagaaaggcttggtacgatagacatatttgtgaatacctgcacctgaacaaaaagggaactcaccagcatgccatcagaatgaaactacagacttagagttcgttgaaggtcgcagttgtgatgaagcagtgtcacattcttcagcatcaaaagcaactggagtatggctgatgtgcttcctggaaataaaactaaatctttagtctatgcaacagcaagcaattttcggcaatagaaacattagccccctgattgtggtgctagacacttccaaacattcatttctttattctcaaacaagtgttcctgtaagtttgaaaccgacttgttgggtacccctattctaatatcagtaatattgtgaagtttgtaaggcttataaataacgagaattccataaaaaaaatacaataaattaaaattctgataaaactattaaagggatacatgtagaagaacttttctaatttttaaaggccacactagctcgacttattctttctcaaaccagattataagctattttaatttacaaaattagtcaaattaaatatagtcccggccatttccaccctcttcccttgcttacatttacacttttgtgctaaaatattaaaattaattctcatattattttaaaatacttaaattgattgatgtattattttttataattttaacacctatattctaaaaaagttttgatttactctctaattattaatgtactaatcccgaaatttctcaagaattcagtttagatgatatggcacggatatggcaaagcccaacctccattctgaaccggcgctgatgatgaagtagccggaacgccctagtccccaccgtcgtggctccaagacaagtgtttatgcttggctcctatctcctgcgataactgcttggctacgataactacagcctccaccttgagatcctacggaaattgcctcaac

SEQ ID NO: 76161 - DNA, 569 bp, Carica papaya
  Intron number 1 from transcript evm.model.supercontig_5.31 8 (locus evm.TU.supercontig_5.318) derived from phytozome v7.0 (chr-ID supercontig_5; pos 2954870 to 2955438)
ctgtgaagagtgagttcttagcttttctgttgttttttttttgttttgttctttacatctaaacaaaacctggttctcttgatggaaattgcattattgtctataaatgaatgaatcacatgcaattgaaagtttaaacgctcccttagtgcaaagttagaaatggttttattaattgatcatgtattttttctgttttaaattcttcggcggcagcagtttcttaaatgaacttcatttgattgatgagatgctttcctggatatcttgtttttaatcacaatgaggaaggcttgagaatcatggaatgacgccagagtgtcatatactatatatcaaccatatgaaaaccattaattctctaggttcctctcatgttgaatgtcatgtgtttcaagtttttatatttcagcacatatttctcttgctcacatgtatttctgatgattgacctttttaccattactttttacttcagcagtttggtttttgaggtgttcttaatcctccacccctacaattttttgctcctcaattacttccctaacttattcagtgctgtgacaggt

SEQ ID NO: 76162 - DNA, 556 bp, Carica papaya
  Intron number 1 from transcript evm.model.supercontig_28.3 8 (locus evm.TU.supercontig_28.38) derived from phytozome v7.0 (chr-ID supercontig_28; pos 545793 to 546348 reverse strand)
cctacaagcaggttaatcaattccgttattgtactactcacaaagcttccttttttctttttcttgctttgatagaaatgtaattcactaacacttgacacttccaagagggtctctaagtgtttatggaatctaatactttaattgcgccgtgcaattgattctttttggcatttgtttgatgttttcaaatctccggtaagcaagttacttggaaattgttaacaaaaatgatagacgcttgcctaactatgactatgaactacctttcggagagagaaactgatatatctgcaagatgataaaattgacgttctgatatctctggcgtttgaattttttattaatgaagaatcatgtgtttgcattggagccgtaattttatttccctgggcaaaacacgcattagtttatcccatgaagacaagatgtttctaatatttcctgccgtagcataattttgatgtgggctaattttttcttctcgtgtcatgttgccacgtttctggtgctcaacatgttgcagctgcttgaggttccggggttggctcaaagg

SEQ ID NO: 76163 - DNA, 495 bp, Carica papaya
  Intron number 1 from transcript evm.model.supercontig_55.9 3 (locus evm.TU.supercontig_55.93) derived from phytozome v7.0 (chr-ID supercontig_55; pos 570586 to 571080)
gaaggaaaccgtttgaaaattggtttagaaatttgtaataagggaagaaaaaagagaaaatatttctttgaatgcttccgttttcaggtgtccagctttattgtagtatattttattatttaatgaatctattgtgtgtcctcctcgagtccgagaactcggtgaatactcgcacgttatctgttttaatatcaatgtgaatgcattttgtttttgttattttcgttcatattccgttatttatctctcttgttcgctgttgcttatagaagttccagttgagtgtttgtgcattttattacaacatcgcgcatgttccatgttcttctttggttgctggagttacagtctttctgtgggtgcgcacacgattcatacgtgcttacacttgcttgatggtttattttatgtggagcgttaaataattggctattttttttggctaagaaatagtattttttttcttggaagcatctcatttgtcgtattaattgg

SEQ ID NO: 76164 - DNA, 746 bp, Carica papaya
  Intron number 3 from transcript evm.model.supercontig_48.4 1 (locus evm.TU.supercontig_48.41) derived from phytozome v7.0 (chr-ID supercontig_48; pos 250102 to 250847 reverse strand)
ctggtaaatgcaactttttttggtactatctgatccgatgttgctttatttttgttaaaaaagcaatgcgaaagaggattttgattttgtgttttggttcccccgccccgaagttagatattgctaatttgatgcctgtaattatagtgtaacttggattaattttcattcaaatgttgagaagtattggatgtactttttcttaactagataggtttttactttgcaaatgttcttggtattaattaaaccttcatggtttgttgaatagtgtcctttctatcttatttgattagaagagctcgagaaattgccctttcgtgggcatctatgttgatcagaacccctttttttttatgcggtgtatttggagtgtatatagcatagtttaggaaaacactggtctctatgttaattagaacttaatccactctgttcatgcccatacttcgtcaggtagtgtacaaacagtgtccaatgggaaggtaacttcaatgggaaagcttggctaaatggatgcagattgcctcagagcatctgtagcaagttgtcttatttatgcttctcttttgtattcataactatgtgatgtccacgcttttgtttcttatggtggaaggctggaaaattttccttcagattttttttattggcaattcccgttatatggtttccttgtttttgatttgtatggtggctgatggctaaaagttacactggtgcagatacattttctaaggcttcag

SEQ ID NO: 76165 - DNA, 560 bp, Carica papaya
  Intron number 1 from transcript evm.model.supercontig_23.3 9 (locus evm.TU.supercontig_23.39) derived from phytozome v7.0 (chr-ID supercontig_23; pos 343367 to 343926 reverse strand)
tggaccttaccccacttaccatcttttgggtactttagaaagaaataaataaaagagcttccatggcggtagatgatgttgaggattttaataagattaggaatagatgtttttagacttttagtttttttattttggtgtcatcttctatattttatggaagatcttggagatcttgttgatattttgatatatatataaatattttataaacggattggtatctctttggtgtctgttcatatattattttatatttttatttaaaagaaagaaaaaaacacaacatttaagggttatagcctaaagaaatggtattgaagggatctttttcatcttgatattccatgtgccttctttgtttcttttcttccttttgtcgtttaaggaatattcttagattggtcagtaggattctgtttggtaattcagcatgcttcctctcatcttcagtaacagtttttgttagcatgaagaatggaactagcggcttttaacattaaactttctttgtcttatttacagagtagttccttatcctttttaatcattctacttct

SEQ ID NO: 76166 - DNA, 981 bp, Carica papaya
  Intron number 2 from transcript evm.model.supercontig_397. 6 (locus evm.TU.supercontig_397.6) derived from phytozome v7.0 (chr-ID supercontig_397; pos 24021 to 25001)
tgctgcaaagaggaaggagaaggccacttgaaactgtaagtccaaagatctagagatgtgaaaattctcctaattccagagatgcctctaaaacttagggcctgtttagttgtataaaaactaaacaggaaattccacctaagtttccagagcctaagtttcagaggcatctctggagagcctaacttcacctttacatcaatacgcatccgtacttttatcacaaaaaaaaaggttttagaaaaattattttatcagattctgtgataaatatgaagatgcatttaatagaaatctagcacaaatgagagagattttgagaaaatcggtggagaaggtgaagtgtgcttgggaagccaaatgaaaggaaagagagaatgctcgattttgtaaattgtggaaactgataagctgtcgttaattgaggattaaaggggtatttatacatgagatttaacttatggctaattacaaactgaccctctatacctgctattagcaagtaattacacagaacttactaataaacatttatcagtatattgatatatgcttatacacaaaaatatttgcagttgctggaaaagaaatgaaattcagaaaatgataatgaaactatggtattaggtttagaaaacgttggaaataacgaattctaccaatcattttccaaatcttattttcacttcaacaatcatacatgacttttttaatagatatatgtgaatttgaaagtaaaattcaaaataattttcaaaaaccaaatattagcattctagacaagttatctgttagtggtatttggaggaattgctattaggaattaggatcagaaataattagtctctttcattatttctcctcttttccttttccacttgtttttcctttcttctattgattggcattttttttttctcatattcatcatccaaattttatgcagatttactttgaaggtcattgtggagatagaagaaa

SEQ ID NO: 76167 - DNA, 894 bp, Carica papaya
  Intron number 1 from transcript evm.model.supercontig_54.4 9 (locus evm.TU.supercontig_54.49) derived from phytozome v7.0 (chr-ID supercontig_54; pos 954099 to 954992)
cgaatagctttgtgcgaccggagcagattgatcgggtaggtcggagatgatcaccagaatagggcagcatgctgccggtgaggctgggactccatttgggtgagtgttgagaatattctagggtttgaaaaaaactataaaattaaaaaactctgaaatacctttattttgctctgatactatatagaaattttaaagaaaatatttactatattttctcaacatatttggtataacagacatctcatatatgcaaaattctcaagtactaatagggaaattacgcttataataaggatactaaataattacaatattatagaagaaattaatagtaagaattatatacgaaaaatatcacaaatatttagaaaacaaaatattcatgtcaacagtatattccttttttggtagaccatatcgtgacacttaggtcataaatctgtgcaacatctttaactttagagtaggtttcatcaattgcatcccacattgcttttgttgtggataaaaacattacggtctagctgatatggagttgtagactactagaattgttccattatcatggaattattaaacaccaaatgtagggtctccaggttttggtccggtaccaagaagatggttgagcttgctctttcctttgaggatggcttgaattaattgggaccaacgaagataatcctttcccatgaagcgatagtctgtttggtggtactccccatgaaagtgagttcagtgtgtttagatgttacatctaacatcctttaagagttttcgggtaattacaatcaaataaaaaattacaagaaagattttaccaagaggacatgcggctatgtgtgtttggccgaaggagccggagctattgggtggacagacaaagctcgc

SEQ ID NO: 76168 - DNA, 511 bp, Carica papaya
  Intron number 2 from transcript evm.model.supercontig_211. 13 (locus evm.TU.supercontig_211.13) derived from phytozom e v7.0 (chr-ID supercontig_211; pos 64602 to 65112 reverse strand)
tgcgaatattcaccaatcagtttcctgaggcaaaggtagcgtcgtaatactcatgttctctttatcgggtacatgatccctgggttactttctcagtatctggagaaacacactaatttttttgcaattggcttattcataacgtatgtcacactaatttagacttgtaataaaaaaggagggtatacctgagaaagcaagcagagggaagtgagatttcattgttccctttgtttttgtcaaaagtgttgaagaggaagttgtaaatggaaattttcattgagaatttgtagtgttacacctctgtgctattttgctttatcggccttggaaagttctctttcatatctgatctatgttgggaggagattttgttggacgaatgttctactaaaatttccctcctttatctttccttttcttttctgaaaaatttacgccagaaaatgattttgatgaatgactctcttctgcagattacgtcatttctagtgctggaggaagctccacc

SEQ ID NO: 76169 - DNA, 869 bp, Carica papaya
  Intron number 1 from transcript evm.model.supercontig_107. 127 (locus evm.TU.supercontig_107.127) derived from phytoz ome v7.0 (chr-ID supercontig_107; pos 677163 to 678031)
tcaactcactttgatattcctttcatttcaaagaggtccgtgctttacctttttcatttacctctatttgacttggttacgcacacttctagtgtttagcactcgtgtcgaagatgttgtaggatttgaactgaggtatttcgttagtgaatattggtggttggtttggcttttcgtttctaaatttttaggtttgttttgtcttgtttagttcctggtgattctgaaaattaaactgctctctgtggctaaagaagcagcaagaattaaaatagaaagacagatttaacagggaaaattgatattgtcatgttcttacaggaattattaatattttcagaatgcatgataactttgaattctgcagagttgatgaatttaatattgactggtcgattgtgctttaagaatttggaaaaaatctgaaaagagcaatggtattgtttgagttaggatttgatattgactgttgagcatataactaaaagctcagcctagaggctggcactccccaagttctggatccaggattaaatatattatcctctataattgaaacattcactttccagggttttgcttatgtagggctttgagaactgggttgagcagtgttctctgtagtccaccattggatttatttttagtatgtctcttctctgatgttttatttaattgagtggattttcttgagtgaatagagtggatttgggttaagcttcatttgatttttaagcttataacaaggccagagcagatcatgatatgcttgtagattgggatgcttgtacaaacaagtctcttctttcagtttccttagatttctttttatgttagtaaattgcacaattgatctgtagaacacctca

SEQ ID NO: 76170 - DNA, 455 bp, Carica papaya
  Intron number 2 from transcript evm.model.supercontig_56.1 18 (locus evm.TU.supercontig_56.118) derived from phytozom e v7.0 (chr-ID supercontig_56; pos 1427569 to 1428023 reve rse strand)
tctctgtaagttcaaacttggagttgcttatattttctccaaggtttgagtagtcaaatcttcggatatctcaatcaaaaccaaactaagctttttcgctcaatatatgtagctgatttcatttttctcatactgttcatcataaatcattctgcaacttctcactgttgaaatgcaaaggattgcatctagtttctattttagatgaggttattttatgatgccttggaggcaccaggccttgaggtaatcttttagtatttcataagaatctagtacctttgtgcagtaatcacccaatattggctagaaactgaaaattactttaaaacgttagaaatttaccttgtaagcaatatagattttcccttttagatgaccttatgccgaatatctgcattattcttttttcttttgggaaattatcaaaaattttgttctttttgtgatagggg

SEQ ID NO: 76171 - DNA, 492 bp, Carica papaya
  Intron number 1 from transcript evm.model.supercontig_104. 27 (locus evm.TU.supercontig_104.27) derived from phytozom e v7.0 (chr-ID supercontig_104; pos 194462 to 194953 rever se strand)
aggtacggatatctatacatatgtatgttcatatatatacgcacgccagtttttattacttatatagaaatctttttgtgttcttggtgggtgggttttggtgattttcagatggagttcggtttgatctttgcaaattcggtaaaagaaagaaaacgagataatatatatatatatatatgtatattagaaaacaaatatgtatctacagggattgtttattgaatttgatacctgaaaagaattcactaattaattctcgaggccctttttttttaagatctaattaagtaattctgataattaagcctcaacgaaacgaggattctggttttgttctttgaaatttacaggatatgaaatgatggattcaacagttagaataaatgaccaaattaaacagaactgatttctgggttattgtcaaggtttaagctctaatgactgtttattacaggtggaacaaaggtacagacagtatcaccaccagat

SEQ ID NO: 76172 - DNA, 801 bp, Carica papaya
  Intron number 1 from transcript evm.model.supercontig_178. 1 (locus evm.TU.supercontig_178.1) derived from phytozome v7.0 (chr-ID supercontig_178; pos 8704 to 9504 reverse str and)
gaggcagtcccctccgtgctattctcgtaatctgcgtgagtgatcgcttctcttttttcctactcgaccttcttattgtccatttttttgtttttagcactttttggtaaatgttttatggaacttttatgcgtttgtctcgatttagttttttcatttcctttgtattcgtttattttggcgaataagttttcatttggtcttcaatctatacacacatatcgtctgattgcgtacttccgtcatttcatgaagtctgggttagtgaatgtgtttatagctttcataaggattgcctactggattattaagttttcacttttcaatatcactttggtcgtaaagtagatttctgattgcccttatttatttcatttttgttaaagtagtcattgactttttctcttatggcaaatcatccgatgatttatgctttaatcattttgatttatacctgttgatgcaacatttaacttttaacagcttttttgggtgtatttggatgcttatagacttctagttctagatatctatgtctacatgcatgaagagtccgtgtgatccattgaaattggaatagaggcggaagtatttgtgtgcatattacactgtactgtctttgtatatcaaatgcagattgcatatacaagatggaatactaaaactatgataagttctagacttccagtcagaggttttcttctccatacccaatacttacagttaacttgcccttgttcttaataggatagttaattgatgatttgagcatctgaattattgttaatagggtagtaatcc

SEQ ID NO: 76173 - DNA, 198 bp, Carica papaya
  Intron number 2 from transcript evm.model.supercontig_15.9 1 (locus evm.TU.supercontig_15.91) derived from phytozome v7.0 (chr-ID supercontig_15; pos 1550967 to 1551164)
gcttgattacaatcaagaagctgaaagatttggtggtaattcttttgtttggttataaaggattgagcttctttctctttttcttctgtttgattattagacaaatgaaaattacgtacaagagaaaattttagtttagtaagctcaagagatgttaaagaatggttgattatggttagttttgacttattgtaggtt

SEQ ID NO: 76174 - DNA, 712 bp, Carica papaya
  Intron number 1 from transcript evm.model.supercontig_192. 22 (locus evm.TU.supercontig_192.22) derived from phytozom e v7.0 (chr-ID supercontig_192; pos 301878 to 302589 rever se strand)
agaaaaggtacatgtagtatatgttgaataataaattgaatcgatagattgattgattgttctctaacacttcttctcatgagtaaattaacaagaccaaaagcatgaatcaattataggcctaatcagtcttgtatgaaattaatttttaatacaatagacatacatgattcaaatgtaaagattttaaaacaaactagaattgaatttaaaatatgttcatattaaataattaagattagatctgtaaacaaaaatatccttaaatttatattagaaaaaatctgtatgtcatgcgttagatctttcaaatccatatattaatactttagagttttcatacactctctttttggatgagaggatgacagaataaaaaaatcttaacatatgattttgggaccataaccgtctgtttatatccttaaatttttgttattttaattttatttatacaaaattaaaaattacatttttgatctctacatataaaataaaaatttacacttttaaggtcaaaataattttaaccgtactagacacttaaatagacataactaaatttgatagtcttttatatataataaactaatatataaatccacacggttgattaaaatccaacatcaaatactgtatttgtatttgtagttctaattttgtgttaaataatatattgaattaattaatctaaaatctttaaggtcatttt

SEQ ID NO: 76175 - DNA, 871 bp, Carica papaya
  Intron number 1 from transcript evm.model.supercontig_18.2 17 (locus evm.TU.supercontig_18.217) derived from phytozom e v7.0 (chr-ID supercontig_18; pos 2445536 to 2446406 reve rse strand)
aggtgcctgttccctggccggagagcttgcacaaggtactgtttcgcgcttctatttctgtcatagcgacggctttgttttggctctgggtttcaggggatcgcggatttgtgctttccgggctcgggttgtaaattgagatttgtttatgcttccatatccaggaaattcttgcgggttaaacgttggtggatttgtagatttatagggctacatgcttattttagatttggtacataaattggattctctttaattggtcgcaccaaattttggtatgatttcaaagtaccttgggttgatatcgggattattttccgaactcattcaactcgctattgttgcagttgcatgccgaggaagctttcttgttgatattttggcatatgctttctgtttctattcatgcctggtataattcttcaatgtgaaaaaatgaaaaaattcccatggttaattttgaattaactgtttgaatttgagcttgatattgctcatgactggaactcaagagttaacggacataattcaaacgggacttttgaatatcagagtggtacagaatgccaaaagaaactcattgaatggaaaattcgggcttcatattactgatttctttggttgtccaaactaagcttcttcctatttgtcttctttatcaccttgggaaaagaatctgtacccaagaatacagattgtcatgtaatccttttaaacatctttggccaaccctgttgcgaggtggttttgagattatattaggggcgaagacactattacttcttattggcactataatgaatttatctgcttttattagtttgagtgaggtctctgcattcttgaaagttttgttgtgtaatttgtagat

SEQ ID NO: 76176 - DNA, 441 bp, Carica papaya
  Intron number 1 from transcript evm.model.supercontig_36.6 0 (locus evm.TU.supercontig_36.60) derived from phytozome v7.0 (chr-ID supercontig_36; pos 488020 to 488460 reverse strand)
ggctatttacggcgaagcctctactcctcaatctggtactcctctctctctctctctctctctctctccatagacaaacatatacgtaattaatgtcctgaaagtggattttgatgtgcgtaatgagcagaaattgcggcactattttctttttcgttgtaattccagaagtacaaagagttttataagatttccacacgattggttagccgatttagtttatatgcgcttgtttttcttttctttttcttttttttatactgtgctgttcatttaggcaatatttgtaaaagacgaattttctttgtctaatctatttagaaattcatacttataccaaagaatatcaaatttgataatattccaattgcattattttaattttaattaaaatttataatttattttattttaatcataggcttagaattacttttctga

SEQ ID NO: 76177 - DNA, 865 bp, Carica papaya
  Intron number 1 from transcript evm.model.supercontig_216. 15 (locus evm.TU.supercontig_216.15) derived from phytozom e v7.0 (chr-ID supercontig_216; pos 115578 to 116442 rever se strand)
ttgctatttctcttaaggtaattttttttttaaagtaattttgtttgatttcctttggttgatttttttatttggcaatctgtttttgcttttttgtttttctggattcagtccagttgatcttgtttgtgaaaaaaagttgatgagatttgggtggtttcttttctgggtcatctcctaattgttgttgtaatcctcaattgctttttcctccaatcactctgtttgatatattcaaaatcccttgtgaatttaaaagggtttttgtgattcatggaatttctagctattgatgctgtctctgtttcactttactttttatttttttttttgtgttcttgaaattttttctaccattagttatcatttgatttgaatctatcttagttcataatgttttgaaattaaagtggtaaaagaatcttatcaggatcaattagaagagaaatgtatgttcaccttctaaattttttatttgttcatgggagttatcctagtgtttgaatgctagatttcttaggcctagtctccaattaaagatgactgtcatttgggtatttttctttaataaataaataaaatatgtctttttccagtttgctcaatcatggattgctattgattttcatccagaataaatcacggatttctaataaatttcataatatataacattaggttccaagaggttttgacaaagatcgctgcgatttgaaccttaaattctgggatcaataaagaagtttttatttaatatatatatatatatatatatatatacacactacatggctgtaccttatgtaatttattcagcattattcattcattgattccatttcttaactgctaattttcaaggctg

SEQ ID NO: 76178 - DNA, 728 bp, Carica papaya
  Intron number 3 from transcript evm.model.supercontig_118. 23 (locus evm.TU.supercontig_118.23) derived from phytozom e v7.0 (chr-ID supercontig_118; pos 238813 to 239540 rever se strand)
tggtatatattcgagaagctaaaacggagtcattctatgacaggaatgtcaagatctaaactaattgatactctcatagatcccaatctcaaattggttgtagattaggaaaaactattggataaatgcttgttggtggaagaacatgatgaaatctctcctggagtttctgacattctgttatgtttttcttttatatgccctgcctctgatggagaaatattattacttttgtatatattagaaggaacccacatgtttcctcaaaaaaaaaaaccctgttaaatgtgcttctatgaacacagtttaaaaactttgcttttttataacaaatttataacataataaagaaccctgttcatagatgcactttataacaaatttatgagtttttttaaatattaagtttattagttgttttacaccattctgcttttttttgttaaagaaaagaaatctctctgtattatgctaaatcatttttattcagttacagagaattatgaccttttatttttatgctgaagaggttttctgaggttgtatctgtcctccagctcctttttaaatttggatgactaagcttgggttctgcatatagtactatatgttttcttagtgctttgatactgttaaatgtgcttgtcaattaagtcactattgcttagctggttgtttatttgccttttgcagttgggagtggctccggctatttatcctcaacgacc

SEQ ID NO: 76179 - DNA, 403 bp, Carica papaya
  Intron number 1 from transcript evm.model.supercontig_541. 4 (locus evm.TU.supercontig_541.4) derived from phytozome v7.0 (chr-ID supercontig_541; pos 17912 to 18314 reverse s trand)
agggactggtaatgggtgcaataaaccagcagctataaatattccattgatagaccatacgagaacagacaaaattttgatgtgagatttcatccccttccaaagaaatccatgtagaggcgcggaagcatctttttatagcttttatgaaactgatcatggactgcaatcaagagcaaagcacataggggagtatcagagtgcaggaagattttccatttataaaatatcaacccattaacttgcaattattactcaactccccttgcaatattctaatagcccattactgcagagaagagggatttcggacttctttggggataccatcaaaacagttaaaatatcaacccatcccaaacttgcagtttactcaactccccctgcaagattctaatagcca

SEQ ID NO: 76180 - DNA, 721 bp, Carica papaya
  Intron number 3 from transcript evm.model.supercontig_130. 41 (locus evm.TU.supercontig_130.41) derived from phytozom e v7.0 (chr-ID supercontig_130; pos 488690 to 489410)
agggtttcttcgcttgctacgtgttgtggaccaaggttgatttcccatgcttcctctcttgaatgcttattatcttttctgagttaaattcagaggaaaaagctgatctatgtgctgatagaaccgagtgacaaaatgcgaacataaatatgaatgtgaagttgttttatttttcacttcaacctacagagataagtagcttactggggtcttttagtgtacgtattccagcttttcatacttcataaagaaaatttttttttgcttctttcaggatagatttcttggtgaaggtatgctctgaagagcatttatcttcatgtggtaaataaaagttgctagaattttgtcttaagaataacttcttgtgcgctgttttaatgttttttttttaaatggagggccatctagtttccttgctggaacaagatggattttgttctttctcattcagtagatttttgtgggtaaagatgtgagccgaagcacatacttatttatgtggtaagtaaattgcaagaatttagaatcttgagaagaaattttcccgtgagttaaatttcaaatggcaagacttgaatctgtttgtaatgttcctgttaaccaagatgctgtaagctattatggttcttatgttctactgtattggatgatgcttgcatttttctttcatgtcaactgaacaaagcttcatatttgactgcaggttcgtagaactttt

SEQ ID NO: 76181 - DNA, 638 bp, Carica papaya
  Intron number 2 from transcript evm.model.supercontig_26.8 3 (locus evm.TU.supercontig_26.83) derived from phytozome v7.0 (chr-ID supercontig_26; pos 633086 to 633723)
aacaagaggtttgtttgctttgttgttgcctttagcatgtttatgattgtcgggttgtgatcaaaccctcacagaagaaaataaaatgagaaagatgggtatgtataagaatgaatctagtaaggaaaaaatcagttaactctctatattttactgtcctttatactttttgttagttcatctacttgttatattgaaacagaagaaagactaaaaacatagaatcattatatttcaaaaaagaaaacatagaatcatctgcttgaatttttttttttgtaagctcccatgatatcctagtattccttttcccatttatctcatgtatgctagtctgtgtcgatggtaaattttaagtgggttctgatatttgaatttcagtttttatcttgatgtaagatttcagtctccatgagttttttacttttttcttctcttggctagtcaaagttgatgcaaggcaaaaccagtttgcttcaaatggagcctgtgcctctaacaaatgtaccttgtaaatcaaattggaacttgatgtgctcaatgtgtatgattacttgcgcgccattctaatttcattgcttgtttcttttcttttttttccagagctggcgagttgactgctgctgagcttgacaatc

SEQ ID NO: 76182 - DNA, 925 bp, Carica papaya
  Intron number 2 from transcript evm.model.supercontig_169. 28 (locus evm.TU.supercontig_169.28) derived from phytozom e v7.0 (chr-ID supercontig_169; pos 329945 to 330869 rever se strand)
aggttagtagcatgactaggttaaaagataagtggttgcattatataagttctatattgttagagcatgatattattgaaaatatggattttgggattgtcattgactcactaaccttattataaatttatgtacatgggcggtactcctgttcttggtaccatgcttatatacatttgatactttttattttttttacaaaaattactttaaaaaggtataaactaaagatttcattcctaatttttagatttttattttgtatcttactaattgacttaattacttgtgtgtcattctcttaacatcaataatatatatatatatatatataatagtttaagtcataatataattgtaataaacatttgtagttttataagtttttatcaaatacaactatttactttttacaatcagtttttgtggaaattcattattttgatttttttagtaagaagcatttagaacttgatatacttgtagtaaaattaggacttcatttggtatgtggaaacattgtttagtttaaaatgaaaacagtagtttgaaaataaatgtaaaagtatgggtcaggttcgaaaatatccaaggtcacttttaatgttttcgagaaaattaattttcattctgcttagttccatgcatacacatgctaacatttgtgtttgtgtttttatgtaccaacaaataataatttagaaatagatactagaaaacatttttatatattaaaggaagtctaactttcaacagttttcgattgtcaattgtgtttcttctttagtttgaatatatggtggtagcctacgcaacattttactatccttcttgattgttcctgtgtttgtcgatttcatcagaactttttgattgattatttcatcagaacttttcggttgattgctaattcattgtttcgcag

SEQ ID NO: 76183 - DNA, 980 bp, Carica papaya
  Intron number 1 from transcript evm.model.supercontig_5.17 3 (locus evm.TU.supercontig_5.173) derived from phytozome v7.0 (chr-ID supercontig_5; pos 1446026 to 1447005)
cctcggaaaagctatcttctgattccaaatacgaggtccgtctttcacaatttttttccgagattcagagctctgcttcgtacctagaaatgttgtatattctcgtttcctggattttgaattccaatgtgcctatacggtgaatttgatgattgaaatggagatgatacttcaaaaatagcaatagaaacatgatataaatacgaaaagactgaggaatcgttttggtgtcttgtaaattggtgcatgtgttggaaataaaaataatatttgaaaaataatgaacgtatagcaaaataacaaatattattaacgtttattcgaaactgtttttgtttaatagttcagaaaatgaatgcaagttagtcatttcatttcattttgaaaatttcaattatagagtaaggccaaacaaaagtagctaggatttgttcttatttaattaatttatttatttcgtgtgtgcaaaaccaaccattggaggaaggggactgcaattgatttagctgaacgaaccgaaatttttctttacgttttacgaatcgaattatcaagatactgttattgagtatagtttacgttttagtttttgcattgtttaggatgctgtattaagtacgaattgctactggctccacagtgagatgaatattttgatataactttttgtatttttgagttgccactggcatttagagagattactgtccaaaagctttagatgaagagcctccaagtgattatgaattatatttttggcttggtccagttataatgtgttcatctggatccatatggtacttttagatctaggacggtttttttggtatataccagggagtattttcgtaatttaatttttgatttcttcttaatgctttttaatatactatggatgataggtttgtttgaagcaatatttgtgtgctttcttctgcttttgcaagctgaaatgtgtctttagcaggttgcaaaattgg

SEQ ID NO: 76184 - DNA, 480 bp, Carica papaya
  Intron number 2 from transcript evm.model.supercontig_160. 30 (locus evm.TU.supercontig_160.30) derived from phytozom e v7.0 (chr-ID supercontig_160; pos 530033 to 530512)
cgtcttccttcctttgatttcattcaagcgagtcggtaagtccttaatttttctttttcccttccaagattgttttagttacttgatcatggaagccgtgaaactgggaacttgttgacgaatgaatgatcaaagtgtcttatcatgttaaggaattgtttgaaaaagtttcgagctatagaaaggaaggactggcagttctaagataattaagcaaaagaatgacaagaaggaaattccgatgtaacttttaagcttaattacttgccttcttaaattgtattgcttctttttgccctgaaaatcaaattttgaccgaaatcatctcgataggctttttgggatatcgtatgtgactgctcttcccgtttatttttcacttcagcatgagaatttctgagcaggatattgatgtctgcgttttttgttgggttggtgattttagattcactgagatatacatcagcattatcggtggtt

SEQ ID NO: 76185 - DNA, 780 bp, Carica papaya
  Intron number 1 from transcript evm.model.supercontig_167. 21 (locus evm.TU.supercontig_167.21) derived from phytozom e v7.0 (chr-ID supercontig_167; pos 309956 to 310735 rever se strand)
gctctccttggtaaatggctatgaagattttatgttaaagcaggaaagtttctggtggagggtgattaaaaccaagttcaagatggagtcctgggagtttaggcttaggcctttttgattgcttcatggtgcaggggcttgggagtttatcaactcagcttggaaagattataatggtgctttagttggaagatttggttgagacagggtgagtttttgttgattgattgaagtgtaggagggctctctagctatgttttccctcagttttcttgtttcccagagttaaagattataccgtggctgagatttcttcttatgcctttagcttcagtgtatgaattgtgaatttggttataatctaaagagtgggagttggataattatattgatcttgttcggtttctctttcttcgtggaggcctgcacaagggtgttgcatttggaagttgagttctagtggtgttttttcagtgaaatctttttaccaccatttgctgagtagttctcctgatagtggaacctagtcccgaaaaacaaatttcaaaagtaaaatgcttcccctagagttgcatttttgcttagaaagcaacaagaggaaatattttgattttagacaacttcaggaaaatgggagaagtccttgtaaatggttgttatttatgtaagagggtggctgaatctctagaccacctttcatggtgccccatacttttcaggttctggtgctttgcttatggtatcttgtgagtgaactgggtaaggcaggctcagtggctg

SEQ ID NO: 76186 - DNA, 705 bp, Carica papaya
  Intron number 1 from transcript evm.model.supercontig_405. 1 (locus evm.TU.supercontig_405.1) derived from phytozome v7.0 (chr-ID supercontig_405; pos 605 to 1309)
gtggatacgttagtggagggtggaaaaggtgattattgatttttatgtttatatgttttcatctgttggctgtgacagtttagaaaatttaagcaaaagaaggatagttgtaggagaggatgttcatcctaggcactaaaacagctagtccagtgacatcttgttcccctcttgattgagggtctctttatggttggtatgggtacaaaacatgcacttgctaagatgtcaacttgtaagcatgttttagctaacttgtgatggttgaattcaatattcgagcatcttgttcgtgtttgtgaacttgattaatgttctcaagagtgtgaaacatgtttaactaaatgtcaaaatctgactggctgagtggttcctaaccataacaggatggttagaaatagaactcaattctcactcactagattcaaaattttgttatcattttattccttttaggtcagtttctcagggaaatgaaaattttaaagagtctgtttctcatcattcatcatttctgaagtcattttggcttgtctttcttttgccttggagcctcatggacatgttttatctttatggatgacatttggaacagaatgatgtaagcttgttgaggttgtttattttctgacactaggagctagttgaacattatgatgaaaataaagtctttttatcttgtttcttgtctgattgacagtgaag

SEQ ID NO: 76187 - DNA, 916 bp, Carica papaya
  Intron number 2 from transcript evm.model.supercontig_56.7 6 (locus evm.TU.supercontig_56.76) derived from phytozome v7.0 (chr-ID supercontig_56; pos 1060424 to 1061339)
actggaagtaccttcttgctggtctcatttttcaggtttctattttattctaaacaaaaataccaacaatatgaagctctgaacgttttcctgttaaacgtagttgagaatttcaattttcttcttttgagaagaaaggtttcagacacctggctgttgagcattcgatactgttttgaggctgcttgaagttacggttgtttggattcaattttttcaattaaaggcacaatttgcaatctttattttcttcttttctgcatttggattggaaagtgtacaagctggtagagggttatgatcatggtttgttgcatctggtaacttcttgaggagaaacttatgctttttgtataagattaaatctgtctttcggcccacaaagttggcttcattttttatcaatttcttttttacatgaacgtcgagattagttcaatgcctgctgttttgaaccttttctgcccaataagaagatgatgatctgccttctttgcttttgtaataacatttaatgagaacgtgacattctcagatgttatttggaagatttctgtgtcactatgtttttaattgtattttcaaaattctggtaagccttcatatgcctctgtggccatattatttatgcaaatatctttgaaatggttttttttttttttaatgcttatgtgcatagaaaaatggaaagtccttaaatgatacttttgcatagaacttgttaactaacttctctatgcttggtacaccactttcttggttgtgtttgtcattagttgtgaggaattatgtttaacaggttgactttttgcctcctgtggtatgcccctttttttcatgtttatttttgacattgtgaagtatgtgaacattttccacagtacatacacgggttagcagcacgaggagttcatta

SEQ ID NO: 76188 - DNA, 548 bp, Carica papaya
  Intron number 1 from transcript evm.model.supercontig_12.1 65 (locus evm.TU.supercontig_12.165) derived from phytozom e v7.0 (chr-ID supercontig_12; pos 1502254 to 1502801)
tcagctgttcgtttattcttcttcttcctttttgcaggactgtttttgtattgattattagctgggaatgtaagtttttcacatgaaagtactttggatgttactgttagctaaaatttttcctcgttctgttattggttttttgtggcggaatgatgacgcgatcattcaaaatattttacagtgtcgatgatgaagtaagagaacataatttattttaaatggtttctttaagttttcttcatgtaaacaaattggaaggagttgggctttagctagatcatgcaagagaaaatgatttcaaatgcttatcactttagtttagcttttgatttgttgcttttggagtctgaatttgactatctttcatagaaaagagagtgacgtattattgtttgtaaacgggtaatctagtggcatctgcttctggtgtttgcaatggactgctttagttgaattatatgaggaggtgatggctttgattcatgtcattgttctgtatttctttggcagcttataccttggaggaagttgatcaaaagactaaa

SEQ ID NO: 76189 - DNA, 828 bp, Carica papaya; identical to SEQ ID NO: 74771
  Intron number 1 from transcript evm.model.supercontig_5.34 (locus evm.TU.supercontig_5.34) derived from phytozome v7 .0 (chr-ID supercontig_5; pos 181635 to 182462 reverse str and)

SEQ ID NO: 76190 - DNA, 900 bp, Carica papaya
  Intron number 1 from transcript evm.model.supercontig_113. 27 (locus evm.TU.supercontig_113.27) derived from phytozom e v7.0 (chr-ID supercontig_113; pos 359924 to 360823 rever se strand)
gctctagtatgattcttcctattctgatctccatgcaccgattattttctatcaactttgagtgatgagtgaaatttgagcattttctcttaactttgagtaaagttaattctgccttttctgcttggttggtggttcatgtatgaattagttgatttgttaatatagtcaatataagaaatgggatttttcaaatattgttgtcttcatctggagaaatgaagggaattttagctctttttcctctctgatctctgaagtcctaagcgcctctgattttatttctcaactttaaatgattttttttttgacaaagaatgttgatcaacaaatcaggatgtgtagatagccgtttagaattttaagaaagacgtatccccatctatgtcaaattattttgttttattattccgttaatatctttcggtaaagaaacttttgcctctttcaattttgtctactgtagaattcgaaatagtctgcacaatctaggttatgaaaacaataagatactgcactgcactattttttgataactattgaactctttcttttgtcagaactaattgcaacaaacagtttaaatagtttgatttaaaattgtatttctcataataatgttggaattttgttatcaagataacggagtttcattatcatcgataggaaggtacaagtttacggagttatctttaggacaggccttgctgtatcacatgcaggttcattatgcataaatgtctaatggagatgacataaattgtcaacgatataatgctatcgcaatgaaacctgaatatgtaatgcttattagagacttacagctatttagttgctagctaagtatatcccaagttccagttgagtaacaacctgttgattctgttttataggtactgc

SEQ ID NO: 76191 - DNA, 897 bp, Carica papaya
  Intron number 1 from transcript evm.model.supercontig_48.3 8 (locus evm.TU.supercontig_48.38) derived from phytozome v7.0 (chr-ID supercontig_48; pos 234400 to 235296)
tgccattttcttgcacaaagtgcattctaaaggtatattgtctctgtcccttatcctctgtgtcagtaatgacttttctatgttgttcttttgtctgtaagactgcaagctttcagattgaaaagttagggacgaagaatatgattcttgatttttgagggaaaaattgcaatctaggcttgttggtcagaggaaggtctgcaggaatctctcttatctgtttgaagaaatcctaaaatgaccctggttttctttgtgtgtataaacaataaggttggcggtgcatgcacatataatatgtatatatacatatatatatttatgtatgtataatgtacgagtagatgtgattcatctgaattttcctagtatataagtggaaccagcccttgtaatttggtataaacaaaaagatatgaagatctattacaaactcctttgcataattggagttgctttttaaatatattaaagactaatgacttgtcatatatacaacagtggagagatcaaattcctcaatctttatgtcatttttagattaatttacaattattctgtttgtaatttacaaaataaatttgagaatatggctgggaggtttcagtaactgtcattctgataacatatcttgtctgtgtttgcttttgtgtttatagccatacagagaggtgtttggcattttgactggtatttttctttatgccataatatgatcatatatgaacctggaacttgataacacatcttgtttatggaatcgggtattgcgcgttttcattggcacacacacacacacacatatatatatataacaactgtgtatctgcagcatttcactgaattcactggttcatgatcagttgatgttacccttttcttaccattctacagaag

SEQ ID NO: 76192 - DNA, 466 bp, Carica papaya
  Intron number 1 from transcript evm.model.supercontig_169. 10 (locus evm.TU.supercontig_169.10) derived from phytozom e v7.0 (chr-ID supercontig_169; pos 170703 to 171168)
tcttcttcacctcttactctcttccactctcaccggtaacttctactcttctttcttctcagttacctactcaatatatacatacatatatatatatatatatctacacacacacacagacatatatattccatacacattcagaatacctgtatttgtcttttgattagtggtagtgaattcttgtatcaactttcatatatggggattaaataaatttctatctagtcaaaaacaaaacattcaccatagaatcagagaagttctgaataaaaattctgaagtaccttaagtctagcttatagaatgatgtttgcttattattatttagtattctggaatcaacttttatgaattcacgaatgaaattttcaaaactttgattttaattatgatttgtgattataatgtgtaacccctttcggttgcagggggaatacaactcatcctcgtaaacaattgcgaa

SEQ ID NO: 76193 - DNA, 625 bp, Carica papaya
  Intron number 1 from transcript evm.model.supercontig_27.2 28 (locus evm.TU.supercontig_27.228) derived from phytozom e v7.0 (chr-ID supercontig_27; pos 2150212 to 2150836)
tgaccgcctccgagattcacagcctcgttcaacaggtaagaatcataaagaattctactttttttttttgttgagatataagagaaggaatcataaagaattctacaattctgtggaatgtatttgtttcaaatgcaccgcaaaattgttatcatggaattcattagaatttgttgacaaatttgagagtttggagaagtaggcttgaaatgtgttattttctgtttgtctttccaaatactctaattcaaatgaattcaacgagtataatttatttcaaataattcaatttggaagttattttcttcatcgattaatgtgcaactaacataaattttcagtggacatttattcaagacaaaatctgaaatttctcacttccatggagctctatcaatttagccatgatgtgaattaactaaaacgtatttggattttttgcatctttactggtggataggtctatatgcaaacaatttgaaactggtgtggtgttgtgatgaacatggcagcagtaaatttgtgtctattactgaggaatttttgcttcagtccttatctttttgttttagttgaatgtttctctgtacatctctcaaattgctgttgatggaatgtgcagatt

SEQ ID NO: 76194 - DNA, 657 bp, Carica papaya
  Intron number 2 from transcript evm.model.supercontig_128. 4 (locus evm.TU.supercontig_128.4) derived from phytozome v7.0 (chr-ID supercontig_128; pos 11988 to 12644 reverse s trand)
ggagaccaaagttctgtccattccatctctcaaatgtaatttgactgctcaattttcagtagtttggaaattttaccttaccgcgccaatagtgtgtaagatcattttataggaaaatacggtgaaggtcctccaaatcaatcaaaacaatgaaatttcctcatgagcctcattgctgtagttatgatgtttcagttacaacattttgaatattggctttgcccatggatgccaccagacactgaacctgtatattaacaaacctttcttcttcttcttgtgtgcatatgatggttgggggagctggggcagtgttcagaaagtaggatctcaagcaaagtgaattattatcttgagtaatactcaaaagtaggaaaatattacttctctaggtgctattgttgaccatcatttgtattcagttctaagtggaaaagcattagtgtgaattgggtcaaaaaactattacaaaaggctagaagtttttttggggtgaataggtaaagcaaatattcaaaatgtttagggtgaataaggtttctgattcttatgcaatatggcatctaagtttcagtccttaagtttttctacctacataaaaacagtattagaaaatggagttctctctgattacttagtatttgtggttatttcagg

SEQ ID NO: 76195 - DNA, 826 bp, Carica papaya
  Intron number 2 from transcript evm.model.supercontig_188. 2 (locus evm.TU.supercontig_188.2) derived from phytozome v7.0 (chr-ID supercontig_188; pos 14042 to 14867 reverse s trand)
caaatttgatctccactgcttccaatctcttactggtatgttatagatttcatctcatcatatttagctctaggtttccaggtaatacaaatatcaagtggacatactggagcaatttgttgataaatatgaataaaggtgatcttaggttttgggtgttagcattttgttaataagggatttttatttttatgcatgtgcacatgtcctcctagtacctcctataggcagcatattgttgctgagacttggtcctgtaatctggttttcccctatccatgctctaatctcgtttttccttagaagggattttcagatacatgcatgttgctcataattgatttctagaattctatagatggctggtctaagtatcacgtttctttccctaaatggggaaacctctgagtttgtggttttacttggtcagctgtgagtcctgaatatgcaagaaataaaaattataattgtcctgatccaagaagcagagaatattttagaccaggtagattagttgactgcaaaaacagtgacacaagctaagcgaaaattttcaaattgtcagttggatccacaagatctgaaattagaggaatgctttattatattttggcttttgagttgtgttgctcattttcttttatgtacgactttgctgtctgggtcttccattttaatgaatgatcatttacagatctgctggttaattacactttgtggaacaacaattggttagaaatattaatttggaaaatgttgaatctacaaaataatcctttttttgaatgcaggaacaaaattctttgtcatctgtgagcctggggca

SEQ ID NO: 76196 - DNA, 696 bp, Carica papaya
  Intron number 1 from transcript evm.model.supercontig_188. 2 (locus evm.TU.supercontig_188.2) derived from phytozome v7.0 (chr-ID supercontig_188; pos 14998 to 15693 reverse s trand)
ttatcaataaatcaggtggcttgatcttctacaaggtaccatctcttatgcgcattaacttctgtttttattttcttctttcagtttgagtgaaacatttcttgtttccgtagggaaatctcttatcacagttttgctttgttaatgaacattgaattttggaaggttaaggaataagctcttctttcactggatttttattgtctgtttagtatctaaggttagaacatggaggatttgattctttatttgttatttggagtccgcatagtatgaattgaggcaaatggtcttccttggttatgggaaaagggaaagaaatgattactgcatgctaaagtttattcttggatctaacatggaatgaaagacattatctttgaattttttgaagaggtaaaaagtttgaccctgaatcatgggttctattgctctgtttggattaaaaaaaaatagcagaatacaagcaaagttaaagcaaaattcaagatacgagtataaagtatttttgaccaatttcacatttgtctaagaatgatagaacagaagggagatcctgaattgttatcactatctgtctttgtttgttttcttacaaatcaaattgatttctctttcaagacagtttcaaatgtttttcttttattttagttgtcttagcagtacaagctttgtttatttgggaaatttaggatt

SEQ ID NO: 76197 - DNA, 750 bp, Carica papaya
  Intron number 1 from transcript evm.model.supercontig_217. 20 (locus evm.TU.supercontig_217.20) derived from phytozom e v7.0 (chr-ID supercontig_217; pos 238515 to 239264 rever se strand)
acttcaagacctgattctagatccctctttggcaggttagttcaaagacaatctctagggctcccaatttcaagctattttcatagcttaattaacatccaatatttgaagaggagacttgtcgataaactttatcgagccagcttgagacctccaggtttttcttatttcatgttaaattaggatttgttgtttttcatttaattacttttgacctgattgttatgactcagtttttgtatatgctgacattagagtatatgacccctaggatttatggatatgtgctactgtttgaaattaatactcggaatttgtaggtgtggcagttgaattgggtaatctttaatgaaacaagggatttttaagcttagtttagatgaaatgcattttatgtttaattcaaattagttctatttatactcattttaataccaatggtgccataaatttatcaaacaataaaaataaatattttaaggttcattcaccttaaaaaaatatatcatctactatctattacttaactgaataattgatatgtttcgttttttataaaagattgtaggttcgagtcgaaatattttgtttcataattaatatctatatatgttttaattgatgaatatatagatttctaatttcaaaaaatacgatatgatgaaaaaagtgtttagcaaattcaaattaacattattctatttatttttactagaaagtctctcaagcaactgcatacaaaggctaccc

SEQ ID NO: 76198 - DNA, 945 bp, Carica papaya
  Intron number 2 from transcript evm.model.supercontig_371. 4 (locus evm.TU.supercontig_371.4) derived from phytozome v7.0 (chr-ID supercontig_371; pos 32320 to 33264)
gagttcgaattgtttctcaaagcgaatctgacgccgtaagtttctaaatctctcttcagttatcatcatcgttttctttttgggtttgattgcattgaaaatttctccaacgtacatgttatacaaaattggtaagtatttctcataaaaaaacaaaagatgaagaaattttctttcactgcattttggtcgaaaatgatccgatttattatggtttgcggatgactaaattttctttattcatcctcaaattaccattgagtgttctctttgttgctaattctatgaaactgtcacttttttttcctttagttgctaattatgtacagaaacagattataggaatgctatacttataccaatgttgagttaatttcttattcaattcctaattaattcctaattttggttctgttatcagttttactatccataattgggattagaaatttattatgttttcaacatttcttttttgttgggaatttaactgaattccttgacagtgaaaattcaacctgatttcaaaataaaacctgaatcctcacaacaaagcattcaaattgtggtggtgaaattcaaaggcaaaaaattatattctagcaatactaacctatgaattagattttatctaaaaaaactaatatgtgaattagaatcaggaactgactaggaattgaatgagaaattaaccaaatgaaatcttatattagaatgtgttggaactgttaaatcttttttcccctttaatttctaattctgtgaaaaaaaaaaacagattttattagtgttacacttctagtactgtgttggaactgttaattcttttctcttccctttaattgctaatgccatgaagaaaacaaattaaaattctagtagtatggttcctcactgttctgttataccttttttgtatgtgattatttccagccacctcctatc

SEQ ID NO: 76199 - DNA, 445 bp, Carica papaya
  Intron number 4 from transcript evm.model.supercontig_11.4 0 (locus evm.TU.supercontig_11.40) derived from phytozome v7.0 (chr-ID supercontig_11; pos 515946 to 516390 reverse strand)
tcctttactgggcattcactaatcagatttcccaggtaattaatcttaattactgtcatttttaacaaattaaattaaattgtttgttaattaaaaaataaaataatactgaagaataaaaaggttatggatttggatttgatatgtgggggcccattggaaatcttggtggaaaatgaaccctccaatttggacacgtgttgggtattgggatcttgataaaaggtatctattataatattattttataatagaatgttctgtttgactcatcatattttttctttaatgacaaaatcatcatcccagcaaaattaattttagaaaaatgaattattactataaattaatttttaaaaaataaattgaatttacaattgtaatatttttaatttaattgatgattattttaatataatttaacgattaaatatattattcgcag

SEQ ID NO: 76200 - DNA, 420 bp, Carica papaya
  Intron number 1 from transcript evm.model.supercontig_26.2 83 (locus evm.TU.supercontig_26.283) derived from phytozom e v7.0 (chr-ID supercontig_26; pos 1862180 to 1862599 reve rse strand)
ggggctccctttagaaggtctggtgagtttcattaattaacatgttctctcctttaattcttttctgatcattattaataattaaccagtcattctttcaaacgaaatgcttcatgggtttctttcatcttacaacgtctttactgggtattcaaatgttttgatagatttgattcattaatatgctgcggcagaacgagggtgggtcttgatctttaattttctgtttttgtttttgttttctggtcttaaaaaaagatatcttgattattttctttttttccaatgttaatcttgaaataatgaggaaatgaaagattagatatgaacgcaagcaataatatgcttgcacgattcaatgtcttaatcttagaaattttatgttccgggttgtgttgtttcaggcaaatcaaagaagca

SEQ ID NO: 76201 - DNA, 784 bp, Carica papaya
  Intron number 1 from transcript evm.model.supercontig_200. 16 (locus evm.TU.supercontig_200.16) derived from phytozom e v7.0 (chr-ID supercontig_200; pos 163806 to 164589 rever se strand)
cgccgttacggaagtcaaagatcaaggccagtgtggtaagcctttttctcattattcttttttcaaattcagtctcgtgtgtatttttgtatttttatttgctgtttttctctcattcttacctgattgatagagatattgacagtgaaagctacctttttgtatttattattattttggacggattgttgtttgctgggtttaattattaatttcaatgctctttttgcttagtttagaaaagtaatttaggggaaattgttttttcaaattaacatccacaagttaatattcatgaatttgatatgctgtaattattagtacaaatgaaagaagaatctgaagatttgattaatttcgccatatgcaacagtttctactcaaagattgatcatttatctttctgaaatgattatgagtagtaagtgaatttcccttactaagaaggatttgtttgtaaaacttaaatacaagaaaatgattttttaattatttgagattaaaattaatatgaaaattagaactcaaaattagattcaagtaggtagatgctgatccgagtaggtagaccaatcatgtggactttttcatcagatccaagtaggtagattagtcgagaggtagattagaacaatctgatccgagtatcacctttatcacgtaaaaaaagtaggtgctgtgatgagttcttttctgtcatgggttgtttgcaatgaactaattagtgtctggttggtttttgattgaagggagttgctgggcgttctctacagttggtgcagtt

SEQ ID NO: 76202 - DNA, 1018 bp, Carica papaya
  Intron number 1 from transcript evm.model.supercontig_2.22 4 (locus evm.TU.supercontig_2.224) derived from phytozome v7.0 (chr-ID supercontig_2; pos 3014157 to 3015174 reverse strand)
tcgacagtaagcgtcttgctcttgcgcttaaaaaggtagattcctttgtttatcaagttctgatttcttgtttctttcccttttctttttcttcctatttcggagttttgatctctgctatgaattcagaaattgtgagttttatgcttggatatgatctattagcaactgtaaacaccttttgacaatgtggtttcagttgatttatcaaatcttctttctttcaactccaagtcaggctagtaattaggctttttttgcaaatgaaatccctcattttgtttttggcacccgaagttcttgctcattagtagacattattatgctcttgttcgtaattttttccatttttcctgttagtttgaagcagctatcatgagatcaaaatcattcatcatttctgctactgctaagttttacccctatccttgcgtagttatcttcctcgtatctttttcttttttaattcttctattagctcattcttcttaattttacaaaactttagactataattttcagtctctctcgtttatgtgtaagtcctcccaatatatgtcaagtacacgtccttgtactatattttgtccttatagtaatatcaatattgaccgacggtttaggttgttcagaatttttactccttaggtttaccaggactttaggaaaactatttgttgtttttcagcaccaaggcattttagttgcaagtttctcaattattaaccaatttttatgtggaaaagctcttctgctgcctgtctataatgataggtaaaagcttgaagaagacatggaaactaacatgagaatctgcaactagtccagccttcttgataggactccttaggatgtctttccataaattctgccatatgcaaagctgcgcttgtttctataatcttttcgcgacagggaaaagaaaaataaactctcctccatcagttaagttaaaactgaattgtttgtattgtgatttgcaggaattcgactcttcgtgtggtccagcctggcattg

SEQ ID NO: 76203 - DNA, 702 bp, Carica papaya
  Intron number 1 from transcript evm.model.supercontig_6.24 9 (locus evm.TU.supercontig_6.249) derived from phytozome v7.0 (chr-ID supercontig_6; pos 1959258 to 1959959)
tacttgacaagctaaggagaaggggaaagattttggtaaatggatgctccctgtgcaaggtgcagaagaatcttgtgatcatatattgctgtggtgtccatgggcatacaagttatggatcatggtgtatggattattgggaatcagttgggtcatgacagacaatgtaagggatgagagttggccgtggaagggtgttagcggtggggaaaaacattttccccctgctattttttggttgtgtgggaagaaagaattaggagagcttttgaaggggtagaagctttgataggttagtgatggatggttccgaaccatagatttattaattatgaattgattctatgcatattatagaagattttgggaaccttatagatattttgattggagtgtaaaatagtggatagagcttattctctagaatgcatcatcctttcattatcatattcttcatttatttcttctttttgtcattttgatacatttttaactgttatgattttgttggatctcgattttttttttatatgcaaaattgttttaatttatctccaaagaatatagtttggaagtttctgctaacatttgtactgcttggtaggaaattcctttgttcaactctatttagtgattttcatctaaattatcagctcttgcgattaattcataacatctcattatgcaggtgaaggaaagtaa

SEQ ID NO: 76204 - DNA, 748 bp, Carica papaya
  Intron number 2 from transcript evm.model.supercontig_19.1 87 (locus evm.TU.supercontig_19.187) derived from phytozom e v7.0 (chr-ID supercontig_19; pos 1380648 to 1381395 reve rse strand)
attatcaaggttggtctttttccccctttcactatggtttaggaaacagttgttccacttgcaattattctcaagtatggtagatgttgactcatattttctaattctattatgagttcttgcggtggtcttgatcgattatgaattctaatattttgcagaaaaccagcatattgtttgtaaagcattctattgatttctctctgaaattttacctctgttgtgttaatcaccagtaatttgatcaaggtctagtttttgtgcgtgatatgatcatggctgacgtaactaggagaatgaaatgagtagtggtctgtgaaaattgagagagctcaccagcttttcgcgggtgaattttttcttcttgagtcgatttgttgggcgaattacttctgagttcttcacttgatgttcgttcatctggtgaacatttcaaaacaagcctatgttcttgtcttcagttttcctagtttatttcttaattgataacttttaatcgtagcataacatcccttattatgtggcctttggtgtggtatagtattttcatttgtcagaaacttctcttcttttttccggtaattctaaagccggatgataggggcatttgaacactcaagtctctttatggagagaggaggaggtaatgtaaccacgtgaactattactaatggttcatttgttatgtttttatttgattgtttaatgggtagattatcttgatcgaggctgggagagatctggctgt

SEQ ID NO: 76205 - DNA, 757 bp, Carica papaya
  Intron number 1 from transcript evm.model.supercontig_5.19 3 (locus evm.TU.supercontig_5.193) derived from phytozome v7.0 (chr-ID supercontig_5; pos 1665639 to 1666395)
atcttccaatccttcgtcgtcgagttcaacccaaggtgtgtttacatttatatttgaaaattatacgagttacaactttcaagttcatgcatggagtgcttctcgtcttttgataatgtagtttggctcatggaatttaattgactaatgcccatttgaaaatttgttttataaattattatatttatttatatggaacgcaagtgtgcttctaaaccgagaacgttttgagctctgctagattctccattttggtcaaattctttaaacgattaaaatttaattttgggtttatagaatgagtggatcttttcatattctgttaagatctttgttactttgttcttttcgggggaagacttagtttctgggattttagcatggatcaattattttgcgttcaacagaacagtttctcttttttctgttcaactaaggagaagtttttaaggaacattttattgggaaagtaatctaaataggaatgtagattcagcttccaaatgactgatttctcagtctgttgtgcccttgggatacttcttgtcctgttagggcattaacatgaatcgttagacctaagagaatgggcagttttaattgtcatagcttaacataattcccttaatattatgataactttctttagcctttgggaatgccaacttatacgcttttgcaataaaagaatgttggcggggtttaacttcctcaaattttaggttcggctgcattcacaaacaaggttgctcttact

SEQ ID NO: 76206 - DNA, 1058 bp, Carica papaya
  Intron number 1 from transcript evm.model.supercontig_5.27 3 (locus evm.TU.supercontig_5.273) derived from phytozome v7.0 (chr-ID supercontig_5; pos 2424878 to 2425935 reverse strand)
tccgttgtgaaacgaaaactaaggtttcttgcatcattaatatcacttcactaacagcaaccatatcttttttaaaaaaaataaaatcataattggcttgcttgtaagaaaacctggttttggcacttagaaaatgtagtttatatgctgctctatgatcatatgaatgtaagtgcatcttgattcttctatgcttagcaaaatcaagtgattcataattaaggagaaaatgaagttttgtggtcataaaacactcaaaaactaaaccatataggctctagctagtttcttttccttttatgaggtaagaatttggctcatatccaagtgaaatgtcgtcttgttaaaattttgatattgaacaagttccttagaaagaggttaaactctgttgttaaggaagataattctttcaactcaaactgatagaggatttttttgtacgctaacgtagcccttcaactaagggaatctataaggaaatatagtcccctagactgtacggttcgctggcaagctgttgattacaaactccaataggtggtaccaaaaatgtggtgagaggttgatatctttggtgagagtttgagctgtgctcaagtgagattcagttcgtaaaagtttatttccttgtgagaaatggtagttgctccttatacagactgcgattctctcaacttcaggacatgagatggagaaattttttatacactaacaccttcctttgtcattgatgcaatcttttcttttcctgttaaagtatgaggtgcaaaggagttgcaaatcaatttaaaagttattgcatctctgacaaggaataatttactcatgatagtgcattttgttcttcccaagccataagtactttttggagagattgattggattcctgttgtctctgtcctgtgaatgtcaccagtaacaactgctatttttatcctaaacataagaaatgatatcttcatcttggtgtcagaagtgcattcttcactgaatttattgtggtttatggtatttgttcaggataacgtgtttgttacagtggttgcttccattca

SEQ ID NO: 76207 - DNA, 565 bp, Carica papaya
  Intron number 3 from transcript evm.model.supercontig_1007 .4 (locus evm.TU.supercontig_1007.4) derived from phytozom e v7.0 (chr-ID supercontig_1007; pos 15632 to 16196 revers e strand)
actggagccggaagcaggtgatccatacctctttgatctttagaggatattgcatgcctcaaattctaaatgttaatggaattaaataaattttttgaagatttaggccacaatggatttttcaatgtgagaaaaagtttcctttttttctcatggagattgtactggctgcttatgcacaaaaatttacttgcaaaatatactctctgcctttcttttttcacattccattatcctaatctttcaagagtcatgaatacttaacaaactttcaagcctgtaaattttgacaaatttcatcctaaaccttaaaaaagtaactcaactcgctctagttgacgagtggtaaaatggtgaatgtgaatacatattggcacagttgtaaattttttcataatgtgattctccatggttattgatatgaataagatttcacgcctttagagatattgaataaatcagtgtttggttgacaagatatgcactttatttttacttatgtatttgtctttgatgatgaatttatccaggtgttctcattgtcagtgacagaaatcggaactct

SEQ ID NO: 76208 - DNA, 655 bp, Carica papaya
  Intron number 2 from transcript evm.model.supercontig_170. 13 (locus evm.TU.supercontig_170.13) derived from phytozom e v7.0 (chr-ID supercontig_170; pos 64718 to 65372)
gaagaaaagcagggttgtcttattgtttttatttcctattttttgtgtggatctgcatcatgaaactgactgaaagttgaaatagttcctttctctcacccaattgaacaaagtcgtatgtctaaggtggagtagttgagactgaaacttgctgaaactaaaaaagcttgcctctttcacctaagcaaacaaaatttatagtttgttagcataactatcctttttcccagtctcaactgctagagtgtgttcttgatgaattcagaattaagtggtgtatgattatattcactgtgatagaccactcatcatggaagagaagctaagaattggaaattgttttaatctaatattttcctgctgaaaatgatttagaactatctcttttcctttacacttgtagaggataaatgagcaggtaaggttgaaagagctaccaatgagtctttgtttcatgaagtttttatcccagaaaaagtgctgctaatgttttgattagttgtttagtgacagtagagagcagtacaatcatgcaaagttattttacagcaatatgaggaaaaataatgtcatagttttgggcaaatgcttccttcataacatcctatgtgtttggaattggactttgtattattgcaggtacagtccattcctc

SEQ ID NO: 76209 - DNA, 345 bp, Carica papaya
  Intron number 1 from transcript evm.model.supercontig_161. 39 (locus evm.TU.supercontig_161.39) derived from phytozom e v7.0 (chr-ID supercontig_161; pos 567789 to 568133 rever se strand)
aacgatcaattatcccatctacaacccacatcaaggtctcatctttgacttcttcttcaagcttttctttcttctcaccttcttcagcaagattcgtttactattttctttctttatctttaatttcttggtttcccctttcttgattcatctgcaacacagttttctcttcaattgtgttgttaatgtttcatctctaagctaactctcttatcagttgactttctgctatatgtgtttataccaacttatttttcttgttgggttttgtaagttcttctcctatttgttctttgtatgggttttgtaggttcaagaagggagatcacaggaccaagcaacagt

SEQ ID NO: 76210 - DNA, 631 bp, Carica papaya
  Intron number 2 from transcript evm.model.supercontig_50.1 31 (locus evm.TU.supercontig_50.131) derived from phytozom e v7.0 (chr-ID supercontig_50; pos 1180170 to 1180800 reve rse strand)
aaggccggttccttagggttctgtgttttattttggtaatgaaggccgattagagttagtgaaggagacttaggatttttgtcctcgagctctaatacaatatggaagaatgaatgcgtgtgtttcattgaatactaagtttatatacaagttaataggacaatacaacaaaatacaattaattacaaatgaagaggtattactaatatgtcatttaccctagttaacacacattttaacttatatacacttcataccacttagaaacacctatagtaagcaaagccaaactttgtgttgatttgtcacacttttctgttcatattttaaaaacttttgacttgtcttgctgtgtcgacaatgttcatctcttctctggtagccaaaaagggaaaaaaaataaaaactgaagaacaaagagaaagggagacaattctctctggtcttcacatgttttgtttttttatttggaacgagaaatgattattgttggaggatttttggaatgtattagatatactaacagattcgtaaatattctgtaaatatgttttatttcaaaaaaagaaagaaataattgatgttgtgttattttggttctgctaatcggagttttcttttctgtaggaat

SEQ ID NO: 76211 - DNA, 402 bp, Carica papaya
  Intron number 1 from transcript evm.model.supercontig_51.1 30 (locus evm.TU.supercontig_51.130) derived from phytozom e v7.0 (chr-ID supercontig_51; pos 1266217 to 1266618 reve rse strand)
acaaggtttttacaaattcttcactccgttctttcataatttttagattttttattagaatttcattctatatacatcaatcgtagcacaacacagactgaaaacacaagacaactcaaactaaaatcatctattcaagtaaatagtagttgacttttctaaatttttagattaattactcatttcattaagatcgcacataatggaattgtattttgcatctgggaacttctgcctgtttattttcatctgggttagaagttgtttaactttttttttttttttttttttttctaattttgtattttgcagggagattaatttaagtatattatgattaattatgggattcttttgtttttagcagaggattaagcaagtggtgcagcaggcaagcaagct

SEQ ID NO: 76212 - DNA, 943 bp, Carica papaya
  Intron number 1 from transcript evm.model.supercontig_30.1 42 (locus evm.TU.supercontig_30.142) derived from phytozom e v7.0 (chr-ID supercontig_30; pos 1860197 to 1861139 reve rse strand)
gggtaagatttgattggttcaatttagtatttttgttaatttatttttattgtttgtaataatttatgttatttttttcttgacccaattcaatgtccttttgttcgggatctcttggtttcttgttgtgacactttataattcatgggcaataaatgacttttctatgaactttatgaatgttcttaatcctttgacttatttatgttccatcggagaagtttaaagagcacatctactaccactttgttctttttcagcttaatgcacaaatgagttgctatagccaaattgctgaatcattgaactatggcatcgtatacagtagttgctaacttttggcatgtgtctgtggttgaccacgacttgttctcgtttaaaaaatcttagagccagttgtggagcttctgcaaatgcatttttaagggcttgagtccttttttctctaaacaaatttgactctatttctttttcatctctaattgttctatcttcgagaagcactgcttattctttcacttgttcatgtatttaaaaaaaaaatttctttcacttgttcacatgaaatagttacatgttgttcttaaaagatacatattgtacacaagtattttttatagacttagcatgaaggagttttattattttcaaagtacacagttcaattttttatatctggataactaacacaattctaaaagtgcaataatgcttctgattagctggaagcaggaagtaacatagaaagattattttccttagtgaggattgaccattagagtctcattctgatatcttgctaaaattgatttcttctgttttgtgaagggagtaattaatcgacttatagctctccttctgttgcactgttagtgttccctataattttgacattctgtgagttgttcacttattgtgtttgttgatgacttccagtattact

SEQ ID NO: 76213 - DNA, 300 bp, Carica papaya
  Intron number 1 from transcript evm.model.supercontig_26.1 36 (locus evm.TU.supercontig_26.136) derived from phytozom e v7.0 (chr-ID supercontig_26; pos 1021391 to 1021690)
ccgctgcgtttttggtctcattctctctctctatcgtttcaaatacatatatcagatttatatgtaaattcgcaagttttctctttttggtttctaagaaatcgtggagaagaagagaaacacgtgtcttgaaaatctcgcatggctgtattggattcataatttctcccagcattcagaatttgaaaaatttaagcggttttttggaaattcgataaaattatttttatagttttgattgtcgtgtttatgatgtttgttttgttctactctttttcgccgcagttgggaatatacctt

SEQ ID NO: 76214 - DNA, 795 bp, Carica papaya
  Intron number 1 from transcript evm.model.supercontig_39.9 2 (locus evm.TU.supercontig_39.92) derived from phytozome v7.0 (chr-ID supercontig_39; pos 1775657 to 1776451 revers e strand)
atttccaagacagaagaggcaaggtatagtagctattgttttgcttcacttaattaagcataccttttttcttttgacattattgagtaatcacacaagttgaatacatgtttagcgattagaattttgatcttataccacctgaggaggtggctcaatggtagagtattttggatttaaataccttgcgagtctgaggtgctctaatttaggatccaagttcttagatcgagtcatagaatgtttcatttattgctaagttcgtttatgctactttgttgggtttaagtgttgatgatgatattcgccaaaattttttatgattatgtgttttaacggatgtaattcagtattatttaaatatgaggatttatattagcttatatgcttgtcatgtaactcttcttcatagcatataatttttggtaagaatcaaacatgcaatcagagtcaattttgcatcatagtttagtcatgcataatatcgggttggtgattcgttcctgcctacctatttatgaatgtgtttcgcttatatgagaagagtgtgtcaaagaagaatataatctcatattgaccaagtactaagatctatactagtttatatgctcatcatgcgctcttcttgacactatattgttttgggtaagaacttaagaatatgattccgtcaaaatcttgatttatttttcgtgggtgttctttcttttctttgttgttcttaattggaacgagttgttgtgtgttgattactgggtaggcaggggatcctctatacgttttactgtgctgttg

SEQ ID NO: 76215 - DNA, 612 bp, Carica papaya
  Intron number 2 from transcript evm.model.supercontig_56.8 3 (locus evm.TU.supercontig_56.83) derived from phytozome v7.0 (chr-ID supercontig_56; pos 1107789 to 1108400 revers e strand)
tgttgacctttacttcaatttggctgctggtgaaggtacttgcttaatttacaacgatcatgattatgaatttctcacgtccttagattagaacataatgaactacaaattggggttttatacttgaaataagagaaataagaggaagatgatgagactaattgaaagatttaatttttaaattatgattgttctcataaatcttcaaatatatatataggcattaatataattttttaaaatttcaaatacatgaatcataatttaatttaatacatgaatctttaatttcttaataaaacaaaatatctataaattattattttcaacaagcaaggcatctatactgcttttcttgtttctgaaactaagtaatgtccaactatgatgttgacaaagtttcttattttgattttcaaaacatgaatggtatgtgatgtgtttctgcttctgctgcaatcaaagaataattatatatacatatatatatatatatattattatattatatttgatatataaagcaaaatgtaagaatttgtctgttgactaataataaaagttacaaattgaacaggtgcatttttgcctgacctgtgcgaggctcaacgc

SEQ ID NO: 76216 - DNA, 482 bp, Carica papaya
  Intron number 1 from transcript evm.model.supercontig_19.1 78 (locus evm.TU.supercontig_19.178) derived from phytozom e v7.0 (chr-ID supercontig_19; pos 1277355 to 1277836 reve rse strand)
tcgggacgccttgaccgccgcttctattgtttttggtatataacaacgctgcacaagataatttttgcgctttaaatttgaatgctatgagcttctggtcaattatagcttttgtttttccctttctggagttaatttgtcagattatgtttgcttcatagtgatggttctgtaataggtgaagaatttatcggaactcttgcttttgttctaaacaagaaattaaggatgctctgtgttcatagaatatgaatcgtattgacaataagatactttaaggaacatgtagttgatggattgcccatcattttttagtttacaactactggaagaggctttttttggtgcattgtgaagaatatgtttttgtctgtcgttatatgcgttcttttcatataagtgtgaatatgtagcgggttattggagccgagtgttgtgatcatgctgtttgaatgcgcattattagattatcaatactcttt

SEQ ID NO: 76217 - DNA, 433 bp, Carica papaya
  Intron number 1 from transcript evm.model.supercontig_159. 21 (locus evm.TU.supercontig_159.21) derived from phytozom e v7.0 (chr-ID supercontig_159; pos 317260 to 317692 rever se strand)
ccaaagtctacgaaggaaagtaagtctgcaacttctctttccttaaatttatatttttcgttctttgttggtctctgtaagttgaaatttagctgagactatatgtttttcagattaaggaattgggttccctgttgatagattgagaaatccatcttcctattaagttatcagtaattggttggtctaatgcatttttctttatgttgattcagaatcttcccatgttatgtttcccgggattttttttgacaattgaatctgttttgcatttgattgttggggataaatttggttttagctctttcgcaagaaattagtagtttcctgctcttgtgggtttacaaattggtgttgtctcactggtttgcttttctttttgcctttgtttgcttaaggtataaaaaccatactgttgcaatcaaaattgtcc

SEQ ID NO: 76218 - DNA, 646 bp, Carica papaya
  Intron number 2 from transcript evm.model.supercontig_49.2 4 (locus evm.TU.supercontig_49.24) derived from phytozome v7.0 (chr-ID supercontig_49; pos 129627 to 130272 reverse strand)
aggtttattttcaaatgcatatttctttcttgaacattgtttttctctcatggttttgggtgtgaccccatttccgctctccgtttctttctttctttctgtattttttgagaaggaaacaagaattattgtattcacaaggatgttgccatcttcttattgccctctcctagcttgtaaccttttttttttttccctaggagataaatgttaccttttctctaagccattaaggaacatataattttatttagctgtaagtgttctgtggttagtgacaaaatattgaccacagctatccaaaacttggcctggtcctaattgaatgataatattttgagtctgaagttgtgcaaacttgaatgacccgaaactcaaatgttgtccagccttgaagtgtccaaatcagagatccaacagttcatgcacaacgttatcttgaaaatttatcaattttatttctattgttttctcgaaagaagttgtgaggttaccctactttagaatctgtaatgcatacttatctacattgagattcttttttccaaagcacttgcattttagtgtgcccatttgctggaaatggaagagacttgtcagattcatcagaaggatagtaatggtaggaactttttatgacaggata

SEQ ID NO: 76219 - DNA, 468 bp, Carica papaya
  Intron number 1 from transcript evm.model.supercontig_5.25 6 (locus evm.TU.supercontig_5.256) derived from phytozome v7.0 (chr-ID supercontig_5; pos 2220742 to 2221209)
aggagattcgtagtttggatctctcttacctaccggtaattctttgctgcttcttttcttttaggacgattagcttgttcgtttgtgattgtgatattattttcccctgtggattacatcttttattccttttgtactgagttggattttgagttttcttttgcgtttttcggccgtaagataaaggggtttctgacaagtgttcaaccaattgttttcattagtttcatggctctgagttaatatgctattgtctttaagctttttcacccaaggtaattgtgacagttatggtttatgggttcattcaatttctgctgcggattgttttggaatgtttctatatttgttaagcttgaattgatctgttctttttctttttttcttattagtgaaacagaccttttagaattgcccgtaaaatttactttttcctttatatttttactttgtgcagatttcaaataa

SEQ ID NO: 76220 - DNA, 799 bp, Carica papaya
  Intron number 1 from transcript evm.model.supercontig_46.1 68 (locus evm.TU.supercontig_46.168) derived from phytozom e v7.0 (chr-ID supercontig_46; pos 1643646 to 1644444)
agagtcttgcgcaagactataaagagttgcagaaggtagtttttctttctcggttttcatgatcttttaattctctatcgtgggttgttgccagatctggtgttttgttttatcttctttggcggttgtttggcttgatattatctggtttatcttgatctgtgtttaatctgctaggataaaagggttctggatcttatgtggggcgctatggatcttattattttgttttttctctgtattttttatcttcttttttcttgaggaaaaaataggaaagaagaagtgaaattttgattcttatgtttttaatcaaatgattctcagttatatatgtacaaatatgcagctgtattcagctcatgtcagcagaagtttttgtttaactcataatacaaacaagaaaacggaatcaatattcatcctttagtaatctttttggtggtttgatggcctttccttttgtgttaggatccacgggttgtattttccaaatctacttccatcgtcctagtgatctgtaattggatttgtatggtttcttctatcttctatgcgataaagaggtaaaaaaggagttcactttttggttatacggacgttcagctttaatctatgtctctaagaaatctctgtatttcattttcttatctttttttttttttcgctttgggggaggggggagggggaaaggagtggggttaatgtctgaatgcttttcatatatggcttgattttcacttgctcagaaacaaatgaatttattttctttatatttgttttccaggaaactgaggcc

SEQ ID NO: 76221 - DNA, 901 bp, Carica papaya
  Intron number 1 from transcript evm.model.supercontig_49.4 4 (locus evm.TU.supercontig_49.44) derived from phytozome v7.0 (chr-ID supercontig_49; pos 315530 to 316430)
gtagggttttacttcttcttccttccgataaagcttttacgtttcgttctcctttttgtttttcgtttcgctaatgttgatgttttctttgtttttctttattacactttctgtgttgtttctttcgtcctttgctaatgggtaatcttgcaaaggattgcttatatttgatcagtgggcggtttattttctttatgtctgatgaatgttaaggatgtgatcacagggttaagtttttgttgaatggtagagcagaaactgtacgactgtgagaattggaaagaaaaaatttctggaatgggttcgtgggaaagtattgttagaactagaagatgattaatcggaaagagatgataggattcgtaggagtaacactgtggttagggtttataattgacaaaggtaatggcagaggaaggtgtttggtatattatgcttgaaattgaacttttagtaagagcagtactatgtggattaaaaagaacaataatgcactaaggcattagttccttggcaaaagcacttaaaaattggaaaaaataaatcaaatgggcggcttatataaaaccttgaaactgcatatcactcggtgttgccaatgcagtttttgtacgtagttcagactgatctagtttattgcatgccatcttcttttcttctgttcacatggctttgcagctatgtgcatctgggtacttgggtgcctgcttgtgtctagtttattgatattctggtgattctgcgttatttttctatccttgttataggtggcaatcggtggaatggatttgaaatggtactttatgctgaataattcatttgaataattagcttgaagtcattgtatgtatactgtcttgtttcaggtgactatttgtcagacctgtggtgacagaggcta

SEQ ID NO: 76222 - DNA, 362 bp, Carica papaya
  Intron number 1 from transcript evm.model.supercontig_19.2 70 (locus evm.TU.supercontig_19.270) derived from phytozom e v7.0 (chr-ID supercontig_19; pos 2295439 to 2295800)
aggtattggtcttctttcccctggaggggtttttgagcccatttttcttttttctggggaggggggtggggacctctttttttggctgataaaatttgttttgttttcttgattttgaagaatctgtaaaatgaattggtggttttaagtgcattttagtttgtcatatctgcacttgagtgtagattggaacttttgcatttttctcgttccatgtatcagtcattttgctgtttcctgatattgttagttttactagaaaacgacatatgactgatgatccattaactgaaattttagttgttctcctgcatatatatgcaatggttttcttattagaaactactgattcattcataggt

SEQ ID NO: 76223 - DNA, 644 bp, Carica papaya
  Intron number 1 from transcript evm.model.supercontig_146. 58 (locus evm.TU.supercontig_146.58) derived from phytozom e v7.0 (chr-ID supercontig_146; pos 332600 to 333243)
gcatccttggggtgatctcgtagttcctatggggtggagacgatagggtcgatccatggattttccttccttttgcaagatattagctattagacttttagcaagatgtagaaagtgttgatattctctttattttgtaaattagtacctatcgagtggtactagttttgtgattatgaggattatgatggaataaaaatgcttttccaactagtattcagaatgttcttctcttggctattcagttttcgttgttactttcttttttcctgttatttcctctatttgatttctccattcttcttatttcttcttgatttctgttttttctcttttactgttctcgtgtgctacattagatttttattttggagaagattctatattacattataaatggactccactgttattagttcataatagtatgatatctgtgttctaggctctggaatcttctagcacctgggtgattgagtttcaaagggaggtggaaaaggcaacttggttaaaagaactcacgcaaaccatatatcaagcttcagtataattttgatgtcattttttttcttatatttgacttgttctttttgcaactacgctgaaattttgttacatatgcttgtaggagcctccatcagtgg

SEQ ID NO: 76224 - DNA, 952 bp, Carica papaya
  Intron number 1 from transcript evm.model.supercontig_129. 34 (locus evm.TU.supercontig_129.34) derived from phytozom e v7.0 (chr-ID supercontig_129; pos 283236 to 284187)
agtttattctcgtcggcacccttgataataccctggtaagcttttgtgttttgagggaatctcttactgtcagtttggttttatgttgtcgttcggtctaggtgtttgttaaaatgtcacagagaatcgtagctctttaatggtgatttagagtagacccgtttgcttatagctatcactgaatctggagtagactgtccattgacgacaggttggggaaatgcactgcatttatattgaaagtatcaattgaacaaatttcattgaaataaattattaaaaatttcttctaactctgcttttctgactaagattcaataatggcattaagttgcatcataacttggatactcataattgcataatgtgactagaatgtcaagtatggatttttaatttttcatcgtactcggattgtttgttttgtgcttttctctcttgcctgatttctattttctgcacaccgttccttgattctcgatcgagttggctagtcgccattaggctgccttgatgaactggtcaaaagttgacagcttataaaccttttttgttgcagaataagttaataaaaccaatacgtgctataagttcataccacttggaacatgtcaatagtttatttgtgaataaagaaatctgtattaatttataagttctgtatcttataaactcttacatttttaggcgaaccaaagacattcttgattcttgttgcaaattgggatgcatctgaacctatgcttctttattgtaaaatttatctcatacactagaccaagctaacagctgggaaatccaaataacactgggatttctctgacagacataaattacatgccttttgcatctttgcagtgccttcataattcataatcttgtttcctaatcttatatggtttcattttgacatgcagaggctttggaatttctcgacagggaaatttctgaa

SEQ ID NO: 76225 - DNA, 929 bp, Carica papaya
  Intron number 1 from transcript evm.model.supercontig_25.1 27 (locus evm.TU.supercontig_25.127) derived from phytozom e v7.0 (chr-ID supercontig_25; pos 1312429 to 1313357 reve rse strand)
gagttaaggcttttactcaagtacgtaatttaattattattattttgctaaaagttaatatattgtatatttataaattagacaaaatataataattaactataatataaccttaaaaaaaaaaatacacactgaaacacaacttgatttgaaactaaagtaaaattcgattcaaaatagaaatttaaccctgatttaaaaataaaatatctgattgaagagatataatttgattattttattgtattttctaataaaatcaagcatgattaatacatgtatctaatattgtattgattgtgttacctataacctactaaagcaagtttttatttttaaatcaccctttattaaggcacaaattaattataacaaaataaaaatataatttgatttaaatttataatatattttttaaaaataaaataaaataaaatatattatatttttaaattaaaaaatatttagtactaattatatatttttagttaaaataagcaccacaaattaaaaattttattaacatttttcttttgtcaaaaacagaatgaattaatcaactactgaccaggttgatttgatagacccaacaaccgttagcctaatcactagaattttatattattataccacgtgtagtgtgcacggattgtaattatcatagttttcagttacatcatctctactcaagttggctacaatgattgagaccgccaactcatacaacctaagcaatcttttcttaatttatgtctagtatacgtatagcttagctatatatgtatgtatctgatttttcattttttggttaaaagagaactgggttggactcgtatcatttcctgataatatctacgaaaaatatataaatatagattatatatacatgtgcaggatctaatagcaggaggaacagagagttcagcagt

SEQ ID NO: 76226 - DNA, 759 bp, Carica papaya
  Intron number 2 from transcript evm.model.supercontig_39.8 9 (locus evm.TU.supercontig_39.89) derived from phytozome v7.0 (chr-ID supercontig_39; pos 1735189 to 1735947 revers e strand)
ctaagtatgtattcatacaatctttttcgcacctgtatttattatttatttgcaatctctgaaaacagtgtgttttgtgctggtttttctgctggatttaattaagcatattttttagccaattcattctgtatataggagttacaactaactgaaccagttttttagtttctcttcccatatatcggatttctgcccagagagctttgaggaatatgtaagtttaaacatatttttgaggttcatgctattaagtggtgcttataaacgttgtggttgtgacttcacaaaatttgcgtctcaattgatatgggatcttctttttttggggaagcctgttgatgtggaaactgatattagattctgtggcccgcttttttcagtttgtattaattgtgccaatttttaataagctatttgcagttgataatgtaaaataaactcgtgcttgtactatctggaaatttatgttttcgattgtcaaagttcctaactaatggctcagaaagatggtcgtgtgagcatgaatgacagttaagagtgaaataagttaagtttgtaagctttggggaaaaagggaagtttgtttttgtttttcttactatacatatagactagatatatcaaaaggcctaataaaagcacgcatcgatgggatttattagtggcacgcattggaggttctcattaatttgcctctattttccattgttgttttatgcagtcgaccttggctttgctactggatccttcattcga

SEQ ID NO: 76227 - DNA, 541 bp, Carica papaya
  Intron number 3 from transcript evm.model.supercontig_125. 5 (locus evm.TU.supercontig_125.5) derived from phytozome v7.0 (chr-ID supercontig_125; pos 177920 to 178460)
ataggaggaaagagaagagaaaaggttagatgtctctaattacttactgtccagaagctttcgtttcattcttgaactcacgttataactgtttttttctctttaacttttgttggttttataactggagtgtgatcttgaccttccatcaaatgtgcaatcagttccacctgtgggtaacattaactaaacacttctaaacttgattttgttcaagctctatgagtttatatgcaactatcatgtccaagttcgatgattgactgcaaagtaatcatgaataaacaaaagataataatgagtagaggaccaacatgggaatagatgatccaatattgtagatgtggtttcttgtcaataggctgagatacacacttgggtcgaggtaatcttagttgaaaagcctacctatgtatttagagaaactaaatattagaacttgatatttgttggaattatattgttttcattttgtttttttttttttttcgctgtttgctaatgaatactttcaacatgtattttttgttttccagggaaa

SEQ ID NO: 76228 - DNA, 921 bp, Carica papaya
  Intron number 1 from transcript evm.model.supercontig_16.1 96 (locus evm.TU.supercontig_16.196) derived from phytozom e v7.0 (chr-ID supercontig_16; pos 2871380 to 2872300 reve rse strand)
cattaatcctcccgtcaattctctctcatttggtgctttctctattttctgatcagatcttatctttttgcattacagctttatatctgcttagcgatgtctgttaagtggagttcttgttttgttatgtttttacggcgtttgtttgttcaattttcttggttatgtattttagctatcaatttcatggtgaatagaatgaattccagtcattggctgcaaaattcattatctataatgctttgattagagtagtttgtgttcagtgggtgtatttggggcaggattattttgggagaacgagcgccatagtttagtggtagttacttgacatgatctagacagtaattttcattaaaatacgacatgagtaggagtaatactcgcgattgttaactggtaatcagtaatcaagatgtttaaggtgcattactgacgtttctttccctcccccaattttcttaaagtaaaaattgtctggtttatttatttatgataatttctttataagttgggtaccgataccttaatattccatgtactcgattcctttattggatgtttatttgatgaaattagttgacaagtcagaaaagtatatacacatatagcaggaaagttctttagtttagctgatcagtcacgatctcatctttaggtttcatggtgtgaaatcttactagatgcgagcagttaggaaggagaagaaaatgagttaaatttgggtatctattaggaaataacgccaagcttgagaaaatttggccctcattttctttggcttgcttaaaactttggtggtttgaatgcttttgtttctgtttaagtggatattgggtttccgaaacaagattaaccaagcttttaactctggtttctccctgtctctttccccagttttatacagtttgaaagataatt

SEQ ID NO: 76229 - DNA, 841 bp, Carica papaya
  Intron number 1 from transcript evm.model.supercontig_34.1 76 (locus evm.TU.supercontig_34.176) derived from phytozom e v7.0 (chr-ID supercontig_34; pos 1517174 to 1518014)
ccaatacttttgagaagttagaaaaagtatgttcctttttgatctgattgctggttttatgttctctttttttttttttctgtgttatgtgattaaatgtttattgctaattgaacggacatacgagaagattgtggagatttagtcgggcaaaaggttaagtagcttgattgaatttttgaagcttgtggtttgcgtttgcttggatatttgttcagctgatgtattgtcaactcggatggaaatggagttgcagaagtaaaaatctatatgtagtcctttttttatctaacaaccatttattttagacttggggattcacttccccttttgacttaaagactgactgggggacttttattttgctggagtagttagtcctaactaaagaagatttggactaatatctttacctgctccgtatatgatatcagctccaagatgtgcataaactatactgtgaaagatgcataaattttattttatatataagaccaaatatattcttgtcttatttgctgatggcaatgacaattctataagctggataaactagagttcatctcctccttgccttgttgtcccatagtgatggcaatttttgtgaatggatgaactagaatgtaggtgaatcattgttgcaagatcaggcaatataaagtttattcatcttttgagcctgcgtctgtattatagttcagggaaagggaatatgcagtgtgtgcactacattattgttgcttgttccattactgggtttatatttcctttgtctagcttcatttaatggtctcatttctttgcagattggacaaggaacatacagtagtgtttataaggc

SEQ ID NO: 76230 - DNA, 706 bp, Carica papaya
  Intron number 1 from transcript evm.model.supercontig_328. 1 (locus evm.TU.supercontig_328.1) derived from phytozome v7.0 (chr-ID supercontig_328; pos 5326 to 6031 reverse str and)
acttgaccagcttaaatccaggatccattctcttggttagcatcttatacgtttcatttcgcttttctcctctccttttagaatcttttattttgtaaaaaattaaatctgcaatggatggttaactgaagaaaatgcatgctgcattggagaaatcgaaggtctaaatagtttgatttctaagttcttcggggtcatgcatgacgaaaacctcgagttagaggagcctgattgactaatttctggttaacgaataaggagaaacttatcactaatcagggttattgaacctggaagttcctatttagttgtatgtaatcctttacttgtatggaagttagggaggaggaatggagaaatgttgccttagatttaattggttgagctactggaaatgcctgcagatatttgatctggtaatctgctaatgttacaatgcaagtggtgcataactattagatattatgagaaaaaatggaaattacttgttttggtgtttactaaaattgctatgcaaacagtgatttgtaaagtatctggatcactgtgtacggccattacttatcatagagtttttgtgttatatgttctcatttttcgtatctatatacagtaaagcatttctcgttacaacttctgagttcattcttgcttctattggctgatgatttttgccatcactttgtggataaagaaacccagattt

SEQ ID NO: 76231 - DNA, 368 bp, Carica papaya
  Intron number 2 from transcript evm.model.supercontig_57.7 6 (locus evm.TU.supercontig_57.76) derived from phytozome v7.0 (chr-ID supercontig_57; pos 1169768 to 1170135 revers e strand)
ttgtaagtataccttaatgaaaatcagtagaagatcttattggaattatgttgataatgaaaaagaaaatgaaagcttaagacatatttctccgccaatttgattttctggcatcagatcctttgcgaaccaacaattgttatatcttttgttttttcttaatgcgtaaatgttctttcgaggagcatcacatatgcaaacatgatagggattctaatgcaaaatgttttagtgactaatttaatttccaatgaacggtttgtgaagtttgttgagttccaagaagaacgggatatgtctattctatttcttgaacttgttaaaattttgcaggtagttgagataacaaagggaagtaaggttaaata

SEQ ID NO: 76232 - DNA, 1026 bp, Carica papaya
  Intron number 1 from transcript evm.model.supercontig_3.12 6 (locus evm.TU.supercontig_3.126) derived from phytozome v7.0 (chr-ID supercontig_3; pos 974849 to 975874 reverse s trand)
tgggtcgtcctctaattaataccacgccctacgaggtattggttgtctcttagttttgttgttcgtcggtttttttttttttttttcaatttgttaaataattcaaaagcttcagttattaggttatctgagttttgttggtagaattagtatttttaattaagacgttattgaatttgaatcagaacattttggatatggtatttgattatgaataatttgatatatttggatttgtggagattataattgcttatttggggatagtatatggcgttttctgttgaacttattgcaattaagcttccatttttaagaatttaagaaaatcctctctctgtatgccaaacataggcattgggctctctttaatgagtaatctgactcattaccaatacaacagatgatagattacggtgaaaaaaataacaaccttcaaattaaaatatgcaatgctgcatcagtattgttttttgatagtgaagcattaaagtatatcaaattattcataatcaaattattaatgcggtaataacttgacattattaatttggttttgtattaaatgggcagaataagtggagtgaatcttcgtactgtttcacgaagtagttttcctatatagggacaatgagtctaatggtctgggataaggtttctttgatggataactgaattactaggtttattaggtgtgagaccaatttggttttgtttacaatgcaatgtaaatgtagacagagtaagctgcttagattttgcttgactaaaaaatttagttagtttccttaaatgaatgataatgatgtgggataaatttaggatttcttgaacctgccatgttagaatgtttcttttttttcgatttaatctttatacatcttttcaaggaattagtttcaatttgaaaaatctctgtacctagagaattatggactttaaaaaattgtctttttaattattaactacgccattatttttattgttgttttatgttttgagttctgctttttccccttcaacagg

SEQ ID NO: 76233 - DNA, 709 bp, Carica papaya
  Intron number 1 from transcript evm.model.supercontig_0.12 3 (locus evm.TU.supercontig_0.123) derived from phytozome v7.0 (chr-ID supercontig_0; pos 3758016 to 3758724 reverse strand)
acaccgaacaggccattgaatacggcacgaaagtactggaatcatatacgtaggtctgcctgtgtcctacgttttttttttaattagcttttaatgttttgatgtgttgcgtcctaattatttggacgacttgatgatttgtttctatctgatctttattttgtatatagtcgttcatttacatatacaagtattctcttttggttgcgcatactgtaagttgcaaatttctggtagatcgctgttattgtaagttttgatcgttacaacagttcaaaaaagtggcatctgttattctcatgtaaaaatatatattagagcatgctttgatgtctgattactgggattgtgagttggcatagcttttgttccagtcacttgaagtttagggtgttaaattttcagtttacgatggactatgcctgtgtaagatgtatgtatgactgagatggtgtgggaactgcctaaggatattctttctggtgttcttgctttggaattggtttaaggcttaacattcagtagtaaaattttgtctttcttttggtattgcataggttattaaagggggtttagtacaattctacttgaagtgctgattgagtgatcttggttcatctggagtttcaagttcgcttttaaactttactttcttctctctgtttcttttataggttgcaggagttacaccaaagaagggtggcactga

SEQ ID NO: 76234 - DNA, 629 bp, Carica papaya
  Intron number 1 from transcript evm.model.supercontig_128. 23 (locus evm.TU.supercontig_128.23) derived from phytozom e v7.0 (chr-ID supercontig_128; pos 178514 to 179142)
aagtggggtctcttagaggatccaatctaattgaggtaagttttcatattttgcatttcattaatttgatttaatacaacaagtgattttcttttccttaactttgcttaatttgcaactgaatttggtatattaggtccattagcaaataaaatcactttaataataatttatatgccgaccattgacatgaatgaagattggcttctttgagtcctttttaagtgattgttgtcctttgttatcgaggaagtgggttactgtggattatttatggaatgccagtttattttgcagtttctctgcaactttaagtaatacatataataggtagtagaatgaaaagtactggatggtccttgcattatatattgttatcagcaaatctgcacagcatgaagtaaatgtatacatatcttgctgattaaatgactgtagaataaaaagcacaagtagatgagcttgttagtccttccagctgcaatgcttcttctttcctttcaaaaatttactactgttccttacatggtatgacataggccaacgtttctgactcttttcctttctttttttcatatgtatcaatgtctaaaggtgatagatcagcagggagataaatctttggcgct

SEQ ID NO: 76235 - DNA, 602 bp, Carica papaya
  Intron number 2 from transcript evm.model.supercontig_128. 23 (locus evm.TU.supercontig_128.23) derived from phytozom e v7.0 (chr-ID supercontig_128; pos 179171 to 179772)
tggataaaacgaggtttgttcaaaattaacttctagttctacaaaaaaaatgcaattacatgaggtttatcttgcagcgaaatgtgaaaaggggattaagtggtttctttcgtgttttcgtctattttaaagtgatctagtaatatcctcaaacttttagaattttattcttgtgtataactttgtctagatccatttttctatctgtgataagttttctctgtcctatttcttgaatgcatatttgtggaagtgcttctttgattctaaagcattttttggtgggttgcccagatggactataacctccaatgtcacagcattgagtcaataatacattgagcatcttctttgctggtatctttcgtcttggataaacttaatttctcttatcatccgacttctagactagtcttaataccttgcttggaaatcgtattatttagaaaataggaaatggtgtgggagcaggagtaacttccgaatgatgctttggctagtttatgcctacccaatttctattataaaagatcgggaaaagatgttaagttgcattcctttttgcaggaagttttgtcgtagttgaccaaagtggaaaggaa

SEQ ID NO: 76236 - DNA, 421 bp, Carica papaya
  Intron number 1 from transcript evm.model.supercontig_104. 102 (locus evm.TU.supercontig_104.102) derived from phytoz ome v7.0 (chr-ID supercontig_104; pos 688458 to 688878)
gtcctcttccttccggcgataacgcttcgaggcaagttccttgtctaatttccttttttctctttgtttttttaattttttttgtatactttgttttcagttgcagtcttaatcaagttctggttttaattgaattttctgtaattagcttatacatcttgtgtaagttataattgaagagagaggttatgtgttggtgttcaatttgataattgagtggaactgttgcacgagaactttgtgtgtgtgtggattcttctgttcttgcttgttaaagtaattggagttaagtgactgattaaagtaattggtgctaatttctaaatagcaaatttaagggttgatattgttaatggaaattttatgtgtatgctttgatttggcagtaacttttgcatcattgaaggaccagagactgttc

SEQ ID NO: 76237 - DNA, 770 bp, Carica papaya
  Intron number 2 from transcript evm.model.supercontig_112. 44 (locus evm.TU.supercontig_112.44) derived from phytozom e v7.0 (chr-ID supercontig_112; pos 395652 to 396421)
gcataaccatcttcgtcctgacatcaaggttttatttcttcctttcttaattattattatatttatatatatttatcctctatattttctcttctatgatatgttaaccatgtgtatatgtatgtgtactatatatatatatatgtatattgtttttctttgtacatgttaatattcttgcttcatacacttgctaatgatgatatatttatttccataagatctgtacatatataaggtaaaatatttgagaattttgtccttagattcttacatattttattattaattacactgaataaacctaatatcaaaagaaattatgggtactcaagtaaaagtttctatatagtttgttagcttacaaacacagtgcttaattttcatggctatcattttatttctgaagcttcactatttcacattcacatcaaaaatatatttttttgtatgggtatgtatacacgcaatcttttctaggggatgtacatacacaactacattgcatgtgatccaagctttttctctaaaccaaaacgccattgatagtcatcatcaattgtcgtgcttttttgtaatctttatgcacgatttacagtacttttgagtcttcaattccaacttttgaacaataccgtccttgttatccgcctttttactagctattttcgtctttttgatacatataatacacaaatatgtgcatcttatgtatgtatttatattgttcatgttcgcagaaagatagctggagtgaagaagaagagaag

SEQ ID NO: 76238 - DNA, 948 bp, Carica papaya
  Intron number 1 from transcript evm.model.supercontig_30.1 12 (locus evm.TU.supercontig_30.112) derived from phytozom e v7.0 (chr-ID supercontig_30; pos 1527505 to 1528452 reve rse strand)
gactgtttctacgttcaaggtcatcatatctccactattttccatgttatgtatttgtttaaatacgcaatcatatatatatatatatatatatatatatatatatattacctcatgcggatacaaatttgatggcttgtctgagattgttgagaatttgatcatcctgaagatgatcttacttgcttgagaaattattttatttggttaaagtgtgagagaaatttttcggtgttggtttggttatttttgcatttgataagtgaagtactacaatttgaaccggggaaaacctaaaaaaattgattataagaaacagagcagctcaaaatttgaggagtaaaacatcattcaattgcattatccggattaaaagcaaactaagagatttatggctttacaaatttgatttttttttaggaatcaaaattaagagtttctcaacgttactgaaggtctcaatactcagttccttctggaagttagtgttggagaaataatgctgctagcctgttgtagttttgtgttaaattgtaaatgtggttttctgcacctttggatgttgaaaatggaggaatctacctcagctgaacagtaaactttcgggttgtcattagttctgttgttgggttttgggtggcactgcagtttttttcattaggctttgggtatggaaagatttctgatgttcttgaattgcttcatatatttaagctattatagttgtgaagatctcttggtttagataactgattggaagtggagatgtgtggatcctcatgcataatcaattatttgcattacttttacttttggtagtggcagggttttaggttttaaacattatgcatcccctctactagatggcagacacttcatctgtcctcactgtgttgtgtactttatattatagtggagcaaaggaagcagcctgagttaaggggctta

SEQ ID NO: 76239 - DNA, 819 bp, Carica papaya
  Intron number 1 from transcript evm.model.supercontig_10.2 17 (locus evm.TU.supercontig_10.217) derived from phytozom e v7.0 (chr-ID supercontig_10; pos 2752880 to 2753698)
cgccacctgtcaaatcgccatatcggttacagacggtaaataacgtatttgatcatagctcatgtcagccaaggcattgcttgagaagcttatatatatatatatatgtacatgtagacatacattcacgaagagattagcaaatatcatattcctgcacactaaacctgaacagtagaggcaatttttgatgcatatttgatcttctttattttgaatcgcgattaagttcagagtaactttgaacagtcaattctcttataaacaaatgtttgattttttttttcagtaagattttaggaatttttcttaaattttctaatttttgcataaattagttgttttcgattgaataaaaaaatttaattttaatgcgtaaaaaattagtcaaattatattcaaaagccttcaatttaattcatgtattcgttatttccaaggtcataataaaggattggatcagatctgaaatgaaaagaagtgaaagaaaaaattaaagtaatacaaacaaattttaaaatccttttataggagaatctgaagccagtgtgtgttatatagatcccccatttttgtaaatcagagtacgtaaattttggtcccccccccccccaccaccccaccaacaaatgggaccagtatatacatacacacacatttatatatatacatacacgtacacctgccctgcagttatatttaattgaatatgaagatacccagatgtacagaatattgaagcattgaattgctatagtgacatgacgaattagattggttataattatttgaaataattactttcaggcttgttaccaa

SEQ ID NO: 76240 - DNA, 1036 bp, Carica papaya
  Intron number 1 from transcript evm.model.supercontig_17.4 7 (locus evm.TU.supercontig_17.47) derived from phytozome v7.0 (chr-ID supercontig_17; pos 526981 to 528016)
gggattggtattcgatattataataaatgaagtgctgggagtttggagtatattagaaattgaccttcaggcaaccttcatttagaaaagtctgtctgttcttgtgtttattttattttgtaagttatgagcccttttttggcctatgtttattgagaaaatgtgcttcttaagaaatatttgcaactggtgaattgattttggtggggtgatgaaggaccttttcgagatattactcaaggttgagaaaagaactatgcctgactatttcttgtagtggtcatgctgataagagcatatggacagttgtgtagttaccttctcttttaatttattcattttttatgttgatcgtggggagatatgctcctattactaattcatggtacaagaaaggtttggttgtttggtgcaacaagttggtacttgtcctttaaatgacttgcttcactttttctcattttctgtcaatggaattgctttacatggaacgaaatgagaaggaagcaaatataagatacaagagtttgtggaggtaaagatgtgaaagttattggaaatttgagttatatgactgtatatagtttgctcagttgataagatcattttttgaagtcaggatgaaattttctggaatgtggttcgtctgagagttctaaaatctgtttaattaaatatttttgaggaaatttgtcaggttagatttgaagggattagaagattgacttatgcaagtgggatagtttaacgtgtagatttttctactcattccattctctatatgctagttatagactgatacgttgtggtagctatttgagtgtttttttttccagtaagtataggtgtaactaaaggtgatgaatatgtatattcatttgacatgtgatgaccaaatgttttcatttgacatgcgatgaccatttacattttccttgtttttcttccctgtgggtgatagttgaccatctttacttgttattcctgtggatgatcagtaggttttcggttgcagagaaacttacttgtggagttc

SEQ ID NO: 76241 - DNA, 386 bp, Carica papaya
  Intron number 1 from transcript evm.model.supercontig_50.8 (locus evm.TU.supercontig_50.8) derived from phytozome v7 .0 (chr-ID supercontig_50; pos 163118 to 163503 reverse st rand)
gccgttcctccaaacctcggtcgccaactttgcaggtagttgaatgattgcttcgtttttgctgattgaaaatggatggcgaattgcccttattctctgcttcttcattcgcttttttttttttgttttgttttaagtattttgtctggtagtccactaacttcaggcaaatttcttcccgtacatgccaaacatgattactaatcgacttgattttgaaagaggaaaagtttttagtcatttctttttaaaaccattattgagttgtgcctaattttctaggctaccaagttggaaagaaatgttttcatggatgccggagacgggcagttttctgttgtatacggatttcgatgacacatttctgttgttgcgtgaagcaggtt

SEQ ID NO: 76242 - DNA, 376 bp, Carica papaya
  Intron number 2 from transcript evm.model.supercontig_166. 50 (locus evm.TU.supercontig_166.50) derived from phytozom e v7.0 (chr-ID supercontig_166; pos 446835 to 447210 rever se strand)
attcttgatctcccatatatatacaactcacatctgtaagtaattacagtaactatactaaatttttgtttctaaataaaagaaaatcatcttactgttgttagttgaaattgattgaaaacttttaacaaatagattaactctaaataatacttttcttggtggaagaaagaataatgagagatcattagaaaaactcaaatcttaaattttgtattcaagtaaacttatgcttccctatgttctcttttgaagattatgttttattgtgttataatatatatatatatatatatatatatatattggatcaattaacgtatgaatttttactgacaaattaataggaagaagtgggaagacagaagtcctcact

SEQ ID NO: 76243 - DNA, 508 bp, Carica papaya
  Intron number 1 from transcript evm.model.supercontig_34.5 (locus evm.TU.supercontig_34.5) derived from phytozome v7 .0 (chr-ID supercontig_34; pos 58559 to 59066)
gagagtggaattttggtccttataatcgtaaatcagtgggcttaatgatgaaaaaaattcaaaagaaattgtgtatagtatgctctgataccatgagcaaatgtaaattaatcttcaaagggtgatcttattcatcataagaacatgctatttataatcttacaacatgtgaagtcctaatgtaattacccttaggttctagaatcctaatgatacaaaaccaattctatgttagagatatacacaaattataatacaatttaaatgtaagacatttatcccttcatccttttacttagtatcttgatgtttcctttttatctaaaaaaggaatgactttagccatttgtggaggtcatcaatggcatatttttgaagtggcataggggtattacagtgtatatgtattatatctaatatgattatttgctctttaactttttcttaataaattatttttggtttgtgcaaaggctgcagatactgaagctaagcgaggacatcgagg

SEQ ID NO: 76244 - DNA, 953 bp, Carica papaya
  Intron number 1 from transcript evm.model.supercontig_13.6 9 (locus evm.TU.supercontig_13.69) derived from phytozome v7.0 (chr-ID supercontig_13; pos 771486 to 772438 reverse strand)
aaggctcccaaatctactcctggctcctcctccaggtccgttttccgttctctttgcttatcttttttcttttatgaatttcttgttaaaattttggtttggtggctaagaaaatagaaagaaatggaaggaaaggtttcaggacgctttgcttttatttaaaatgattattttagttttttggaaaataagaaactgagcgtgacttagttaactggatatatgtttcgttcactcatggtgttagtcgaaataatttgattagtgagttttcttgcttttggatacggcgtttgcttaatgatgaaacaaacagagtcgctggtttgattttgcaatttttttggttaattttgttgatcatcgccattctttacattgtttggccatcttttgattgtgtttagatgctttaccttcttctcgatctggttctgtataattgtttcaatgttttccgattatgtggtgtctagacatttttttcatgttttccattatgcttatttgttctaactacaaatcttatgctctacttaacactttttcttttttattttgttgcatcattcaacttatgttgtatagtgaaattgtctactaaatgttagaaaatggtgtagtggaactttagaagaagtttatatgctgcttttggctaatatgtaaataatcaaaatgatatttgctagcttaatcactgcttttaaactagctggcatcaaggtatgttgctttccattaccatcctggtttggttgcttgcaggtagcgttttggggatataggatttagttcataccctgattgtcctaagcaaaaaagttactagcttaatattgtaactttgagctttgaataattttcatttcttagttttacacatgtttagtttgtctatatttatctgtttgatagttcatctggagtagaattgtcgagaggaaaaaagc

SEQ ID NO: 76245 - DNA, 1000 bp, Carica papaya
  Intron number 1 from transcript evm.model.supercontig_1834 .1 (locus evm.TU.supercontig_1834.1) derived from phytozom e v7.0 (chr-ID supercontig_1834; pos 2173 to 3172 reverse strand)
tcgtcatactcgccttcctctctctttagaaccaggtgattaatcatttctgatttttatttaaaaacacgatccatgatcatgttgattttcgtccatcctttcttcttatttttaatttgtggatttctgcttaatcgagcttttctatgtcatttattgagaccttctgtgattgataagaagaaaaaaaactctactatttgcttattgcggtttaaatttattcgcttggttataggtttcgttttgttttatttttgtttgtttaacatcgtatggctcctagacaatccgaattgcgaggaatatattttactttcattcattctatcaatctggatacgaggagagttttcggtattaatatgtcaacggaaacgacgtgaaattatgctcgaacaattttgttttgtttagatgaattaatgtcgctaaattgggttaactctgagtttttgctgtagttccgatgtcagagtgtatacttggttgttttgaattagttacatttacttatattacattatgtctctgtttcggattgttcttttatatccacggaaaaatatgttgtaatttggttttcgatcaaattacattgatttatgctgttttcattattaaatctcttgcaaataagtatggagagttatttacagtgaatctaacaataaaagagagtcaaagtcgaactagtcatcctagactataatttacacagtcaaatcaaattctcaaaaagtgtcttattggccatttctgtttctaaatcatgtatgtggaagtgaattagcaccaagtaaccatgaagtataatgctgttggtgactttcatcttggttctgagcctttgttaagttgttataataaaattgttagaacaagcacccatatccatgaagtagaacgtctttagtttcgtttgtaagttgcttcttaggcttaatgttttgtttttgtttttttttttgtgttgcaggaggaaaatacctcaaca

SEQ ID NO: 76246 - DNA, 164 bp, Carica papaya
  Intron number 2 from transcript evm.model.supercontig_1.38 7 (locus evm.TU.supercontig_1.387) derived from phytozome v7.0 (chr-ID supercontig_1; pos 4854119 to 4854282)
tagtatctcaagcttacaggacgctttggaaagatgtagtttattcttaccacattgatttgttctcttatctgagcaattacgttttgaatgttctagtttctgttcttattaaaattttagtttatcttccttttaatgttgatttcagttagatattgctt

SEQ ID NO: 76247 - DNA, 553 bp, Carica papaya
  Intron number 2 from transcript evm.model.supercontig_3.44 7 (locus evm.TU.supercontig_3.447) derived from phytozome v7.0 (chr-ID supercontig_3; pos 3232460 to 3233012)
taataagacaagtagttcgcaacgtatcgtccagagtaagcatgcaaatccaatatcgcagtttttttttttctgcagtttatggattgcatgacagcagaatattatatatatatatatatgtattttactgattgcacagttttttcacaagccatctgttttttactgtataaagctgctgtctttatttgattagtaaaatatatataattgaggttaaatacttagtaacttcctagataataattaattcaaattaactaaaaaatatgtaaactaatttacaattatagtatgcatcaagaataagatcatccacactatttcacatcattttctagctcttctttaaaaaaaaaaaatcaaaatcacctcataattttgtaaaaagtaatgtacattttcgatttgcatatgaatttttaattgtttgaaataattactacaattacaaacatataaaatctcatttggaaataaagtaaattagcttcttttttttttttttcgctcttcatgatcaggtacagatacaaacatcacaaagaat

SEQ ID NO: 76248 - DNA, 649 bp, Carica papaya
  Intron number 1 from transcript evm.model.supercontig_53.4 2 (locus evm.TU.supercontig_53.42) derived from phytozome v7.0 (chr-ID supercontig_53; pos 226805 to 227453 reverse strand)
atattttccagaaggttgataaggtatattatgttgttaaagtagaaaaaattgctggtgctgctattgagtcttaacatttcataggtatatgtggtctgccgtttgatagaaggtattgatgactttatgatgggcaaggatgttcatgtacatttacagaaacaagaagtcatatgatgggcaaggatgttcatgtacatttacagaaacaagaagtaacattctttaacaaacctacaaaattttgtgtcactatctgtggtactgttgttatctaaattacaaattttcggacaaattaggataattttgaactgagcagctaattatagtctcattaattccggcttatgtctactccgttttagaactttataaaatcatctgggatttggtttctttacatatatgtgattatcttttcattattgactgacataaatataatctatcccaattccgttttcttgcattcttttacaaaaccattgaagatactgtcgtctctagttactatttagcatgttgaagtgaatctttcagttgcatagtcattcctgtgttcttttttaagttttctatattctgacttatagagttgctatcacttatgatggtgtctactattagcttgagcaaagagtaa

SEQ ID NO: 76249 - DNA, 503 bp, Carica papaya
  Intron number 2 from transcript evm.model.supercontig_18.5 2 (locus evm.TU.supercontig_18.52) derived from phytozome v7.0 (chr-ID supercontig_18; pos 376353 to 376855 reverse strand)
aattttccgagggtgaagatcgcattttgtaagttcaagaaacataataaactacaatttctagtgataaagaaaattttggttagaaaactcatgttcaaagactcacattgtcttccattaatatcaaccaatattcaaatgagaagcgaaggtgttagcaattcattgagaatggaaactcattctgttgagggaaatatcaaggataaagaaaaatcaaactgagaaatgatatagaaggatgctacaaggctgaaaatctcatcccagttttttttttcctaatttactttcctttgttcgtagttgcacaattacttaaaatttaataagtttgaggtatagatacaaattcttctctgtatatttagagtaaaagaggcattttctagctgcagcagatgtctattcttttattttaaagttgacctactgttatctttatcaaactgtgattagcgataattcatgcatttcttttctcttttgaattttctagg

SEQ ID NO: 76250 - DNA, 314 bp, Carica papaya
  Intron number 1 from transcript evm.model.supercontig_25.5 7 (locus evm.TU.supercontig_25.57) derived from phytozome v7.0 (chr-ID supercontig_25; pos 736192 to 736505 reverse strand)
ctggatccattcactacccgagaagcacacctgaggtttgttcctctaccaaatgcaccttcttttctcccttttatttaatcatatttactgcgtttcttttttccttgcaactctgttaccctttcttttttttttttttttttgaaatttttttcaaacaagaaatctgggtatctctcaaattttcctctacatacccatgttttaatacacagacgtacacatacgggtttttgtttatttgtttctatttttcattttgagtttattatttttgtttgcgttttgtttgaacttgttgttgcttgcag

SEQ ID NO: 76251 - DNA, 928 bp, Carica papaya
  Intron number 2 from transcript evm.model.supercontig_28.8 4 (locus evm.TU.supercontig_28.84) derived from phytozome v7.0 (chr-ID supercontig_28; pos 1204358 to 1205285 revers e strand)
cggagataaagaaaagtgccaagcaagggcaggtatgctgatttcgctatgttggtcttctgcttgatcttttgctgacagaatttcttgactaaccaaattgtttcctcaaatgaagccaagagaaaagatttattttaaaagtatagctatcccttgccaatcaggaagacactgaatattgctttctttggatatctttgctatagtgcaggttcagacactgtgttaacttaatgcatattgcataacataatcaggataatacatgttttaatttttaagcaaaatctttaagatcatttctactttccattctgataagcctgcttcattgcatgctaaactttttgttgaaacttaaagcatcagttatagcatagctgaaatatttcttcctcctttctttttcctccccagaagattttagtgataaaaatcctttttccaatatgtctcgcaagtcatagtctgggaacccattgttgaatgagctacttgcatatttgtatccggttagcacggacatggaagcgctgactccaacatgtttctttgattgtacttagggatgttattctatttgcatctggttagcacagttgaatataaatgatgaaaagaaaattctattatagaaatacgaagctatgttgcatatgtttgaaatagcatggaacttgtagtctatcatattgaaactttatttagatgtccagttttactttgttgtcttcaatgtaaaccaataagcatcatttcatggtttatttatttaaattttcttgttgtctaggcatgaatggttaagtactttacttatcttaaactaaagacaaatgggactcattatttctagacacaagtgtgttagtacttcccttatcttaaccttactcccattttctttcagggagccgtgaaggtg

SEQ ID NO: 76252 - DNA, 746 bp, Carica papaya
  Intron number 1 from transcript evm.model.supercontig_28.8 4 (locus evm.TU.supercontig_28.84) derived from phytozome v7.0 (chr-ID supercontig_28; pos 1205362 to 1206107 revers e strand)
gagtttcctcttcggcaagagaaaaactcctgcaggtgtgcccttcttttacgatttcttgcctctagttttcgtaaatatagcttgattatcgaggaatttctggggattgttgttaattcattgaactatgtgcaactgcgaaaaactcattagaggcatctaggggaagacgtctggattgtaactgtcaattggtcatacttagggtttttagcgttgttattccttttgattttgagaagacgactgatgtaacattacatcgtggtttgtttaagtggttatggtttgttctgtcttgtacgtccatcgtctgaatgaattgttgaagaaaattgttttacgggatatctgaacatgccttcgtggtttctattccgagatatctattctctttcttttgaaggtcaatcaggtgcaggtcaattcattgaaacaaatatgtttatgatcgatgcaatattgaacagtgtatgcttcgttcaatatatgtgtagaagtagataaaggcaaactatcaattctaactttgatgcctgcaattgtttccaagaagaaattgcatattctcctttgctgacaccatggattgttagatggtgaatggttgagcatagtgaatttgataattaatgtggatttgttgcagcatcttttctttctttttcaaagataaacttccctgcttatgattggagctaattatggttatgctttcagagcttctgcgggagaataagaga

SEQ ID NO: 76253 - DNA, 804 bp, Carica papaya
  Intron number 1 from transcript evm.model.supercontig_48.6 4 (locus evm.TU.supercontig_48.64) derived from phytozome v7.0 (chr-ID supercontig_48; pos 366669 to 367472)
aatcacattttctggtaaagatgttgtaatctttgaagtaatgaaatgcaactttttacatagttaaacatttatgatatgttataattagttcttctgaaaatttgttataacaagttaccaaacagtcccactgaagctttttgccttctttgtaatgttcccttgctagatgtagtgaataccgatgcaatgcacagaataaattaaagaatcagagaaagggaaggaacaaaaggaatttaacatgattcaacagcatccttacaagaatgctcccaaaaaatagaatgctgtaggctattatctcaagaaaaaaaaaaaaaaaaagaatgttgtaggctaaacaaaattgtatatgggccacagctcaacattatgctctcctattgattcattcccagcttatgctttctactatgttatacccctgagagtgttagaaccaattcttggatagagtatagctttggtgctatgttcgttaactttcaaattgaaagggttctgtgcctctcgattattccgtaagatctagatgaagactcaaaatatataggtgtttatttttgtaccttgtaaatgctgcagtacagatgttaatttcatgaatgcttgcctctcttactgtttgtttaccatgttatgtgccaatggccattaaatgagttgtctctgtcatgaagatggcagtaagacatctgattgttgcagttgaagtatctcaaaactgattttatgctatttgttctggtgtttctgcatggagctgcatcttcggctatttcctgataacatctgttc

SEQ ID NO: 76254 - DNA, 869 bp, Carica papaya
  Intron number 4 from transcript evm.model.supercontig_2231 .1 (locus evm.TU.supercontig_2231.1) derived from phytozom e v7.0 (chr-ID supercontig_2231; pos 8504 to 9372 reverse strand)
aaactactgagtggtataaagagaaagggatagaggtacgtattacttggttttggtctcaatacttagtttgtatatctcgtatatcatgttatttgtttttgccattttcttttctttttagatattgtcaagaaactgaaaatgaccctagccaagattaggtttgttgtgatggacatgtgtaaaagttataattttgaggtaagcctgctgtggagttgcctactaagtttctacatgcatgtgtattagtggatagcaaaggccatgaacattctatcctgaaacttagggtatttgtggttaaagttagatacatcaaaaatagatcttgagatttcatcttattgaattttgtttgtattttctctttcctgttcaattcctactagtgacattcacattggtatcaatattcgtaaatacgactttgatttttttgtgttaagttagctctactctcaccttaaattccttggggtagtgtgagaattaaattccaaataggaactaaattcccaccctcaaatttcagccaaaaaaaaaaaattccccttcctgcaaaaaagtcaagttggctcaaatatccaaatgttgttctaattatgattatacatatcatgattaatattgacagctagaactttgaattgaattatgcactcttaagggtgaaaagtaaaagtcacttgctagtgacaacagcttacaccaaaattgtttgtctgtgcatgcagaattccaaccaaaactccttagcttgcttgtttatgaaatatatgtatgtatatgaattggaattggtaggttcttatttactacattctttatttatgttgttttttgtttttattattgttctacag

SEQ ID NO: 76255 - DNA, 419 bp, Carica papaya
  Intron number 1 from transcript evm.model.supercontig_60.1 9 (locus evm.TU.supercontig_60.19) derived from phytozome v7.0 (chr-ID supercontig_60; pos 197127 to 197545 reverse strand)
tttcggtgtctcggggatctgacgacacattaagagtgagcttttctaatactttgtacacacatatatttaagttggtttgggattgtggttaaactgtttgttaatgttatttattgccgtctggaagcaaaattgttacgtctatttctttatttttgcttttgtaagctgggaattgtttatgatgctagatacaaatgataaacttatgatattcttggaatctgtgtgctcgtaaggtagctattaggtcaggtatcagaagatggaataatgccaatatcttcaaaatgtttcataagtagtagtgtcttgtttactcaaattttgtgatgaaaagaaatctaaaaccaattacttaggatcctttttcaacgttttgtttctggattttttttattaggaagttgttctgg

SEQ ID NO: 76256 - DNA, 205 bp, Carica papaya
  Intron number 2 from transcript evm.model.supercontig_2215 .1 (locus evm.TU.supercontig_2215.1) derived from phytozom e v7.0 (chr-ID supercontig_2215; pos 5915 to 6119)
cctacaatacccagttcaggtaacctgcaactgcaaacaaaaacctaaaatacaaaaatctcagttcattttttggttcttctttataaaaatataattaaatcctgatgggttttttctttgatgtgttttctttttttgtttttgtttttgtgtgtgatatggaatagggaattgatagaatctgggaataatattgaagacg

SEQ ID NO: 76257 - DNA, 670 bp, Carica papaya
  Intron number 1 from transcript evm.model.supercontig_48.5 3 (locus evm.TU.supercontig_48.53) derived from phytozome v7.0 (chr-ID supercontig_48; pos 299468 to 300137)
ataggtgccggctttacttgccaactatacatagaatacctacatgcgtgtgtgtataaatctagaaatgcttatctcagtacatttttttggggggttttcttattttttttttcttcttttttacgttcaaggtgtatatgggaggattatatagggctgacccttttgctggtgcacctgcaaatatgataatcgtttcaatttagatgcttatggaaactgaatttgatatgggaatgaaatcacatgcatagcaattcagtagttggcttcggtaattaaattatggtttggtttgagatttaaccaagattagaatactcagattcttgatttaaaggcatacttacctgcattttgagattttaggaaggggaaaattttagttttcttgttggtaattgatttggtttattcgtcatattggatggtgcatgaagcatttaagattgttttctttaatgtaatataccttaggttctagaattctaatgacacacagaacctagtattagtgatatatataacttataatacaatttaaatataaaacatatttatccctttatccttttactagcaactaactgaattgaacacggtggattaagcaaattttgtttgtgtttcagttgcttgccttcggatttggagggtgctgtcaggc

SEQ ID NO: 76258 - DNA, 559 bp, Carica papaya
  Intron number 2 from transcript evm.model.supercontig_48.5 3 (locus evm.TU.supercontig_48.53) derived from phytozome v7.0 (chr-ID supercontig_48; pos 300182 to 300740)
agagccatagtatgtgcaaaggaaaaaatgcaattgtttgacagaaagtggaattgatttgttcctacttggtttctttggtggaatcctctaaatatcatatagaatcatctataattgtaattgttcctcaagctacatgatttagtccacttcttgagcttattttatcagatgtgttaaggagaactatgacaagattatacataaagtgtaattatattgatggaagatcgaaaaatctcaaattgtctaactcttatatgatttttctgagttttactgctggctattcaaaatttatctttgtcttatccaaggcgaataagtgcttcatattgcttgtctgaactttgaaatgaaagttgttctttctttttaatatttgttttgatatgataaaaaacttattctaaataaaatcaattgaatttcattatggaagcggcatttatagtcatcagtttgttttatgctcatcttaccttttttctcatattactagatcatctaacttcttgcaggtcgagctcttaatcccccagctgcggtttctaga

SEQ ID NO: 76259 - DNA, 543 bp, Carica papaya
  Intron number 2 from transcript evm.model.supercontig_3.48 8 (locus evm.TU.supercontig_3.488) derived from phytozome v7.0 (chr-ID supercontig_3; pos 3487407 to 3487949)
tcaggtatacttctctctgtttccctctgctctgttgtttgaatttgaaaaatcaatacaaaaaggagtttatctgcttagcatgaatctactcaaacctggccacaccttttcaacttagcagtgagatagtgggttggtttggacaggagaggcaagggggaagggattggaaagaaaagaagaaaagtatttttgttttttcgtgtttagagtttgttgagtgaagaagagaagtggagggctagtcttaattttgtatttcagttcctccatatattcatattattatttatctattgttgttattattattattttctgtgtttttaacacttgaactagggatattgtcgttttctatcttttctttcaatccatttttctttttcctttctttccccttctaacttccaaacagactaatcagccgccctagatgacaacttcaaaatcaaagtcaaattatttgtcagtttcaacagcaaaagatggaatttatcctcttaacatattcatttactatccaggaaatactctgca

SEQ ID NO: 76260 - DNA, 622 bp, Carica papaya
  Intron number 2 from transcript evm.model.supercontig_18.7 7 (locus evm.TU.supercontig_18.77) derived from phytozome v7.0 (chr-ID supercontig_18; pos 502320 to 502941)
agttgcagctacaggtgtgtgaatctaagcctcggctaacttctcctcctatctctacttcaacctgaaaccacaacttccaagttgtcttcttgctcctgaaatccctaatgtgttcagtgcccatgagaccaggctgagcacacaaaggatcgcggatgtggttgcgagattaagcgtggttgagagattagtgacagccagacattagctcttttttgttagaactggaaaggctgtaaaaaaaaaagagttcaatctaatcctttatagtgaggacttggtggacaggattgatcttttgacattggttcttttgtaaatgtacatggctgcaccaccttgttgtgtcttagtgatattccctctatctcaaaaagaaaataattttcaagtattttataaatccctatctcttggattttcctggaaattatgttgtattggtttctacaaaatccttacatgggaatcatctgttattttccttgttttcttttctttttattctgatatttaaggatggctattttgggggactatgctgacgaccgttatacaacttttcacttaaatgcttctaactgttgtattgtttcttaacttttataggcactcgtca

SEQ ID NO: 76261 - DNA, 439 bp, Carica papaya
  Intron number 1 from transcript evm.model.supercontig_3.50 9 (locus evm.TU.supercontig_3.509) derived from phytozome v7.0 (chr-ID supercontig_3; pos 3632522 to 3632960 reverse strand)
tgaaccgtgggatctcccaggtagtaatctatttttcttctttgaatatttgtttgttttcattttgggttaacgtatcatgtttgtaccttaatcaactaattggtcaaactgattgtcctttagttaattataatattaactggatttttttcccttttgccagatggattatgtgtttatatctaaatgtatatataaagaatagagattttcgtgaggtttttattgaagtatgtctcaacagagagaaagaataaaagggtggaaattatttgctgtttcttgaaaataagagattgatgataagcttcatttatcaatcaatgaaacttatgatgattttgataataagactataagattacgtgtgtgtttttaatatataattactaaatcaatagtttattacatattatgtggtgtaggaaaggcttca

SEQ ID NO: 76262 - DNA, 784 bp, Carica papaya
  Intron number 1 from transcript evm.model.supercontig_129. 29 (locus evm.TU.supercontig_129.29) derived from phytozom e v7.0 (chr-ID supercontig_129; pos 251443 to 252226)
aaacctgttaagcctcgttcgctttgttacttgaggtatattcaatggattgaccctcggttatattctacatttgctttgaccttcacttaatcgggtatttgattagccattataagcttccagttctctttctttggttaaattgtttctggtgctaacttgctgcttatgctcgtcacactagattacctcctctttttttttttttgttgtttattttctgctacgacgccgtttgctgatctgagttgaaaggaagtgaaatttctaagatttcatgaagtttattttctgcgcagtttcagagattttagcttgttaaatcccaactaaactctcatttctcgctttccaattttatgaaatgcttgtttatatgtatgtgcctcaaggtgaagttgacgcaggggtgtcctactcgtaactattttgtgtctcttaaacatcaaagaatggcttgtgcagtaaattagaacttcagatttgagtgttagatttcagccagaagtagttggtttgcttgatcggtgtgtctctcataatgataaacaattcaatggaaaccggagaaactctaacttcattactggttaggttcttctctcaacaattcgtcatgacgtttttgatatcataaagcttgaatttagtctaccacttattatctaatttaagatggctcagcccttctcttgaaggaaaattatttcaccttacagtatcaatcatgagggatgcagaaacttggtaaatcttttgtcaatctttctttgcaggacaa

SEQ ID NO: 76263 - DNA, 918 bp, Carica papaya
  Intron number 1 from transcript evm.model.supercontig_26.7 0 (locus evm.TU.supercontig_26.70) derived from phytozome v7.0 (chr-ID supercontig_26; pos 523067 to 523984)
ctactcaacaccataatcataaccaggtactctttcttcactcctccctgcactacaccttacatgccaattctacccttatgtatatatatacatatatatatctatatatatcatacgaattaacccttccaattttttgcattagaaagtatctatatatttgttagaataataataattaaggacagaaaagagcatagagaaagtaacttcaaatgattatatataaaacttaaaactcagaacttggacatatattgtatagaaaaataaaataaaattaaattatcaactatttagtaaaaaaaaaaaatagtttacaaaaacgaatttgaattttttacttgataaacatgtttttggattaatttctcataataatcattgcaacttttcccataattttaaagtaagattgacacccaccgagaattgaatgaaatatccaatataatatatatatatatatatacacacatatatatgtatagtaaagtaagataattgaatagtagtttcacttggaattggcttcttttgatgcctatccagccacgccattagtgggtaaacccaaatatcctgccatacctactggtaggcggcccctaccattttctccacaagttttctactttcctatttcaaattttctactgatctttcctactttcctatttcaaattaggcaacttggtacttctcagcctacacaacaaataggaaacttaccatgtgcacgatactggtttatcttttattgacaactgcaatgaatatttgatgttcataaaaaaattttagggaaacttctaacagtcactcacaatcaagtttggaattcaaagcaatgaaataatcgaatttaaaaatgtgacaggaactcgattttccaggaggaaaggtgacatttac

SEQ ID NO: 76264 - DNA, 390 bp, Carica papaya
  Intron number 1 from transcript evm.model.supercontig_137. 23 (locus evm.TU.supercontig_137.23) derived from phytozom e v7.0 (chr-ID supercontig_137; pos 479439 to 479828)
tagagttacagattcacgattttcaaggtcatgtgttctgatggggtttttttttcttcaaatctccatcatcgatgatgacgatatgatgtcgattccgaggacaagggttgcggaaattgattaattattttcccctgctgattaagtgtttgacttcagacgttttgctattgctctttctcgtttagtcttcgaaatactgatgttgttgcaactgttatgttttatgtacataagaggtcacgaagaaatgcagaatgtttcttcacgaatatttttttaggcttgtttgacaagtgtatgtatatatatattagtattttgatattaatagtgtttgataatcttgcagagcagataagggtgttgatagagcaacaagagaag

SEQ ID NO: 76265 - DNA, 674 bp, Carica papaya
  Intron number 1 from transcript evm.model.supercontig_16.1 70 (locus evm.TU.supercontig_16.170) derived from phytozom e v7.0 (chr-ID supercontig_16; pos 2597173 to 2597846 reve rse strand)
cgaggcgcctcgtactacaactgccggccctggaggtcaggccaacccctacactcgcgggtgcagtgctattactcgatgcagacgttgatttataatttttattattttttaaaataaatattctcagtttttttttaattctctttaattattatttcaagttttttttttttttttaatattccagaattaattgatattttttctatatgtatgtttgatggtaatgctggtattatctgtgttattgtaatttttatacatataaggaggaagacattgaaataagtctgaaaattcttatgattattattggtattataatttaatttttgtacttggaatgtaaatgtattatattttgattatttaaacatttatatgaaaatctgtaatgggttattttaatttgatttgaaatgtatgtaatcttattttttattttttatttagaattttcatggtttattagataaattaaatttgggttttattagataattaattttttcatggtttattattttagttttacttaaatttttaaggtgctaaatcttattattttctcaaactcttttgcattcttctaattaaaataagtagaagtacataagtaaattaaattttattttatttatgacagagacactctcattgctaagttaata

SEQ ID NO: 76266 - DNA, 674 bp, Carica papaya
  Intron number 3 from transcript evm.model.supercontig_458. 2 (locus evm.TU.supercontig_458.2) derived from phytozome v7.0 (chr-ID supercontig_458; pos 20667 to 21340 reverse s trand)
ggtattaattcatcgtattttgttaaaaaatttaattattactactcatttttataaaatatttattattagaatcaaattattttataaatttaaatcaatagaaaataatttgatattctatcatttatattatcctaataagtaaaaagtatattattttgcgcccaatatgctcaggtacataattaattttattatacataaaaggatactaaatatatatatatatatatatttgaatttgtttcactgtcaatcacataacacttgtagctatatgtgatcgtaatcatctttccacatgattcttggaagagacaagttttatttccgacatatataaatatgtacgtgtatatatatacacgtacttgaatatgtagaagagtcataagaaagtaactaaaaaaataatatatatatagacacagataacactaatatcaaaattatcaactatatgatcaatagttatacaggaacttgactgtaataagttgatgatttaagttggagtcctaccctttacacgggctgagttctcgtctgttttttctctagttgttataattgatatttatatgttaattcgttgatgaatgtattaatttttattaaaatttaattaattctttttattaatgcagattctttatcagaagaaaaaagta

SEQ ID NO: 76267 - DNA, 968 bp, Carica papaya
  Intron number 3 from transcript evm.model.supercontig_119. 64 (locus evm.TU.supercontig_119.64) derived from phytozom e v7.0 (chr-ID supercontig_119; pos 443607 to 444574)
aaggacatctacttgcctagggattattatactgggtgagcataagtctgcttgtcatgtataatttgcagtaatttggatggtagattttgcttttgcaattcttttgaccgtgatcacatgttggactttctatataccaatatttttcttctgttctatttcatttttttctgtctagctgatgttttgagaccatgtttaatgatgttttaaaatgtttggactttctggaagcaatgtaatgaaagtgattttagaggttccttttctagatatcacaccttctggaagcaatgtacccctttaatatgtttaatttggcgttataattttgattatgttgtttacttctttgaacaagaaagccatgatcttgaaagttgaaactccatttccctaaggttttgtttgcaattgcttttgaagattttgagagttttattatctcccaacttgagttgttaggggtgtctccaggcagtcccttactttcttcctcattatatttgttttcattttggacattacccttagagatatgctcccttaataattgcaagttgggtgcattaattgaagctattgagatttaacagtacagtgaaattaaagtattgaagacatcaatcaagtaattagagttcttttgaagatgatgttaatggtagtgaagattggaagaaacttgggtttgaatacattgtgaagatgttccaagtcttggagaatttcaagtcatctttaaactgacacttgcaaaggttagcaggcaagtgcttgctttttcatgcttatcgtgaccttccattactggggattattttggtaaatttcaatagcagaggtttatggcctgcacagttacgtggtctaatttttatgttttgttatggcttttattatgatagtttctttctttgtatccatttcttgcagggagccccgtggatttggttttattcagt

SEQ ID NO: 76268 - DNA, 668 bp, Carica papaya
  Intron number 1 from transcript evm.model.supercontig_13.6 0 (locus evm.TU.supercontig_13.60) derived from phytozome v7.0 (chr-ID supercontig_13; pos 679579 to 680246)
gtggaacaccactgcctttccttggagagactaaagtaatgttcactcaccttttcttcttcctctttctttacattaagatgcttagttgggagccatggaattttttaatcatttgtaatatagcagtgatcagtggttctattgggtgccaattatcatcttttttttgtaggctctatgcataccatgcatctcagtggcattttccatattttgcatactgaactctttttcttaaaacttttgcatgctcctcatttctcgttctttggagactctttttggtttaatctctagaaacttagtactgtataattttgtcaatttaggaatactaagcaactaataggttattgtggttgatatcaaggagatggatcagactcggcacaatcttctttctagccttttctgcccttaggttggaggagttctgcatttactgctgcattttatttttggcttgagtttggctctaaattcattgtcttggttgtgtaatagtgtcaaataatgtgttccgataaataataatctttctttgatatggtaattttgactgatcttatacatacatttgctcacctctgtcttcaaccttagttatggttgttgaatataatattgaatgtaggcacagtatcaggcttggttcagcaggcttg

SEQ ID NO: 76269 - DNA, 285 bp, Carica papaya
  Intron number 1 from transcript evm.model.supercontig_44.1 30 (locus evm.TU.supercontig_44.130) derived from phytozom e v7.0 (chr-ID supercontig_44; pos 1634430 to 1634714 reve rse strand)
atgtaagttccacttgttttgatttattttccatttaaacttgattattatttttaaatacgttatggctattggggcccttcaacatgttcatgcggtcaaccacttgtattcttatgtttttgctgttacattgacaatagaactgaatggatttgcccataacgttgtccttttcttcatgtggggtatttatgcgtgtttatttgtggaatctaatctttcattttttccttattgttttttgcaggtcacaataactccggaggtgccatcaagaactgt

SEQ ID NO: 76270 - DNA, 706 bp, Carica papaya
  Intron number 1 from transcript evm.model.supercontig_13.2 85 (locus evm.TU.supercontig_13.285) derived from phytozom e v7.0 (chr-ID supercontig_13; pos 2610321 to 2611026 reve rse strand)
gaagaagttcaaagcgctgtctcttctattcaacagtaagatttgtgtttcttttatgagtagtacgatttttagttatctgaatatctattttccatacgtttctcggtcttttggctaagatcaaggatatatattttccggtttcttttgttggacatgagttttataaggtgtttagaatagactgagtaaattaatcaggttggtaattttttgtattggtattttcttatgcataactaagtgttcaatccattttacgccactctgggattgtatatggaattgaaatacgaccaacccctcacccatttttaatatgagaaaggaaccagtgaactaaaactcgttggatattattaatcttgataattgataattgtgttgttgctagtcttagccgatgttgggaggtgatgaacttcatgcatggaaatgcataattaaatacatctgaatttccatgtgaattcggcaaatcaaacctagtcttgatagactagaaatagtgttgtctgcaattcttcaagccatgaaaaaaatttctaagcagcacagacactgttttcagaaaataatctataggatatgcccattgctttcccagaattacataatgtctcacgggtcacagacagcaaaaaagaaatgtccttggcgtgaggaagacgaggtcctgggacaaagttgagttctgtggcag

SEQ ID NO: 76271 - DNA, 428 bp, Carica papaya
  Intron number 2 from transcript evm.model.supercontig_12.1 60 (locus evm.TU.supercontig_12.160) derived from phytozom e v7.0 (chr-ID supercontig_12; pos 1456884 to 1457311)
tcatcccattcctgtgcttgttgaggaagttaaaggtatcccaagtgtcaaagtgcaacaaattaacaagacgaagatataccttttctcatattcgtatgtttatttactttctgaattcctgttatcacccgtttgaaagaaaaaatcaaaattcaaaatggtcccactatttaaggttaactttcttaaggaaaacatacctttacgatttgtcaattacagaagatttttggtttttgaattaatttcttactcaaaaatcataggctcatatacttctgcaagaaagttacaggaacacagtgttaatcctgattatgtatcatgtcatgagaaagaaaagctagtcagaatattcggatcaatgttgtgcttaattcttataaacagatattgttagtgttgggcagtacatactaattgtt

SEQ ID NO: 76272 - DNA, 547 bp, Carica papaya
  Intron number 1 from transcript evm.model.supercontig_2391 .1 (locus evm.TU.supercontig_2391.1) derived from phytozom e v7.0 (chr-ID supercontig_2391; pos 5362 to 5908 reverse strand)
cgtatttgctggtgttggatctgccattgcttttggtaattataaatttaattgtgctttaattaagcttagtaaattaaatttatttgaatttctgtcagttaattttatttagtttttaattttttctataaaaaatattatgaaatctgaattttacgtttacgtacttaaagtttaacatgctaaaaaatataaaatatttgataaaatacaatttttttttttttttataaatgaccaaaaattgcacacttatttttttaattgaaagattaatttggtgaactaaaagataaattatgtcaaaatatgatcaaatgggttcaaaattaaattacaaacaaaaaatttcaatacatttgaatttcaaatttttacttgtattaaaactttattataatatttaacatctaaatcagacggtatttttatattttcataaaaatagataattaagatttaacgcttaactaagaacagaacaaatgtatttttcttcgcgtttgcagggaaggtgacgtcggacggagcgttggaccccgca

SEQ ID NO: 76273 - DNA, 527 bp, Carica papaya
  Intron number 1 from transcript evm.model.supercontig_474. 1 (locus evm.TU.supercontig_474.1) derived from phytozome v7.0 (chr-ID supercontig_474; pos 30520 to 31046)
aggttctcccctcctactcccactattcgcttcaggtatttatgacacagaggaaaaggttgctccttgaaattgtgactaaacacaatcttgtattattattgagacatgaatatctagtattttgttaaagatcgtgaatggaaaggtgttagctaataatgcaattgtgctgaatcagattgtatttgtattgttctccttattttacttttcatcctctgacatccttattgagaggtcggtttttgattctgtggatctaatttaatatgttaaaaggatggttgtggtggactgaaaatgtgaaaacatgatgacttcagtagactatacttattgacaattcagatttattttttgttatcatttatttgaaagaactttatgtaataaattatagatatcgtgttcgctatttactgtttggatggtgagcttcaactttgttcacctagtaggaagatactgtgtccttgctttctttcatctttttaacttctatgtccatcgcagtgaacagagtg

SEQ ID NO: 76274 - DNA, 893 bp, Carica papaya
  Intron number 1 from transcript evm.model.supercontig_6.81 (locus evm.TU.supercontig_6.81) derived from phytozome v7 .0 (chr-ID supercontig_6; pos 653485 to 654377)
actacactgataaagtaatcaaagggctcatcttggttagtcaatttactttcatctcctttctagctaacatatctttctggtttatctctttggataattttattagcggccgggtaagtttattatatgtgtgtctatatttatatatgtgttttttgagtgaatatatgtgtatatgcatatatatatatatatgtacacacatcgtagaaaggaggcagttaaaaattggatgtaggttgattaagaacaagggtatggaaagttacagccgtatagggatgctgagagaatccccttttttctaattttttagttaagtataatgtttatattttatataaacaataatatgctggaataaatagtaaaaatattatttatatacataaagatatataatttaaatcttatagaaaattattatacagttgtcaagtttggagtatattaatatactaaaagaatgcgttatagagaaataattttctaggaatagttaagaaaattctaaaaatgcttgaaaacaatttgcttttattgaaatagtgatacttgttatgaattaaaagaggtatatttatgtactatatatgaaataatgatgccatgaagaattagttgtatttaatcaacttcttaagttttttatttcgtattttattttaattttttttatcacttttcaagtcattttttctttgtctttacaaaaatagttgttattagttagtgcatagattcattgaatttatgtttcatgtcaatttttttaattattttatactaatcattttgatttttaaaataatatttatgattaattaataacattaattcaatcatgtattataggtgatattagttggtggaaccgatacaacatcaat

SEQ ID NO: 76275 - DNA, 952 bp, Carica papaya
  Intron number 1 from transcript evm.model.supercontig_3.27 6 (locus evm.TU.supercontig_3.276) derived from phytozome v7.0 (chr-ID supercontig_3; pos 1947227 to 1948178 reverse strand)
aaaggttagaggatatgttgagccacaatggtagtgtgattctaaagggcatttcaaatttatgagtgttcacaaaatcatagtggaaggagaattctaattcattgaaaacaacatttgtaccctttatgaagggagctatagctaagaaagacacactttgatgaatgaaatgagagcttgtgactttaggatggtctcaaataagggaagcaggcacaactgaaggtttttagttgtttgtagttgggtttcttgtgatataatttttcaagcggcaaggattgatttgagattggtgtaggcattctattaatcaggaacattgtcatttcaaaggcatcgagccaatatcttggtggtactccagactcagcaaggaaagtgaaaccaatttcgactatatacatgtgtttcctttcagctcagccattttgagttgaggagtaagggcaagagtatctaatttttcttccactagtttgaagagtctgagccaaaacagtgaactctcctcctatatataattgaaggcattttattttctttccaaattaggtttctgtttgttgtttgaacaagataaaggtctgaagaacatctgatttttgtttgagtggatagagccaggtaaatcgactataatcatcaataaagattacatactacctatggtcttaagatgcaaggagaggagaaggtccccagacatcggtatggacaatttcaaagggtgtttttgcatgcgacaaagacaaaaagtaaggaagaaggtgggacttgcccagttgacatgcacacaaataggttctcattgaatttaaagtgtttattacatgatttcaaaatggtagataaatttttttatgatggatgtacaagtctcctatgccacatctgcagtattttttattcaggggttcggttactgtcttggttgtttttgttggtg

SEQ ID NO: 76276 - DNA, 1003 bp, Carica papaya
  Intron number 2 from transcript evm.model.supercontig_227. 5 (locus evm.TU.supercontig_227.5) derived from phytozome v7.0 (chr-ID supercontig_227; pos 350017 to 351019 reverse strand)
ccttgtgattgtatgatctacatacattttaatctcagtcttttgttatttccttttgcagtcaagaacattgatgaccacttcgatactcttgtacttgttatgctgaattattttcataagagatgtttgattttaattcttacgttttaaaaaaacttttacaaccaagagtgtaaagtgcaaagtagttttatcaacagccaaagtcaaaatttatgttttataactttgaatttaaaagttacaatgtatagtttttagtaaaaatttacactttaaatttcaaaacctgatttcaccaaacgcacaacttatgttttttaaacatggtaacactttctctagctatttgtattaagcacacaataatttttgaatgaaatcatatttagtgaacaattaatttaaaagcacttttaaaattcacgactcaagtctctacaattatttgtattgaagtactaaataacctttgattagaaacacatttagtgaataattatttttaaagtattttctgaactccgatcctaagtttctacaactatttgtattaaacaacaaataattttgactaaaagtacatttaatgaataattattttaatagcacttttaaactcataacccaagctaaatagtgctcctagtttatgctcttcacatttgcaatcgcctgatgccttgttattgtatgatctatatgttttaatctcatttttcataatttccttttccaaacaagaacattaatgactagtttaatactctttggtatgctgtttcttttttttggaaaaataacttggtatgctattttatttccaaaatgcgaaaatatttgaagagttattagtttctatagaggaaccatgctttcggaacattgtagcgctatccatactattccttctctggcttttaatattttggttcgctaagttaaaaaaagttgcaaaatttcaggtaatagagaagggttctgtgttatttgcattctt

SEQ ID NO: 76277 - DNA, 549 bp, Carica papaya
  Intron number 1 from transcript evm.model.supercontig_58.3 7 (locus evm.TU.supercontig_58.37) derived from phytozome v7.0 (chr-ID supercontig_58; pos 424324 to 424872)
gcctgcaccaaggatccatcaaagccaccttctaagtatgttatcttccctcttatatatctatataaagatatgtattacaacctcttgaaaccattcttatataaaagtctcttcttactttcttttcttgtagtggttaacgaggagtaggttgctggcaaaaatttactaaattttaagcaaaaattcatatattcattaattataaaataaatctcaatcataatacaacctcttaataaaagctcataaaaatatagcgcgatttaaattctcaatcccttatgaaataagaagctttctgactattgagctaagtagtcgtaagataagatctagtatctttggttaatgcaagttctagttttgtttttcttttcctttcttacattacaatgaattattcgattatggtgattaagtttgtgttaagatggaattgcttgcattcttctctggctaaatatatacatatctaaccggagaaatgtgtttgtgtgtaaatattcagggcacaggttgtgggttggccaccagtgaggtcat

SEQ ID NO: 76278 - DNA, 686 bp, Carica papaya
  Intron number 1 from transcript evm.model.supercontig_48.1 24 (locus evm.TU.supercontig_48.124) derived from phytozom e v7.0 (chr-ID supercontig_48; pos 725193 to 725878)
ctcgaagaagagaaatttaaggagtctgttcacaagtaagtttacttttctctttctctctgtatgttctcttttatgtatgtatttatcctgtatggctttggtgtaaaagacaaactgaaggaggactgaggatataaaaggagctctgtgaatctaaagcttcgataccgtgattttgtttggagatttttcttggtgccttagatagttgcattaattctgtttagtgggtgtctttgttgttgtttggttggcaaaaatggacaacttgctcttacttttcaggtgtaatcgttctaattgttaactgtggctatgcttcctgaaaagacgtattgaaattgtttggatttagtaaattgattgggtctctgaaaactatgtaaaagaaaaaatgagctgaatcagctgaaacgtatggattttcagttggattaacatggaggcgcacactaagtgctcccgaaaaataatatgaagaaaccaccttgagcataaaactttaaatctgagtgaatagccttttctctagcaaataaaaaaaaaaaggtaaatggtcttatagtgtttgattgttacttggctactttgatctgaaatgacagctttgatcgtggttgcatgattggaaatttatgttttattttggtaggctggagaaagagtccggctttttcttcaat

SEQ ID NO: 76279 - DNA, 637 bp, Carica papaya
  Intron number 3 from transcript evm.model.supercontig_1.31 8 (locus evm.TU.supercontig_1.318) derived from phytozome v7.0 (chr-ID supercontig_1; pos 4373779 to 4374415 reverse strand)
caagagccatcaggagaaggctaaccaagcaccaggtaccatgctgctttgattctttggtctttccatttttgctttcatttgatgatgaagactctgcattcgaattttgttcttcaaagttttaattgaataatttaggagttttgctcttccatattgtgatatagataatgctttaccataaagttcgactcttgatttcttgttatgaatattgttttgccattactttttggaggctaggctgttgtcttagataactagattttgtgactatttgattgtccttttatcacgagcatagttgattattcgatttagacttttctgtattgacctatagatattcagttatgttagcgtggtacaattggctgctctcatatctaaatttcactgtgctgaatatggttattttgtcttcttttactaattcgaagagatttgaagttgtgccgattgtattggaacctcaatgcagaggaggtttccaacagtttctatgcatttctttgttcttgcaaccgaactttcttaagagcttgcttgctgactttttcatattttcctaatgcctatgacatgttttgacttaacaggcatcgctgaagacggaacgtgagaagaagaagga

SEQ ID NO: 76280 - DNA, 470 bp, Carica papaya
  Intron number 1 from transcript evm.model.supercontig_137. 13 (locus evm.TU.supercontig_137.13) derived from phytozom e v7.0 (chr-ID supercontig_137; pos 216049 to 216518)
cgggtctgaccgcgagtgcaggtgcgggaaaatattcccttttgcaggttgaggaaagaaattccccttttaaggagttcttcaaaatctaattttagataaataattggttttatttaaaagtgaaatttagaatttaaacagtaaaattagaagaaagaaattaggaaaagaaagatggaaatattgcatgtgtggattttatctgtaaaaatttgtaaactggaattagggatttaattgagatttttaggttttaatttaactcaaagttagtgtaatttcattgaaagaaaataaataattgaagtctaagacttaatcaatctagcagtccacttaaatccgttgtatctaattttctgggggtattgtttatctgaggagccaatttctaggcagtgaatggtagatctgtttgtttaggatcctttacgaactaaatgcagttcatacccacgaccaggggc

SEQ ID NO: 76281 - DNA, 921 bp, Carica papaya
  Intron number 2 from transcript evm.model.supercontig_137. 13 (locus evm.TU.supercontig_137.13) derived from phytozom e v7.0 (chr-ID supercontig_137; pos 216602 to 217522)
ttatctgcatctgcacccattcacgtagtaggttagttgtcctatatctggctcccaggaaatagatgacaacggttgcacacgtaggtatgacaacagttaagctaaataaaagaatgtaaaagacttaaaaagaagagttagtctgtgtgcgtgtgtttgcttgtgtttgtatttgcttatgattgaggttgagcactttgaggggcatttgtatgatttaatgggggacatcaacaacggtttctcaacagatatcggtatcaagtacatgtaagttgattgctttgatatgattgtttgttgtttgtctgtaatatgataaaagaattgtagaaatgtatataattatgttttcaaacataattgtgaggctttaatactgtttctcttattgagttcattggagctcacccccttccaaactcttatgttgatctgacaggtttactaacgaatccgtgtttatatttcttcaaagagactttggagctagagagggattcttggaagttgtcttctgatcttttgtattttgtattttagaggctcgtgggattgacatgaggaagtagggatgattatatttcagaggttgtaaataaatagattatcaaaccctgtatatttctgttgataatcagacgcctcagttgtttttgagtaactttttgcatgagatgtatatttatgttgtactctagatagattattatttgctcttcagatgtgggtgtcaagttgacaccaagacgttacaggtggtatcaaagcaataggttctaggacacatcccatattattaaggcttagagtttaggtactcttaaaataggatgtcatttgtttgagtacttgaaaccctagtcatttttaaagatattctatatgtctctaagtcttgttttccttgtgtgcagt

SEQ ID NO: 76282 - DNA, 634 bp, Carica papaya
  Intron number 1 from transcript evm.model.supercontig_33.7 (locus evm.TU.supercontig_33.7) derived from phytozome v7 .0 (chr-ID supercontig_33; pos 51528 to 52161)
ttcgagcttctgaacttcagaaagaaggaaaaaaggtatacctgttttgtacatagccaatcttaccttcaataagccttcttgtcttcttattttcagctgttgcttaaatacccaattagcacgatcactagcttgttatgactgtcgttgaagtttcaaattgcagtaaactaaaaagatgtaaactgtaatctgatttggtgaagcattttaccctttttcttctggaggcatatcaagtaacgcatgacatgaattcaaactgattgccaacttagtgactatagagatttcaaaatggtaaacacaattactactttctagcaattaatatatattctgccatatccaagatgcctctcgagtatttgtatctcttgattggcaagacactcatttctacgtgaaagccatccaaaaaggaaaacatgaatttgatcttatgccataaaagtattgttgaagatctattattcaggccaaacactaatttcctcctttggttgttaaagtattattgttacacattttggcccttgtggaactatgagaaaaaggattaaatggttcaacgtgtatgtttttatttcactaacctctaaaaagttctattcacagattatcttcacaa

SEQ ID NO: 76283 - DNA, 569 bp, Carica papaya
  Intron number 3 from transcript evm.model.supercontig_33.7 (locus evm.TU.supercontig_33.7) derived from phytozome v7 .0 (chr-ID supercontig_33; pos 52396 to 52964)
taagcattacctttccttgacgcctggtggtctaggtattttgttaaataaaaaggagtattaaatattctgcagtgagaggattctacggttccctaagtatcatgaatagatttattcttcttaattatatgtctatttgattgttgtgaagggcgaaaatagtttagggaggagtccttcataattcaattctccattgatctagcttatctgaaaacatattttccaccatcaacatctagaaaagccaaccgttttattggttaaatggtctcgtgatttttttctttctccttgtgagaattcctttagtggagcacttgcttttgattgaccagtgtaaaatcactcttatgactattacctgcttctccaactctttcctttcgatattctagcctcatatttacttgaatgttgatgctttatatttcttattaaattactcttattagtattgggatatactcgattgatgagggcaagaagatctacttcaagttgaacaatgtttctttcctttttctctaggtgcatatagtgactcccgaggtcttcctgggata

SEQ ID NO: 76284 - DNA, 486 bp, Carica papaya
  Intron number 2 from transcript evm.model.supercontig_11.1 82 (locus evm.TU.supercontig_11.182) derived from phytozom e v7.0 (chr-ID supercontig_11; pos 2755696 to 2756181 reve rse strand)
ctattcgactattgctcctactgctactaccattggtattattactactgctaatattgttattgctactgctgctgctgctactactactattactattactgcattatatttaacacacacaaaaatttagtttattttaatagtattattaactattcaatattttttttcaaatttctttattttagttaattaattaatttaaatgaagaaaaaaaagttttgttgtcatattaatttaattgaagaagaatttaaatgtaaaaatcaacctacaaatgacaaagtgatcaattaggcttgatttgtttgtgttagaaaaaatgaagagataagctagctgaatataataatttgttcaaatatgagaagaagaagtaagatagactaattaagaaacttaagttttgatttatggttgatgcttaaagccttcaaatacatgagtatttataagtactactactaatactactactacaa

SEQ ID NO: 76285 - DNA, 378 bp, Carica papaya
  Intron number 4 from transcript evm.model.supercontig_36.1 82 (locus evm.TU.supercontig_36.182) derived from phytozom e v7.0 (chr-ID supercontig_36; pos 1334612 to 1334989 reve rse strand)
tgggtgtgcagaaccaccttttcattcttctattcgtaagatgtccttgcagagaaattttaatcagaaactttcagaaacatgaaaaaaaacacttgaaacgtcgtgtgatcatattttactgctctccttcttgggcatggagtttgcttgacactaaccatctgttttcttatgaacaaaacaaaaaaaaaatcatctatgttttgttttaagaagtctcaaagcttaaatactcttgtattggaaagataatagttttatgattttataagtggaagaggattccatgttttataattctgtagtttagactaacaatatacttaacttgtatttccaggtctcgcttttacatttagctgatatcactgaaaa

SEQ ID NO: 76286 - DNA, 657 bp, Carica papaya
  Intron number 1 from transcript evm.model.supercontig_12.2 32 (locus evm.TU.supercontig_12.232) derived from phytozom e v7.0 (chr-ID supercontig_12; pos 2039519 to 2040175)
atttctagtggtttgcaggttattgttattaattatttataccgaattttgttttcttctttctggttatgattttcttggaaatttgattgttggctgatttgatttctagcctcttttttatttttggctatttaattctcatagtttctggttggtgatagaatttcatgtttctaaaacaggaattcttcatagttcacagtccatatttccctcatccaccgcttcaagttgaccttttctgtaagaattggtttgaaactggatatatacatttgagccgtatgaagctgacctctgagaaattcttattcctgaataatatttatgaatttatgggtggtttattttctagcttctgtttgtctttcgctatttgatttctatagcttctgtttggcgatagaaatttatttttcaaaaataggaagtcttcgtagttcaaattccatggctccctccttcacctcttgaagttgatttgttttgctggcatcgattggaaaatggatatacattttgagctttatgagctggcctctgggaaattcttgtttctgaattatatatatgacatagtatctgtttgcacatattagctggtgtaagtttcaattcagttgcttgttctttggaattagggggtggatttct

SEQ ID NO: 76287 - DNA, 507 bp, Carica papaya
  Intron number 1 from transcript evm.model.supercontig_151. 56 (locus evm.TU.supercontig_151.56) derived from phytozom e v7.0 (chr-ID supercontig_151; pos 448500 to 449006)
tcttccgtgggcttactgtcgctgtatgttgcctgaatttcgctaattcttttttgtttttgactgtaatggaattggcctggtaataattctaaatttggacgtgtttcttagttttggataatactttctctggtgaagtttgtatgtagttgttgataatttgggtgtgaattgagtatactagttatggcagaagagaagttggtaactccgaagggaagtcttcatcagtaacacacagacataaaattggtgtatgtgtatgtgaaagctcatgttgatgcagattatggactttgccgattgttgttttcttgctagtcattaaaatatttttgggcattgactatttagttctgctgattagttgaggtaatttgtcctgtttatgaaatttctttgttgggtagagcaatgcaggcatgatattataccttcataaaacatggttagtagctgattgcagctaagtttaatcccatttctatattttatttgcagcta

SEQ ID NO: 76288 - DNA, 400 bp, Carica papaya
  Intron number 1 from transcript evm.model.supercontig_221. 14 (locus evm.TU.supercontig_221.14) derived from phytozom e v7.0 (chr-ID supercontig_221; pos 115856 to 116255 rever se strand)
tctgcgaggaagcccagtgtcctaacataggagaggtcagtctttttcctgcttattcagtttcattgtatgaattgctcgtagatagacgccactgtattgtatttctcatagaagaataaataaccgatgcagaaccttaaggatttaaaagaagggagctcgagttacataggaaatgttaggagatttttttgggagataatctttataggagatttgagtttgattttggttggaagtctagatacttttttctagatactttttacactttgttttatggtttagtgagcggtatggcaataatgtaacattattgagtagagcaaattgctgattaattctcatctacggataagtaatctcactactatattttggtgggatacagggatag

SEQ ID NO: 76289 - DNA, 643 bp, Carica papaya
  Intron number 1 from transcript evm.model.supercontig_2869 .2 (locus evm.TU.supercontig_2869.2) derived from phytozom e v7.0 (chr-ID supercontig_2869; pos 3637 to 4279 reverse strand)
ggtcactggtgcacgcattcgggacaatataacaggtagcaggatcattcttgcaagtgtcaattttagcagtaggttacatcattttggtattgcatcctttcacttgttttgtaatttcttttgagtttgtgagtattaatcagttctagtatatgcttcgagctttatcttttatgcacttttcattatcagtacgtaattatgtggtcctacattgctgcagtgtacaataggtagaatttagagcctagaatgggcagcttgtttaattgctctaaaggcatgtgagcataaagttctttatttgaattaccttgcgttgttaaccatttgaatccctcttctgtttttttatgtcttaatccttattcttgctattagagcctcattccctcttctgtgtttttatggcttaaacactattctggctactagagccttataacaaactaatttttgtctcttacactgattgatcctcttgtttgttatcccgatgcatttttaaaatcttaggttccattatcattcatttctcttgctgctatttttaagattggttcatgtagttggcttttgcagcttttgcacctcttatgattttcatgtgatctgataccaggccaagaatttgatacct

SEQ ID NO: 76290 - DNA, 660 bp, Carica papaya
  Intron number 2 from transcript evm.model.supercontig_125. 12 (locus evm.TU.supercontig_125.12) derived from phytozom e v7.0 (chr-ID supercontig_125; pos 260016 to 260675)
cagctgaaaccattgtttatcaagagggaaatttggtaagttagtaaaagatctaaacttcaccaatttgtgttccgtttttctctaagagcatgtttgtagcaaaagaattctttctgtggaattcattcagaaatcttagtttatgaagggattatccatttagcataccttaaataggtatttggagataagagccaaactaatgaacaacttcggttttaaatagtatcataattcattttcaaattcctttttttttttcacaaaagaaaaatcatttttgaattccaccagctttgatgaacttgaaatacattattgcatttccacctagaatttatttggaaatgaaattttaaatgtttaagtatctgaattaagtatgaaaactagtgatagtttctagtgaattccacaaaaataattcattcattctaaatacatcctacagatgtttcttccttggtggccctaatgcgtgaaagtaacagccctcctccatctcttaaatctacatcatagtgatggcaggatatgctgcttgtttttttggcaatttggcatatctaatattttgataaacgttgtaccaattctgtatatatttatttatcttgctcaggacagattcttggcatattctccagaacaacatcc

SEQ ID NO: 76291 - DNA, 594 bp, Carica papaya
  Intron number 2 from transcript evm.model.supercontig_115. 27 (locus evm.TU.supercontig_115.27) derived from phytozom e v7.0 (chr-ID supercontig_115; pos 469250 to 469843 rever se strand)
gaatcaactttattgggcctaatgtaaggttcttttgtttttttaagttaagaggcctaactatataaaaggcgagtttaacaaaaaaaaagttacagaggcaagattacttatttggttgttttcaaatatgaagtcctctttcagtttgacattttcttgtttgtctattttgtatttgacatttccccggaagttcatcaatggtgcctctatctattaagctgctgttttacactttttttttttgctacccataaagtgaagttagtcctagtcctttctgcacctggaggattcagtgaccttctagtgattgtatctgcagtgatctattttttctaaatctaatttgcacaactgtcttcttgtttacacttgccttgctttttgtccttgtaaaatttatttcagggatgttcatatctcgtccaagtatgttatcattattttcacttgggattcagtctataagtgatatttttggcttttgaatatttttttgggatatttcttgtatgcattgttgtagtaatctcgtccaaataaataataatctcgttttcattttgccagcctgatagcatccgtgtc

SEQ ID NO: 76292 - DNA, 758 bp, Carica papaya
  Intron number 1 from transcript evm.model.supercontig_6.17 3 (locus evm.TU.supercontig_6.173) derived from phytozome v7.0 (chr-ID supercontig_6; pos 1409122 to 1409879 reverse strand)
attggcacccaagcaccggttttctgtaagtttatatatatatacccacacagacatatatatcccttgattacacaggatatattagttagggtttatgtgtagtggaagcttaattgttatctgtatcttaattacaagctattagaaagtacacatgcacccaacttatatatcgatgtgtgcataatatacgagtcatagtaagctacttatttcagcacattgcttatttgataagctgcttcattaattacaaaaaaagtacctagaataatgtataacctaaactatagtgctataaaaggtcgagcaaatcaacattaatgcagcaaagaacatgtctagcaagctacataaatgttttttcttttgcgtttctgacaacattcatatatatatatatatgtgtgtgtgtgtatacatatgaaaagataaattaattatcttttaaatgtatgaataatattaatagattgcttttttttctttttaagtatataggtttttcaataaaattgattcaactttattagatcaaagagttcatatttaaactttagatcttagctctcgatcgattcaggttttgtgcttcatctacattttctcaaggagcttaggccatgaaaaggcacgttaaatttgaaaaaattagtttcatacttaattttaatttcattgattatatatatgtatgtaatctatacattaattttattgagtgtttttgcttaaatgataataatgcaggaata

SEQ ID NO: 76293 - DNA, 849 bp, Carica papaya
  Intron number 2 from transcript evm.model.supercontig_52.1 43 (locus evm.TU.supercontig_52.143) derived from phytozom e v7.0 (chr-ID supercontig_52; pos 1336084 to 1336932)
gggcagaagccaatcaaggggtctcctcacccaaggtaaatccaattctagcatagtgtgagtgttagtaaattcttttttttttttttatagttttatggtgtggtattgtaaaaaaatttctggttggctttactgttttcacatttatgtttatgattttttgaaatatgaatcaggaaagcatatgggtagccattttattgtttctaactatattaatatcatctttccttttatgggtgcattatattgttgcatttccatgtgaagagatctttaatggttggtaggtgttggaaaattatgattgactttgtgactgtactgaggttgttctatgcaatctgcccctcctgacacatatgtttggtggggtgtgatgtctattagtctctatcgactaggattaggtaatgggttctattctattgaattggttaaggaccttcctacacatacaataaccttgaaagggaaaagcagtgaaggggtcaactggtcaagtggttgaagcttttgcgtccttgcagaattgggtcaaatagttgctgcaaagatggtagagtgaaacttatttacgccttttcttaaaacaaccatcccaatccataatttggtcaaagacgaactgctcttaaatttatgcctttccttttattctttgatctatataatagttttaagtctcaataattaactgctgtttcatctttgctgcattactatgttaagtatggatgtgaactttaaatgcagcatataaacttgggactaatagctttaaatgagcttagttctttacttatttagctagaattttgtggaatcatacaggggatattataa

SEQ ID NO: 76294 - DNA, 673 bp, Carica papaya
  Intron number 1 from transcript evm.model.supercontig_12.1 07 (locus evm.TU.supercontig_12.107) derived from phytozom e v7.0 (chr-ID supercontig_12; pos 970032 to 970704 revers e strand)
agaagatcctgaaatacttgcgcgagagacagtttgtatgttatcaagttatagattctattgatattttctttgataagatatgattcctaaataatattgatcagtaaaaacggagctgtgtggtgagcacagagcggactattctttcgctttttacataatattgatcagttaaatccttgtccttctgtggttctgtttttttctcaacttttcccgcaagctttgaataggtttaaataagcctggaaaccaaaatcatctattccctgtttggtataagtgtattctattcttgttttattccagatctttatcatttgatgcatagagtttatttacaatttgcatatttgatggatgattaattaactccacttatatccttaattctactgggttacaaaaacatctaacttgagttaagcttggaattgagtggacttgttataacttgtattgcattccaatttatattcaataacattaacattcgaaggaaaccccacctaacatatgaaagaaatatagcttatatctgttgtttgatttggtttcattttggtgatttaccttttgtttcttgaagaacaattgaataataatactgctgaaaattgttcgtttgctcacttggatgcagtcactgtgagtgaaattgaggcccttt

SEQ ID NO: 76295 - DNA, 167 bp, Carica papaya
  Intron number 2 from transcript evm.model.supercontig_603. 3 (locus evm.TU.supercontig_603.3) derived from phytozome v7.0 (chr-ID supercontig_603; pos 19317 to 19483 reverse s trand)
aagttcttgttaaaacttaaacaacgcattgagaggtaattaataaacttttcagtttcttctctcttttttttttttttttgtgggaatcaaaaaattatttgtctctgatttttttaaaaacaaatacagagttgggcttgattttcctacaattgaggttcgat

SEQ ID NO: 76296 - DNA, 931 bp, Carica papaya
  Intron number 2 from transcript evm.model.supercontig_30.1 13 (locus evm.TU.supercontig_30.113) derived from phytozom e v7.0 (chr-ID supercontig_30; pos 1557716 to 1558646 reve rse strand)
acaaaaggcgacactcaaatcgtatgttcactaatgattttcttcatatattgacactgttttatgtgcaatttatataatggtcctgatgttatgcatgaaatgtatggtctggaaaaaacccgaagtttatgcaattaccacagaggtaatggcagatgaatcgtgtatgtcctttacaattctgtgtttttctcaagcgtttgttatgacatttggtgttctattaaatattaatttgagcatctttaaggtaaaaaatgtttgatattatgtcgtagttaacagtgtgatagtttaatttcatcagacctgatagttgttttttacttcaactgaataacagtgatcttctggtttttagttcggcctttttaaggatacacctttgatttttccccatgttgtgcatgttcacatgacaaaagcaatgcatgttcaagtgacaaaagcaacttctgtctaaaactgtaagggcttattacagccaaacctttgttgtttgaggatattcagtatatgcttctattttcttttctaaatatgaggttagttcatgttttcaaatttgcaaagagttaagtgtatttactgaacctcaataatagagagacttcaaggtggttaagtggaaagaaaggaacaggttactagtaaatcaactgtaaaaggcagtagaattgatcttctttcagctttgcaaggatcaacctttttgaacttaacgtgttgataattccctttatgaaactgttctttccttagataaatgataacttggttacaagaacaaactccttaaaaccttctgcgttcatttgcatcttctttagaaaggtggttgtgaactttgattgttggggcgcctcataatgtctctaattttttgtggttaggaaaagctaccacatcttcacttccttgagcttca

SEQ ID NO: 76297 - DNA, 432 bp, Carica papaya
  Intron number 1 from transcript evm.model.supercontig_30.1 13 (locus evm.TU.supercontig_30.113) derived from phytozom e v7.0 (chr-ID supercontig_30; pos 1558681 to 1559112 reve rse strand)
ccgggaagtcgtctctgactaatttcctggtttgtttcttttccaaattttcctcctttagttttgtatttaccttcttttttgtttttggcttaattatttttgttgttacgattatttatagtattgaagatgttaattttgaatttagcgatattgatgctgttttgtccctggaatacataataaatacacaaagttcacatagtttatttagaactcttttccctaaaaagaaagaaacttgaattgtaactgtggcttttgataatcctaattcccaaaattcattttgcttcccctctccctatgaagaaaatatgatgtctcatgatttttgttcagatgtctcatgatttttgttcagatgtctcagtaagtttccttgttattataggttgagacaaaggttgctgctgtttcacggaagac

SEQ ID NO: 76298 - DNA, 961 bp, Carica papaya
  Intron number 2 from transcript evm.model.supercontig_37.1 23 (locus evm.TU.supercontig_37.123) derived from phytozom e v7.0 (chr-ID supercontig_37; pos 1014635 to 1015595)
acatctgtacgttacctttatttaattatatcattagccaatttcaaatgccaattctccttttcctttctctcttcattgttgtagctttgttatggtgtcttttaaatagcttttcagtttcatcctacaatattttgattagatgttacataatatgatagtactctttatttgttcttttgttttctggctataaatcaaatctattcactcgggtcattcacgatgctggcattttcagataatttcattgcattgcaaagtttaggtgaatgtgatggcacgtttagtctatttgaaatggataaagttaatggttggagtcaaacttggtaactttctcttattcttcaagtcttgggtggttgtagaaaattgtttgagttttaattttttatatattgatattatatatatatatatgtgtgtggatctctcttgatattaaaaaacgtgtatagtttatgaaaatgaactcaaactttgaaaaatgtttgcaaaaagtaggacatgagtttcaaaataataataacttgttctcaagctctaaccatattttcatgtcttttcctgaacttgcattcatttttaacaatcatacacgtccttatgtacaagtattataggaatggagaaaataaaaactctgttctctggaactaagcaaaaccttaatttttgtggctagcagctttcattgtttaggcagcctattaattagtgctgttgagaattagttagtcaaaccgcttttagttagtctggtaaattcgtttactcacaactagctgataactaactattgttagttagttaactcgaagtgggtttaactaatgttgtataattatgttgtaaacatacgtgtataaataaaaagaggaaagatagagaaaagcgttaacttcttttctctgttccagaatttgtttcgttcaaataagaaaatcttttacct

SEQ ID NO: 76299 - DNA, 426 bp, Carica papaya
  Intron number 2 from transcript evm.model.supercontig_5.23 0 (locus evm.TU.supercontig_5.230) derived from phytozome v7.0 (chr-ID supercontig_5; pos 1972949 to 1973374 reverse strand)
gcgctacttcctcgggtgtgtgctctttcactcgctccagtgttttcttttctttctatttgtttgtttgcattctgttgcttcatataaagttggtaaaaaccctatcttcttgatactgggattcataaggcgactaagttgcattttttgtgtggatgaatatgcgttcactgtgtgttgtatcgcaaaaatttcaactgaaaaataacgggatatctgctgaagaactctttactgggctttttagccatttgctttccaattgacattggaattgagacggcgaaatctgttgcatttatttttgttttcttgctacaatgtatagtttgatatgatttttggtacaagaaattagtagtacttaggattgtgatactatggagcttgcttgttttagcttcaatttgttgtgcaggtgat

SEQ ID NO: 76300 - DNA, 245 bp, Carica papaya
  Intron number 2 from transcript evm.model.supercontig_104. 51 (locus evm.TU.supercontig_104.51) derived from phytozom e v7.0 (chr-ID supercontig_104; pos 321220 to 321464 rever se strand)
ttgtgattgctattgctcctttggctggtttgagcgtaagattttaactactagtcatcagggtcttctcttcaaagacagttacacaatttgaagtgtcctttaaagtgttaaaaagaaaaaaaaacatcaaaatgcccagaacaggcgtgacgtaacagcacattcttggagtctcctgtctatctctagatacaattaattatctaattgtttctctctttgtttaacacagccaaatatag

SEQ ID NO: 76301 - DNA, 761 bp, Carica papaya
  Intron number 1 from transcript evm.model.supercontig_129. 42 (locus evm.TU.supercontig_129.42) derived from phytozom e v7.0 (chr-ID supercontig_129; pos 379819 to 380579)
gaatccaggtattttttcgttcttctttgtagatctgttcgtttgtgattttttttcgttcttgattgtaatttttcggatctagtttcgcattttgttgtttttttcttgcaatgtttaggttataataggatttaaaacttgtttccgtgtagtatcgaattgcagtctgtgtaatctagggtgttatatttgttctttaacgtgtaccgactgaaacatgttaatattatagtagtttctgtttgttttactagatccggtccttttatgttactatgatgaatagtgtttattttattcatggtaattctttagatctgtgcttttaacgagttacgggatacgcatatgatgaaaatatctgaagtttaatgttatatgctttgatttgcgcagtttctgtttaaatttgtccagatctagcatttctacgtgcttcattatgatggatttgctgggtattatgtttagcctatcattttcacgaatcatgttcttttttctgtatttgttttttattttcgcgatgactcgatgattagcacctttctgtgtttttcttttcaaaaatattcgcctgtcttaggttgcttgtagcctgaatgttggtttgtaatgtgttaaccttaatggtttactaaggaacatctgatgtacttagaatgcgatctcttatttcagttcctcctagtaattttttataacgccttctgcttttgtaaagtttctcaaattttgtctctgcattttacagcctg

SEQ ID NO: 76302 - DNA, 546 bp, Carica papaya
  Intron number 1 from transcript evm.model.supercontig_124. 52 (locus evm.TU.supercontig_124.52) derived from phytozom e v7.0 (chr-ID supercontig_124; pos 876154 to 876699)
atcgctacaaagaatacaggtttgttagatttctcctctgttattctccatttttttctttttgcttaatttgttttttctggtcagtactgtccatttctagagttaagatggtaatgaataatcttgacgttgtccaaaacaagaggtaaaattttcttctcctgttatgatctttaaattaagatttataaagattattgattaatgcttaagactctttaggagtacagacttgaccagtttcattcatgagaaattattaaacacgaagtaaagttgaaaggcccataaattttgatacacttcatcttttattttcatactttttatagaaagttaatataaacttactggaatttcattgcattaatgttgcttgatcaagggctaagtttaatttcaatgtcctaatccgtgcagagcagtttgtttttgttctcgttttttgtatttcacttttcatctttttcattctttaatgaaggtaatggaagttttttgtttgtaggtattgtttatctgtcaatattattggatttgtat

SEQ ID NO: 76303 - DNA, 339 bp, Carica papaya
  Intron number 1 from transcript evm.model.supercontig_112. 93 (locus evm.TU.supercontig_112.93) derived from phytozom e v7.0 (chr-ID supercontig_112; pos 718268 to 718606)
tttcgtacgagatcaccaagatcaacctttacaaggtcttctctctctctcattcacacgtttccttccctctctgttttgggtgttatttctgtttgttgttatgtctgtttggtttctgaggaaattttggaattggaaagaaatttaccacgtcgctgttttgatttctggttatttttagtaaattttgtgaggggttggagttaggggattggctgtaatagcttctattgcaaaaagcgtctgatgattaaatgtctttgttatttttatggttgatttttttctttttagggtttaaggttgtagggtttatgcggtttgttttctggcagg

SEQ ID NO: 76304 - DNA, 602 bp, Carica papaya
  Intron number 1 from transcript evm.model.supercontig_212. 1 (locus evm.TU.supercontig_212.1) derived from phytozome v7.0 (chr-ID supercontig_212; pos 306 to 907)
ctgctacagataaggttggttttgcattttaatgcatattattcttgtcaataagtgtttgcctagtatctaacagatttcctcagatgcagtttgattgtgcatacatatgtactcttgatgcttgcttttgagtttactaatgtatattggaagtcatacaaattagtatcttatttagtgcaagtctcctggaggtctgcattctgatgcttggtagtttgctgcctggaggccctgtattaaaagattccgtttaatctttttttttttcttttttttttccggtttatggattctcctgaatacaagagttcattttctacttgaatttatcttgttttgagttttcagcaaaatcatatgaattgtaaattaattcttacactaaaatagacacttctcagtatcatgttataaataaacatacatttgtgttttcttgctggtcttccaaatcatatttatttggggtctctgatcgtgtataacaatcattgcaagaatgcatttataatttgaagagttttattgtgccatgaatgacgtatttattgatttctcaatggtttattgcttttcttaggcaattcaaacaattg

SEQ ID NO: 76305 - DNA, 777 bp, Carica papaya
  Intron number 1 from transcript evm.model.supercontig_217. 17 (locus evm.TU.supercontig_217.17) derived from phytozom e v7.0 (chr-ID supercontig_217; pos 205425 to 206201 rever se strand)
attgggtgagttgccctcttctctactctttttcctcgttttgtttcttttgtgctaaagcatcaatttgctgttgggattaaaacgaaaactacaaattgttaggggttgaaaaacaaactacctagttggagggatatattagaaatttaccgaaagtaatatcaatcttccatttgataaaaacaggatgcttagttccaaggatacatgtcctatttatagccaattctaaccgacttgaaaaaagagaattttcagcaccatgcttaccaccttaagacaactaatttcaaatcaaccccctaatgaaaagaaaattaattaaatattctaacatttgtcatacccttcttttctttggaatctgtggctggcattcgtggaaaattagaagtgtttcactggttagaatatccataaatatgttctataccgtttatctcagtcaaaaaggtttcaagtggtttaactcatcttcaaaaaaattcaaatgaaccaataataccaaaacctaactataattactcggcactcattttgcattaacaataaagaggagtcttagaggttcctactacacctagattttcattatcaaagtataacaattgaaacagcataagaggatcattgggtatggtttcttacggccatgaaaaaaaaatgaactgtctcttcgttttcggacgtgtatgtataagaaacgcgaaacttaaaagattactttgtcttattccagggacctcacacatcaaaggcaaacccattcctcta

SEQ ID NO: 76306 - DNA, 690 bp, Carica papaya
  Intron number 1 from transcript evm.model.supercontig_175. 4 (locus evm.TU.supercontig_175.4) derived from phytozome v7.0 (chr-ID supercontig_175; pos 162844 to 163533)
ggtggtgttatggggttttttggcgctttgataagagaaattccttgttagtactcgtttttcgtttctttttcagttttgcatgttttgtttgcttaagcttttttcttctttctcatattttctacatttttgttttgctttgtttctctctctctttttttttttttttcaattttttatagttatcttttattatgtattttgttttttgtttccatgttctaatgaaatgagcttcaaattctttttcaagatctaagtttagtcgttgcattaatttgttttcttatcttctatcccttttacatttttgttaaatttgcctcttgagaattttttcaaaaatcttttttctgcagcatttcttttcaccaagattctaatgaggatagttagataccatctttttgttttctttcaacttatgttatttgcatgggatcaaaaattcacagtgccccatttttaacatttcatcttggaccaagattctaatgaggatagttagataccatctttttgttttctttcaacttatgttatttgcatgggatcaaaaattcacagtgccccatttttaacatttcatcttggagattaaacatgggaaatagtaaataatttgtcaaaagtttcttaactgtgaacgtctgttttacaatgttaataggttgttgacttttgaag

SEQ ID NO: 76307 - DNA, 708 bp, Carica papaya
  Intron number 1 from transcript evm.model.supercontig_48.9 7 (locus evm.TU.supercontig_48.97) derived from phytozome v7.0 (chr-ID supercontig_48; pos 556702 to 557409 reverse strand)
ggtaacgctgaatttttcttcccctatttatgtcttggtacagttgcattgcttcggctaaatgagcttgagctacttgggttggtcaaagaaaaccaaatgttagtggctaaagaagaagccttaatttgagtttcaatagtcccttgtcaccctcccctccatccctttacaaaaagaaacgtccttgtccacttgttccttgtctcaagtcacccttaccccaaagctttatttagttgtagaaaacagctgtgaattttattttctaaattcatgtatcttcttatgcaaaaatatttatagttgaaattgtgacacaaatgtttataaaaataagaaaaagtttttttattaataacccaagctattttgttttcatttgcaacaagaatatacgtgttttagagtgtaaaaacatttataaaatgaaaactcaaaacagttttgacaactaaacgagcctgtaaatattttagaacgtaaacacctacgaatttacaaaatgaaaactcagaacagttttggcaatcaaacaagcctattaattttttcagagcttccgtattttgtttattctgcctgcactcaatgggtgttaattcacatgagggattatggaaagctggacagcattttggatttgcactgactgcaatgttatcatccaacttgatactctggcatgttttacaggccttggaaaat

SEQ ID NO: 76308 - DNA, 565 bp, Carica papaya
  Intron number 2 from transcript evm.model.supercontig_57.3 6 (locus evm.TU.supercontig_57.36) derived from phytozome v7.0 (chr-ID supercontig_57; pos 612977 to 613541 reverse strand)
ccatcaagtacttcttttctcctgtacaaatagttcttctcaaatttcacttgtctagtcgtctactccttgtttctttcttctaagtggttatcagttttctaatgaagaaatttttatggtctaggttttagatccatagttagaaaggaacttcttgtgcaatattggcttgtttgatcagttggtttccttagtaggattagtaccccagtgagaaattattaaattagctagataggatgaaacttgatcctgaatgtttatactgacttcacttttgtggaatgaggtttccttagcatcctagttgcagacacatcatacactagttacattttgttacaacctaaggcattataattttggtctcttttgtacttgtttcaaattttgtgcagaagtctttgtctattgaatttctcgattgttatctactagttatagatgggagacaactattcatttacatacattgtactgtttgttttagatatcaatgcttcaatttatccgttatgttgctgcaggatttctggatttgatcctcctcctgcccgtgtgt

SEQ ID NO: 76309 - DNA, 784 bp, Carica papaya
  Intron number 1 from transcript evm.model.supercontig_56.6 1 (locus evm.TU.supercontig_56.61) derived from phytozome v7.0 (chr-ID supercontig_56; pos 948249 to 949032)
ggattttcggttctatctttgcgccctccgctaaggtatatccgtgtttaatcgcgtctccgttaatggctgaaatctattgtagatagacaaaattgagtgtcgattctttacaatctgatcttactgttgtttcttttcgtctgttcatgttaatcgggtttttgcattctaatgcgaatcaattttgtttcatttcttcgtaacctctgtgtaactgtcgatgaagtcgtcaacatgtttgaattcagttttgtttgtttcttctctttttttaatttgagttttaaagcattgttgtttccaagttttttattttaattgagaaactgtacatggattgctttgtcaaggttttgcttgactgattgagtacggaggttcattccccccccttacttttctgcaatcgtgacatgtatccagttaagggattataaagatgaatgcgaagctgacaatgggagctaacatgagtttgatttggtactttgaatggatataattgacctctttgtttttcattaggatttttttctccttcgttttaattttttggtcctttttcttttcgtgttctctctgtggcagtgtttcgaatgatcttgtttcttgcatcaacgtttgcatggttaatggtggtttcttcaacataaatgggctgttgttgtctttttattaattctataggttttaataaaatcattttcagagataagctgattttccttttgttgtcgattttttaggtttttggtagggagtcgttgcgctctgaagtggt

SEQ ID NO: 76310 - DNA, 586 bp, Carica papaya
  Intron number 1 from transcript evm.model.supercontig_6.28 5 (locus evm.TU.supercontig_6.285) derived from phytozome v7.0 (chr-ID supercontig_6; pos 2167209 to 2167794 reverse strand)
aggtaagcttccgagtaccgattctgatttatttgatgttcttttatttatttctaataaaaatctttctgttcttattgatttgatgataccggcgtcttagtttgtaaacagtttccactatccatttattatgttgttttgtgaatttaggagaaaaaattgaagaactcgggtattatgggtggttgtcatggttatgtttgattgcgtattttctgtttgaggataaaaagttgagtgattaacatttgaaagttcaaatatacccttttttttttactcgattttccttctaaattctatttctcgggagccgaacaggtttcttcccaggcaggatgaagtattgtattgttggcaaccttatattttatttgtgagcattgtacgtctttcattgttcacaagatacttccattttgtgtttgagattctatcaggaggagaaaaagaacgcttcattttattgttctttgtttcagtgttagcaagaatcttaaatttttattgttcttattccattgttagcaacgtgacatttgactctgtttgatgcaggtgaggttgtcttttgaagattttg

SEQ ID NO: 76311 - DNA, 689 bp, Carica papaya
  Intron number 4 from transcript evm.model.supercontig_33.2 3 (locus evm.TU.supercontig_33.23) derived from phytozome v7.0 (chr-ID supercontig_33; pos 158221 to 158909)
agaaaacttgctttgaaaacgaggttcacatcttctgttgttttcaactgctcctgttcttacaatatagttttttaggggttttccattaggaaatattgtctagtaaagtaaaatggtaaaaacctgtcccactgcattaatttgacttttgatatatagttgaagttcttttgtcaatttgagctttaggcattgcaggcttgttcgttcttctgaatgttcatcttgatccaagaaaaagctatttctttaatttcaagttttcggtcagcatggttttatcattatgtcgtctttttatcatgctgcaattctaatatgctatgtgtctgacattactggtctttgtacttttctggtcattgtctctgacattataagtttctgataaacttgtgcgaagctaagatgtaactggtctttgtgaagtatggtttctggggaatacatttggattgggagtttgttttgctggggatcttcctttagacatgataggataactggaaataattgtggaactaaggaaatgtgttatcctatcacttatcatttctttttggggtaaataatctcttagtagaggtaggctgaaatcagaagaactgttcttttgccatatttggctaaataatattttgcttccttgtattggtttttttacatgacttcacagggaaaagata

SEQ ID NO: 76312 - DNA, 624 bp, Carica papaya
  Intron number 1 from transcript evm.model.supercontig_38.8 2 (locus evm.TU.supercontig_38.82) derived from phytozome v7.0 (chr-ID supercontig_38; pos 1704238 to 1704861 revers e strand)
aggaggctgagaaaataccatttgttggtgataaggcaagagtcttttacgactctttgctgtttattatttggttacattgcagttgaactatgttaaagttgtgaaattctttctttcttttctctttctttattgcaatccgggaagaacagttacaaaaaattccatatgttggtggtctgtgaggttcatttactcggctacatggtcttttttctttctttttgattttcctacatcatttataatctttggatcatatccctaagaactttagtcttcaataggtttaactctcaattgtatgtttgggaatctttctccttgaatctttaattcatttgtcctgatattctccttaagtcaaacttctccaatttcacattcagtacatttatcatttccttgtcttctttggagaataagtacattcatctttttaataatttcttcaagtgtacatatcctctatgcattaattccttttcaggtagttagtatgtggccttgtgctacgttaactttcgtttttaatttctgaatgtgtatttacaagaccaaaaaccttgtcctgatggaactgcaggaacctctgtcaagtttagctgctgagtatcaatc

SEQ ID NO: 76313 - DNA, 374 bp, Carica papaya
  Intron number 1 from transcript evm.model.supercontig_17.3 6 (locus evm.TU.supercontig_17.36) derived from phytozome v7.0 (chr-ID supercontig_17; pos 446541 to 446914 reverse strand)
gaggaggctaagacaggattagaaacgtgtgttttcagaccctgggttttttagttatggattatcctctatattctttagagaatttcggggatctcattgacattttaattgacatataaataatttgatatgtgggttgacaacctcttgatgcttgtatttagtgacacatacttttttatttgaaaaaaaagaagagtaacaaacttttggtagtagtgatctggttaaaggcttttgagtcactatctaacttgtacgtcttggcttaaatgtgttagctgctaacctgtcgatccattttcacctatagcattacactttctgatgtcttgatcttttttctgtctgtttgcttgtttttagtataa

SEQ ID NO: 76314 - DNA, 978 bp, Carica papaya
  Intron number 1 from transcript evm.model.supercontig_50.2 2 (locus evm.TU.supercontig_50.22) derived from phytozome v7.0 (chr-ID supercontig_50; pos 324163 to 325140 reverse strand)
gtcacctatccgtacgctctctctctctctctctctctcctctctgtcatatatcactgttaatgtcttgtagtgagctgccaatgtagttattgtacaatttgcgtacaaatgccattggaattttcctttttctttttgattttaaggttctttgagtttcgattcggttacagaacgtcattattgatttcttatgttcagtatgaattagtcttagtggcaaattacagtataagttttatgtttgactgactttatactgttacctccaactactgaacttcaaacaaaaatgaaaattcgacacacaaacaattcgatgtgaaaaaagaacgtcttaattctaggaatatttttataaattaagtatagggacccaatagagtgggaactgaatcaaatggccagtatagttttttactattcggtggtttaagcaatattagctgcgaacttatgatgtgcttgagctgccgtgccatgtaatctggatatatagtttcttatttacattggtatttcagatgatgatctcgtttttttctttcttttctggtaaccttacttgatgctgtaatgcccagttctgtgttgatgttatatttacctgatgttatatatacacgtgcacactttgttggtgtctgtagtctttggcagtggaatgagaatagttatttggtattaagtgtaattaatttaatactttcagttagtattttgctgaggattggtttattacctacgtgcagcacacatgtgctcaccttcggttgtatatatactcagtaattcaagatacataaattcttttctctctttctctctctctgtctctcgatctgtacatttggaattggcttaaatctttttgtattggtttctagttggtttttttctaagttgacctggtaatggacatgcacacctctgtttgtaggttagagttgttggtgacacaagagcaatagcaca

SEQ ID NO: 76315 - DNA, 890 bp, Carica papaya
  Intron number 1 from transcript evm.model.supercontig_2.43 0 (locus evm.TU.supercontig_2.430) derived from phytozome v7.0 (chr-ID supercontig_2; pos 4559545 to 4560434 reverse strand)
ctcaggagcttgtggaacagggaatatctccacaggtactctcttcttttcttcttctttctccatagatccacgaagctcttgcctttttctactctagtgttacgttaaatttgacggaactgctataaaaatgttatcttgctcttttattttctgtagttttgattttgtaaaagaggctttgagttatgtgagatttaatggggttctgggcagttgcatttttgcttcatggaaggaggatgttttcatgtgggctttcccatttccaatttttctgtgtaaatgtcttcactattagcttaaacgggttatcccagaacaaatttcagtgacacattagcagttgtctatcaagaaggaaactttagcatgcctttgtttctcagtgactgataaactctgaagtctgaagctaatttcaaaattttgctcacttttcttagctagtccaattgcctgtttttctgtattctttgcggggaaattttgatgaaatgatttaatcattttgggataaaagaaacttgattctctcatatttttgagtcagttcatgtgattaacttcatggaatatggtgaatatgatactctgctggtttcacctttaacaatgctcaagctactgcctagttctgttaaaaaaaaaattcaaaagtagtgaaaagaataaagagagtttcttaaagcatctttatataatttccttcttgttgtgtgttcctggcatagatgaattctgcttctgacccatagtacagaattgataacattacactgcttgttcttttttatcttttacttgaaatgagtgtgtgaaatataacaatgactcggtgccatgaatcagaatttgaagagggtatcttgtacaaccgtgattac

SEQ ID NO: 76316 - DNA, 877 bp, Carica papaya
  Intron number 2 from transcript evm.model.supercontig_53.3 8 (locus evm.TU.supercontig_53.38) derived from phytozome v7.0 (chr-ID supercontig_53; pos 208702 to 209578 reverse strand)
ccgacgatcggggtgaaggtatataaataatccaaccatgtataaggattaaaatacaaatatatctgtaagttcaatgcttgtatcaaacgctcacatggtggaatttctaaaaacttatgaaaaggacagagaataaatgaatgcgatcaattatgcttaccaatattacgtaatttacttctttttaaagtagtagttttcaatacccatgtgaagttaaagacctaaaattagatggtggattacacagacatatatatacacgtatatggcaaatcatcatatttcttatgtatattttttgttgaatacagattacttatttaatttaaatgtataaattagatgaaaaatacacaaattaaacacctttaattatgcataacttacatattttattaacttataaacttcaattacaagttttttgaagaaaaacctcagactctccctgtaatctcttttgtggagaagagtaaaccttcaaagttttcatgatccagcataaacgacacacagggaaagaaaaaaaagtggtttcttcttgaattttcttctgggtgtggtttctttctactttctcggtggggggttggattaatggtgaagtaaataaacattgggcatgtgaatcaactggtaataatgagtatggcaagctaatactctgttatgaagcatcaaggtagaatatcttatccaagctctaacgaaaacctcctttttgaaaagactgactatatgggtaattatatttatcataaccagatttcagcgagtttcaataatcaaagttgttttcctttcattttaattttcaattccgatttgaatcgcaggcggaacgttcgctctgtattcattgctttgcagg

SEQ ID NO: 76317 - DNA, 527 bp, Carica papaya
  Intron number 2 from transcript evm.model.supercontig_18.1 42 (locus evm.TU.supercontig_18.142) derived from phytozom e v7.0 (chr-ID supercontig_18; pos 1258169 to 1258695 reve rse strand)
gttatctcagtgaaaaccaagcggccacggtgactctcctttgctctcgatatgtctatcctcaaatcctattgcattaacgtgtttaattttttgaatttcgttcgtctttgttcctcgtagtttgaaagaaaagaagaattgtttcaatgtcttgattatagatgttcatcttatccaattaattgcataaaatgcttttcttctacctttttttaaaaaaaaaaaattacctacgtctttatgattcggttgtttcctttccttttttttaggctaataggatttcagatatacgatacattggggtttcttcatgtttaacgcaagctgttcttacttttacgtgtcacttttcgtgttggggttttcaataatgccattctctaatctgagtgtttttatcttgtgaaatttgttatatgttctctatgttggactttcatcttcatcttttctggaggtttattcattggttcttgtgaatttcagtacattgctagtcttactcgtgcattggcatattg

SEQ ID NO: 76318 - DNA, 733 bp, Carica papaya
  Intron number 2 from transcript evm.model.supercontig_106. 73 (locus evm.TU.supercontig_106.73) derived from phytozom e v7.0 (chr-ID supercontig_106; pos 749804 to 750536)
gttcacataccaatccctgatactccctgcaacaggttagcttttacctctttctttaatccctttcactatatacgccttccgacgtctcttaagtggcaattttagttattggatactttatcgtttgcgaataaataggattatgtttaggaaattagatgtcatgctcatgaatttggtggtgaaagtagaagctccatttgtggtagagtggaaggaaatggaaagggaaaaaaaaaagaagagatgaagcatgcgcatttgtaactggtgtattgaaagaattgatgaagagacgagtgatttccctgtgtgtgtcaatagtttgtgaaattgatcatcgaacggaaaaagaaaaagaccagactgttattttggcttcaattctcattccacataagttcttatccctttgcttaattactagagttgtatttcttgaaagaaggaatactagagctgtcttaatacgtaggagtacatcataattttaagttttgaattgcatttattcccatcttgaattctttggagatggattttcgattgtgattatgagtatagtaattaaatgaacgaataagatccagatgaaatgagaataaaactggatgagagattttaagtcattggatgtcttctctacatgatttaattcaaaagatcacagtttctaatctgtttgacaatttatgtttttaaggtgccaaaatccgagagaaaactggtt

SEQ ID NO: 76319 - DNA, 743 bp, Carica papaya
  Intron number 2 from transcript evm.model.supercontig_166. 23 (locus evm.TU.supercontig_166.23) derived from phytozom e v7.0 (chr-ID supercontig_166; pos 177522 to 178264 rever se strand)
acagcagatcaaacccggtacttgtttttttttttttctcattttttaacaaaatgagaacttttaaattttctgtgcttgttctcaatatgtttttattgtaatttgtgtttgaagttagtaatttgcatttgggatgctagaaagtattggcaggttgattaatgctgcacattggcaagttactagtgtttgaagtggggtcattgtttcatgaaaaattggtgccaattagtattgtcttaagtgactaccagaagaaaatgatgaacgtagctcccatattcatgttaactgctgcactactgcttttttgtgtgtattaaactatattgcaaattgatgccttttgatgctatagcatatgtttcgttcttggtcatggtgataaaggaatcagcttgaagatgcaatgccctcatgtattgcctttatatgctatatgattcttggtctgttagtttctcacgtgtttttctaactgcacttttgaattatttcaagttgaacatttgttaacatcacatgcaaaattaaaaatgaaaaagaattattcctatgtgcttaatatgtggtgctcgtaatcgtcaacttggtgtacacttcactcccttttctgttagcctgtatttagttttgtcgcgttactgagatcgctttcttattgagattctaattttttaattcacatccaaccttctgtttcagttgttggcggttgcaagaagaagtggtgaggtaag

SEQ ID NO: 76320 - DNA, 903 bp, Carica papaya
  Intron number 2 from transcript evm.model.supercontig_26.2 15 (locus evm.TU.supercontig_26.215) derived from phytozom e v7.0 (chr-ID supercontig_26; pos 1563589 to 1564491)
tcttgcctacactccccctgagtatctaagaagtattacttttaactattctacaatatatatatatatatatttatatattatggtttccttttcaaaatatggtatgggcccatgattataggaggacaacctccaggaaatgtttagttttgggtttggacacaccccatattgttctttaaatggaatttggtgccacctgagctaggaagcctggctttttctttcctttttatttaatttcttatcttcttaagtcattttagcagggcactaaagagtctcatggaatcttggaaagtagaagtgcagttctttgtaaagcaaaatcatagaattttggatatctttaaaaaaaatatagaacggtagataagacatattaagttggggaaaagagtcactttttatctcaaaaacaaagttcgggaaaagagtggagctcgataatttattttaaaaaaagaatggagctcgataacttatttaaaaaaaaaaaagagtggagcttgataacttataaaatgcttctgtttgcctatgagtggacatagtgaagctacttcctggatttaactcagcagaggcccttcctctccttcccctgtaacccttagagaagaagaaaaatgaaaaagagtccagtaaaaaaactaacttattggatatccttttcctatgttcagaaattggtaaaaatcattgaaattctgtcaagagcatgaatcaccatcaagttatcattttaatctactatttgaacatcaatcttttgctgttttgagtagggatacttttcaactaagaatatttctgaaacatgaataggctaatgttagttggatgaactatgtttatactgcaggaagggtcactcctgaaagtgttatcttcagcttt

SEQ ID NO: 76321 - DNA, 681 bp, Carica papaya
  Intron number 1 from transcript evm.model.supercontig_139. 65 (locus evm.TU.supercontig_139.65) derived from phytozom e v7.0 (chr-ID supercontig_139; pos 485175 to 485855)
tctcagagacaggtacaggatcgtctccatttctgttgatgttgattttgttgaactctttattttttctatatttatggcgtagtagcggacgcagtttgttcctttgtttggttgtgaggtctatcaacaaacaattatgtgtttatttaaatttctgcattgtgttgcttttctttttgtaacagtaacgtggaagttttatttgaactattatactttctggtgctaatcttggagcgtagaataattgactaccgattcggcttattctagtttggtaaagtgtccagattctttgagggcttttcttgtttgttaattatcaggaaatggtcaatatggtatcgtaagaggaattgtagcttcacctttgtaggctttggattgcttttttcaactgttaatctttatggccgttgattgactgtaattctttttagcgttgattcttagccattctttacttcaattttggtttcgagttgctttgctattattttcctttacttctcattcttttttcaccttttccctctgttctctattaaaatagagatgctgcctgcagtatgcataaatatttctggtttaaattttgaattgtgaattgaaatattgtgttttgcttttttttttttttggcaatccacagggaagccggggtcatagagaacaaag

SEQ ID NO: 76322 - DNA, 1027 bp, Carica papaya
  Intron number 4 from transcript evm.model.supercontig_43.2 9 (locus evm.TU.supercontig_43.29) derived from phytozome v7.0 (chr-ID supercontig_43; pos 295218 to 296244)
gttcgtttattccaggtaaaattttgttcaatttttaatgttcatatatccttctctaacgagcttcagcaatttagtaaaaatttcaaattatttacgaagggccatcttagcttctagcaaaggcaatttcctggtggtagcttcggaatccaagagaaagatagtgtgcattctaaggtcctgatttttttgtcagcaaaagtctcttctactatgagccagatgcttggcagctattcatattgtgattctgaaagcttcctgcatgttctttcttctcctattttcctggcctgtttcccatttctccctgaaggccaaaaggtaatggttaatttgagggccaaaacttttccgggaaaagtttgtggaaatctgaggaatgatgtggaacatatttgggcatgaaatgatcttgatgcttcatgagctgcattatcattatgaagaatgagttccttctacatgatagaatacgatcaaatcgaacagttcttcatatactcatgtgtctcttcaccttttttttaaataacaagtataacatgtatcataaagatagcaattagttctactaaatcttccgtgtaatacaatggttcacccataactaaaaaaccaagtatttgaaaccctttctcttgaattccatcaatatcttctaccctatcaaaaattcttttgtttctttctttccacacaatccaaaatattgcaagtggaataaactccaaatatttttgccgctcaatcaatcccttcccatgtgtctcttcccccgattttttattttttaacgaatttgcttgatttaatgtgttggttcaaattcatcagtctcctcacacatattctttcaagaagtttcaccggttatttatttagtttcgacaattcctactcaaagtatgtgttcttctagtttctgatagacattactgtcaaataatattaatgataataataataatacagtgataattctgcagtgccttcactggacaagtttcctgcaatagaagac

SEQ ID NO: 76323 - DNA, 781 bp, Carica papaya
  Intron number 1 from transcript evm.model.supercontig_27.6 2 (locus evm.TU.supercontig_27.62) derived from phytozome v7.0 (chr-ID supercontig_27; pos 637980 to 638760)
gtgaagacgataagtcctcccaacagaaggttcgtttcttgccgtacttgtttactgagagcagttctttcgccttttccatttctttttttatgcttttgtttcatttttttcaactgattgtatcccttttgaataattatactcgttcttgatttatttcaaaaaaaaaattgtactccttcttgacgattttatctaatatggatgttctctagcatggttttgatgtttcctttttttttttaaaaaacttgaagtcctcaactgtatctccttatctgttaattgtcgttctattgatggtttttatacgcatattttttgagaacaagagctgagaaatttgctttcggcagcttaaggaaagtgaagaaacatgctctcctggttctttatttgcattttttagattcaaaaagggggaaaagtagtaaatcatctaacattttgctcatcatctttcatcacccacccctggagccataaaagagaatttctgcaagtgtgggttaactcttggaattgtgaaaagttaaaacaatctcaattagtgctataggggatgcatcagggactggaaaaatattttgtcaatttgatattgagaactatacaatttttactttaaaaagtaggcctgtgtttctgtttttacgtaaacttgccacttcacttattactgtccttgttggtgtttgttctgaattaaagtttttgtttttgttttttttttccgacttaatggctgactatattcaaattcaccagcaaaattctc

SEQ ID NO: 76324 - DNA, 192 bp, Carica papaya
  Intron number 3 from transcript evm.model.supercontig_139. 80 (locus evm.TU.supercontig_139.80) derived from phytozom e v7.0 (chr-ID supercontig_139; pos 644756 to 644947 rever se strand)
ctcgtagagctgctgaagactgtttccctcctctggtatgattttattttctttttcctttgattaaggattgaaaaaaagctaatttcactgtttcttttaagaagaaaagctacctgcagcttgttggcaacatggttgttttactggattgcaggactataagcagcagagaccctctcaagagcttgt

SEQ ID NO: 76325 - DNA, 442 bp, Carica papaya
  Intron number 2 from transcript evm.model.supercontig_36.1 78 (locus evm.TU.supercontig_36.178) derived from phytozom e v7.0 (chr-ID supercontig_36; pos 1289579 to 1290020 reve rse strand)
gttcctaccaacaaggtctgtttttctcctgttcttgggtcaatgtattttgcttggctaaagctgtttggttgatgagaaaatgtaagctgaatctggttttcaagaatcgagagaaacaaactacaataaaattcttctccccaccccaccacccccaccctccacacataagacttggcactttgacatcgagctttgttcattcagtttttgactctgagcaaaatgaacttatttaagaactatctaaaagaggctttaataccatttattcaactgctgttctgtctatatagatatagatatagatatttgttgagaaattcactatcaatacttttttgtttccttctatggcaccttttctgattgttgatgttaatgtaaggtgaggtatatagaatgatagtttttccgttatttggaattctgtagcaag

SEQ ID NO: 76326 - DNA, 439 bp, Carica papaya
  Intron number 1 from transcript evm.model.supercontig_36.1 78 (locus evm.TU.supercontig_36.178) derived from phytozom e v7.0 (chr-ID supercontig_36; pos 1290104 to 1290542 reve rse strand)
tacccgatctctacaagctcccaacagtcgcccaagtttgtgatcaatctattccttcctttcttctcttatttagggattttgttttctgttatcttccattgctctagttttatttagccgcgactgctttttataaatttggcggattttggttggttttgaacagtgattgcgcattttaattttgctgttttgatttttatattcaacttttctttgttctagtgtagaaattgaaatacctggattattatttttttctcatatttggtaattttataattgttgacttttaaattcgagattacgtatcaaactgttataaaaatttctttcgttggttgtttcctttattaaattcttttcttgcagttgttctagagattaggatttatttatagctatgttttttttatatatgtttttttatagcaaa

SEQ ID NO: 76327 - DNA, 637 bp, Carica papaya
  Intron number 2 from transcript evm.model.supercontig_482. 3 (locus evm.TU.supercontig_482.3) derived from phytozome v7.0 (chr-ID supercontig_482; pos 29438 to 30074 reverse s trand)
ctctctcgattctaaagattcagaaggccgaacaggttattggtagtgtttatggcatcgccaattattatatctatttttcagttggtgatcatgaacccatgatcgaaagttagctttccctgacagcttgctatcttacgggttctcattgcattattctctgtgcttacccatggttatgacactcccaaatagtttggaattaacacttaaaactgagatttatgatcttatcctaatttaattaaaaatagcttccttatgagcctcatggtttcaatcctttgttttccaaatcgaactgaaaattcaaagccattaaatatttcaaatggtgtgcaaccaattgcaataacatgctaatgagctaactcattctagcaactccttctagattagcagctccattttgatttttttattttcagttgcgtgcgtgatttgagaagacaattaaatgattattgctagaaattgatataattccatgttttttggaactgtaattcagggccctcaagtttaaactttaatgtttatgaaattcaaatgaagcttcatcatataattgtcacttctgcctgtagttactgaaaacattctgttggacaatatttttaatgcagcacttcac

SEQ ID NO: 76328 - DNA, 750 bp, Carica papaya
  Intron number 1 from transcript evm.model.supercontig_482. 3 (locus evm.TU.supercontig_482.3) derived from phytozome v7.0 (chr-ID supercontig_482; pos 30115 to 30864 reverse s trand)
agacgacgccggaggacgtcgaggccttgcttgaggtatgagctccttgttttgtcacccctttcttcttctcgcttcgtttcctctccgaacattttctctaattacacccgacctggtttttgttatgctcggtgttttttttctacagattatttcatttattcattcttaacgcaattaagtggctgtaggagtacaaatttgagctctgaattcataatatgcactacttaggttttatattttcttcagttttgttcctgcttggttcgcataagtagccataaatgtaactctaactctcatatgttccaccaaagtcgttttggtttcttagttccctgctaattagtctcagaggtttattatatattttctttcttcagttgtttgcagccttgatcagtttccttctcggtaaggggccttattcccaagaaaatcaggaagtaaaataaatgataaagagttgaataactactgaggtttctatgcaagtatttgatttatatttaataattaaaagttttaatattctcattgctaacgttagatcatcatccctattaaatttcttgtttttcctcatcgctaggaactatagatgttagttttatcttttattgacttattaatttctagattgtaaattaatatatcctttttcggtaagagttgtattccctgagtacttatttggtattcatttggttcttgcctcatatgctcgacaggctgctagatata

SEQ ID NO: 76329 - DNA, 461 bp, Carica papaya
  Intron number 1 from transcript evm.model.supercontig_13.2 75 (locus evm.TU.supercontig_13.275) derived from phytozom e v7.0 (chr-ID supercontig_13; pos 2516088 to 2516548)
gtggacctgaggtctctttcttcttctctatatcttatttctgtttaaaacgttgatttggtattcatcaaattgcttgtggtttaaatggtctatttctccccctttgatcgatggtatttggggttttagattctgaactcgtgggaaatacagggataggtttatttgattggagtaccgtgcgaatgaacatccctggaaagcattttattctcccgtatttttttctgtagcaaatctggccaatctgattatgaatttaaaaggagttgtttattgattttacctggccaacctgattaaatatattctcatgatttgcttgtatcggttcactctctaggatttctttggaactggttttagaatttatctacgtttacgcttcccatttgtttcttagccgcttacctttagtattgagattcatttttgttgataggtcctcaagtgggagg

SEQ ID NO: 76330 - DNA, 909 bp, Carica papaya
  Intron number 1 from transcript evm.model.supercontig_183. 30 (locus evm.TU.supercontig_183.30) derived from phytozom e v7.0 (chr-ID supercontig_183; pos 292823 to 293731 rever se strand)
ccttgcagctctctcttctgaccccttacgtccaggtatcgtctgatctctatctgccactcgctctcacactccctcggtgtttgtgtctatcgcgatcgactaattgctcgtgaatgttttgttttatatgcattattgagatctgttaccgtcatggccttgcaactgaattaaaggaatagaacagttgtttgagaaagagcttaagttcgatgaatgtcggtaactttatttcatttcatgtaggtcatgtttttgaacttattggctaacatgagttcatcatttaagtggtttcacgatttgccggggaggaaaattagtagtttcatgtattctacgaatgaattttaaccagtaatgacatatattatcatgcgctttttttactggatgctccatggttgtgcagtttcattcatggtgtagcctgaaacccgtggcgatagtgtatcaaatgcttaactcgaggaatttcccaagagtattaaaacaatgatataactgagaactaatgttccttaaggggacattctccctatcaaattggtagaagccccttatccttttagcgggagacatgggcactgtgctatgcaaatataaatggaaactttaggtggaaactttaggggaacaaccaagaggatgttagagatagtaatttctcaaatgcctttattatgaacccgagtctctcacacagcaaacttgctctcctatcagagaatatctgttggaattagttgattcatcaattttatttccttatgatagcaagaatagattaatgcaattattaatcttattgtttattttgtcttgtttattttttgaaaatcttctctgagcagttacctaactttgattcacttgactgattaatgcagactcttggaataggac

SEQ ID NO: 76331 - DNA, 826 bp, Carica papaya
  Intron number 1 from transcript evm.model.supercontig_130. 58 (locus evm.TU.supercontig_130.58) derived from phytozom e v7.0 (chr-ID supercontig_130; pos 639287 to 640112 rever se strand)
cttcattggattactacttctgggcatcctcaagggtaagtcctctcagttttctggttcttgtttgtgtactctgagaaattatcctgtaccattgcaagaagtaatttgtttctattttgtatgagggagttttatcttttcttttcgctgatttgggtatagagttatgttaattataggttttgggttggacaaggaaagaaatttactatcacaagattgtttacgttgcttcttttctctactcttatttgcttcctttatttttgggttaattttcttgctgttagaaactattattatgatactagtgggttaatgttcttgtttgaggacgctgatggttttgatattctaaaaaatagatgtttttagactcttgattttttgttacggagtcatcctctttgttcaatggaggaattaacgaaccttgtggacaatttaattgacatgtaaatttttgtacatgagcagcacctctttggtgcctatagcaatatactttcgcactttttatttaaaaaaaataaatgtgggttgaattaactgtttttatgagaatcaaggtttggaattttcataacttcagatttggtacatgtttagtttcagtattagccaatagaaattaatgcccttgacgatgatgcccgtgctttccttttcgtgagaaacaaaatagcagtttctaactgtagaaacatgtttgtgtaatatgtttacaatccctttaccgatgaagaaaaatcacttagttttttgaatgcaatcaaacatggtgcaaaattatactttcaggtatcatattctgcccattgat

SEQ ID NO: 76332 - DNA, 724 bp, Carica papaya
  Intron number 1 from transcript evm.model.supercontig_108. 25 (locus evm.TU.supercontig_108.25) derived from phytozom e v7.0 (chr-ID supercontig_108; pos 285085 to 285808)
tcttggtgcacgattgaatctgatcctggtacagttctacctctttccctgaccttagatatttatagtggaagtttgtcccactgaattttattctccttttgaacggctttgaactttattaggtgtgagagcacgattaggttattattgatgaggatttgaaagattaatgtctgtctgggactagggaattgagttaatcaaggtagacagcggctaatttggtgtgtaataactaagtgtgatttggcagggatgtgaaaggtttcttttccccattaaactatatgaattggtagttttttatttgttgaaaaacttttttgagtaattttattgtgactcataggaaagtatgagctgctaatgcaggttataattttggcctgtaactaggcaagaagaagaaatgaagaatcgagttgccatgtatggtataaaatgtaaacaattccatgaacagtttttttataatttaaaaagatgtttggcatcaattgctgtaaggaaagataggtttagaaggtaatgctttaagatttgatggggcaacttggtaggtttctatggttatttcagggcgagaaaaatattaaagaagaaagaccattcccaagattgcccaataatcatttaatagcgagcaattataactatcaagaggtggcttaaacttttttatggtctgctttcaggtgtgtttacagaactgatacaacaa

SEQ ID NO: 76333 - DNA, 902 bp, Carica papaya
  Intron number 2 from transcript evm.model.supercontig_108. 25 (locus evm.TU.supercontig_108.25) derived from phytozom e v7.0 (chr-ID supercontig_108; pos 285812 to 286713)
caagtaaaaggtgtacaggtaactcttgttgaatttctcttattttaaacatgaacagtgtaaagttcttttgacaatttattttagttctatgttcttcacttatatggtgtgtgttaagagtactgtaggaggatcaatgatggttcactaaccgttacatctctaatgagagagtgggaacctcaatgttttttttttttttaaatcagaccttatttacataggcagagccttcttttcgtcttgtcaataatacagactttttctttaaaacaaaatatgatgtaagtaataatttatttttttctttgtttgttcaacagtggatcatgcacgtgaaaagcctctctttaggatgtctaggttattgtttgtagtagttctggtgttttatttctctatttctaatcaaattaactgttgagtttattaaaagaaaaaaaaaagtcaactgttgagtgctgaatgaataacaatccagactttttgttcgagtgtttgcaaagagagattgaaagtaaaccccatcaagctgtaaagtttctttgcctcaaattgaccagttagttgaatgatgtattcatctttatgcatctcttgtttctgataagcagaatttttattatgggtaatctgggcttagcttttgaagttagagggtttctgctagggccccatcttgtttctttccgatcagacatttttttgggccgactgtttcatttcatcataaaaaaacttattacctcctacacttgtctagtcactattgctagaacatttaagagaaaaagaaaaaaacaattgcttcctttgccacccccaatcagcttcctctatatgatgccttgacatgttttgcaggttgaagaattgtattcattggaccttgattctct

SEQ ID NO: 76334 - DNA, 486 bp, Carica papaya
  Intron number 1 from transcript evm.model.supercontig_3234 .2 (locus evm.TU.supercontig_3234.2) derived from phytozom e v7.0 (chr-ID supercontig_3234; pos 6733 to 7218 reverse strand)
tactcgccacaggcggtgctgattttgatatcagggtattgatctccgaaattactcatttctctctgttaattcgttttcccggacaccgccttttttggttttattgattaatttgagtattttttggttctctggtggtagttggcttgtttgatgctactttgtttactactgttttgaattgcgctgtacttggtaaaaaatgacacgatggaaagtgaggcgtaatggatttggaattttcgagtccttctctcttttcccccctctgttaggcatttgaacaaagaagaggaatgctggtgttgctttctaatttgagaataatggactgaatagaagcgccatcttgaggcaaatttcttgcatttcgtagtacatcaatctaagtattattttgatgatattcgttgtacatcaatgtgactgttcctctgtttttcttcagctttggctaattaactctggcgaacagaagaaaat

SEQ ID NO: 76335 - DNA, 735 bp, Carica papaya
  Intron number 1 from transcript evm.model.supercontig_48.1 02 (locus evm.TU.supercontig_48.102) derived from phytozom e v7.0 (chr-ID supercontig_48; pos 627687 to 628421 revers e strand)
tctgctcgagcttcgtgctcccattcgcatctgtggtcagctctctctctctctctctctacaaatatatgtaccgcatctcttcttttccttcttgatggtgattatcactatggtgcctggtcatggttgtgatttcgatttgattccttttttttttttgtgtttctgtttgtgaggaattggtgattgaatttgtgtttggaatttgtgagtgtaaaagtttggtttcatttttcaatgatctggtgattaataacgaattgaagaaaattttccatctgggaatggatgaatctgaattaatttgctaaaggggattcatttgagcaatttgtgatttgggtaaaattttttagcccggattgaggcttagttttcttataaaattctcatttatgtttgggtaaaatttttgatttctcttgagggatggaaaagatatatttgttgttcttattgtacattacgggtcaatattgatgtgctatgttggaattgaaagtgtcttctgttatctattacaaataagcagaagagaattgaggagaacttgtctccttctacttatagtttttatgaacttttaggaatcttatctgttatacaaaagtaatatggagaaatgttcaaagaaacgtggctaaatagcagcatatctaattgatacgaaatcttttggtattttctcagcatggtttatctaacattctattccatgcacaggtgacatac

SEQ ID NO: 76336 - DNA, 933 bp, Carica papaya
  Intron number 1 from transcript evm.model.supercontig_21.3 2 (locus evm.TU.supercontig_21.32) derived from phytozome v7.0 (chr-ID supercontig_21; pos 420090 to 421022)
gaagctggtggccttaattggttagtaggtaaggtgcgcattttttcaaatttcttggtagaatattgacttattaatgcacttagaagcttgtaatacatttgatgcattcgaaatgctaatgcacatctaatgcatttctgtataaagccttgtgcgagtgcttgagctcatttttagtccactaatcactgctagggtggtttagttggcatagactttgagacagtcgctataggattggctgattttgttttgttttctattgtgaaaaggccttgaactcacttgagtatgttgcttggttgtaatttgtgatccatgttttcatgggatctcgtgatgcataggatttctaagtgcctaagttgttaaaggagctctattttttcttgggctgggttactgtaaactaggcatctttgttaggaaaaatacatagagagccctttttatttcttctccccccatggtttttgatatgagagtcgaatgctttggaaggatttatgtttgtagttttgggcttgttgtggttggagagaaatgcagagatttttaaagactgtttcttatctcttctgcttatgtggcaaaagaatgacatctctctggactaaggctcatgggctctagaggaccatctctttcactatcttgtaaattgcatattaatttttgttttttttttctcactttgatctttgttatagggatttctttgacattttttctcatctttctctgatgatatcttttccatttaggaaaaacagcttcaagcttcagaattaaatctcatagtgaataatacttctttttctattaaaaaaaatctcatattctgcgatattcattttcctgtggtattttcattaacttcttttgagttttgcttttccagaattgttgcgtgtcatcaggaggttgagc

SEQ ID NO: 76337 - DNA, 303 bp, Carica papaya
  Intron number 1 from transcript evm.model.supercontig_1441 .3 (locus evm.TU.supercontig_1441.3) derived from phytozom e v7.0 (chr-ID supercontig_1441; pos 12640 to 12942 revers e strand)
atcgttttggggtcaagctccttttccctcctaaggtaccactttatgcaatacacaaaagattgctttataaccagatgaaatcgaacatgattgcgattaaagtaataataagctgattcctgcgagttattttaatttttttatgtgttatgctacgactatttatgttctcgttaataactctgttgtaatcgatgagtttgatttagatgtgctatgaccatttgtttttcttctaaatgtttgttaattatttttgaattcctgtaattcccaggtggttcatctgtacagaaggaa

SEQ ID NO: 76338 - DNA, 673 bp, Carica papaya
  Intron number 1 from transcript evm.model.supercontig_26.2 06 (locus evm.TU.supercontig_26.206) derived from phytozom e v7.0 (chr-ID supercontig_26; pos 1518663 to 1519335 reve rse strand)
ccgttcgcttctcctcagtatgtcttcacattaattatttatttttacatactcctccctccctttctgtagctttatcagactatttcttctcgttgttctctttgtgcttctttccatcttttctcttttatttttgtttttaaacttcttctaaatgatgaacaatttgtacttgtcaaattagaaaatttatgatgaacaattgatcgaggaagcttcttctaaatgaattttgattttgtacaaacaagagaactatttgtagcttagccatatatatatcaatgactgatctcagtttatgtatttattctttccgtttccatgatcttgttggcaaggaagatccacatactatttttttcactggctaataataatatttgccttggaacggtggcttttgtggcaaatgacttttgagcttgagcttggtgatcgtatttagggcacaacctctcaaagatataagctatccattatcagccagtattgctattttccattctcacctgtatatgattttacttcccaacttaaaaatgtttccttctgttgtgggatgaaaagattattttatattaagatgactgtggatttggttgtaaagctgctttgcgttataattcttgcagatctccattcatttccaagcaagaaaaattctttc

SEQ ID NO: 76339 - DNA, 672 bp, Carica papaya
  Intron number 2 from transcript evm.model.supercontig_106. 105 (locus evm.TU.supercontig_106.105) derived from phytoz ome v7.0 (chr-ID supercontig_106; pos 896037 to 896708 rev erse strand)
aagagaggagtaaaggtaatgtgaactaacctttttcttgtttaagtatgtttgaaatgcatatataggaagctattctaaacatcctctatcagtagaatgctttcttcttcaatcataagtttgtagtttttgttgaaaaatacttaaataggaggttatgagaaacttaaaagaacctaattagaaaataagcagttatatatctgaataaagatgcttaagtagttctattttagtttagaaaacaaatatatgatggtgaaaaagtaattgaatataaaggaattagtagtagttcatttataattcaagttgtgacatttggaattgtcagccagaaaaaatacaaatcttctggttgtgcttttgcttgtaacaccgtgtgaaaatcaaattggagaagaaatcctatatcgaattccttatcttgtgtctctttgacttattcatttgtaattcaagttgtccatttggagttgttagccaggcacaacataatatattggtcatgcaatcctgtcagacatttcagagaattattgcttgcgatttctcaattatgtagagatcactcctgatgggagtattacagcatttacattgcttctcttaattataccatcttacatattgtgcagaagaggcttctgctgttcattctggcctggt

SEQ ID NO: 76340 - DNA, 418 bp, Carica papaya
  Intron number 1 from transcript evm.model.supercontig_111. 56 (locus evm.TU.supercontig_111.56) derived from phytozom e v7.0 (chr-ID supercontig_111; pos 1174575 to 1174992 rev erse strand)
tgatattgcagataaggtctacgacattctccgtgtgttcctttcgttcttcatctttacgcttgtgcgttaactggttgttgaaagaaaccaaggaagtgaaccaaaaaaattttgaatttgcgttggatttgcttgcggagaaattaggagtttgagattggcaaagtgcgttttcttttccgttttttattgggggaagggggagtttagctgccttttttctgcaagcaaatagagaaatgggtttataggcttctttgaattgctgatatgttctttttttttttctgcgtgggtgttctccagagtcaaacatgtctaatgattttgctattatttttcgcgtttaagttgacttttttctgggtttgttttggtaggacgaatttgggcgggacacaatatactgagattt

SEQ ID NO: 76341 - DNA, 379 bp, Carica papaya
  Intron number 1 from transcript evm.model.supercontig_28.1 04 (locus evm.TU.supercontig_28.104) derived from phytozom e v7.0 (chr-ID supercontig_28; pos 1491951 to 1492329 reve rse strand)
gaaaacgaaagtaaaaaggacaaaactgaaaagaagaaggaaaagaaaatctgagggaggaggaggagaaaggtttcaggtaaacggaaacaaaaagagggaaaaaaaaagtaaaacatgaagaaaaagaaaataaaaaaaattaggcctggaatgtgctctgttttgatctagcccaatcacaaagctcaaaacaggaaagctagaagcacgacgtaaaatcaaaacccggattaagattttaaatccaggactgaaatgacgccgtttctaacattaaaaagacccacaacgccgtttctaacattcaggaaccctcttcttcgtttgtcctcttctttgaaaatttgcaggcgcggtctctgggagaggaaaagtg

SEQ ID NO: 76342 - DNA, 707 bp, Carica papaya
  Intron number 1 from transcript evm.model.supercontig_55.1 17 (locus evm.TU.supercontig_55.117) derived from phytozom e v7.0 (chr-ID supercontig_55; pos 714045 to 714751 revers e strand)
aagaagaggtaaattaaaacattagcatgattcattttttctccttaaccaaattcactggaatctgaaatgtaaggttgcctggtgtactgtcaccaataagtttctactccatgttctcattgtactgacacatagcaaatcatttgaactcgtttaagtgaatttatttgttggagaggtcagcaataacgataacaggaatttgccaatcttcagaatcagatgttctacatctgaattgagaaaattaacaacgttgattctgggattgagaaacttatgtctcaggctaattttagactacttggttgcctcctttggccagttcttcgcatggaaaacctgcctatatcgtcaataaaatcatctccattaattaggttgggctaaagccagaggaattttttgagtaaaacagtttgaaatttgtgaggaagtgtgtggtgggtgttaaatacctgtggttgtaagaatgccttcccctacctcattcataggagccgaactacgaaaaatatcattgcagagattgaatcatgaccaaatagttaataaaatataaaccccaaattcagattgtgtatatgcatccaggagcctcatcttagtatctttagactgcatattcttcctaaaaaactttccatttaggaactacttccattacaggtgctcatatttccttcattgccttctcagataca

SEQ ID NO: 76343 - DNA, 955 bp, Carica papaya
  Intron number 2 from transcript evm.model.supercontig_380. 6 (locus evm.TU.supercontig_380.6) derived from phytozome v7.0 (chr-ID supercontig_380; pos 35327 to 36281 reverse s trand)
gttcacaaagggaacagttgaaaggtttaattcttgttttttctcctctttctaagtatctttgttttatctcaaaacttgcacatgtttctgtattcaattgagaatagttacaatttattcatctgatttacagaggttctattttgagttttcgtttgcatttctttcacgaggatatttcacatatttggcatgggcatcgcaattggcttctattgaatactgtgggagtctactttattcaattcattgttgtattttctttcaaaagaaagaatcaattacgaactgatatatcagacaatattggaaataatttatatcgtggatacttatcccttcttatcactccttcaattcttatgggatattttaatataaaatatgcatcaaattagccttgttgatattgagaagaacaataattttctctgccatttgagacctcccaagactttcccctatatgatcaaggagccgattcatagtgatccgttttagttgcagtaagttctgggtaaaaacctacaaatgtggcagagagttctaatgtacagaaattcagtgggatgcaaagggatttggaaacagagttttggctaattggaggatctagaagttagaacggggtatcagagagagccgtgaaacaagattctttcaccatcctttccaagatttccattgattttatcaatgatcattctgtgatatgattccacctacgtatttctttacagaactttttccgtcaactgttgttgcaatcctatcagttcagttcttacacttgaattttcctttatgttttaaatttgattgcaaaactctagctatgggtaatatatttatccttttaatatggagactattcctcagcaatgtcattgatgactaatctctttctgtttttgtaggttcgtccgttttgtaagtactccagaggtcttgg

SEQ ID NO: 76344 - DNA, 697 bp, Carica papaya
  Intron number 1 from transcript evm.model.supercontig_1498 .1 (locus evm.TU.supercontig_1498.1) derived from phytozom e v7.0 (chr-ID supercontig_1498; pos 8216 to 8912)
accgcttgaacaaaccggctgttcagagcattgaggtttctcctctcttcctactttacttcctttctcctcttcctagaaagttactcttttttcttctggtttttcaaatgcctgggttttttggtctgtttggttgctgggaaagcgagagaaaattgtgtatcgttctctttcgttttctgttctactatagctgatgtctccaacatttgaaaaaaaaaaatgaaggaaataatcttaaagctttgcttttttgggttctacttttgccttcagaatgttggatttgggctaacgagatctttgatgttttggtttgagtagttttccttgattttctcagcaaacaaacggagcttcaatgcaaaagggcttttctatttcctgtaaaaatataggtcgtgtgaagtaatcattttggttattctccttttctctcaccttctctctcatgttttattttttgcagattataaaactaaaaaaattattatcatcatatattgaaaaaagatgtaataatgagaggtcaaatttgtgttgttgtaataacatttaagcatttccatcgttttgactgtttaagaacactctagcttaactatgaatgaaatttcttggtttgttcaagtgactggtgaggaatataaataaagttaactcctttgattcctgatgcttaaacagagcccgg

SEQ ID NO: 76345 - DNA, 723 bp, Carica papaya
  Intron number 2 from transcript evm.model.supercontig_17.2 39 (locus evm.TU.supercontig_17.239) derived from phytozom e v7.0 (chr-ID supercontig_17; pos 2948510 to 2949232 reve rse strand)
ccaagtgtcctgtaactgggaaaagaatccagggggtatgttttgaattctttgttcatgctatccctagtgaatgtttaacatgtatgtcctccgtctgacatcatattttagaagtatctccatgtatgggcttttgtgtaattcacttaagattaattctgacctccttcctgatcatgttttgatgattgtacagagtataactcatggtttcatgaagtgttgcagttaagcatgatgatatgtttgtgttagcatatgcatatgtgttgccactatgggttatggctgaaattaaggactgcgaaattgagtttgttttggaggcatcaactttttattatagaggaaatcaagatatatatatttgtattttttagagtttgcgataagactttatggcttcaaatgcttttcctttgatgagcatcatctgtttccatttatattcttctagaaatttacagtcagttgtctttatattgttcaaaactctctctccaaaatgcaaattattgttggacatgttaaagttggaagtagtaagttaccttagtttcagtagtttttttcatagttgaccactgcagtttctcaattctcataaaaagtatactattttgcattacatctttgcaatatggtgactgcttagagttctcattgaatttttcctttactacagattcctcatttgagacctgcggaatacaagaggtc

SEQ ID NO: 76346 - DNA, 311 bp, Carica papaya
  Intron number 1 from transcript evm.model.supercontig_41.1 00 (locus evm.TU.supercontig_41.100) derived from phytozom e v7.0 (chr-ID supercontig_41; pos 2110900 to 2111210 reve rse strand)
agagcaactcctgcggacaggtgaggcttgattgagtctgttaatatgcacgttccttttcttccctttatctacagcatttggtttagtctagatattttgggtttcttattggaatccgctgtgaccttcggatcttatcatcattccctctttttggcaaccttgtcgtcaaagtaggtaaattgctcggacagatcttgtgtattctcccaaagtggcgtcttctgctagtacattcttccatttgattaaactttcttttctaaatttgcctccctttttaacccagcgagtatccagtattgctt

SEQ ID NO: 76347 - DNA, 641 bp, Carica papaya
  Intron number 1 from transcript evm.model.supercontig_42.4 6 (locus evm.TU.supercontig_42.46) derived from phytozome v7.0 (chr-ID supercontig_42; pos 389807 to 390447 reverse strand)
tttgtggttggactgctcttcattgggctgcattctgtggcaggcaaggacctctaactcagttttctttgaccctcttataactctaaatttcctctttttttttctttttgccgggggcgcgcgaaaatttgacaaaattctagtttccttttgcatcggtttggaaggcagcttatatgtttttttattagagccttgaactcaaccaactactggaattctttttcttttgttatgtgaagtgaattgtcatttaatatagtccatctatactaaggagtctactatctatgtagaaaggtgccaaaattttctaataatttatctttatcatcttgcattcctttctggcaagtggaaagtcaatcttgtataatagaaaaataagaaacagtattaaccaggcaccaagggggtgccactcctattaaaagagaagaggttggatgtgctaacaaattaattccaaggtattgaaatatgtccttatttaatctaattttttgatatttttgtgatgatttaaatctagttttctaatttggattgtgtttgacaaaaactagttatctgaacctttcctaactttggattattctgaagtatagggagcagacagttgctatccttgtttctct

SEQ ID NO: 76348 - DNA, 356 bp, Carica papaya
  Intron number 2 from transcript evm.model.supercontig_195. 7 (locus evm.TU.supercontig_195.7) derived from phytozome v7.0 (chr-ID supercontig_195; pos 50061 to 50416 reverse s trand)
gagcctgacgtgcccagaagggcccccagtgcaaggtacattgttcgcttccttcactttcttcaatggagtttgggttttgattgattatcatatgaattgagtgtttggagagtgatgaattctcttttattatgatgagaatgtcaaattcttgcgaggtttgaattgttctgttgacaaagtggtgggttttggttaatggaattcttggaactgaattgcgaagcttgctgcttttatttcatctcggttgttaaattggcttttcaaatttctgaaactaagaaaaaatagtcaagtatgtctcttttgcaattagtttgttttttatttgttgcagtgatttctgttaa

SEQ ID NO: 76349 - DNA, 131 bp, Carica papaya
  Intron number 2 from transcript evm.model.supercontig_14.1 01 (locus evm.TU.supercontig_14.101) derived from phytozom e v7.0 (chr-ID supercontig_14; pos 1206083 to 1206213)
tataattttccacagagagcgaaagtaaaatttatttctatctctttctttgtttccaaacacctttttagttttgaatattattttgagatttctttgcttctttttcttgttttgtttttgcagaacga

SEQ ID NO: 76350 - DNA, 829 bp, Carica papaya
  Intron number 1 from transcript evm.model.supercontig_122. 18 (locus evm.TU.supercontig_122.18) derived from phytozom e v7.0 (chr-ID supercontig_122; pos 467356 to 468184)
taagcggcgcagagaggaaaagaagaaagagattggttagttttgtaattgcatttgtaccgtattatcccggtaatatatggtcggatatatcacttatttgattggtaagaaattcagaagagggaatttatggttttgttgttaattctgatgttgtgacctctagactctaataagtggatggatatatttaatttaggatgttatttcctaggaaatattttcgtctacgatgcctagctttattgtttgattttccggggaattttgcatatgtgatctttgtgtccctaggttctaaaccaatcagtttgtgttatcagttgaagggtgacgattgcatgcagcaacgttaatttatttttataagagagtgtatgtcaccttttataaattgagcagagaggaacgtggtatctgcaattttttcttgtttatactactattaataacagattgtagactcttcatacaacaaagaatagtagggattagtttcccaaaaaaaaaaagtagggattagttccccaaaaaaaagagtagggatttcagaagaacaagaatcattagttacgcaaacaagtgccaaacggacatattagcagttccctcaatcacattccatgtttcattgttgagttctgacctatttggtttgagttcccacaaaataattcaagtgtatatataaaattttattactaataatatgtatatatttgtttcagtttgtctttagactttggcactgcagggcttcaatttagtttcagttaatttgtcatttcttttactggaattaatttatttttagcattatccgtgg

SEQ ID NO: 76351 - DNA, 755 bp, Carica papaya
  Intron number 2 from transcript evm.model.supercontig_50.1 9 (locus evm.TU.supercontig_50.19) derived from phytozome v7.0 (chr-ID supercontig_50; pos 295957 to 296711 reverse strand)
acaatcattgagcttcatcaaaggcttggaaataggtgggttcttattaatttttttagaaaatcatttttaattaaatttaggagagaaaacccatatcaaatagaaaatacatatatatatatttaattttggagattgagaaatcttgatttctgatatctcttatccttttcttttgtctcttttttttttcctccacaattgaataatatatatatatatatgtatataaaatattagggaaacaatgtgggtcggctgagaagattcctgctctgtgaccctttatataataaacaaaaatatatgtgtttcagtttcatatatatatatatatatatatatatatatatttcttttttcaaaagctaacaaagcttggcaccttggttagtgcaaattttttttttttaaaagaaaaaacaggattatcacactggtctataatgttcaaatctttagaataagaattatttttaaaaaaataataataatttaattctatatagaaaataattcaataaattatacatatatactcaaacatattcccgacacataagtccaataggttaaaagcatgcatgaaatataaatttattaaatattttatgaaattatttttattagaaataagatagtgactaccaatccttgaattccaatactagtcaattattcaaaaatttaaaattatataaaaattatataattaattatatgtattctaacacatttactttcaatgttag

SEQ ID NO: 76352 - DNA, 672 bp, Carica papaya
  Intron number 1 from transcript evm.model.supercontig_6.23 3 (locus evm.TU.supercontig_6.233) derived from phytozome v7.0 (chr-ID supercontig_6; pos 1863292 to 1863963 reverse strand)
gtcatcagtcacaaccccgataacgacactaccaggttaaattttgctttttatcgtaatttttcattcttcacatagttcattttgttaattcgtgaattagtttataggttgatggtctgttggatatctgtttaactttgtttacttagatatggctgttaccatctgatttgatcagctttgcttagttttgatgtttctagggttagcgtaatctattagttgctgatgaataagactagatgtttaatctagaagtatattctttacctcctgttatttattgttagtatctggttaatctgcaactagttttgcttgttgctattataattctctatcattgtgaaagtatttgattggtggtttgaagggagtctgattggtaatttattgaaaatctgatggagatgttgtaaaacctgacgattgatactttagctgctaatgtaattgcgaataagaatgggcttttgttaaacatgcaagttttgcgtgaactgataactctcttggcacctcaccgtgctttgattttggggtttcaaaacctgttatgaggactccttagagccaataaaaaaagcaacttttgggttaattcatcccaatatattgttctgttttttggcaggatcaagctcccatctggttctaagaagattgttc

SEQ ID NO: 76353 - DNA, 1031 bp, Carica papaya
  Intron number 3 from transcript evm.model.supercontig_19.1 45 (locus evm.TU.supercontig_19.145) derived from phytozom e v7.0 (chr-ID supercontig_19; pos 933543 to 934573 revers e strand)
tatcatcttggggttcaaaagtaagctttcttcttgatttagatgtgttgagatatcttggacaactaatggtagatgtttaaacctctaacattgcgtttgattcaacttaatttatattcttattcagtttgtagattctagctatatgatcaataaatgataatcatactttatatatttgatctataattagatgaactttcctcgtatcttcaattttttaaccatgattttatagtctcacctctcaatgaaggaattggaagaaaatatgtaattggaattggacatgagcttaattttgaattagactactacttttgtttgaattttcattggaatttgaaccaaaatattatagctactatttgttatatcagtcttatgtttgtggtgcctcttttcctaaagttatatgtgagtttaaatatttatgcttttgaaagtctttcatgcatcatgttgttctggaaagaaacagaagatagttactgtgttcttttatgtctaattgtaatggcagttagtttaatcccttgttcactggggaaattgtgattttattgcctttatataacatagttaattaggagggtgtgaactacttcgccaacacacttcttgaagctatgctgcatgcagcagccaaatgctgtacacaagtttttaggtttcttggttctatatcaaaaagacagtttggggatgggttggcacaagcctccacaccttcttgtatttatgatatttcatttgattattcatgaagtcccttttctttttgttggttgaaaaacttttgaatggagggctactcaccttatttgttgtgagaacaaaggattaaatatagtcttaaatttaatatttcattaaattattctagagttcacttatactgctacccatttatttattctagagtttgtgttagaggctattcctctaaatacaaccttgaggttactcaccttctgtaaactaattatgcagccttgcagagcctcttgataatcttcagaaagcgt

SEQ ID NO: 76354 - DNA, 1023 bp, Carica papaya
  Intron number 1 from transcript evm.model.supercontig_44.1 0 (locus evm.TU.supercontig_44.10) derived from phytozome v7.0 (chr-ID supercontig_44; pos 87132 to 88154 reverse st rand)
aaaagataatttggaagatcacctcccaaaaccttgtaagtctttctacctctatctctatacctatatatatatatatatatatatatagtgattaggggatgttcggatttcttcgaatactcaagagtgtttatggactttttagtacctaggcttcgaacattttttgaagttttggatatctagaggcattttttagtttaaaaaatttctgaatatctaattaagtatatttacactcataattagaaaatcatatgggttgaagaatgtaactgcgaatattatattttttttatgaattagaaggtgctatcatggttgtattacaatattaaattacaatgttaacgattatgtttagatactaattacaagactttttatactcttgtgcacctaaaccctgaaataagaacataattaaattttgattggaacagggtatgtcattagtgattgcttgacctacaattgcttgactcttgtagtgtatagtgtatatggaggtggtagagatacaacaatgtgacattgtcatacacttttttttttaattttctaaaaatgttatactgtttagaaggttaatatgtcatcgctacgacaaaaatttttatatctgtttcagtattcggagtaagaattgcaatattagaaattctacttaactagaatagaatacgtatggagagcttagacatgtaactaaattctatttgttggaattcatgtgaaagttatgctagtttaattatgaaatgttgatttttttttttaatgagattattccaatgaaattgaaatatattatggcagtaattgtaaaaacgttttcagaagatcaatctttatggtttggaagttattatctcaaagttaaatgtgaattggtcattggcttcaaacatagtcttagtgggtttttttatgtcctaaattaaggatttttttttttttttccaaagacttgaaaaggcgaatataaggtaaattgttttggtgttcatctaactagat

SEQ ID NO: 76355 - DNA, 836 bp, Carica papaya
  Intron number 3 from transcript evm.model.supercontig_13.1 85 (locus evm.TU.supercontig_13.185) derived from phytozom e v7.0 (chr-ID supercontig_13; pos 1726978 to 1727813 reve rse strand)
gccgacgaaatgtaagtaaacagttttttgtattatgttacatggatttagaatttcccccttcatttgcaaattacttgcgggtcctcggatccttctaaactggtgctgcctggtagcagaacttacaataatctacccattgagcaaacgcaacttgcccttgagaatacaagggatgatcgttgtcctttaaaatgctcctatgagatgcttaagtttctgtaaagttaggataggttgctttctggtgaattagatttccttgtctcctgcacttcctgcaattctaattgagagaaatcaatacttgtgttggttctttatcagacagcaccaaaactgctgaattttttgggggtgttactaacattttgatcacaatgttatgaaggtcctacattgtaaacgcgcatctgtctgtttcgttccaaaaatttgtcactggattctatcttactttatactgaagcactagaatatccttaacatgtagaaatagataataaattttcatatttgaatttattttgctcctatgtcctatctagccatgaattgggaacccatcaatgaagcattcaagttaaggatggaactaattgaaacagtaaagatcttatcataagtgaaagaacagaacagaacttaaaacgctatatgttgtttcatctcgaaaggtttctgattggagtacttgggaattgactgatttctttagttttgcttttcttccatacttgggaatcaactgacttattaggttttactttgttatatcctgcttcatgaaaatgttaatattggtttattcaaattctgtcagaaactcggag

SEQ ID NO: 76356 - DNA, 840 bp, Carica papaya
  Intron number 1 from transcript evm.model.supercontig_34.1 84 (locus evm.TU.supercontig_34.184) derived from phytozom e v7.0 (chr-ID supercontig_34; pos 1680792 to 1681631 reve rse strand)
aaagacatcgagttcttcagtaatgaatttattctctaattttctatttaatttcatctggatgtgcttagtctgctgatttgactgtataggttgcccattctagaaattttgattattttattatgtgggaactgtgtttagattagactgaaaacactcttggagaattatcatgtggtcgtcttctaaaattaatgtcctctttacgtcatactaacaccctgaagcagaaatcttaataccatataaatctggttagaatttcaacaatggaattgcagtgcgtataaagtaaaaccctttacctggttagcaaatgcgtttactaattggtaaagcatttgataaatcccaaggagaattgttagttcatcagctagagttgaataaaattgtgaatgcaaatcattattgtggaaaactttcttgaaagtatatatgctttgtatgcatccaaagtgtgattcatacatttttacttggcaattaatttagggtacaattagtttagctattgagaatttaatttcttttctcttggaagacccagtgatgatagaagttcctagtttgaaagaagctgaggatctgaatctttcaaatctttctgaaatatgttgaacttgtctctattattcaagctgaaaagtcatttagaaaattctttcttccatctagtttctttcagttcctatgttttacttgtcagttgcaagtgttttcccaaattttcttttccttttggacctttcaagcatcagtgtttcactccatcatcatgcttctgctattcatcctggctcttacttatattgtgtgatttcagactcgtcacat

SEQ ID NO: 76357 - DNA, 378 bp, Carica papaya
  Intron number 3 from transcript evm.model.supercontig_40.6 6 (locus evm.TU.supercontig_40.66) derived from phytozome v7.0 (chr-ID supercontig_40; pos 1063941 to 1064318)
gctagtgagcttctcttatgaagttctaagatttagaagtaccaacaagtttaatatagtttgattagagagtatagaactttatttttttcaaactctaacactttgagtatcttttcatgtagagaaaaatcttagctaagaactttaggaagcttgcacttatttgactcagtttgttgatgagattgaaagaatttgcaacttcattagattcttatattcattttctaaattgttgggctatttagaattttatattagtacattggtgttatagtttttcttttttcttctttccaccgggaatttttaatcctttctattaatgcattaataacagatcttaattcaattggtggcttggtcccccttctt

SEQ ID NO: 76358 - DNA, 1052 bp, Carica papaya
  Intron number 1 from transcript evm.model.supercontig_18.2 20 (locus evm.TU.supercontig_18.220) derived from phytozom e v7.0 (chr-ID supercontig_18; pos 2460156 to 2461207)
gcgcctctgaatcactcgctctgcagaaactggaggttcgcttatcgggaattccactttttccttctttatcaatcagatcccctccttggccccgactagtttccctcttttaattacttagctgccgccattgcttattttctgtcttattggtcagttggctcctgatgtgtaaatagttgaatttggatcccccattgtcggtgtcttgcttctgttttctttcacatcgttgttcctcaacattgctttcagtaatttttacaggcgaaacactgaatttgtttttctccttgtaggtcgttattgtgctgtaacgaatacgaagatgattaagctttagcactaataggtgatacaatgagttaaaagagttcaaatcatgattaaatttcccttttgcaaaaaataaatatataacctagcatgtatccacacactcacggctgacaatgaagatttaaattctaaacatattgcctgattccatgggaattaattagttttaaccagttattccgaaaccttttttgaagtggcagaagaaaagctctgttaattttatgatctaacatacttggtcttttcctggttcactatcaaatttgttttggtatatggacctgaattattaaatgtcctctatttgtccaatcttccagctaaatgtctttttcaatctgatagcacgttcaaacccacttaaacgatggcgctgtccttcacatgcatgttgttattcttttaaaagggtagagcttactcctgttagaagatccaatatgtcagcagtgtccatgcatttttaagaactttttaaccattcattacagtgataaagatgttttacttttcctagtattatgttgtctggcacatccctaacaattcaaattgtttccagttatagttctcattttcattaggtgttgacgtctggagttagtaatgcaatttatgatattgcagaaaggtttatgtaccatgcactgaattctgattggtaattgctaaccaggaatacggaggcaatctcagcgacgctgtga

SEQ ID NO: 76359 - DNA, 844 bp, Carica papaya
  Intron number 1 from transcript evm.model.supercontig_18.1 36 (locus evm.TU.supercontig_18.136) derived from phytozom e v7.0 (chr-ID supercontig_18; pos 1191260 to 1192103 reve rse strand)
cccgcaagcgcccccaggtacgttttgtttattaaatcgtagtttctgaagttagtttatgtttgaattgaattattattggcttcttgtcgttttattggttttcattttgtttctggtcataaatacagcggcctacaaccgtaccttggagtgtgattttttttttttcttgtgaatattcacttggctaagtttgttttaccagtgtttctagcaaggtgcatttactgagaaccatctgttaggggcaaaatgattccttaccctaaggtttatcagagaagggataaagaggaataatctcgtgtaattgcttatctatatgtattagtttgaatgttattatgtaagtttatgtgtgtgtttaattaaatgttaaatatgtattagggtgggaaataagtctatcataagacaagggtagtttagataattctggaaattaaaaaattatagaattaactaccctctttgtatattatatcctctgctctgggagaaaaacatcattatctctgaaattattcttgaatgaatagtacccttctactctagatatcgtgtggttctctctattgagagacccctaattctttcttaatttcaaaagatagataaaggtagataatcaaagaaaaatatccttctatctactgatttcgttgtgaactataagtagggactgtaacaaattagtatcagggccaattgttatggtgatctataattttatgtttgaaaaatttcctgcaatttatcaagaggataggggggaaggaaaaattaaagtgaatttttggttggatggttggaaagttgtcagccagaacagtcaaaaaag

SEQ ID NO: 76360 - DNA, 925 bp, Carica papaya
  Intron number 1 from transcript evm.model.supercontig_116. 53 (locus evm.TU.supercontig_116.53) derived from phytozom e v7.0 (chr-ID supercontig_116; pos 510005 to 510929)
aggaagagctttgccaacctgcaccagggaccaaggtgtgtgatgtaattcctagggttgtcttgattgttatttttagtccttggttgtgtttcattgaacacttgccctgtgaatgttcttatatgaattactatttctgactccaacatcaaattttttttcctgttggattgttaatgagaaatattgctatttgcgtgatatctgccggtcatcttgattgtgtgatcctctatttattggtaatatattctgttaaattttcttcccaaggcattttatctatcagtttgtgtgagagggggtctccttgattttcaaatgatagctgtgttctactgatattatatgtttcattgtcattcatctggagcaagataaaggcccaggcctatatccagtcaagcttagggttagcggtagattatcctattcaatgattaaggttaaaagtcataggaaaatttgtgattggtgtttaatggctaccaaatggtagtagcatatatgtataatattttttttaaataaaaagtagtctgtatattaacaatgtactctaacaaaaccggagtaccacccaagtacaaaagatttacaataaaattagtgactcaacgttattcccaaaagcctcatcacatataatgttgtgacctctaattggatagatccaaaataaaaagctcatcacatataatgttgtaacataattggatagacccaaaataaaaagtagcatatatgtataatgactcccaacatttgatttgtgccaccattaaaatgtttaacttttttggttgctacaaagttattgccagacctggtatgttatgagagttagagctatttcctacattctgatgtggctatatcttttcttcttttgcagccaaggaaagcagaagaaaagcagtga

SEQ ID NO: 76361 - DNA, 1014 bp, Carica papaya
  Intron number 2 from transcript evm.model.supercontig_133. 9 (locus evm.TU.supercontig_133.9) derived from phytozome v7.0 (chr-ID supercontig_133; pos 482309 to 483322)
aggtattgattgtgatctctgtgtggacgttcagtattgtgtgctaatatttatgttcttgaaatgaaaaatttgcttatttttatgtttttgaagaatataccatcaatatatatctagcgattcagaattgtgtcctatcattttatttatcctcaacggtgtctgtgtaattttcttttcctttgaatttcccttttttctttttggtatatacattgtctgttactcctgggaaatgctttttcaaacttttgaaattaaagcagtaattttgaaatgcctttatgacgttattaattgttgtacaatgttgaccaagttattactaggcaacaaaacaaactgatctgacaagttttccttgtcaagtggaatggtatatcaattatcttgagcttagagtaacatcatgcattaatattaccctcagtcttccttctaacttcagtctcttttatttcatgttattccccatgccatgaagcaatgtttcatgtagtgcatctgagaaaactcttgacagaatgaaccaatgttcaatgcatctacatgctttaagaaaagattctttagattccaataacatgttcctccagcagatgtcttaacttaacatgttccatgccaaatggaaatgaggaaccttaatactatatttttggtctccagcatctcagatcattttccttgctataaagagagtctaaggaagtgcatacaaaatactccgacaaccaacttgcaatgttccaaacaatctgttgatttccaagtgatgctgtcctgttaaaccccattaatatgaattcacagatttgacatggaactaggtttttatttaaaatttgtttacttgctttatcatctatttaatttctttataaatatctagcttagaagaatagaggtgtgaactgttagttagttgagtacatgaatagggtacttgtttttgcttcttttgttaatagtagtgcatgctgttaatgcagtttggtgaggtagatattg

SEQ ID NO: 76362 - DNA, 374 bp, Carica papaya
  Intron number 1 from transcript evm.model.supercontig_127. 26 (locus evm.TU.supercontig_127.26) derived from phytozom e v7.0 (chr-ID supercontig_127; pos 425161 to 425534)
gagccgatcgtgattctgtaagactaagttagaccttgcctttgtaggttgtatatactttccttcttcccttttttctttgcggattaaatttgtccccaattttcaggatctagagaactctatgactcgaatattgttgctctgttattaaacagctggtgtgttttcctttataacgtcatttcctaaagttttgactagttgtgagcggaaatgagttaaaagtactccgtaaaatgggtgttactggtaacttacagtgactcttttgctttaatgaattgtttgttttattttatctgtaagttatgcagccttgtaactctgaggattctctctcttcatttagcgaaattatcttgataacttgg

SEQ ID NO: 76363 - DNA, 637 bp, Carica papaya
  Intron number 1 from transcript evm.model.supercontig_148. 21 (locus evm.TU.supercontig_148.21) derived from phytozom e v7.0 (chr-ID supercontig_148; pos 299495 to 300131 rever se strand)
ctgtgagtgaaatttctaaatatcttgaacattgacttcctcttacctcttaatcaagaataattggtggctaattatcccggcttagaaagttttatccttatgtcttagtaatgaaattactgtaacgtaacccattaaaaggcttttccccattcacaactaatcagagagttcattgaaatccttgttcttctgattttgaacggagtccccctgtaacctgatggaaataacagtagacctctgtttagtaaggagatctcttattggggttgggagggggattatgggaatatgttagatgttatgataaattaagccaaattgatattttactgcgaagtacagcgcagcagtttcacaaagtcttagcctttaatcaaccgaaattttttggttccctaccactcattttcttttccttctcactacgtgtcagtccttttaacaagcattcagaaactttgaggtctgtgcttttcttattattttgtttgagattatactgcagatggtatcttagttattttccttttgacttcaggaacttatgtagatcacatgcattcttatataattggatttctttattttcttcgtttctgattaattatctttccgatgttttactagc

SEQ ID NO: 76364 - DNA, 707 bp, Carica papaya
  Intron number 1 from transcript evm.model.supercontig_12.2 87 (locus evm.TU.supercontig_12.287) derived from phytozom e v7.0 (chr-ID supercontig_12; pos 2632447 to 2633153 reve rse strand)
ctgctgattttattggtaacctctctctctctctctctctctctctatatatatatatatatatagataatatgcttgtacttattattttcttttagtaattaagtatatatatatatatatatagatatatgctcgtaattattattttcttttagtaattaagcagctatccagctacttcttttttgaaaccaaaaaaaaaaaaaagttaaaatatttatttcatatttaaatgcggttaaaaaaacttaaagatgacttaattaaattactaatactactttaattaaaattatctaaataaaatctaattatttttgaaaaataaaacaaaagtgaaagtttaaaataaatataaaacatcaaactacaacaaatgttgaatttgaaaaattaatttaatattttttttagtaaaagctaaaatatctcaaattaaaaacaaactaaaacatctaaatttgtctaagttacatatatatatatatatcagtataaatatatcaaaaaaatttataaatattattattacactttaataaattttgtaacaaaaacttgaaactaaataattactccataattaactatatagaagtatttaagagttgaagattattattgtttgtatagaagatttaattatatatattaatattattttgtcagctgaaaaagtgggcttaccgacgtcaccgccgtat

SEQ ID NO: 76365 - DNA, 585 bp, Carica papaya
  Intron number 1 from transcript evm.model.supercontig_25.1 37 (locus evm.TU.supercontig_25.137) derived from phytozom e v7.0 (chr-ID supercontig_25; pos 1432724 to 1433308)
ctaagcaggagccatttgagatctttcctgtgagtttttagttatctgcttcattgagaaatttgttttagcacataatatctttggcattgcctaaatttgtccctgcttgagttgaacttgtgttcagtagtcaagtagcgagataattaactatggttaacccatgtttaccacatttgggatagtattttctttggctggatgatgccaaaacagactttgatcctaaaatagcaacagtctctttcttttcttactccatctgatttttctgtacatgaatttacagctgtcatttgggcattgcaatatggtttatcgacatcttttgttagactcttaattctaaccgtgttaacaggataaaagcgataacttttgggcatcaaaagtcaaatgtacatgaaataggcattgatattagttgtgctgactgccacatgtttagaattgtgtgttttgtaagttcaaccttctaaaaaaaagtgcaagtgtcaggtagttgttgattttgtttctttttctttttctcctggtttaattgtaggaaattgaattacctgacagtcaaactaaagaggt

SEQ ID NO: 76366 - DNA, 913 bp, Carica papaya
  Intron number 1 from transcript evm.model.supercontig_467. 2 (locus evm.TU.supercontig_467.2) derived from phytozome v7.0 (chr-ID supercontig_467; pos 33274 to 34186 reverse s trand)
gtgtcgaggtatatttctccttttgtttgcttcttgattctctttgaaattctgattgtgcaaactcaaatccgggtatagtagaagaaagcgttttcggtgatccagatgtggcaaatctatttttggaagtttctcggtgtgaactcacttccagaatgtttgagaaaattttagtaacggaatatggaggaaaggaaaggtatggtttgcagaaagagatgaaaggaaacatttttccatttttgaataactgaaaaattgagaaattaaaagtgatgaagtaatgttgcataactagaaattgaaaggaaatgaaagtattgttttcagaattttgtttggtttagttttaaattattagatatgagaaaaatattcactaatactcttttattaataatataaaaattaatagaatgacaagtaagtgaaagtgtgaaatataaaattcttcatctaaaatttgtaatccgcttcgattcttttttaatagaaaacttggagtcttaaggaaaaatggaatgttcatagtctcttcttttcttctcctagttacttttttcatctaaatgaggcaaaagagggtggacagcccttcctttctttttcccgttcgtctctcaatccaaacatggtatgaaccagattttttttttggttctttaaatatgaaccttacattttatttaatatgatttgttcatgcttggatatacccattttctttgagtttgtattttgttggtggtcatgtaagctaacttttggttttatgttcatattgtcagtttgtttggtttggaagatgatgataccgagacttttcggtcttttttaattctcaattctcatggacaatactttgttatgtgtaggtcgcggacatcaagagattgaattgcttggccac

SEQ ID NO: 76367 - DNA, 409 bp, Carica papaya
  Intron number 2 from transcript evm.model.supercontig_158. 13 (locus evm.TU.supercontig_158.13) derived from phytozom e v7.0 (chr-ID supercontig_158; pos 140603 to 141011 rever se strand)
acgtcagtttgtttctggattcactggaagtgcaggttggttttcagtctctgtcgattgactggattgctcgagtatttgttgtatatggagtctgcaagttttatttcttaaatgtgtataatccgtcatgattaagactggcgtttctcattatattcagaatacgagtaattatctgtatttaaagaaaaagaaagggaaactgtgtgattatatggtaccaactgtttgtcgaagtaaaaaatatcagtttgctttggttttgaggtgtgctttttgcgtatgcatatgtgaaccgttcctttttttttttttatgactgatttcttatcatgtttgatagatggtttgtgtattgattttgaatgtttgctcttgatttctttcaggtttggcacttatcaca

SEQ ID NO: 76368 - DNA, 279 bp, Carica papaya
  Intron number 1 from transcript evm.model.supercontig_158. 13 (locus evm.TU.supercontig_158.13) derived from phytozom e v7.0 (chr-ID supercontig_158; pos 141034 to 141312 rever se strand)
ctttagttgtcccctccgaagattatcaccaggttctccttcctctcttatggcctctcttacgtgttatatgtattgcaagatcttcgtttgagttttctcttttttcccttgaattgaaaccgtaattagcaccttcagttgcagattttatttatttgtttgttaaatttgtatgtgtcagtttgaatttatatgatcttgattagtttatgatttcactttattcaagaaaaaataattccatgatattggtgtcctctttgctgcagagtgagt

SEQ ID NO: 76369 - DNA, 923 bp, Carica papaya
  Intron number 1 from transcript evm.model.supercontig_3348 .2 (locus evm.TU.supercontig_3348.2) derived from phytozom e v7.0 (chr-ID supercontig_3348; pos 7724 to 8646)
tactgctaatactgctattgctattactgatactagtactacattatatgtaacgtcacaaaaaatctagtttaaatgagaaattttttttgtcatgttaatttaattgaagaatttaaatgtacaaatcaacttataaatagcaaaatcattaattagcattgctttgtttttgttagaaaaaaatgaagagataagctagcgaaatataataatttgttgaaatatgggaggaagaagtaagagagacgaattgagaaacttaagttttgatttgtgattgatactaaaagctttcaagtaaatgggtatttataggtactattactactactactaataatactattactactaatacttctactactagtactgttactgttacttctattattgctattactactacaattgctaaaacagctattactactactgctactattcttactattgttactactgttattaccactactactattactgctactaatattgttgcaactattactactactgctattgctattattactcattatttgtgataacacaaaaaatcaagtttattttaataacattattaactatccaacatttttttaagatttttttactttaattaattaattaatttaaatgaagaaaaaaaagtttcgttgtcatattaattcaattgaaaaagaatttgaatgtaaaaatcaatcaacaaattgcaaaattatcaattaggcttgatttgtttatgttagaaaaaacgaagtgataagctagttgaatataataatttgttgaaatatgagaagaagtaagttaaattaattgagaaacttaagttttgatttttggttcatgctaaaagactttaagtacatgggtatttataggcactactactattaatactactactacaa

SEQ ID NO: 76370 - DNA, 640 bp, Carica papaya
  Intron number 1 from transcript evm.model.supercontig_5.35 0 (locus evm.TU.supercontig_5.350) derived from phytozome v7.0 (chr-ID supercontig_5; pos 3254347 to 3254986 reverse strand)
gagtctgccatctttgccaccgaggtactgctaaactgcttccttggtttttgtcgttttttttttcaatattagattgaaatgcgtactggtgtttctttgtacaccgtcattcgcgtatttatcgaggattagctctttatctgggttaaaatcttaagtatcatgaaatagttgatgatgtagaagtggaaatctgtaaaatctgttcaaacacaagcattgaaaatcttaagagcactttgctttttttcttttttgttttcctaaccagtaaaaagatgatgaacttaaggagtgtctattcaaatccaacctgatttcttgaaactggcagcaatactaaatggaattagcgtatgagaggttttataatagtttaatcactggtgaaatcatccttgttatgaattgttccgagtctttttcttccctgaagttcaacttctactctctgaatatggattttttggttcttacctctagtatctcagttatgtttcaaatataactagtttcttgaactctaattacttgtgccctgtagcctagagagaaacattttttatgcatacaccagttatatctgattagaatattcttctgtgaccttgctgacttctaattttacaggagttaa

SEQ ID NO: 76371 - DNA, 541 bp, Carica papaya
  Intron number 5 from transcript evm.model.supercontig_14.7 6 (locus evm.TU.supercontig_14.76) derived from phytozome v7.0 (chr-ID supercontig_14; pos 891269 to 891809 reverse strand)
ctatcagcctttcagattccagaaactcagtccaggttcaatcttatattccctgtgatgctccaaaagaaaatgctgagaccttgtttgacacagtttctggttttgattcttatatttcgaaaatatttttataaccaaatggaatcaaaatgaagagtaattttggcaaaaggtaaaacccaaacttaacttttaataggtttaaacacaaactacgatttataatttttaaaaaataattttataaaaatttacatttaaaacctcaaaaatcatattcatcaaatataaattatgtttttttttaaatgatatcatattttacaattatttttaccatacactacataatttttagctaaagacatttctaatgaacaacaattttacattttttagtaacagatatttgaacaatatttttaaaacaaacaacataaattacaggctcctcaaaatgcccagttagtaaaaaagaaaaccagtagaagtttacaagtgcagataattttgtttttgtttaatcaggtttcttgtg

SEQ ID NO: 76372 - DNA, 307 bp, Carica papaya
  Intron number 2 from transcript evm.model.supercontig_14.7 6 (locus evm.TU.supercontig_14.76) derived from phytozome v7.0 (chr-ID supercontig_14; pos 892102 to 892408 reverse strand)
aagcggcttcagaattaggtccagatctcttttttttttttttattacttcttcttcgttttgatagcttatcggccgatattcattttgagtttcactggttactgcgtaattaataatttctcctcggtttaaacaagcctgaaataatttaaatgttcccaagagaaagacggaagcctgagttttttttccccttaaatttgttttatatttttctgctgttcgaattcttagcagccgcaataagactgagccaactaaagctcatactttgaattctcaggagctggacgacgtcgcttat

SEQ ID NO: 76373 - DNA, 407 bp, Carica papaya
  Intron number 1 from transcript evm.model.supercontig_131. 20 (locus evm.TU.supercontig_131.20) derived from phytozom e v7.0 (chr-ID supercontig_131; pos 177573 to 177979)
gtatgtaatccaagaaaatgtttttaattttttattttcatttgtaatcaggtttctttgaacactaggatataaaattcgtactatttcaaatggttatttctttttttctaaatcaagagaagttctgattgttggttgttaaatccggattgctcatgattacttgaagctatataacaaagaagtcgctctataatatcttctctttgtttgtgattaacatatatctaaatcttaaaaatatctcattttttaattaaaaaaatgtgatattattttataaaataataatagaatataaaatactacttcaagaattaagtacagtttcttcttgttgtggttttcaattatagtaagcttttgatggttggaacatgtaattgagatgaaacttctgtagg

SEQ ID NO: 76374 - DNA, 928 bp, Carica papaya
  Intron number 1 from transcript evm.model.supercontig_128. 12 (locus evm.TU.supercontig_128.12) derived from phytozom e v7.0 (chr-ID supercontig_128; pos 104548 to 105475 rever se strand)
gctctgactttcttaggaggcctacaagcaaagtggtatatgatccatgcctcatcaaatatctttgcatggcatgtcttagaaactgaggtgttgaaacaatcatcattctatgtgttgaaacaatcatcattctatgttgtagtaactgaatgttgctttttacagtttcatttcgtgcagccttgctccctcattttctacttcttatatctgctctagttggatatgggtagttggatatagaatatgagataataaaccagccctaagagtttgttcagaaaatggttctagttgtatcagattgcattttacgaagaaataaaagaaatacagtaggggaattcgtgtgaagtatagaaagggtaatcattatcattgaggaacttgtctgtgtgtgaaatttgtttgaataatattctggtatgcagtatgatgtatagttaattctctagataaagaaaactttgttcttgaataagataccatccatgaataatttgaattctagtcaactatgttgatattatcaaattcattcttagagcttttctgttttgtactgaggattacacccctgagattgcaccatatctctggctgatattgcatctgtttagtaacttctttaattagcttcttgttatttaaatgaatgtttggttctattgaactttgaactaaatttgcttcttttttcctttgtcttttcacttttttggaagagatattggcagtgtctctttatttggttgtccttcaatgcaaagttgatttagcagtgctgaatgcaaaaatatcaattgtttgatggtgcctactctagttttaggatattgtgatagtgttctatcctgtcattgattttgtatatttcaattctttttcagattagtgatttttccaagaaaaacgtttgttttgt

SEQ ID NO: 76375 - DNA, 698 bp, Carica papaya
  Intron number 2 from transcript evm.model.supercontig_163. 3 (locus evm.TU.supercontig_163.3) derived from phytozome v7.0 (chr-ID supercontig_163; pos 211938 to 212635 reverse strand)
aggtaagttaaatcattgcttacacttctgcaccatttgactagttatcagtatgaaaataaccttcagcaatatgatgtgtaatgtcttgttagggaatctttgctatgcattttctacttctcgttttataaaattatgtgttacatacaaaagcacctatggtgcttaagaatgaaaaataacatttggaaaatgataataaagatattgtgtgattttgataaaaatagaaagttattttaaactgatgctatatacacacgatcattttccaaactttatattaattctcaacaattaaatatattttcttgtataaacaaatttgaatttttttgagataaataaacaaatttgaatttagaaaataaaactttaaaaatattttaatgtattaaatagaacctaccatctgtatagcctgattgctttttgatatatgatatcttacactaatttttgtcctaaatatttccctttatttaaactgtcatcaaacaaatcttgatgaacatgaatgagaagaaaaaaaacggctattgctgcagaaacttggtttatctctcatctttctgggccaatttcctgcaatgctgatgccccaagctgcttcttgaaatatcaagtttgctctattcatggaaatgtatgaacatgatgaacttactgtgtggctttatgacactctgtaggta

SEQ ID NO: 76376 - DNA, 769 bp, Carica papaya
  Intron number 1 from transcript evm.model.supercontig_163. 3 (locus evm.TU.supercontig_163.3) derived from phytozome v7.0 (chr-ID supercontig_163; pos 212699 to 213467 reverse strand)
cggattgctctctttgttgagccttctccattttcgtaagttctttgttttgtctttttctcttttttacttcttcgtttttgcgattgtgagattatccattactccagattgttttcagatcgtaagctcccaaatgttggggagtttagagttcaactactgtccttatttgagtttctttgatttagtgatgatttcgtaatgttcgataaattgactgagtgactattgttatggtaagggttgtcttctgtgctatgccagccacaaacgatatgaagtttggatcctactcgctttctatcttttattgtcccttagctgcttctggatatgggttttcaacctcaactgagaatttcttttttctttgttcatctctcttgttggtcatcattgtgtatgaatgtgaatattaagcagtcaaattagtaaaattaaatttaatcaacttataattcgggccttaggctgcacttagctaatcatctagtttttttttctgtgctttctgatttgtcctaaaattggatggacatgtaaactgcaaacactattagtttcagagggaaaatgtgcagtatggttatgatttaggtagttttgtaaacatgtgctgagtgaggatacattgttttaactctcccttttaattgtcctgtattttctgctggtcaaattagagtatgggcattcatgaatttgttattttttcttttttttttttcttttccttgagaaattgctacgttttcatcttgcagat

SEQ ID NO: 76377 - DNA, 608 bp, Carica papaya
  Intron number 2 from transcript evm.model.supercontig_289. 3 (locus evm.TU.supercontig_289.3) derived from phytozome v7.0 (chr-ID supercontig_289; pos 17670 to 18277 reverse s trand)
tggaagtattcttacagtgggtaaatctggattcagagggactacctggaaagatttgagattcttgaatatccaatttccttatttcatcgcttgaggacaaggctgtatgtcagttgctcttggtaaccggtggcagatagcttacctgtgcatccagcattttacttaattggattagcttaaatgttgttatttctgcagtaacgtgattagtatgcattctttctattagggaatatttttgtttctagcttcttagattttagtaataggaaagttagaagtctggttgtactggtaacttgagtatttaaggaatattgtgtgtcattcttaggcatgccaatgaatattcaaatgaagatatattttcctatctcctaaatgtctcttctccatcttaaaactcttctgcttatcttctctctccaattttctctccctgctctcatccctgtccgtcctacattctttttttcattgtttctagctttggcatcattttcttcatttaaaatgttttttgtataattaaacttggaattaaagtactctggtataattgagcaggttgtacttccaatacatacctgaagggaaggagt

SEQ ID NO: 76378 - DNA, 903 bp, Carica papaya
  Intron number 1 from transcript evm.model.supercontig_577. 1 (locus evm.TU.supercontig_577.1) derived from phytozome v7.0 (chr-ID supercontig_577; pos 28766 to 29668)
aggggttgcgctggttccccgcttactacggcacggtaagctccttctctctctctctctctctctctctctctctctctctctctctctctctctctctctctctctgttggcctttaattcgttagctggtagctgtctatattttttgggtttgcttggtagtattgaaggggattgcttgcttctgttatatggtataatatgtcaaatgagcaaaatacgaagaaaggatgctggtggtttcaaggtgctgctagtgacctgacagagtgagtcatgtttgatgctttgttgcaaaaaatgatgcgctagataaaacaatgagtaatgcaggaattgcatctaaatccttcagcttaataagctttccaacagttgagctaatatgaaactgaccaataatgtctttcaagcatctatactgaaacgcccttctttcatgcatcatgtccatatgcttagaggaaggtatgtagttcttcaaagcaaacagaattcacaggatggaacagcaagcaagacctctaagccaaaatggcttgtaaagatacttaattgattaagtcctgaaccttaagctaagcatcatcctcctttgcatgttgcttcataggacagctaaacccactttgaatattgggaaattaaccctttacagtacatggttttatgtgcggatgcacatttttgtatttatctccccaactcaatactgtaacatgacacattagagaagcactcactgtgtgagatttttctgtgcgcttgtagtaaataagattggtactcagtgtttatctactgtggcctttctcattagaaaatccttgtgaaaaccatacaagagtagggccccttaactcattcatttatgtaggttatttacagctgctgacagtg

SEQ ID NO: 76379 - DNA, 576 bp, Carica papaya
  Intron number 1 from transcript evm.model.supercontig_6.20 3 (locus evm.TU.supercontig_6.203) derived from phytozome v7.0 (chr-ID supercontig_6; pos 1600650 to 1601225)
acctgttgttgaagaacgccgttgaagtaagccctcatttctccagaattgtcctttaattacgataggattgttattaattttgtttttagttgtttgaatttcgattagcgactaagaaaaccctaggtgtttgtcttctttgtgctctaggctcgctatacctcgtactgtttgaatttatatgcttcgttttagatacaattgactgcgatttgatttttattgttataattctgcgtttcgctagagaatcttaatatcatttcatgttcatttccatgtattattctgcggctgcttatgcctttggtttattaatgttattttttaatgatgttaagctattagcaggaaaattgcgagaattagattcggtatctagaaatcttatgttcaccgtgcatgtttttagcttctaactacatttgtttagttataaaaagaaaatggtgttcgtggtattggattttctgaatttggaacatggctctgacattttactcatttcttgggttattgttttccattccaattataggctggtgcttctttggaagcacttgctaaaggggc

SEQ ID NO: 76380 - DNA, 284 bp, Carica papaya
  Intron number 1 from transcript evm.model.supercontig_25.1 95 (locus evm.TU.supercontig_25.195) derived from phytozom e v7.0 (chr-ID supercontig_25; pos 2042548 to 2042831)
tctatattcctcttgagttcctatatcaaactcgggtctgaccttaatgggccggcccacatcaaacatgtcttctccatgcccaatgaaattcccaccaatcctcttaaattccttttattaaaaaaaaaaaaaaaaaaaaaagaaaaagaaaaacgtccagtcggttaggcaacgggtcgggttattttcggttttttgtttttcctcccttccagttactaacccttttttcttcctctgttacagggttcttctctttgtgcttgcggttctcagtaagg

SEQ ID NO: 76381 - DNA, 671 bp, Carica papaya
  Intron number 2 from transcript evm.model.supercontig_25.1 95 (locus evm.TU.supercontig_25.195) derived from phytozom e v7.0 (chr-ID supercontig_25; pos 2042829 to 2043499)
aggacttcaacacggaaataagtacccaaacaggagtaagtttattctcataatttttttcttgtttgatttgtttcagttgctacttcatctagagtatgcatctttaaagtaattctcttcccttctctagtggaagaaaaatcgatttgctattatattttttgtggagaattagaaaaacaggactctcgcaagttatttattcttatcattattgttcttgttgttgtttatgtgtgtttttcatagtttcatgcaagctgaggccaaatagaaggtgctacctgagctccccttatgtttttattttcaatttctttattaggactaacggtgcaattttttttaatggtttggttattatatatatgtttttttgtatttaatgcattgtactatgttaacaacccatgaaaagttttcccttgaattttaaattactttcttatttggtatcgtattgcatatcatctttttagtttacttagtttgatggttttgcttttctagatgaaggattgatgaacttaatgtttgcagattttttgatgttttgtttcataagcagacaaattgaaaagggtttcaatgttaaacttctaactttattgacgaatagacatcacaatgtaggtggaatacgggggaggcatatttggtgaagtgct

SEQ ID NO: 76382 - DNA, 846 bp, Carica papaya
  Intron number 2 from transcript evm.model.supercontig_23.1 61 (locus evm.TU.supercontig_23.161) derived from phytozom e v7.0 (chr-ID supercontig_23; pos 2436211 to 2437056 reve rse strand)
gacgctgattttaaggagggcgggcaaagaaactggtagcaatttcttatcagtttgtcgtcacgtgatatttttatgttgttaactctgtatctaatatatgaatttatttttatgcatatcgaaatgcgagtttgactcatttataggtttcaggtagttaaattgaagaactgaacgtaaggctcgtgttctttttaattttaccgtagttactttctaggaaaatactattagtttaccggatgtttcctgcatttatgagttctctttggtatcatattttggttggatatttgaataggaagataaatctattcttatattgaggattcaattgcttgaaccagcgatgttgttgataattcatggtaatatattaattccagcacttggttgaggctttccagctgtgtgcatctcatcttaattagattggacaaatacatttaactcctacattcaggttgatattgatcaatttacttcagcgttgctcttttgaattgcttgagcctatttgttagagagattctaaattcttttatttgttcaatctactccaattttatatttctcggagtaacatgatctgatcaaggcagagaaaaattgcattagccactcgcttaagctaaaagctgatgcagaattattgcatgcatgaagatagaataagcaggttatagtccattgacaggaggagtaagctaaaagctggtacaccaatggttggagatatgaaagtagaatacaatggctatattgcatcactgacgctttgacaggattctcccaattttttcttcaggttacaggtgataatcaatagtgggattgcatcaa

SEQ ID NO: 76383 - DNA, 647 bp, Carica papaya
  Intron number 1 from transcript evm.model.supercontig_50.4 1 (locus evm.TU.supercontig_50.41) derived from phytozome v7.0 (chr-ID supercontig_50; pos 473951 to 474597)
taggtgggctctgccaacaggtctgtttccttttggtcatgtcaggttacatagtatactaggttgattttattttaaataacttgaatattaatgacaagtttgatgtttatgattggtgaaatttactatatgtatttgtgataccttactcttctgttttgagacttggtatactgccatttgacaaggtctaccagtggaggaagaagaacaagtagggattaagtatctaatactgttatttatgtattttgttatattttatctgtgattgctgctaaatgtcaattctgagtagtgtatcatgttgtgtttattattttgactgctaaatatcagtaattggcagtttatcgtattcaaattaatcaaattctgttgttagctcggatgggcaattcctagtcctacggtaaaaaactagggaaaagaattatcctctgttctcgtgtaggaacaaaaaccatatttgagaccattgggtttgtactcttcctctgcagttgtaaatgttggtttaactttctttgcaccatttagactggagtccatttgtggtgctttaatttttttcattcttcttattaaacttttgcatggaaatctggataaggaggctgattcaccatttaaaattgcaggaa

SEQ ID NO: 76384 - DNA, 423 bp, Carica papaya
  Intron number 1 from transcript evm.model.supercontig_37.5 5 (locus evm.TU.supercontig_37.55) derived from phytozome v7.0 (chr-ID supercontig_37; pos 417332 to 417754 reverse strand)
tgtgcctctcgcttgacgtcgaagacgacgaggaggtcagaagcttccatctctacgagatagaaacaaatactctctgaaaggacttgtttatatgtttttacggattttgttttcaatttggcgcgggaattagtataggagctgtttggcttgaatccgaaggttatgttgatttgattatcatttgctattatgcttgatttggttactttctctggtgctggtacctagcttctgattatccatcttctttttatctcattaagcagtataatccgtgaatttatgattgcatattggttctgttgtatgttcctgtgattttgtgtcttgttattgtagatatggaagttgtactcgttattttgttctatttggaagtgatattttgagggttaagttattcaggattaccacaac

SEQ ID NO: 76385 - DNA, 622 bp, Carica papaya
  Intron number 2 from transcript evm.model.supercontig_22.4 7 (locus evm.TU.supercontig_22.47) derived from phytozome v7.0 (chr-ID supercontig_22; pos 1188163 to 1188784 revers e strand)
tggcagatttgagaagaagggtttttctttgaacggtaaagtagtctgacttgcaactgttgtgtccagattggtgttttaagttccaaaattctgcattgtttgagcaacgactgtaacgtttgtttgaatgattactttcaattcttgtttaatctgaatattaacctcaccaaacattttctgctttaatctgatagtgccctagtgaattttggaaatgcaattacctcttcggtcaaacctattctattctcattcaattctagattcaaatttattttatactagaaattggtcataattatgatatttgatgcataataaaatcaactctcatatttttaatttcacactcgtatcatttttgcatactcatctttcaaccaagaaacacttagtttgattcgaatatggaagtgacttagaaatatatggttatttttactaagatttctatgatttgtattgtatgccgatcacattctatggaattagaatttaaactaaattaagtgcaagtacctgaaattttgtatctagtttatgggttgttaaattgttcctttggctgtatgtgatattaggtttgaagctagtgactgtggaacgctcttttgcc

SEQ ID NO: 76386 - DNA, 548 bp, Carica papaya
  Intron number 1 from transcript evm.model.supercontig_22.4 7 (locus evm.TU.supercontig_22.47) derived from phytozome v7.0 (chr-ID supercontig_22; pos 1188764 to 1189311 revers e strand)
gagtccagagaggcctggtaatctttcactcttctctctgttaacactgttggttatcgagaataggttttgtttttaaatttgtatcatcagagaagataatcgagttgagtttattttatattctctgaggaagttcgatgtgtttcttagatctattgaacttattgagaatcgctgtgatgataaataggatggggtattttcactgtgtggaagattaactgaattcggctttatatgcaactttttgaacttttatttttttgaattttttctactttatttagatggccatatgttttgataactaaaaacgtagttttctctttccttttcctcactgttttttggtaatgcttaggcgcctctcataaagaaaattagacgctgaaaaagttttttctttataaaatctgtttcaacaagtttcatggacaattgctagtttatgttgccatgggaattttgtgggattcaaaattttcaaaaatttaactgcatgggtttcaggttggcgagatcattggcagatttgagaagaaggg

SEQ ID NO: 76387 - DNA, 556 bp, Carica papaya
  Intron number 1 from transcript evm.model.supercontig_1145 .1 (locus evm.TU.supercontig_1145.1) derived from phytozom e v7.0 (chr-ID supercontig_1145; pos 16876 to 17431)
gtgaaaatatctgctgcaattcttagtccataccggtatgaactctggctctaatggtcatttctgtttgttggatgatgatttgctttttttagtttaataagttatgcatctttatctttctgagcatttgtagttcaagttggtctgattgtacagaaaaagtattagtttttctttatataatctcttgatggttaatgctttgataccttcaaatttcttaagaagtatgatggtacatccttgtgtgatattgctttccaattccataattaatttgttctgatgcctctggatgctggattcttttctgcttttcttgatgtttctagtctcatttattcatgctattgcagtaagttgaatcatttgacaaaactatagtcttccttactttttctttttttataatgtcatgtggtaggatatatatagaactattataaattttcttctgaataatactgttagaaagcaagctcagacccatccttgacatggttaatgtgtatttgtaggctcttgatcttgattcgaatattggctcttggat

SEQ ID NO: 76388 - DNA, 316 bp, Carica papaya
  Intron number 1 from transcript evm.model.supercontig_20.3 4 (locus evm.TU.supercontig_20.34) derived from phytozome v7.0 (chr-ID supercontig_20; pos 371859 to 372174)
gtgcttgccttgctgcgactgccattcttcgcaaggtcaacttttcttcctcggaatctctagtcaatttggttatccatcgctgaatttagatgctatgctctaaatcaaaactttaaaataatgtgcgatgaccgtggccatggtcatcgtactggagttggacaacttagtatttctttagctttgtcacgttattacgtgatgtgattttttatttcactattttgataaatttcagtcgaaattaattcgttatagatgtcttgcctctagtttatttatttttgtttcttaaaatttagggtcctggtgg

SEQ ID NO: 76389 - DNA, 444 bp, Carica papaya
  Intron number 1 from transcript evm.model.supercontig_33.2 02 (locus evm.TU.supercontig_33.202) derived from phytozom e v7.0 (chr-ID supercontig_33; pos 1930649 to 1931092 reve rse strand)
cctgaaactctattcggaatattctttgaggtccattgacttgaagtttaaattttcttactgtaactccaaaaatgggcttccgttgttttctggcttttgcgattggttgtggtttaatactcaaaaactgtgctcaaattcaggtaaatattcttacaaaaagataaacaaggatcaaaagttaaaaacaaagctaaatgaatcggtcatataggtatctcttttttgggtgccaaactaattatgctgattcttgattgctgggatttactaccatgtgtcactgaagaaaaagttaattgtttgactaagcttgtttaaaaatttttaacttccttgtacggagttattttttacctacccatgtgcataattatacacctgaagataatttttgtgggtatttcattgtttgaatgcctttgctgcaggagatcaatc

SEQ ID NO: 76390 - DNA, 468 bp, Carica papaya
  Intron number 2 from transcript evm.model.supercontig_152. 66 (locus evm.TU.supercontig_152.66) derived from phytozom e v7.0 (chr-ID supercontig_152; pos 701527 to 701994 rever se strand)
caattaatcaaggtctttcctttatttctctaaatgttaagttaacctagtgcctctgaaggattcgttcaagttccttttgcaccttaaacttttagtttcttcgagtaaaagccaaaatatgataaatgaaattggaaaatatttctccaacatatgtaactattgtttatatagttggtgtaatctatagtgtgatgattataatccaaacactgtgactttattttacctctaaggttaggttccatgaacacattttctgtttatcaatctaactctaagcagaatataaatcattgtaccgagttaccttgtgttttgcctcgagttttttattgtcttgctatctaatgggttagatagttttcttttttttttttggatgttaaatataaatttttccctttgagtttcataataagtttgatttttatgaaaagtaggatatccaagtgacattaaggg

SEQ ID NO: 76391 - DNA, 334 bp, Carica papaya
  Intron number 3 from transcript evm.model.supercontig_20.1 84 (locus evm.TU.supercontig_20.184) derived from phytozom e v7.0 (chr-ID supercontig_20; pos 1952695 to 1953028 reve rse strand)
ttagctggacggaggtaagttgctctttttttgctgttgtttttttgtctacagtcagcaattctgataatggcattaaatcatattcgttttttttcctattatagtaatatatagagatttgttcataatgttctatttcaagacataataatagttgctttcatcttttcagtatatgaaacccttatgttatctgaaattattctcttctggctttagcctttgtgattgcaatcaattccagaatgattgcgatccccagctacttaattgttcacatgtttgattttggccaggagatactttgggcacaaaccaacagtccgtccaa

SEQ ID NO: 76392 - DNA, 1040 bp, Carica papaya
  Intron number 1 from transcript evm.model.supercontig_132. 76 (locus evm.TU.supercontig_132.76) derived from phytozom e v7.0 (chr-ID supercontig_132; pos 741291 to 742330)
actgcagaagcaatctcttcactggtgtttatcttccttgatatcaagctgctttacctaccttgcctgaaaacatttgctcatcctctcaaattaaatcatattcagctttattatcaaccctaggcatagccagaaagaaattagagaacaccgtccttttccttttataagaatctaatcgattaacttcgtcttccttgggagcgaatgagcttcggtttaaacataggagccttgttcatgaatttattaaattaatttaattcaacgaacatattacttattaatatattaaaattaatgaaataatttaaaattgattaaatttttttgtagtgaaattttatcatccaatttttatgttatggtgacttaaatttgaaatctaatgaaaaatttatattttcatatgttttgttattattagttatcaatgaatattgctttatttataaaatattaaagtgataagtatcatcagggaattactaacccaattaataaataaccaaatcaaaatttaataatatcgtttacaaataaattaattaattattttaataaatttaattgttataatccttaagctcatttgaaaaaaaatagacaaaacaaaaaaaattatatcacattttgttaaactttttctgattatataataaatttatcaataaataattttataaatttaaaattatagcaaacaatttagagattaaaatgataactttatctaaattaaataaggtataaacacatttttttttaattaaaaatgtagtcattaaatatttgatttatttaatttgaaggaggcagaacttccttctaccttgtaggcccaatatcaatcccaatctcatctggtgtcgatccgccgtttcagaaagaaaaatgaaacgataatggcagcggtcgagcgttgaggaaatgaatcaaaatcccaaattctcggtcccaacactccatgcaatcatgtacatgataaaccccagctataggatttatgttgtttgtagcaagtgaactcgctcccc

SEQ ID NO: 76393 - DNA, 748 bp, Carica papaya
  Intron number 1 from transcript evm.model.supercontig_11.1 0 (locus evm.TU.supercontig_11.10) derived from phytozome v7.0 (chr-ID supercontig_11; pos 248787 to 249534)
ccaaaaagcccggctgcgagaacaactttgttctggtaaatgaattaagaaccctaatctctcttccttttctatttctttttccaaacatatttgacatgtttcttttattgtatttgatttggttttgtgttgttatcttttctgtttgattgctaagaaaaaaagggaaagagaagagaacctttttttgtcttggtttgtttgattttgtggttaatttaagatttttttctaaggaaactatttgtgctgggtgattgtggtggagtccgtttagttggttttgcctgctttttccttcatccagttttgttcggttgattagggaaggacggaaaaggaaagtgcagaaaggggaaaaaggaacttttgaattttcgatgatgtgaattaagaatgtggaaaatattaattacaactcagtatagtaatatttgtttgtcaaatgagttttcgagctagtaaattctcacttttatgtatttcatttgctgaggcacagagtatgttcaagcaaatctctttttttggatgttttgattaactactcaaaaagcgtgttattctatattttttttaatccattttatcggatctatttctcagctattgaatttagccaagtgttgtctcgtttagcagtcactgtgatctgcattaaatcctgatgaaggtttttgtccgttgcattgattatcatctgttactaggtaaaagtccctacttgggttgatcatatagaaga

SEQ ID NO: 76394 - DNA, 465 bp, Carica papaya
  Intron number 1 from transcript evm.model.supercontig_179. 53 (locus evm.TU.supercontig_179.53) derived from phytozom e v7.0 (chr-ID supercontig_179; pos 342012 to 342476)
gggatttcagggtaatctataatacctttttcattcaattgttactgggaaatattttcactgcaaaatttgctttggcttatgatttggtttttgtagttaaattatgaagaaggcagcatgttgattattctcatagtactggatttttctaaaccaatagtgttttgtattttgtattcttatgttattttggatatacaacttctaatcaagaagagtgttagccggttgaaattcaatcttgaatgttaatctggttttgatttatggcctggttaaattcaattcctatttctttaccactaaattgtaatgatcatatatgatagtttattccagtgccatacctttccagctctttatgtttgaaatatcgtggctatattttgtcaatgacatgcatatttatatttctatgcatatataggaaaccttctgaacttcttgaacttgggagtgtat

SEQ ID NO: 76395 - DNA, 355 bp, Carica papaya
  Intron number 2 from transcript evm.model.supercontig_179. 53 (locus evm.TU.supercontig_179.53) derived from phytozom e v7.0 (chr-ID supercontig_179; pos 342649 to 343003)
tcaagggattggtgattttcaacttcgtgagagtattttggtagaatttttcatagaggaaaacttcttatgtttatgcaaccatgtttccgaaatgttactatcttgtgtaaccttgtataaaagaagttttcttttggaagaaacaaacttgaaaacaaaaataatatggagttgattatagatcaaagtttagttaagaatgttgtagcagtttttgttcttcctattggaagttacttgcaaagaaaacaagtcatgtttgactcttatccatgttggattggctattagtagtttgttaacagtctcatatgctcagcatttgatacaattttttttctttccttagatt

SEQ ID NO: 76396 - DNA, 652 bp, Carica papaya
  Intron number 1 from transcript evm.model.supercontig_21.1 11 (locus evm.TU.supercontig_21.111) derived from phytozom e v7.0 (chr-ID supercontig_21; pos 1310259 to 1310910 reve rse strand)
gagaagaataaaactgctaagggtataacttcatctctctctctctctcttgccgaaagggtagaaatattctagtggaaggcaagagattagatcttgtgtttaaataaaaaacgaaagttaccctcatgtagttttagttaatttgtagggcaaagctgagttggttgtaagttaatttgggttttattaaattaatgaacataaacaaactggttcttttttgtttaactattcttacttaattactacttagaatttttgttagtcctaaaatcaatcgtaatattatctttatgtttcagttttctctgctccaaactgggtattttgtagggtgaaattttcagttttcatttctctcagagaataaaaattttctacaccaagaacttaaagttagactgcaagcaattcaaatataaaaactatattataattttcatattaagactaatttaataactaaatcataaaataataaggaagaaaatgaaatccaagtaagctgtaaggaaatcttgacatatttttctatagaggtttttattgggtgcaatgtttcttaatgtagtttttgactgaaactatgacatttatgatccaatctctataatttgtaggaagccagctggaatcaaacaagaaagcc

SEQ ID NO: 76397 - DNA, 483 bp, Carica papaya
  Intron number 1 from transcript evm.model.supercontig_17.1 67 (locus evm.TU.supercontig_17.167) derived from phytozom e v7.0 (chr-ID supercontig_17; pos 2080989 to 2081471)
ggtattcccactgttttttgtttttctttttctttttcttttgactggtaattatttgcgcacgttacttgtgtctctaagctcctccaccaagtcttttttttttttcctggctgggattttggttaattggggttttgatacgattttactcatctgtcaattgattattacagttctattttgtgttcttttctggggtagcgcaagggaggctgtaattcccgtttacttgaatcactttgtatttgtaaagtttctgttgctgtccacaaatggaatataatctctttcttgaaacgggttgatgtgcttttgaagattcaatgttcttttagtgagttagaatggaagttctgctcaggttgatttgtgtatttcttggggactttttctctccccagcttctctggattggtttggtggggtgcatgtacgagcttctcttcaaatggtatttgattgaataattggttttaggaa

SEQ ID NO: 76398 - DNA, 444 bp, Carica papaya
  Intron number 1 from transcript evm.model.supercontig_13.1 79 (locus evm.TU.supercontig_13.179) derived from phytozom e v7.0 (chr-ID supercontig_13; pos 1604775 to 1605218)
ttcttgctttctggcgccaggttagtttctgaattcttcgttttgtacatgtgatgtatgtgcctacttatctagaaaaattgctttcatatccatagccagtggttttcgttttcttctttctgcatcattttttgtttgcttaatgtgctaagtttattgattttgttgcgaaattgttcaatgaaacagttgttagcggccttatttccatttacaatccgtcaaaaagcaaaaaggaattttcctaaacagatgtagaaatggaatcttctgttccttgtattgatagcaggatgtgtgtgttgtttctggagctgttagtcagtttcatctaagcttgttacgctctacttcgaaagaaaatttgagttgttctggttgttttttggataatttaaattttattctttggcttttcagcattttgttttggaagaaaac

SEQ ID NO: 76399 - DNA, 561 bp, Carica papaya
  Intron number 1 from transcript evm.model.supercontig_4.43 (locus evm.TU.supercontig_4.43) derived from phytozome v7 .0 (chr-ID supercontig_4; pos 1213739 to 1214299)
gtcacactctgggaagtttgtccgagtgaagaagggtgagtgtagtacttccctctcttcatcttaatgctactgctgatcacttctattttaataagactattgtaatcctttgtgattattgtctttcttctctaatctttaaatcagatgtattggtgaatactatcggtctcttgctggatcaattaatttttaaaatgctatggtcctttgtgattactgtttttttttctaattgttaattgggatgtgttgatgaatattattggtctgttgctcgatcaattaatttttaatttacattatatatctgtcacatgggtgttataactcctttttttccccccctttattgattctttgatcgcacttactggataataaaccttctgtgcatgatactgttgtgctaatgaatggaacaagagccttaaaagttctaactggatatccagcagcaagtttgactattgcaatgctactgtagtagtttctatcattacaacagaggagagttggacaaatgatatgcccttctttatggttagatgtaggtgg

SEQ ID NO: 76400 - DNA, 482 bp, Carica papaya
  Intron number 1 from transcript evm.model.supercontig_13.2 67 (locus evm.TU.supercontig_13.267) derived from phytozom e v7.0 (chr-ID supercontig_13; pos 2423913 to 2424394 reve rse strand)
cagaccacggatacgggtatgctattttttttccccttttgctattcttttatttaaggttacataatttctttttttggccgggaacaaagtcacatggtggggcttggattttcatatttagatgtctggaatcaactattgatcacgtactatagtttgatatatagtataaaaggctaattgataaaatcaaaatgtgggtactgcttcaacttgttaaaaatgtttgtattagtttacttggcttctgagaaaactgaaatctaaaattagtaaaatgaagataggtttttgctattgatttctggccatcaagtaactttgaaagttccagataattgagtgtcttaagttttttttattgaatttgatttgattctcttttataatttttcgaagaacttagtcatagttttccatgtggacttcatttgggttttgcagtttggagatttttgatcatttggagtttgataagt

SEQ ID NO: 76401 - DNA, 712 bp, Carica papaya
  Intron number 2 from transcript evm.model.supercontig_20.2 06 (locus evm.TU.supercontig_20.206) derived from phytozom e v7.0 (chr-ID supercontig_20; pos 2127831 to 2128542)
tttgcaaagctcttgaggtcttcttcttcttcttcttcttcttccatttcccattctcctttctctcctctcttctttcttgcagatttcagaaagttgaatacttgaactgtgaagagctgttggttttacctttttggtggagaatgttggaaagaaaccaagttttggcattcaattacggtttcttgttgggacagaatttttaggatgtatgaactttgattctaaatttataacttttacatttaaagataccgtttaaagatgttgaaaaagtaagataccattaaaaggattactgggatgttcccttcttcaaacaagcatttcttatcctttttcttgattgacatgaaatacgtctaaaaaagttgtcaccttgtgatgtgttttatcccatcctataaccgaactttatttctcaaccaagagttcttaatgttctttaaatttttgtcattttaattatgattactcttttgaatcatttcctggcattgactttcctctctattcttttttttttttggcatagaaaatataaagaacctttcaaaagctccaacggttatgtctttctttattctttaatatgactcaatcatgtcaccttcagatacagtaataaatactattctcatattcttgtctaaataaaggatcattatttgcaggctgttgatctaaggagttcacataatttcagccc

SEQ ID NO: 76402 - DNA, 1033 bp, Carica papaya
  Intron number 1 from transcript evm.model.supercontig_428. 8 (locus evm.TU.supercontig_428.8) derived from phytozome v7.0 (chr-ID supercontig_428; pos 33154 to 34186 reverse s trand)
ccagtcgtcgactttatccccttatcccattgtcggttccacccatctattagagcctgagcaatttgttagtttcctatgaaatgtcgggatttattcttatctgttacatttatatgcatactttatttttaattttgttgtttgttgtgaatgcaaaagaaagcaatagactttaattagctcaactcacaggtccttctttgacagtgttgcaacaagcataattgtttctgaagttgttgtcagagatcaaaatcgtgtagggtcatatgatagagtttcttgtttcctagtttttgattatttcttatgggatgaatatgattaagatcatgtttctgttggcatcaatggcagagcttattgtttttggtaggctggaactaggttttgcctaagtgatatagtttcaacttcattttttgtgttttatcaatcgctaagcgattattgtgtcaattactgaaaccaggcgtttaagggtaaaagttaattcttgaaacctcaaacggcactctatggccatataaaacctttttaggctgttatggagcgagggttgcatatttccttgtgctttctagccactcctaaaagttttagaaaaagaactcgtctttttcctttctctttttactgattgtgtagatttctttcagtatctccaagaattctacttgttattgagcattcattcaaacaataattttatgtgctttcctctaccctccattttttctctcccaacctagcatttgtttggttttgcatgttgcggttctccgtctgttttctttcctccaatctaaaatttctttaaattttctttgattcacctatctgaattactgttctgtgattgtcctcccaagtgcttctcttgtttcttttttcactttcttttctttctatctctcttcagcaaaagtcagttttccttcttcatcaatctctattctttactttgacatttgtttttctttcagttctcgctctttacagttgttgtggttgtgtaggactctgggga

SEQ ID NO: 76403 - DNA, 367 bp, Carica papaya
  Intron number 1 from transcript evm.model.supercontig_37.3 7 (locus evm.TU.supercontig_37.37) derived from phytozome v7.0 (chr-ID supercontig_37; pos 256493 to 256859)
actggtataatgttaactctcttcacccttttctaattgttactgtataaaaattgtctttgattgaatgatggctattcctatgttattctgttatttatataacaatattcttcttctacctacaaaaatatttgaagcacagataactctcagcctggggttttctactagttttcttatacgctacaaaaattatgtcggaggaaactcctgcaacacgtcaagagtttcttaaaatatggcattcacttaattagcatccaagtataatcattctcatgttacaatgtatacaatgattttattttccttttgtactgggcagccaggttggttcttgctttaggagctgaagctaaacttg

SEQ ID NO: 76404 - DNA, 742 bp, Carica papaya
  Intron number 1 from transcript evm.model.supercontig_139. 74 (locus evm.TU.supercontig_139.74) derived from phytozom e v7.0 (chr-ID supercontig_139; pos 531383 to 532124)
aggtgtgtaaacaaaactattatctccatatacttcatatagtttgcgcgagtttatcattttttttatgtgtgtatatatatatgtgtatacatgtacaaaacaagtcggcagtttcttcttcatttttactactatttggtatttttagctaaatagagtttgattttagcgtatcgatttactgataaggtgctctttgctacttgaatcttattcagtttgatggattcggggttttagatatgcatacattacattatcgctgtgtttactagatccaaataataaatggacgactcaagaatgtcactgtttttgccttttgctgattggtagcagcgatatgttcaatatttgtagacaaattttcagtatccgtaaactcgtcatttgggctgtaacatttccatttggaatgtagttctgctgtgtataagttatcaagtaaaggacagtgagttattaaactctaacctccttgcccactggtttataacatcttgaggtggattttatgattgcaaaagttggaatccttgaagtccttaaagtgatgcatttttatatattgggataattgttgccctgtatgtttgttcccagtagcattattggttttgactcttttggcttcttccagacttctgaccttgttttaatatgattttcatgttctaaatctatgttttgctcatgtgctatagtaagcttcagagtgacgcactgagggaagctattt

SEQ ID NO: 76405 - DNA, 489 bp, Carica papaya
  Intron number 2 from transcript evm.model.supercontig_184. 6 (locus evm.TU.supercontig_184.6) derived from phytozome v7.0 (chr-ID supercontig_184; pos 62062 to 62550 reverse s trand)
ataaaaatccttaaaaagtctgaaattaaggtagcaaattttcaatatatgttgcctgtataatgacaaatttatgttctcctcgtgatgtataaatacataccatcatcttaataccataagtctgaaaattttctttttcttactcatatccttaaatgaagcacttgttaattgcttttttctgtgtagtcttcgtaaagataaatagaatcttgcttagttttcttatgcaccccggcattactctctctccatctttacccttttatttcttcatatagtagatatagacagaattcaaacttgtttatagaataatacacacacatgtatattgtctttcaaagatcccttcatgtatttttaagctgttatgtcaatttaattaatcaatcatattatatgtgcgcatattcttacaagaaacatcttgggtcattaaaaaacacaatctaataatatattttcgtataggtgatccgtgac

SEQ ID NO: 76406 - DNA, 624 bp, Carica papaya
  Intron number 1 from transcript evm.model.supercontig_184. 6 (locus evm.TU.supercontig_184.6) derived from phytozome v7.0 (chr-ID supercontig_184; pos 62664 to 63287 reverse s trand)
ttcaagtggaagaattactgtgcttcacttttcaggtactttatttccttcagaattgtttgattactagttgctgtttatcttgattcagtctgttatttgagtgccctaatttttcaaagaagaaaatgttctgcttcttgagaaaatagagttggaaaatttgtttctggtccgttagattaaagtgaatattatcaaataaagcagtctgccaaacaaattaatggctgcagaattgggcttgtgtgcggaagatagatttgcattgtgttctatgcagttgcatgcatgttgatcttgtttgaggaatctccattcctctcttacgaggacaaaaaatgaggaaagggaaaatggatttattaaagctaatactagttataaaggggtgagaattcctgagatatatagtagtactattttgctgaacaagcaaagaaagtttgtcctgcacatgatgaactcagaacatgagcatgatggtattttttccacatcatcgacaattttcatccaccaacattgattttcctgagcttctgttacctaaatccttgtaacttctaaaactcagaacttgacacttgcttatctgctgcagacttctacacgagctccaaa

SEQ ID NO: 76407 - DNA, 569 bp, Carica papaya
  Intron number 1 from transcript evm.model.supercontig_6.30 8 (locus evm.TU.supercontig_6.308) derived from phytozome v7.0 (chr-ID supercontig_6; pos 2269187 to 2269755)
cagtctggttttgaggaaattaaaggtgaatccctctttttctggtccttccatggctttctgtttgactgctgtagtattatttagtatactttgcaagaaatcatttccgttgacgcaataatgaatcggcaagcaaggaaccataagttcatttattgcaagcagaatcattgacaaaaatcttacagttcaggctgcctttgctgcatgaaaaccttttttttttttttacttttcttattcaataccaatgtatgaatgtataatttctaacaaatgagtgattcatctgtatatacataaaaagagatagacatatatatacgtacatttatgggaataacagttaaaaaatgtgcacgtgtccaaaggcagcgttaagttcttcttaagttcctagaagaaaaaatgcttgttattgttttgtctttgtttttggtttttttttttcttggtgaaactaaagaagcctgtcttgtttactcaaagttcagcagttacttcattcaattgtgtatggaatttgtgcagagaagtcgagcaaacttcttcggtccattactctg

SEQ ID NO: 76408 - DNA, 912 bp, Carica papaya
  Intron number 1 from transcript evm.model.supercontig_1.37 6 (locus evm.TU.supercontig_1.376) derived from phytozome v7.0 (chr-ID supercontig_1; pos 4791590 to 4792501 reverse strand)
gagaagaaggtgagctctcctcgtcggacgaagaagtaatgtctcttcaagaaatcgcgctttcattttattatcattgttataattcatgtgtttttgcgtgtatatattgcactctgacgcgttttgttgttttgctttacctggttttaggtatatatattttctcctctatcttgttctctcgctggctcgttcattaggtagctttagtttttttttgttttggggggttaatcgtttttgattgctgaaagtttgtgtgagaataaattgagaaaactattggattcaatctaatgcttcaatggggttttggagagtgaactcacgtcgactctccgtagtattgttttccttttcatttcacgttcttcttttttaaggttttattttctgagtttcgatgtttaagatgagggtttaggatctaaggatgcggttattatgtatggttctatgttttttcagcctttaatcgttagttattagtaagtgttatactgtttgtgtttggttgttgagaaaagtagagggaaaccgaggaggggttatccttgggtttctggcaaaagcataagctattctagatagacaacttcttgtcgtttgattgacttgtgaaccatgcttttttttttttaaagttctaatgggaaaaatgggtgccaattaattggaattgaagtaatgaaactttgtaaatatgtttatacatttattggatgttagttgtgttggactgttggagatttacttatctggtatggttttaattttttgttagaacattttaataattttttgttcattttgttggtttctttttgattttttgagagtttttcacttttcaatatgttggggatgtggaatttttctgctttataggttcctcaatttctagcttta

SEQ ID NO: 76409 - DNA, 557 bp, Carica papaya
  Intron number 1 from transcript evm.model.supercontig_3.43 9 (locus evm.TU.supercontig_3.439) derived from phytozome v7.0 (chr-ID supercontig_3; pos 3176031 to 3176587)
cgagaggaagaaacccagaaaggagagcagaccaggtaaaataatcacttttaatgtttcttaaagaatgggcacatttttgtttctttgttttttgttttaaataaattttttaagctgtattttatttttctttgaccagtttttaataaaaccgcgtttcaacacagtcccctgtttcaattcaaagtcattacctttgattttcgcaacccatccagattttctcttctcttcttttcttctccatatttgctcttgtgctcctcattaatgtcattaaatcagattgattcacatcaacgactcagctcactttttcccggcttttcacttctctctaatttaactttttcctcttttgggttcctccttttattgctaacttctttttcttcaagtgaaaaatccaacttatatttcttgttttctcttatattccagttttgattcgggtttcagattgattctcttgttttctcttttctgggtctggggttaaacttttgtattttcatgtaggattttctctgcaaccaaacaggaagagattgctg

SEQ ID NO: 76410 - DNA, 928 bp, Carica papaya
  Intron number 2 from transcript evm.model.supercontig_5.12 8 (locus evm.TU.supercontig_5.128) derived from phytozome v7.0 (chr-ID supercontig_5; pos 950547 to 951474)
tagacccttttcgtttctgttcgctcggttgtaaggttagtgtttctttcaccctttcgtcttcttcattcatattcatctgcactagctgcttgatgttattcatcatcatcatcatcatcatcattatccacaattaacatatcataatcacacatcttatggtcccaaaattccctaatttcatcacatatatgtatatacatgtcatgagtttcatgacccacattcacaatcccatcacaatcataacaacaacctaccattatatgatcatcattgttccaatttacataaattttatcaacatatgcctactatacgctaactgtgtatttttcaacgttgtaatccctttgcatattcacaaacatcaccattgttatcaagaaagataacccacaacccaatgttcttgtttttcttcctctttttcggattaaaaaaaaaaattaagtggaaggaaaagaatatattattcaatcctctatcattcacttaacgattataatatacagaaacaataatgggttttgctaattgggttgattcactaccaaaaattaaaaaaaaaaaaaaagggtaaaactctagctaaacttaagagcattatgatgaaattattcttttatcttaagattacgtgtgtaacaaatttaaaattaatacttattttaattttaaaaaacagattaggttatgcgaatattcaaaatcatatcattttgaattttgttattacttaatcgaacaatatattttaggtaagatttttattgtagcttagtttgaaaaactatagagttattaataaaattttacttgcatttatttatttatttttcttcttggataaataactatatatcatgtttaatgggtatggtgttaaatgaactttagcttgtaggaataaggagaaaggggg

SEQ ID NO: 76411 - DNA, 916 bp, Carica papaya
  Intron number 1 from transcript evm.model.supercontig_43.5 2 (locus evm.TU.supercontig_43.52) derived from phytozome v7.0 (chr-ID supercontig_43; pos 644658 to 645573)
ataacgcagctaccgttgcttctgtggatcacaaggtatatatctagcttaccaagtctctatctggagttgtcttttgggtgaatgatactatagaatctttaaaaataaaagctattgatcagatcatttgggtgcatttctgcccttaagtcaagaaaaatgaaaacaacaagaaactaatggctgttctcctaatccagtatttcttttatatatatgttctatcttattacacacatgcaccactcagactcttagatattcaaccttttttttgtataagaaaaaaatagtgttagaaagactcatatatttatatatgcatatatgtacttatattcctgtatgaacacattattatgtttgtttcttcaattacattgacattcagtatgctccctatgatactctacttccacattagaaaaacatataattataaatctgaaagctcaaatcattattaccaaaaaacttgaatttgagcttctgagaactaatgattttgattgaaaaattattgagcaaatcatgacatagctatagcattataagtgggctaacagtacatacaactcggtgactctaagctcatacatgactggatcttgatacgagtggttgggattatgatgcctaatttccgtgtcaaaaatatgtatagttattgagttctatgtaggggcttaaataactcaaatttgagcttgatcttttaagtgcaatcttagattcaaaaaattgttagattattagtgcttggatccggaggcattacatttctcttacatggtctttaacatttctgacgtatgtttgatgtgggggtttgtgaaaccttgacatctcaagcaaaggctgtgaaagataatttataaaatgaagttatctgttgtacaattcttgcgcaggg

SEQ ID NO: 76412 - DNA, 677 bp, Carica papaya
  Intron number 2 from transcript evm.model.supercontig_18.2 4 (locus evm.TU.supercontig_18.24) derived from phytozome v7.0 (chr-ID supercontig_18; pos 144173 to 144849 reverse strand)
gaggtaacgtctcattatcactactcctctctgttattatttgattttattttcgtgcgggttttagtgttattatatattcttatcagtattggaatttccaacttttgacccgtaaaacgacattaaaaaattcgttttacatttcttatttatgtttatatattttaatcaatgggaatagcaattggtattcgattttcttagtaatttttttgcatttttaaatattaaaaatggtaatatatatatatatattttttaattttacattattttagtagacatatttggggaagcaaaataatcaattttgtagcctaaaaagttgaaattgcataataatagcttgcggtgcatgccaatgagtagcaaacagttgaatgttattactaacaaaataatatcgtgaactccgatttattttatttttctttttcgccaatttggaaatttcacgagataaaaattaaaattttgtttaaagaataaaataaaaatacattatacaacttggtcgccacttggcttccatgtgagtttttttttttccccaatattttaagccgtcaagataattaattatatatttacaaaataacagtaaactgtatcattatccaattgaaccgacccgattttttactggatttcaggtacttggtgctgggacaagg

SEQ ID NO: 76413 - DNA, 253 bp, Carica papaya
  Intron number 4 from transcript evm.model.supercontig_17.1 91 (locus evm.TU.supercontig_17.191) derived from phytozom e v7.0 (chr-ID supercontig_17; pos 2319395 to 2319647 reve rse strand)
gctcgtcttgcacctaaagcgaaggtatcagattcaatcaacttattctctgttaacagttccataatcttcaatcttagtgttgtatttttgatgaaaaacagtcagtgttatattcattagctatccttttatgctttttagtgtgtgagatgggtttcttttccttttttggcagtatatctatttactttttttttgttttgttggattctcttatttatgatgaaaattactgtaaaggttctacgag

SEQ ID NO: 76414 - DNA, 682 bp, Carica papaya
  Intron number 1 from transcript evm.model.supercontig_17.1 40 (locus evm.TU.supercontig_17.140) derived from phytozom e v7.0 (chr-ID supercontig_17; pos 1664615 to 1665296)
tgaatgtaatgctgtatattgattagtttagaccattggaaaagaagtaatatactgtattgcttcgttagaaagaaatttgatgtaataggtgagtgccactgttagagtcctgttgaaatttgatgtaaatgaatatagctctttgagtctctttgaaaaattcaatgtaatgagatgaacattttactgatttgaaaattttcattttgtgcttctctgcttctgttttcctttatggattgttctgctaggcatctaatgtacatagcaacaattttttgaatgaggaatctttctaagggatgaattgagggaatccccatggatggagtcttgattgatggtgactctgcagaggaatttaatagttgttaatgacaattaaaaatccttttaaatgtttattctttattatttttaatgtgtacgtgcccgttttctgtttgtgcttgtttggtgctgctaaaacctgatgcaggtgtcatagctgtgggtatgcatttgcaactcacttaaacaatcaaggtgaccaggtttcacatttcttaaagcattatgtaggaagttaatttactatttacagtctgtaatggagaaagattttttctaggaatatttcttttttttgttagaattgcaagtagtgggacgtgccaccacttctgctgtaagcgtcctt

SEQ ID NO: 76415 - DNA, 803 bp, Carica papaya
  Intron number 3 from transcript evm.model.supercontig_6.10 1 (locus evm.TU.supercontig_6.101) derived from phytozome v7.0 (chr-ID supercontig_6; pos 760348 to 761150)
tactgcgattctgttaacggaggccttttgcacaggtaaacctaagcccgaatttacctctgtattgacttcgattggctgcttccattggaatttttccctttttttcttcttcccttagtattttcccctttcttccaagtttggtttcattcagatatcattgttatttgttgccttgagatcatattagcaggaatctaatttttctctaaacgttgttcttcatttgttgaaataaaactgttagttttgagcttgttgtgaccttgttattgatgggctgatggacgcactttgctggtgctgtttgaatgttgatggaagctaaatggttctgtggcactttagacaactatattgtaattgttttaaaaggttaagctttgagaacattttattcagctggaaaatatgggctccccaaggtctatactcattatcatggtttctctaatgcaaattatgtagtcttttacttgcttttttgacttgcaaaggatttttatctgttcttttggtcttctcgccattctggtttaattggattgctaagtttccggtttaactgttttcatttgattctattcaagtgaagcggttatctaactttagagtctgcaggagagttgtgccttaaaaaatgtctaattttgaatacagttgtgccataatgatgaacaagatttttgattagtacaaaggccgccctcttaatatttttacagaggcatgtcttgaattttcttattcactgtctatggtcagttacaatccgctggaaaggagagagacttccaagg

SEQ ID NO: 76416 - DNA, 451 bp, Carica papaya
  Intron number 2 from transcript evm.model.supercontig_58.3 (locus evm.TU.supercontig_58.3) derived from phytozome v7 .0 (chr-ID supercontig_58; pos 17064 to 17514)
gggtccatctctccaggttcatagctccttcgcaggtaagattgtaaccctacctttttgaaattatctttgtttaacagctcggttttatttcaaatttcaccagtatgggggtaatctttcacagtttattcaatatgtgtttattgtctgatgttctcgagagagtgacagtatgccttttgagtttattttccccttaagataaagattagtgcccaaatgtattacgttttggtaaattagaaagaaaaaatgggaactccattattggtcgttgttaaatattgttacaaggtgtatacatttttacagggcaagaaggaagcttctatgattaacttaggaatgataaagggtaggttcttttgttataattacacgctctgtcttcactgcactgattctatatccagatcagaaccataaaaggatagttcttgctcttcaa

SEQ ID NO: 76417 - DNA, 570 bp, Carica papaya
  Intron number 3 from transcript evm.model.supercontig_38.6 2 (locus evm.TU.supercontig_38.62) derived from phytozome v7.0 (chr-ID supercontig_38; pos 1295158 to 1295727)
aaggtcaattttaaagattaatcatttacacagatagccaagtttatcttccctaggtatactggaatcaccatgtctccttatatctgttggttaaactgactgccactgtaattggaaatgaggtaaaacaagtgatataaagctttatccggaagtttttccaagtgtgattattattctggcagaagaaatgtgaaatcctactcattctgcattttgatctgggggaaactgtttcttgatttcacttgaccatatgagaaagggctttagattggttggtctttcattcttctgtcctttgaaaccaagttatgggcttaatggcctgaatttaaatacagcagaggaaaaaaattgctcaactattcaatgtgtgttgtatgcgagaaattctgctaaactattgcttctaatcacttgcttcgtttcacgtaatttattctctttaattaattcaaaacataaaagagaaggaaaattaatctctttcactgactttgcaacttttttatcttatcaatgattgcaggatattattcttcttttccttgcatctggaaggga

SEQ ID NO: 76418 - DNA, 306 bp, Carica papaya
  Intron number 3 from transcript evm.model.supercontig_55.1 87 (locus evm.TU.supercontig_55.187) derived from phytozom e v7.0 (chr-ID supercontig_55; pos 1144980 to 1145285 reve rse strand)
aacttggctaatccagcgcatcggccaattaccaggttagttagagttgatcatttgctttactttatttggaattttaggaaatgagagtggctgaaactatattgttaaaaagaagaggtttttcagatttgaatgttggatctcacgtttcttaaaatagacccttcacttaatccggcagggggagattaagatcctggatattcatgatataatttattcattccattttgttcattaattatgttgtgttttttgttgatgttaggaggttggcctcccaaatatctagctctcgcgaac

SEQ ID NO: 76419 - DNA, 277 bp, Carica papaya
  Intron number 2 from transcript evm.model.supercontig_228. 18 (locus evm.TU.supercontig_228.18) derived from phytozom e v7.0 (chr-ID supercontig_228; pos 220341 to 220617)
caggtaattatgttgtttaattttctgttgctctccgttttgtttccattaataaggaaagaaaaaattcaaattacagagattcaaggacagaaaaaattcaaatttatactcctttactctttctttttgggtttcattgtcgttcgttgtccaatattaatgacggtaagaaatatagaccatctattcatcaatactagaaactatcctcttggtctaatcaagtatttattgcgaagatatgtgtcaacatgtttcatgatacagggaacag

SEQ ID NO: 76420 - DNA, 884 bp, Carica papaya
  Intron number 2 from transcript evm.model.supercontig_106. 84 (locus evm.TU.supercontig_106.84) derived from phytozom e v7.0 (chr-ID supercontig_106; pos 794074 to 794957 rever se strand)
tagtggaactacgtttgcttctggttctcctctgtgtaaggaatttgctctctgtatttggattaagtttgtcttcctcgcatgttggattaaatttgagttagaagtaaagaaaatggcataaaatttgtgggtaaatgtgcgaaaattgttgattatctgctacacttaagaacttgctctattctgtgtaaggaacttgctttaaaaatcgcatccaaattgactagggaattccaggtgaaataacaatgcattaggaattccataaatttcataagttttgatgaaatttggaatctattgttttagtttcaaatagaatatcgtagaagttaatttttggatattcatcttcttccaattgaattgagctaagtgtggacttccagatgaatttcacagaaactttttttttttttttttttttcatatatagcctaaagttgtgtttagaaatgaaaaaaatggcatataaattatgggaatgttgtgaaaatttctgttgctttggaacttgctctttttctttgtaagggacatgctctctctctctctctctctctctctctatatatatatatatatatatatatgtgggttcaattcatttttcttgaatgttgacgtgaattgtgtagaaggtaagaaaatagaataaaaattttgtgggtgtgatgtaaaaatttttgttgcctcttgctgtattcaagaaatttcctctctgcatccggattcaattaatttttctgaaatgtttgattaagacgctgcggacgtaaagaaaatggcataaagattttgtcttttgttgcatttttaaagattgaacgtgaaaatttttttgggtgagatctaaattcttgcttctaatgcccagtgat

SEQ ID NO: 76421 - DNA, 859 bp, Carica papaya
  Intron number 1 from transcript evm.model.supercontig_13.2 46 (locus evm.TU.supercontig_13.246) derived from phytozom e v7.0 (chr-ID supercontig_13; pos 2180597 to 2181455)
aattatttcccagaaaagtacagaaagaaagaagggtatgtataatatatacttcaaattattatgggtcggtttccttttcatatgtattttttcgattctgagagggaggatgagagtattcacacccagaaaaacagagcgcaaaaaaattgagagatgagatgaagtgaatgatttagggcttccaactggtttattctaatcttcccccttctctgttctctgaatccatctctggtttccaaaagaaatcgtgcttttgggtttttgttttcaaggatgaaaagcaaataaataaagatttttccagaatgaagatccaggttcttgttatatttattattttcaagttttttgatgttctattaagttttttcttttttttccttctttttctgttcttgccggatctaaatcttttccttttgtaactttcatgtatagaaaatcagcttggagggtgatctttggttccctcatagtttgttttgtaggttctttgattttgaaaccacattgatcttttccttttgatcgtctgttttcttttaattttgacaaaaagcagataattagttttataaattttcttcagtctttcaagaacgcaaaacagagacatatttttaactaattcgattacaatctcatcctgtaaaatctgaacttaaccattaaatgtttgattaaaaaaattcaagaataattagttcatctactgatgaaattaccaaaactggttgtgggtaacaaatttgtttgatgtaaaaatggaaaccttgattgattaaagattctggcataattttcttgtgacacacgatttcatgtttggaaaaaatatttcaggaaatcc

SEQ ID NO: 76422 - DNA, 633 bp, Carica papaya
  Intron number 1 from transcript evm.model.supercontig_257. 6 (locus evm.TU.supercontig_257.6) derived from phytozome v7.0 (chr-ID supercontig_257; pos 183824 to 184456)
gtaggctctctatggacttttgaatttctcccctaatatcatttgagtatttataattttcttccggacattgatttactgaattaaggtttattttccactttcatgtattttcgcattatatgtgcagttttcttctcgtgtattgttaaatagggatggcctcaattagtctgtgcaaaatggttttcaatcgttaagtctgtgccagatctaattgagttatttatttcgatttatcgtttggtttccgagaatgttgggcgaaattaagaggaagatagtgaattggtttcatctcgattttatgtgttgttgcattctttgcttttacgtttagctaaaccattttattacattatcgaggaggaaattttttttgcttttcagctctcgaaatttcaatcgcttctcactagtccctgaagtttttcatcatatctgttgcttctaaaatttcaaccctaaatataagaaagaattggtgttgcttccttggagacctatgattggttaattgcatattttggtaatgatctcatagtgggttacaataaacatccagaattcacttgttttctttcactattatggataggcacctgttaagggcattctttccctgcaacgcac

SEQ ID NO: 76423 - DNA, 400 bp, Carica papaya
  Intron number 2 from transcript evm.model.supercontig_151. 35 (locus evm.TU.supercontig_151.35) derived from phytozom e v7.0 (chr-ID supercontig_151; pos 313323 to 313722)
ttcttgaaagaggtgccacaattcttgcatctcaggttatcttctgaccaacatacttgccttttaatgcttctaagaggaaacaaaactgaagaagaaaaaaagaaaaaacttacagcttatttacttatggaaaagagttttgattttgtaaattcatatatgtttgtaagtaaatatgctgatagttgttaaaggatgaaacaagtctggggaaatgatgtactcaacttatttaataacgcaaaatgaatctagaaaatcaaacatcaaagatgcttttatataatagatgaacccaacaactaaagctgaaactcaaactgggggtagggtttgagatttgtttgtgcttaaattattttggtttttcaggatttggctcactggggagtagctg

SEQ ID NO: 76424 - DNA, 745 bp, Carica papaya
  Intron number 1 from transcript evm.model.supercontig_140. 30 (locus evm.TU.supercontig_140.30) derived from phytozom e v7.0 (chr-ID supercontig_140; pos 466095 to 466839)
ggcaaaattgctgcaactgctggctgggaccacaggttggtttgatgccttttaatgttttcttgccttatggaagatgctggagggaaatataagaaatttatcatacttgactgctttgtaattatcatgatgggccatagaacttttgattccttatgggctttgaatcttaactatgttctcaaagcattaacagtaatatggttaaaccgctaatatcggactcaatctgccagctacttctaaattctccgagaattggatttttgaggatcagtaaccaatgcaatcttgtcctacttaagtggattttaggtgattcatcatgcagcattttcataacatggttttgaagctttaggaattatgcgttttttcgtactcttttcttttctattattatactttatttcttatatttgcatgggctactgttagccagtccaaggtggaacaagcgttcctcattcagtgtttacaggaacagaagaaatcatataatcagtcccccttttcatctagtgtcctcattttttctctattcaaattggatcttccctggggaaaagatttccatgggtgtaaataataagcttaaaacatggaaatgcatattgcaatggcaataaatttcattgaatagttgattccctagtaaaagtactgcattctaagttctttgtctttgttttccttttaacacttgataacagagttagagtatacaattatcacaaaggaa

SEQ ID NO: 76425 - DNA, 947 bp, Carica papaya
  Intron number 1 from transcript evm.model.supercontig_51.6 9 (locus evm.TU.supercontig_51.69) derived from phytozome v7.0 (chr-ID supercontig_51; pos 655575 to 656521)
aagcgttctttctctcgtccttcatcgtttgcacggtattcttttattctaatagttatgcatattggatttctatgtaagtgtgtgggtgtgtgcacgtatttctggtttttgattgaatgctgtgtttaataggtttgaaaactttaaaatctctgttcctaaaaaggaaggtaacaatttcgaattctctaatgggggagttgtattcatttttcttttttcaaagtatatctttgaggttttgatcggatgagttgttttctgggtttaaattctgcaatgggcagaatttgttctctccagtatcaagtaaatttggtaaattgaactgtatgataaattgggcatttatgaaaaatgtggaattgcctagggttatatttcttggtggttacggccactcgtatgtgattgtgcatgtcatcttgacttgtaataattaaaatttttgacagatcttttacctgattaagcttttcacatgttggtgttggtttttcaagacaaaatatatgggtaaagatttttgtatttgcatttatgaatgattaaaaatatgtaaagatacgtcaaggagaataatctgtttgcaaaaaaggattaatgttttgttacactgacaaacaagtgaagttgtgcataaagttcagctctgttatgagtacttttaaattgatgatacttaggagtaatttatgggagacttgattaattgtggttctgaagagaagttgagaataaaattgaaaactcttaagaaaattagaattttgtttctatttcagaatttgtatctttaataatctggcttggacttgcttggtataaatgtccgggaaaaaagacattgtcttgggctgtaaaatttaaaatcgaaaatttaatctctttcattttcattaaatgcagacatcagtggcttttacagcccttgttattgcagc

SEQ ID NO: 76426 - DNA, 705 bp, Carica papaya
  Intron number 2 from transcript evm.model.supercontig_106. 13 (locus evm.TU.supercontig_106.13) derived from phytozom e v7.0 (chr-ID supercontig_106; pos 215931 to 216635)
gagctcattgtcatcttggttcgactattacaaaggtatcttagtgacaatcaatgttcttccatcttttgatacctgttataagatgaatcttgaatgaggtgcattagatggtgctaatagcctaatctaatgcattgcttgtatacgtttgtgctttgaactatcatattgttcattttggcaaggatgatgattttttcttactcaatgacaatgatcagcagtattttgtttctattggataagtttagggatatttctttttttaaaaaaactaatgaagtgactgcaaatactactttgtttttgtgaagagaagacataaattagtatgtttatacaaaaagaacttcttaactggatttgcccttgctgctgtatgtcatatgtaatggtcatatcttcccccttataaagggaatattcacatgaatattatgtaggaagctttttgcaaatggacacgttttttcaagctgttccatccagtcattggcagtttctattctcctattcaacgttttattattattatttttaatattatgtcttctgtttctttaatatattatcaaaatatgattgattgttgtctttatctgtaagatatgtaatgcacaaatgtttcctctgtaagtataagttgatggctctatgatgccttattggtatattatgcttttcaggtggacgtatttagag

SEQ ID NO: 76427 - DNA, 926 bp, Carica papaya
  Intron number 3 from transcript evm.model.supercontig_27.2 17 (locus evm.TU.supercontig_27.217) derived from phytozom e v7.0 (chr-ID supercontig_27; pos 2084502 to 2085427 reve rse strand)
tgatcttagcagtgttgagcccgccattagagcaggtgcaaatatggaatctcccttatatttagtatcatttaattgccaaataatttagcgttagctaaattattagttgtcacatgcttcacaaacgttgttgtggctgcatctaaatctgctcatagacttaaagcactgaaattcccccttgaaggtaacattttgaatttttagttggcgagaattcaacattcatattgaaagaattaaatcttatcttcaagaattcaattcgacgtgagtcatgataactaaaacacttgcaacttgagtcatcataactaaaacacttgcaaaatatgttctcttttatccatattaagattaatatgagaattgaaagcaggaataaatgatatttgaataagaattgagccaaatgcatcataaggggcatagctataagggattttagatgactcaagtttgaaagaacaaggctttttgtctttgttctttctgaaggaagaagggtttactttttctctttggttcaattttagttaggtaagtagcttggcttgcagaagtgttccttgcctgagggtttctatttttttctccttttcttctgtgtagtttaattactatcttcttacttaggttgatgggttctatatttaccagaaaactattgctggtctatttttaccacgagatatgaaacaaagccgtaaacatgacagaagttgacgttgattgctgcatgttatcgttctatctttctcttttcataaatcagtattgaaagccaaccttaggctttgtggtttaaggaataaatgggattcatatgttaatttttatgccgcatacctggagatagctctaacatgtgttgctctgcaatttcagacaccgagggcgataatttccgtggtgatcttcct

SEQ ID NO: 76428 - DNA, 652 bp, Carica papaya
  Intron number 2 from transcript evm.model.supercontig_58.1 02 (locus evm.TU.supercontig_58.102) derived from phytozom e v7.0 (chr-ID supercontig_58; pos 959142 to 959793)
tctcacacagtcagtgctgaggtatgccttgaactaatctgttatctttgcctatgatacatgtgattatgactaatgaattcttcataggatgtaagcgtaatgggttaacgaaccacatgtaaactcaacatacacatgtttatttggatgaatatttttcatattgattatatgagtaattggtgtttacatgcaacgttctttttctgccagggaggggtgggtgtcgcagatggagagtgtttttctgtctttgggtctaaagtagttttaattagatttgccaaagatttcatctatagaggctgagccgtttggattaattcctgatctccttgtctttatatgcatgaaataaccagtgaatcaatagaaattttcaaacattttctatgcttgcatttccagttctttgcttgtacacattcaggatattaaagaataactttatgcattaaagtttgaacagtggtgatctcatgtaagctagtgctggtccatggcaatgtttgattgtttctggtctcagccttgcagcagcatctttagaagttgattttcatctctttttcctttttttttttttggccatttgccatattgtttcttatcaggaaatcagaagagagctgggcatctcactgcttga

SEQ ID NO: 76429 - DNA, 377 bp, Carica papaya
  Intron number 2 from transcript evm.model.supercontig_16.9 (locus evm.TU.supercontig_16.9) derived from phytozome v7 .0 (chr-ID supercontig_16; pos 353400 to 353776)
gctctggaaccagtactatctttaagcaggtatatttccttttttttaaatcaatctttaagcaagtatcttaaccgattttgagttttcatttttaaattggaatgcttattcttgttctactttattagagaagaagtttttggagtattatatttctatctacttatgtgagatcttcttcaatatatttcatcattaaatttgtttattgtccttagtctaataaactgcagtcctaagaatgttttgcacaattgttgtgttcttgatagattctcattttttgatgccatctctttctcaacattgttcatagtaatgatgccattttctcaaatgcaaatttcgtattcctccacaggccaaatttttgt

SEQ ID NO: 76430 - DNA, 765 bp, Carica papaya
  Intron number 2 from transcript evm.model.supercontig_284. 11 (locus evm.TU.supercontig_284.11) derived from phytozom e v7.0 (chr-ID supercontig_284; pos 75002 to 75766 reverse strand)
ctttgtcaaatttgtctcgccctgagctcaagcaggttaaagtttctctgttgtttgcttcttgtttttcgtttcggcttttagtattcactaattggatactgttctatgtcagggttagttaagtcaaattgatgaattagatttggttttcttgtgggtttaatgggagtcggtaatttaggatcatagctctggtctatttcaataaaaggaatctaaaagattatacagaccatattggctttttaatcagcaaaaccggtggttgagttgatgatctgacgtacttaatagcaagtcatcatgaagaacacagtttatttttttcttttttttcttctctgctatgctattaatatgtggcaactaatcattctcaagtattggtttcagactttggaactaaggcaccaaatagattcgctggttggaacttcaccatgaacacccattaagttaattttacttatagatcacttgctcaaaactaacgaccttttgaatttcttaagttataaatcaatgtggtcaatccgctaagttttgtaagattgatccatccttagtcgcagcctatgttcagtggtgctgtttagaccttatgccagttttgtttgttaagttattccttgctgattgtgatttcctttttttactttcttgttccgttttattcatattattgactaaaatttatcccacttctatccttcttctttcctcaaaggtgtgggcaattgcggattctaagagacaaggata

SEQ ID NO: 76431 - DNA, 877 bp, Carica papaya
  Intron number 1 from transcript evm.model.supercontig_17.2 28 (locus evm.TU.supercontig_17.228) derived from phytozom e v7.0 (chr-ID supercontig_17; pos 2777859 to 2778735 reve rse strand)
acaggcttcgtctcaatctctctcgtattgaagaggttcttccttcgctttattcttttcttttaaagaaccgaaacatgtgacggttgcgtatgaatgggcaatggcttttattgttttggccgctttcctttgctttctataactgtatggtaatcgcccccgctgggcgtcccgtggaggattgattgggggcaaattgttttgccagtagattgtcattgccatcgctttctttttaatctagtaatgggtttgtttggttgtcggcaatcatgaaggatgggggaggaatagataatttgagatgggttcggaaatatagactccataaagcagacgactgatgagaaacttgtttaagtgtacttctttcatgtgggtatttggaatgaagggttcatgcgactttttgaatgattatgcttatttacttcttaattcttacatttaaatgtatctcgttatacttgtagtttgggatggtatctgtgcaagtaataaaacagttatctttgggtttaatggtggactttgtacctgaattattgcctgcatggagaagtgggcttgtttactatgctaatgctttctagattttgcttattctgctgccactggtgtttcttttaatggtggaaatcaatgtacagttagtttataatgctaagggttttgagggtaattgcacatggatgctgtttttaaaatagattattgtttgtgttaatcgaacgtgccaatcagagtcattttaactgaatgcttaaatgtttcaatagagaccacatctttctttgctaatatttctcgtctcgatcctaatgtttcattttcataaaatggctaggctgcatctggtgctgtacagtgtcag

SEQ ID NO: 76432 - DNA, 977 bp, Carica papaya
  Intron number 2 from transcript evm.model.supercontig_519. 1 (locus evm.TU.supercontig_519.1) derived from phytozome v7.0 (chr-ID supercontig_519; pos 488 to 1464)
ggctatactcaggatcaattgctggtacaataagggtatgttgttgatattaagaaaattttctgctactaattttcgtgtcaacatacagcttcttcatacaaagtatcctgtatatctttctttctcttttttctttatgtctattatcttaatttcattggttatttctgtcatatactctgcaagataggtcattttccatggtaactctttcttatgagtatcaagtaaactctgcccccttgtcttttgaaatttgatttaagccggaagagatgaaattcaatattagaatattcaaacttgtaagtagtataccaactaaggaatacaattagctattaacgttaaggttgattttttttttaaatttcaactctgtgggatatgagtgagaacataatataaataaaataaaaacttgagagaaaatattattccaattacaaattaattccatatctaatttaagttgtgtttttgttattgcttaatatgtgagaataaaaatctatagttttcatattgaaatatgaatttaattgattaatttatgtttcaaatatgtaaattatgattaactttcagatgtcaaagaaacttaaaatgtaggaattggaaggaaataaaacaaggttgaactagttccctctgttgtaactttctgaaccatgagtaactttggtattgattattgttctcttctattctttaattcttgtcatcttgcggaatacagtgtgtatttgtgttgttttacatgagaattttttcctagtatcgatatattcattttttaacgttacatggtctccattttgttgtctttgcttatctgattaataagtgaccttcgcacaaatcattcgatttcatgtgataatattttctcgatatgcacaagtatcatttaccatttccttttaaatataaaaccaggtttgggcccttgacacactgcagcttgttacatc

SEQ ID NO: 76433 - DNA, 626 bp, Carica papaya
  Intron number 1 from transcript evm.model.supercontig_131. 45 (locus evm.TU.supercontig_131.45) derived from phytozom e v7.0 (chr-ID supercontig_131; pos 342189 to 342814)
tactctgcttgttgtcgtccctttacatagttcaggtacgatcttctcgttctgtgcaaagttttgagttataaagcatggtgtatggttatttactctattttgattggcatttctctacctggatcatccaccttggttagtgtttcattatatcacgttctgtcatggtggaaagtttggtgggaagggtaagttttctcaataattaatcttctagttaatttggagttgctttgtgctcgaaacaagtgacctgttctcagtttatagttttaatttatgttgttcggatgcttttgagtggttatctaggaacatatatggtcaataaatatagaaaaacaaggagaattcttcttctgttccagatcttggactcttattgtctgggtgttttctttcgttcttcttccttttttaaaaaaaaaaaattatctaagcaaggcttaaaaatgacattaccaaaatatgtttgcggttgttgatccaaggaattctcttttatatgtttttttatcaaagaaaataaattctggtgctccttgtttgaaaatttgtactcattactgcttgtttactgctatccaggtagaaaactgtggggttttccaaggtttgctggg

SEQ ID NO: 76434 - DNA, 708 bp, Carica papaya
  Intron number 1 from transcript evm.model.supercontig_1159 .2 (locus evm.TU.supercontig_1159.2) derived from phytozom e v7.0 (chr-ID supercontig_1159; pos 2688 to 3395)
ttgagccaagtgaacgtgccccacgttgtgagtattgttttcctgatgaagctttaattaataactgtcaatattttctttcccgcttttgcctttttccattcttttctgttgtttggtgcgtttattactattagtcctctgatttcctggaaaaacacctagtgctaatctttcatgcattcttcttttcttttgctttttgttattgaaatttgtattcacatttatacaacatattgaagatcttctaagaggttcaaattaactaagtggatctatgtgggtatattgtaacttgacatatatggtgagtaaatcattttcagttatacaacgtggttatttcttgtcataaaagtgttaatcaaaatttgatatgagtacaaataacttaaacccaaactcatttcttttctacttccatgtttgcttgtgtacaatatcatggtatcattgcaatattgccacctgtagctttaaggtagcatttttgtgaacatatttatggtagggaacaacttttgtttaaaagcctctttctaggaagtaaaacataaaaatagtcctaatgttcgaaaaggatggaaaggatttgacaatacacttcactgtgttttctttctctaaatatttgcctatcttttcttctctttgtttgcttgttccgcaggtgtcagagttgaagaaattatagatagaattgct

SEQ ID NO: 76435 - DNA, 803 bp, Carica papaya
  Intron number 1 from transcript evm.model.supercontig_109. 35 (locus evm.TU.supercontig_109.35) derived from phytozom e v7.0 (chr-ID supercontig_109; pos 754291 to 755093 rever se strand)
ggactatcaacacttacaaaaatcgccattttcaggtcccttcatctttatttctttttttaattttcacttcatcattaacccagtaatagtttcattgaaatttaggggtttgatttgattttcatatattatcctttctgtttctgttttagttgattatggagtactgtacctttactgttaattgaaaataaaagaaaagaatagtggaatttattttcccttttaatgaaacaaaagtatttctgctttcaaaagaaagaagaaagaaaaccattaaattatatatttcacctctctcggttgagttagagtataaaagtcagtttctatggtctcagtttctgggataattagtcaaaattaattaatttttatgctttttgaattagaggtttataagtctagagttaaagagtttcaaaatttatttgtttgtttgcatatgtgactgagtttgaatctggcttccctctcaatttttttagagcattaataatggattagatcatttattctcaaattaagcttttggtagaaagaaaaactggttgtaacttattaaattggaactttggttcctcttaaattctaaagtctgtcacttttttcaacaatttgactttttttaatgggaattttgtttgctttatcaattaagaaaaagctttttgattagtgtattttctcaacttatattgtgcttttagatttatgtgttattcattttcaagagtcaaactgattattaatctgttgggtttgttttgtttggccttcttgttatacgactagagcag

SEQ ID NO: 76436 - DNA, 696 bp, Carica papaya
  Intron number 3 from transcript evm.model.supercontig_54.3 (locus evm.TU.supercontig_54.3) derived from phytozome v7 .0 (chr-ID supercontig_54; pos 4360 to 5055 reverse strand )
gacaacattgagaaggtgtgttttttctcttaaataatggtactggcaatggaaaaaatatgcagctgaaacaggataacatgcttctcaatctatattcccataataaattatagtacatccttaagtttccccatttaattgacatgacccatgttgtaatttactcgatgttattttctcttaaggcatcacaatcatttttttaaggttatctagtccctggtttgtttcagcatgagcctcttttctttttttcccccttcaaaaatgtgtgatcatctctcgtttaaattttactgctgatgcaaatcaaaccatgttaataaaagtgtcaaaattgacatttgatgcctttgcttacttaatcggaggattgtttattaaatccttttttattggtcgaaatgtttcctgcaccacttatctgctttttgaacataattgtcaaatcacattgctgaaattattctagaatagttacactgagatttatttttattctaaaaaaatgatttattgttttttttcttcttccacttagagatgcattagttatctaatttcttagcaaatcgatttatattatgtttcttatgaagggtggaatggcaatcataatttttagcaagagtgcagaaaagcactttttgcaaatatctcagaggtgtatttatatgtttatgtagtttatag

SEQ ID NO: 76437 - DNA, 414 bp, Carica papaya
  Intron number 2 from transcript evm.model.supercontig_166. 27 (locus evm.TU.supercontig_166.27) derived from phytozom e v7.0 (chr-ID supercontig_166; pos 198709 to 199122 rever se strand)
gtagctgattcgagtgagcaaaattgctgttttgggtagaacgaatttttggtttgtgtacatgagcttttcaatttgtttctagcaactacggtggactcttcttgctaagttgtttgattgcgtggaactgaaagaaataagtgaagataaattggttttctgctttttatttggttggaaacggaaattgatgcacttgcttggtgcaattaattttcttgcatcttagttgaacgggcttttcattcccttgaatagctaattgtgaacccagaacttagaagtattaggtttttaccaattacggtttccctgccacctacaatgaatttgctcttttattttccttactaattgtttgatactgattccttgttattttctttaggattcttaagagtccaggtgaat
